United States Patent Application Publication US 2024/0271161 A1 - sequence listing, part 5

SEQ ID NO: 49911 - protein, 542 aa, Ruminococcus lactaris
MVYQKGSNLFNVAIYIRLSREDGDKEESDSVGNQRKLLTEYVNKHDDFILYDVYIDDGFTGTNFNRPDFHRMIADIEDNKVNCVVVKDLSRFGRDYIDTGRYLERIFPELNVRFISVTDNIDSMKQAYDMLLPIKNIFNEQYARDISNKIQATVKSKQKAGEFIGAFTSYGYKKSPANKNKLVIDEYASEVVKRVFTMYAQGVGKQSIAKILNAEGILCPSEYKKLNGENYKNCNRLEKTSYWTYSTIKVMLQNELYIGNMVQGKKHQRMRSKQRPVEKENWIRVENTHEPIIDRQLWDKVQKLLTKKHRDIDLETNKNIFAGFIKCGDCGRAMMKNFWRRADGSKSYSFYCGTYKRSGKDYCTPHTLPFQVLNDIVLGDLKQIIRNVENLQELVKSQSFTATKIRKSTDIELTKLKAELERVKKLKKSIYEDYKDELISKEEFLSYREDYQQKETLYSKQIETLEEKKKESVTEDVFETPWLRRLLELKDIEELDRDIIVEMIDQITVYENRKLKISYNFGNELEHLFSSVYCEDLEKKAI

SEQ ID NO: 49912 - DNA, 50 bp, Ruminococcus lactaris; identical to SEQ ID NO: 43032
  source 1..50: mol_type = genomic DNA

SEQ ID NO: 49913 - DNA, 40 bp, Ruminococcus lactaris
  source 1..40: mol_type = genomic DNA
tattatgcttgatgcaggacatggaggtcgtgatccgggt

SEQ ID NO: 49914 - DNA, 50 bp, Ruminococcus lactaris
  source 1..50: mol_type = genomic DNA
aatttgcgtaaactacaaccagcaactgggggttgtagataacgcaagtg

SEQ ID NO: 49915 - DNA, 40 bp, Ruminococcus lactaris
  source 1..40: mol_type = genomic DNA
aactctgcctgatgaaggaactggacgtcgacttccgagt

SEQ ID NO: 49916 - protein, 536 aa, Cobetia amphilecti
MTPEQPKAPAIKAYSYLRFSTPEQMKGDSFRRQTKLAKDYAQKLGLTLDDHSFHDLGISAYQGKNRQTGSLGIFLRAVEDEIIAEGSYLLVESLDRISRQSPHKAASVLSSICEMGVNVVTLFDERVYSRETLSQDPMTFLQAVVTFQRANEESATKAKRLRSVWESKRKMIAEGKPVRLTSRAPQWLKPSDDGVSFDIIPERGEVVRNIFKWTLEGTGKQSIAARLNREGAPIFGRGKLWHTSYVSKILTNTATYGTLTPFTSRADRKEHREACEPIEGYYPAVIDRETFEAVQMLKASASPRRGRHSSSPVQNIVGGIAVCPLCDSRMIRVTKNKAKGWVYLVCHRAKQGAGCVYNAVRVDMVEPLIQENISYIAAHCPVGDDDFDERFDDLTGQLEGVEGLIHNIVTSIENGLDPSKHPAIGERLTALQEQQEALKEEIDQMGQQRISFNNDVAQRRAQKLVAAVQENWEDKAQINTLMRGCFSKVVVDFTTGLLEFHWQQGGEETLITYTFLDEEWVDPREASQKPHESHLA

SEQ ID NO: 49917 - DNA, 50 bp, Cobetia amphilecti
  source 1..50: mol_type = genomic DNA
atgggtctccagacacataacgctagcaggttgtggacgtgaagacctac

SEQ ID NO: 49918 - DNA, 40 bp, Cobetia amphilecti
  source 1..40: mol_type = genomic DNA
gcccggcggaccagcgaatagcagattgtggccgccggcc

SEQ ID NO: 49919 - DNA, 50 bp, Cobetia amphilecti
  source 1..50: mol_type = genomic DNA
atgggtctccagacacataacgctcgcaggttgtggacgtgaagacctac

SEQ ID NO: 49920 - DNA, 40 bp, Cobetia amphilecti
  source 1..40: mol_type = genomic DNA
tccgagcggcccagccaatcgcagatgctcgccgccgcac

SEQ ID NO: 49921 - protein, 533 aa, Streptomyces sp 769
MPGIKVRRISKDTEESAALDSQDKTINKHVGETGIDIIDDVEDATVSGSVNLADRPSLGKWMSEPRLSMWQVLVVTEQDRITRDDWEWMAFLLLCRKHGKHIRLVSDPEFDLYDRNSRLMSHFRSYQDSGYLEAVSTKRKNQKAYFRDEGLWSGGVWPFGYRPIKVKHNGKIRWKLVKDEITAPLVMEAYLRVVEEGDAITEICADWNERGIRTPRDHQRFMNGVLEKEGVSIEPKGARWEYANMYAWMTSVSSMGQAMHDGEVVLAENGLPRQYADPILTPEQWQKLQEVIVVRGESMRGYNRDRGPWNGALWCLCGQRLQQDTATRKKKDGSTKRYEYFRCATRNKNRFGRKCAYMQAWHRAIVLEELEDAFMAKLGGLDIMNKRYEAGRDNRPRIAEIKEAIGKLTARQMKYDEGDPRYEAIEEMMDEHVTTLRELEKEPVVPARWIEESTGETFGQKWASSSPEERGKLLRRSGVRFIVAGTPVDPTYVFVHSDDFIDRAQSAASGLVDPVSETKWLKQIKEFQAQLAA

SEQ ID NO: 49922 - DNA, 50 bp, Streptomyces sp 769
  source 1..50: mol_type = genomic DNA
tgtatggtcgctcgtaactaggaccagtccttgttacgactgaccaaacc

SEQ ID NO: 49923 - DNA, 40 bp, Streptomyces sp 769
  source 1..40: mol_type = genomic DNA
ggtatggaccaactgctaccacgcctaccccgcccacgcc

SEQ ID NO: 49924 - DNA, 50 bp, Streptomyces sp 769
  source 1..50: mol_type = genomic DNA
tgtatggtcgctcgtaactaggaccggtccttgttacgactgaccaaacc

SEQ ID NO: 49925 - DNA, 40 bp, Streptomyces sp 769
  source 1..40: mol_type = genomic DNA
ggcagggacccacggccgccgccccgcccccgcccccgcc

SEQ ID NO: 49926 - protein, 498 aa, Rathayibacter tritici
MFSNTNMKDLIRPTIEQPRRTAAIYVRISKDRVGAGLGVERQETDCRKLAEREGYEVVTVFSDNDISAYSGKKRPGYEALLSAMKSGAIQAVFAWHTDRVHRRPTELEPYIEASDQFNIPTFTVQAGPLRLDSPSGRMGARIHGAVASYEVEIGIERQKAAKLQAAQNGEWSGGQRPFGWLPGSMELDEREATVVREMIDRCISGQSWRTIALDLNARGIRTQHDKGWNALKVRNVAIRPRNVGLRDHNGSAQYAAKWEPLVDQDTWQRMQTAIAMSQNHHKQRGPFRKHLLHGFAYCGGCGNRMNSFSKQQRDGSHTPTYRCRANDDEKGKIGCGKVSRIGAAVEDLVKEAVLFRLDSDHLGRLVASTQTEAPRLRRLLDDRQTQEVRLQEILSLYSEGDLTFDEYRTAKTTARARLNGLSRKIDAMTATSAFANAPVGTSLRDAWNGADLLWRRQLMDLVVDRVWIDPLPHPAGRKQIRYKQWVFDPAYVRIDWKA

SEQ ID NO: 49927 - DNA, 50 bp, Rathayibacter tritici
  source 1..50: mol_type = genomic DNA
ggtgtgcttggctacttgttacgtcgtcgaatgatcttgacgactccact

SEQ ID NO: 49928 - DNA, 40 bp, Rathayibacter tritici
  source 1..40: mol_type = genomic DNA
gacgagaactcgggggcctcgtcgaggaacagcactcccc

SEQ ID NO: 49929 - DNA, 50 bp, Rathayibacter tritici
  source 1..50: mol_type = genomic DNA
ggtgtgcttggctacttgttacgttctcgaatgatcttgacgactccact

SEQ ID NO: 49930 - DNA, 40 bp, Rathayibacter tritici
  source 1..40: mol_type = genomic DNA
ggggagaccgctggggccgtccccaggaagagccctcccc

SEQ ID NO: 49931 - protein, 496 aa, Rathayibacter tritici
MFSNTDMKYPISPTIDSPQRPAAIYVRISKDRVGAGLGVERQETDCRKLAEREGYDVVTVFSDNDVSAYSGKRRPGYEGLLAAMRSGAIEAVFAWHTDRVHRRPTELEPYIEASDQFNIPTFTVQAGPLRLDSPSGRMGARIHGAVASYEVEIGIERQKAAKLQAAQNGEWSGGQRPFGWLKGSMIIDESEAVIVREMIDRFIAGDSWRTIALDLNARKILTQHGKGWNALKVRNVAIRPRNVGIRDHNGTAQYAAKWQPLIDQETWQRLQTAILVSQSHHKQRGPFRKFLLLGFAYCGRCGNRMNSFSKQQRDGSFTPSYRCRAMDDEKGRIGCGKVSRIGGAVEDLVKEAVLFRLDSDHLGRLVAASSSESPKLRKLLEERQQQEARLKEILNLYGSGTLTYDEYRSAKTAASARLATLGRNIDAMTAASVFVTVPSGTSLRDTWDSADLQWRRQLLDLVVDRVWIDPVPVGLKQTRFKQWVFNPKYVRIQWKA

SEQ ID NO: 49932 - DNA, 50 bp, Rathayibacter tritici
  source 1..50: mol_type = genomic DNA
ggtgtgcttggctacttgttacgtcgtcaaaagatcttgacgactccacg

SEQ ID NO: 49933 - DNA, 40 bp, Rathayibacter tritici; identical to SEQ ID NO: 49928
  source 1..40: mol_type = genomic DNA

SEQ ID NO: 49934 - DNA, 50 bp, Rathayibacter tritici
  source 1..50: mol_type = genomic DNA
ggtgtgcttggctacttgttacgttctcaaaagatcttgacgactccacg

SEQ ID NO: 49935 - DNA, 40 bp, Rathayibacter tritici; identical to SEQ ID NO: 49930
  source 1..40: mol_type = genomic DNA

SEQ ID NO: 49936 - protein, 479 aa, Streptococcus pneumoniae; identical to SEQ ID NO: 17911

SEQ ID NO: 49937 - DNA, 50 bp, Streptococcus pneumoniae
  source 1..50: mol_type = genomic DNA
agtgtcatttacttgacataagagggctttggtgtcataataatgatagg

SEQ ID NO: 49938 - DNA, 40 bp, Streptococcus pneumoniae
  source 1..40: mol_type = genomic DNA
tagttgggctttgccaggtggctttggtgaagtcggctat

SEQ ID NO: 49939 - DNA, 50 bp, Streptococcus pneumoniae
  source 1..50: mol_type = genomic DNA
agtgtcatttacttgacataagaggcctttggtgtcataataatgatagg

SEQ ID NO: 49940 - DNA, 40 bp, Streptococcus pneumoniae
  source 1..40: mol_type = genomic DNA
ctgtagggctttgcctggtgcctatggtagagacagctct

SEQ ID NO: 49941 - protein, 537 aa, Clostridium beijerinckii
MKAAIYSRKSKFTGKGESVENQIELCKSYAKNNGYDDIYIYEDEGFSGGNINRPEFKSMMKDAAAKKFDAIICYRLDRISRNVSDFSTLIDELKVLGIDFISIREQFDTSSPMGTAMMFISSVFAQLERETIAERIKDNMYELAKTGRWLGGTPPFGFSSEPIYYLDSNSKQKKMMKLSPINEEISLVKLFFEQYLTLGSLGKLQKYLIQNDIKTKRNSPWDIKALQLLLRNPVYVKSSELVISYLSIKGATVFGDPNGNGILSYNKKDSKDKYKDISEWILSVSKHEGVIDDNLWIKVQRQLDKNKDLAPRLVNGSEYGVFNSVLHCAKCGGKMIQKQGHVSRKTGEILRYYICINKINPSDNTCDSKNIRLDKLEKSVMKELFKATDNKGSLIKAIEEYKKSLESEAVDKSSIKSYEKQIYQKELQVKNLIDKLSLNPNIYDLLSSRIEELNKEIKELKFKKFELENTNNNLKAAIKEINASTSMLLNFKKLWENADYSMKKLLINSFVDYISYNSDTQEVVIKPFCTNKKKGAL

SEQ ID NO: 49942 - DNA, 50 bp, Clostridium beijerinckii
  source 1..50: mol_type = genomic DNA
aggcgctctttaatgtagcgcccaaatgctcggtacatgaaaaagcgatt

SEQ ID NO: 49943 - DNA, 40 bp, Clostridium beijerinckii
  source 1..40: mol_type = genomic DNA
atcacctgtaccgcccttaaatgcgcctgcagttgcagca

SEQ ID NO: 49944 - DNA, 50 bp, Clostridium beijerinckii
  source 1..50: mol_type = genomic DNA
aggcgctctttaatgtagcgcccatatgctcggtacatgaaaaagcgatt

SEQ ID NO: 49945 - DNA, 40 bp, Clostridium beijerinckii
  source 1..40: mol_type = genomic DNA
atcacctatacccactttctatgaatctgcagtttctgca

SEQ ID NO: 49946 - protein, 566 aa, Lachnospira eligens
MKKKTRCYIYTRVSTAIQVDGYSLDAQKDKLRKYAEFQDMEIVGEYSDEGHSGKNIKGRQEFMRMLNDIEDGKDGVDFVLVFKLSRFGRNAADVLSSLQLMQDYGVNLICVEDGIDSSKEAGKLLISIIAAVAEMERENIRVQTMAGREQKAREGKWNGGFAPYGYRLENGELVIAEDEVEIIQMIFDRYIHTNDGINGVANYLNNHGYTKKLRQNGTIPGFSASFIKKIIDNPVYMGKIAYGRRRTEKKTGTRNETHVVEQSDFPVYEGVHEAIIAEEDWKLAQEKRSKNNYKREKIHDPEHAHILSGILKCPCCGKGMYGNIAKAGRKDNKTRYYYYCKNTVNATGHKCTFRCNIEQTQIDDMLAKLITAMTKEGKFKDAIQDKIGATVDTTDLEKQLSVLNASLHQAETIKTRLEQQMDNLDVTDTHYDKKIVDLQRRLDAQYDKIDEVEETMAELKSQIYELKKNQIDADSIYGFLGAFNEVYSECTDAEKKQFMQAFIERIDIFQERREDGNWIQNIKFQFPVPIIKEGKEVAQIKGISLDKEKSDEHMVSLEKLSTLETV

SEQ ID NO: 49947 - DNA, 50 bp, Lachnospira eligens
  source 1..50: mol_type = genomic DNA
tccttggaaaagttatcaacacttgagactgttgtcttactttccaaggg

SEQ ID NO: 49948 - DNA, 40 bp, Lachnospira eligens
  source 1..40: mol_type = genomic DNA
tgggaatacagtccatgtggagacggttgttcttttgtcc

SEQ ID NO: 49949 - DNA, 50 bp, Lachnospira eligens
  source 1..50: mol_type = genomic DNA
tccttggaaaagttatcaacacttatgactgttgtcttactttccaaggg

SEQ ID NO: 49950 - DNA, 40 bp, Lachnospira eligens
  source 1..40: mol_type = genomic DNA
ggggtcttcattccaggtgatgtgaggtgttcttttgtcc

SEQ ID NO: 49951 - protein, 571 aa, Butyricicoccus pullicaecorum
MIEKFDIAGYCRISVDDDLDRDNVSIENQKAIIQDFVRQKFPGSTLTFYEDRDRSGYTFEQREGYQALRKKLMGHKYEILIVKDFSRFSRRNSRGLVELEDLRDAGVRIISIGDGIDFPNDDDWLKIQFQFLINEMPVTDTSKKVKNVIKRRQADGKWICAAPYGYIINKRQEFEIVPTEADIVRTIFRLYNEEGWGYKKIANYLTEQGIPTPRMAERDRKEAAGEEYKRAVKASWAIVTVQGILDNDFYIGTLRQGKYTRKKINGKDVRQAEDEQIVIENHHQAIIDYRTFAVTRALREKRTTSHYRGIKKYDNVYSGFLVCGDCGSPMFAMSRKDLKSAYTCGSYHRRGRAGCTSHHIRTDKLDELLKSYIRQVMEHSADMLERLNQDLAREQEDVTETEQSADHLAEVLVDLQNELKATKRQRIRDLMKHPDQEELLEETYDELEAELQKKIEGIRHQIDMLSDKRNTIIQVNRAARTAMDVFSDILNKNPLERNDLELIIRQIKVFEDHLEIELQADVDAILRAGTLEDAVNFKNGMEHIAPVTIVQSSNKRPDKVFHANVISDGDP

SEQ ID NO: 49952 - DNA, 50 bp, Butyricicoccus pullicaecorum
  source 1..50: mol_type = genomic DNA
catgccaatgttatcagtgacggcgatccgtcacagaccacattgacatg

SEQ ID NO: 49953 - DNA, 40 bp, Butyricicoccus pullicaecorum
  source 1..40: mol_type = genomic DNA
catgcgcatccgcgagggcgatccgctggagatctacacc

SEQ ID NO: 49954 - DNA, 50 bp, Butyricicoccus pullicaecorum
  source 1..50: mol_type = genomic DNA
catgccaatgttatcagtgacggctatccgtcacagaccacattgacatg

SEQ ID NO: 49955 - DNA, 40 bp, Butyricicoccus pullicaecorum
  source 1..40: mol_type = genomic DNA
aatgcccttccccgatgggtacccggtggtgatccacacc

SEQ ID NO: 49956 - protein, 486 aa, Mycobacteroides chelonae
MSVKAAIYTRISQDKKLKDKDDEDNDEYEREGVTRQLEDCVALAARLGWEVVAHYDDNDLSAFNGKRRPGFESLLEAMKSGHFSALLVWHPDRLYRSPKDLERLIEVADAREVKIATVRAGDMDLSTPAGRMVARILGSVARQESEHKGDRQRRANEQRAAEGKWYTANRCFGYTDDGVPLEPEATAFRQAVSDVLGGKSIRKIAMEWNDKGLHTALVGRTQKRNGTKYVVAGTWNSPSVRRLLVNPRYAALRTHRGVVVGPGEWEPLIDADTHRGLVAFLSDPSRIKCTSFERKYIGSGVYRCGKCEGGLMKAAQPGGRKNRAYVCRDHAHVLRAGEPVDAYVEALVLEYLARPDAKLPLDDGHDIDVAALQTQRAGLQARLDELADMFADGAIDGSQLKRGTTELRSRLAVLDSQLADLARTNPVTDLLGAGDRLAEKWAALSKDMQGKIVSELMVVTILPAPRGRRAFDPDYIQIDWKTGSAA

SEQ ID NO: 49957 - DNA, 50 bp, Mycobacteroides chelonae
  source 1..50: mol_type = genomic DNA
aggtacccaacctaaaaggtcttgcctaagaccccctagttgatatacct

SEQ ID NO: 49958 - DNA, 40 bp, Mycobacteroides chelonae
  source 1..40: mol_type = genomic DNA
cagcgaatcgtgttgaccgccaaggatcgtggctgtacct

SEQ ID NO: 49959 - DNA, 50 bp, Mycobacteroides chelonae
  source 1..50: mol_type = genomic DNA
aggtacccaacctaaaaggtcttgcgtaagaccccctagttgatatacct

SEQ ID NO: 49960 - DNA, 40 bp, Mycobacteroides chelonae
  source 1..40: mol_type = genomic DNA
cagcgaatggtgtggacggcgcataaacgtggatgtagcg

SEQ ID NO: 49961 - protein, 542 aa, Streptomyces hygroscopicus
MRHPVDTDFSTLPDMTNQLRALSAIRLSVRTDETTSPGRQRAANSNEAARRGAVVVGEAEDLDVSATKTTPFNRPELGAWLARPDDFDMIIWWRMDRAVRSMADMAELGRWAKEHGKLLVFSEGPGGAPLELDMRTVSPVSELIMMMLAFSAQMEGLAIQERVTGAQAALRVQGRYSGGLVPYGYEKVKNPDGEGFKLAPDPEAVKVLSGIIRDVLEGQSLTAVAMALNENGVPVPRDYQAIKAGREPGGTRRGNKIERFRWTAGTMSKVLRSPALMGYRIHQGKPVRDRDGNPVLIGEPVLTREEFETLQDHLSTLTPQKNRTRKDTRAMLLGVAKCRGCGGNLYLSKRAGGSDYNCRATARGERCQAPAGIRADWLEKYVKEEFLTRLGHFQMTKVITHKGYDPTPELREVEEELRTLYAEKESRKSRTGRMIWQEEVDALERRAESLEATPRTEARTEVVETGETYASFWARHDAAGRRQLLLDVGARVTVAKGRSGGGAERLKGPAPERLAFTIGAHDDPEAAALEAVEEEERASRLG

SEQ ID NO: 49962 - DNA, 50 bp, Streptomyces hygroscopicus
  source 1..50: mol_type = genomic DNA
gttgtgcaaactaggtcgatccgccatccggtcgatacagatttcagtac

SEQ ID NO: 49963 - DNA, 40 bp, Streptomyces hygroscopicus
  source 1..40: mol_type = genomic DNA
gatctggtagtcgatgcgccagcccgcgtcgttgtcgaag

SEQ ID NO: 49964 - DNA, 50 bp, Streptomyces hygroscopicus
  source 1..50: mol_type = genomic DNA
gttgtgcaaactaggtcgatccgcagtccggtcgatacagatttcagtac

SEQ ID NO: 49965 - DNA, 40 bp, Streptomyces hygroscopicus
  source 1..40: mol_type = genomic DNA
agcctggcaggcgattcccaggcccgcgtggtcctcgaag

SEQ ID NO: 49966 - protein, 555 aa, Streptomyces chryseus
MPIAPEYLHHVYEGPFPTLLYARNSVDPKKKGRSVGDQLSEGRTLCASYGWPIVEEFKDTGISASRHARRKRDEFEELIEAIESGVARIVVAFEASRYYRDLEVYVRLRNACYAAGVLLCYNNTVYDLSKSADRKATAMDAIQAESESDLIRDRNLRTVRLNAEAGAPHGKIQFGYVRRYDPDTGDLIGQYAHPTHEAFAAEAFDKADTGVSTYMIAKWLRGDRKAARPDGAEWSEKLVKRMLLNPAYIGKRVFRGKIIRDATWPAIVKGPDGTPDVAKFNRVKARLTDPARRTQRDSVVAHLLSRIALCGECGDHALLTAGKRNKGRQYYNCKTAYDTALAEDRLDAYVEEALMRWLSSPEARAALLPDEGANEAKAAEVQQRLTSLNEQLDEARALATQFNEQGRPRLSVASLSALEASLEPDIKEAEAALEGMTGVSPVLQQLLTAKDPEDVWYGVKPEEATPERPARPALSLEQQRSVIRQCVTVRLFKASKKGVQKIEPGRIKLSYFGQPGYRARPITAREFAQQRAAETSQGSSAPPPRDAAARPSVRP

SEQ ID NO: 49967 - DNA, 50 bp, Streptomyces chryseus
  source 1..50: mol_type = genomic DNA
ttacgtacctaggagacactgtcgaccgagaaagtctcacaggcacatag

SEQ ID NO: 49968 - DNA, 40 bp, Streptomyces chryseus
  source 1..40: mol_type = genomic DNA
catcatcacgccgatcgccacggagaagagcgtcagccag

SEQ ID NO: 49969 - DNA, 50 bp, Streptomyces chryseus
  source 1..50: mol_type = genomic DNA
ttacgtacctaggagacactgtcgttcgagaaagtctcacaggcacatag

SEQ ID NO: 49970 - DNA, 40 bp, Streptomyces chryseus
  source 1..40: mol_type = genomic DNA
catcatcaagctggtggccttggccaagagcctacggcag

SEQ ID NO: 49971 - protein, 471 aa, Rhodococcus globerulus
MRAVIYTRVSSDATGKGRSVSEQESDCRAICEREGWDVAEVLTDNDIGASRHSGKERPAYRRLAEVLTKGDVLVTWEASRAQRDLRAYVELRDLCTIRGVLWSYSGRLYDLSRGDDRFGTGLDALLAEKEAEQTRDRVLRAKRAAALDGRHGGRLPYGYRRVINMRTGATEGWIPDEAEAPIVREIFDRTLDGESLWSICRDFTARGVPAPSTQKNAAGQWRPQRVRVMIIRPTYAGLVVHQENVIGKGSWEAIATEEEHRRIVTILTDPARAVHRGCEPKHLLTGIATCGVCGSPVRYFGPKSVKTPRYLCEKSACVGRRCDKIDDFVERLVIRLCMNPDNFHTMNASKSSDGRSALDDAIRLRQELDRFIEDAHAAGVSPFTLAKYERSVEAKIAAAEELARSSARSPLLARMAGPNAQTEWDLMSITEKRDTVRALMTVTINPSTVKARNFTHDDIEYLPRPEYLLPS

SEQ ID NO: 49972 - DNA, 50 bp, Rhodococcus globerulus
  source 1..50: mol_type = genomic DNA
tgatacctgtatcaacacttagcttcgaccaacagttcataacggtatcg

SEQ ID NO: 49973 - DNA, 40 bp, Rhodococcus globerulus
  source 1..40: mol_type = genomic DNA
gctgaccgggtctccggcttcgaccatctggccgttgccg

SEQ ID NO: 49974 - DNA, 50 bp, Rhodococcus globerulus
  source 1..50: mol_type = genomic DNA
tgatacctgtatcaacacttagcttggaccaacagttcataacggtatcg

SEQ ID NO: 49975 - DNA, 40 bp, Rhodococcus globerulus
  source 1..40: mol_type = genomic DNA
gctgcccgggactcccggatggacagtcctgccgttgccc

SEQ ID NO: 49976 - protein, 540 aa, Cronobacter malonaticus; identical to SEQ ID NO: 47771

SEQ ID NO: 49977 - DNA, 50 bp, Cronobacter malonaticus; identical to SEQ ID NO: 47772
  source 1..50: mol_type = genomic DNA

SEQ ID NO: 49978 - DNA, 40 bp, Cronobacter malonaticus
  source 1..40: mol_type = genomic DNA
attagtgtgaagcgttgagagcaccagatgcccggtctga

SEQ ID NO: 49979 - DNA, 50 bp, Cronobacter malonaticus
  source 1..50: mol_type = genomic DNA
gttagttattagagagttgtaattctgactacgaatctcttatgataaac

SEQ ID NO: 49980 - DNA, 40 bp, Cronobacter malonaticus
  source 1..40: mol_type = genomic DNA
ttttctgtgtagcattgagctcaccacattccctatctgg

SEQ ID NO: 49981 - protein, 525 aa, Mucilaginibacter gossypii; identical to SEQ ID NO: 13646

SEQ ID NO: 49982 - DNA, 50 bp, Mucilaginibacter gossypii
  source 1..50: mol_type = genomic DNA
ttgccgctttcgcctgtttggtagccgaagctaaaagatttccaaaccaa

SEQ ID NO: 49983 - DNA, 40 bp, Mucilaginibacter gossypii
  source 1..40: mol_type = genomic DNA
ctgcttcatcttcaagtagcggggagcaggatcgaactgc

SEQ ID NO: 49984 - DNA, 50 bp, Mucilaginibacter gossypii
  source 1..50: mol_type = genomic DNA
ttgccgctttcgcctgtttggtaggggaagctaaaagatttccaaaccaa

SEQ ID NO: 49985 - DNA, 40 bp, Mucilaginibacter gossypii
  source 1..40: mol_type = genomic DNA
atctttcagcttcaagaagggaggagcggaatggaactcc

SEQ ID NO: 49986 - protein, 589 aa, Klebsiella pneumoniae
MSAYVTIPRNTLLPAKHNVMNRPRLYSYIRYSSERQGKGNSLERQKSYIAKMAKQIAEEYKLEVFEEYQDLGVSAYKGKNLQEGALSDFIAQVKSGVIPKGSFLLIESLDRFSRQNAMQAVNLFTGLLFNGITVITGIDRQVYKHTDANNDTFQQLMFSVMLFSRANEESSTKSQRTIASALSKIERHQQRKPGDPVIAIKELGSDKWWTDSSSGYVNPHPVLFPIAKEIIQLKQDGWSNRMILQHLKNSYDGPIIGNKKSKGIWNMQHCSRILEPAIYGRKVITINNAEYILDDYYPAIISKDEYEALKLQVGNKGFAPNRESNPEIPLLSGIGILYCAHCSCYMVKAKSTLKNHPHAYRYQCASRDLHQDCNKWGFRASTLERTILQLIADRVFLPTKSQPSGLEGKIADIQSQIENYVLAIGSAKSPEIINNITSKIDQLEQEKQRLVVAKRLYDESIVQMNTEGWDKFREFDINDALAPLRSKIRASIKTVVMRVDCFRIDKKHNLFTITYRDQQKQRVVIENNSGWRKGKVYVEVQTINNTQLIESEGFILHDHIDILINRDKFMMEVKKRLENPRTLIDELTE

SEQ ID NO: 49987 - DNA, 50 bp, Klebsiella pneumoniae; identical to SEQ ID NO: 45382
  source 1..50: mol_type = genomic DNA

SEQ ID NO: 49988 - DNA, 40 bp, Klebsiella pneumoniae
  source 1..40: mol_type = genomic DNA
gctcggggtaaccatcggcaacaccgacggcaatattatc

SEQ ID NO: 49989 - DNA, 50 bp, Klebsiella pneumoniae
  source 1..50: mol_type = genomic DNA
gattatacctattacacttcagtgtctactaaggtaaactacatcccatt

SEQ ID NO: 49990 - DNA, 40 bp, Klebsiella pneumoniae
  source 1..40: mol_type = genomic DNA
gctccgggtacccagcggctccaccggcggtaccctttgc

SEQ ID NO: 49991 - protein, 589 aa, Klebsiella pneumoniae
MSAYVTIPRNTLLPAKHNVMNRPRLYSYIRYSSERQGKGNSLERQKSYIAKMAKQIAEEYKLEVFEEYQDLGVSAYKGKNVQEGALSDFIAQVKSGVIPKGSFLLIESLDRFSRQNAMQAVNLFTGLLLNGITVITGIDRQVYKHTDANNDTFQQLMFSVMLFSRANEESSTKSQRTIASALSKIGRHQQRKPGDPVIAIKELGSDKWWTDSSSGYVNPHPVLFPIAKEIIQLKQDGWSNRMILQHLKNSYDGPIIGNKKSKGIWNMQHCSRILEPAIYGRKVITINNAEYILDDYYPAITSKDEYEALKLQVGNKGFAPNRESNPEIPLLSGIGILYCAHCSCYMVKAKSTLKNHPHAYRYQCASRDLHQDCNKWGFRASTLERTILQLIADRVFLPTKSQPSGLEGKIADIQSQIENYVLAIGSAKSPEIINNITSKIDQLEQEKQRLVVAKRLYDESIVQMNTEGWDKFREFDINDALAPLRAKIRASIKTVVMRVDCFRIDKKHNLFTITYRDQQKQRVVIENNSGWRKGKVYVEVQTINNTQLIESEGFILHDHIDILINRDKFMMEVKKRLENPRTLIDELTE

SEQ ID NO: 49992 - DNA, 50 bp, Klebsiella pneumoniae; identical to SEQ ID NO: 45382
  source 1..50: mol_type = genomic DNA

SEQ ID NO: 49993 - DNA, 40 bp, Klebsiella pneumoniae; identical to SEQ ID NO: 49988
  source 1..40: mol_type = genomic DNA

SEQ ID NO: 49994 - DNA, 50 bp, Klebsiella pneumoniae; identical to SEQ ID NO: 49989
  source 1..50: mol_type = genomic DNA

SEQ ID NO: 49995 - DNA, 40 bp, Klebsiella pneumoniae; identical to SEQ ID NO: 49990
  source 1..40: mol_type = genomic DNA

SEQ ID NO: 49996 - protein, 610 aa, Vibrio cyclitrophicus
MTIQGDSHLLEQLSQEYNMPIGRAYNDAGISSYKGKNAREGELNLIIQHIQSGEIASGSIIVMRALDRLSRQTLTASESLYNTIVSSGVRILTTIDSHLYKKDCVMSSVLKTLAFKTANEESAKKSYLTNQYALHRINQFQRGERPTADTAYDIGVGRRPWYTKIENKVVMVDDKKFTLARGCIDMALAGKGVRICKEFLEDNGVVLSWSSVAKFFRSEYLIGRLNVTLEGKKYTLDGYYKPVCTESEWFQIRGIKEQRTYAVGNRKRVSILGGIRRLYCQCGSSMCVVTSQGNSYYRCAATQRGEKNCFPALQQKHVNKVVLETIQHHVFTAEEDNNELLALNTELEEKQKMFRKRQKLVFQNPDLLTDLQPLLENEKADIQRLVDDIESIRVKPNDLTLESYQEWTELIRLYLSTENDDLLTEIKDAVQKIIKRISINENYLIKMELESGESLHAQIAKQRNQTKQRVLYWSPVRVVDNNTYDEIVNLEPLLAFKTTTQDNVDSHQVWSDDIDTAWLKQLEKPIDKKAEFFSLLQGNAYEWKRKAIIDAGATSTQWQMYKECNVSEYGFTKREVTLTTKHYTKQQKIVVYREWNESEILQVLGGLSVN

SEQ ID NO: 49997 - DNA, 50 bp, Vibrio cyclitrophicus
  source 1..50: mol_type = genomic DNA
atgtgtaagcagcttgccttcgcatcaccaagtgctaaactgttacacta

SEQ ID NO: 49998 - DNA, 40 bp, Vibrio cyclitrophicus; identical to SEQ ID NO: 20333
  source 1..40: mol_type = genomic DNA

SEQ ID NO: 49999 - DNA, 50 bp, Vibrio cyclitrophicus
  source 1..50: mol_type = genomic DNA
atgtgtaagcagcttgccttcgcaagaccaagtgctaaactgttacacta

SEQ ID NO: 50000 - DNA, 40 bp, Vibrio cyclitrophicus
  source 1..40: mol_type = genomic DNA
catgcaaatctggttgtcgagaccaagcagcaacagcatg

SEQ ID NO: 50001 - protein, 545 aa, Clostridium scindens
MKRAKLNNDKITALYCRLSKDDGTNNESMSISTQKTMLKDYAKRNGFLNCQFYVDDGYSGTNYDRPAFRQLIEDIQDGEVSTLITKDLSRLGRNYLETGTYIEVFFPNHNVRYIAINDGVDSIDNAQMDITPFRNIINEMYAKDTSRKIKSALHARRMQGKYMATTAPFGYQKDEKDHNHLVIDEVTAPVVELIFSIAEEGVGLHTICNRLRKAKVLKPSFYKKELFERFMDEEKMYDWDTAYVSQILHNPVYAGNLTVADKPTKTMRSKKRQYIPYAEREIIYGTHEPIIEQNRWNNVQKILQSRPPVIGESSSGYDNIFRGVIKCADCGSAMLAKVEQKRKRNNVLDKTFYCCTKYRKFGKEGCSAHTIEARTVHEVVLADIQKHAGQALTDRKAMVMEIAERLNLQLSADREQQKKELRQCKQRVSEIENLYAKLYEDLTRELITEKRFQMLSARYDSEQEELTAKIKELEKSAIADKEQLSSIEHFAEQISGYAGIAELNFKIINQLIEKILVSEPVEIDGQKIQRLTIHYKFIGALETLE

SEQ ID NO: 50002 - DNA, 50 bp, Clostridium scindens
  source 1..50: mol_type = genomic DNA
aagtcacctattccaactatccaacggatgttggatagtgcgtaggggcg

SEQ ID NO: 50003 - DNA, 40 bp, Clostridium scindens
  source 1..40: mol_type = genomic DNA
tcggacattatcattgccacagatgccgggcgggagggcg

SEQ ID NO: 50004 - DNA, 50 bp, Clostridium scindens
  source 1..50: mol_type = genomic DNA
aagtcacctattccaactatccaatagatgttggatagtgcgtaggggcg

SEQ ID NO: 50005 - DNA, 40 bp, Clostridium scindens
  source 1..40: mol_type = genomic DNA
tcaaccatgacccttgccctagatgctggcctggagggcg

SEQ ID NO: 50006 - protein, 475 aa, Mycobacterium kansasii
MSHTLPIVARVKAAIYLRQSSDRTGDGLGVDRQREDVRRLIAAKGWTVAGEFVDNDVSALSRKPRPAFQRMMAGVDAGEFDVIVARHMDRLLRRLAELEAVLERCAATNTAIVTAADGVDTSSDGGRLVARILSSVAQGEVERKSARQRSAAVQAAKQGRWIGGRRAFGWEPDGVTVREDEALIVKQGYADVLAGESLAEIARRWNAAGYVSSQGSPWRRTAVKDVLTNPRHAALRRYRPADERESIRKNPELGITGAAKWPAIVDEATWRAAVRVLCDPARLRAPLGGKGLLTGLAVCGVCGERVHRGGGAHPGVRTYRCSTGRHVARKADPVDEYVTKVVIERLTQPDAADLWAAELPDASALMAEADTLRRRRDDIALDYADGAMTREQFRTANKRVLDRLGELEAQIASAGHTSPLSIVAADDVAARWAELSTAQRRAIVAALMTPVLHLVGAGVRRFDPATVEIRWRTEQ

SEQ ID NO: 50007 - DNA, 50 bp, Mycobacterium kansasii
  source 1..50: mol_type = genomic DNA
ttccgctaatttgcgacacacgcggtcgcaagggctccaatgtcgcacac

SEQ ID NO: 50008 - DNA, 40 bp, Mycobacterium kansasii
  source 1..40: mol_type = genomic DNA
cgtggaccgcacgctgcgggtcgcctggagtctggccgat

SEQ ID NO: 50009 - DNA, 50 bp, Mycobacterium kansasii; identical to SEQ ID NO: 50007
  source 1..50: mol_type = genomic DNA

SEQ ID NO: 50010 - DNA, 40 bp, Mycobacterium kansasii
  source 1..40: mol_type = genomic DNA
cctggagcgggaggtgcgggtggccgggtggctggccgat

SEQ ID NO: 50011 - protein, 552 aa, Brevibacterium casei
MSTTTAPTLTPASPGVTDDMPVLLAVSYLRVSTREQAERGGTDEGFSIPAQREANQRKADELGARVVREFIDAGESARSADRDGLQEMLAFIAATRVQFCLVHKLDRLARNRADDVKIHEALISAGVTLVSATESIDQTPSGMLVHGIMSSIAEFYSRNLATEVTKGLTQKVAQGGTPMRAPIGYLNVRTTDEQGREVRTVEVDPERAPLIRWAFQQYATGETSVSGLLRDLTARGLLTVPTPKRPSKPLGKNTLYKLLTNPYYAGVIRYKGALYPGAHEPLIDPALFDQVQSLLRARTAKMTRHVQHAHHLKGLLHCGTCGSRMLLDFATNPRGTTYAYFVCSGRAAKKTTCTRRAVPVAVAERLVADSYASITISDQTYRDLAAKVDAAFDARMAGRDQEIADLMANRAKLESESDKLLAAHFADAIDLPTLKRHQDRIRAGLADVNRRLAEHDEHHTGGRAFLHDSLRLLTDAHHAYARSGDADRRLANQGFYTRLDITDDEQLSPRLAEPFATIIREASKHSDDGGEEPLQEHDTPTHVACSRKTLWV

SEQ ID NO: 50012 - DNA, 50 bp, Brevibacterium casei
  source 1..50: mol_type = genomic DNA
gtgttcccgtaagacactttgggtggacgcaatggagcactacgggaaca

SEQ ID NO: 50013 - DNA, 40 bp, Brevibacterium casei
  source 1..40: mol_type = genomic DNA
gtctcaaaactactcgagtggaggtaaggggactcgaacc

SEQ ID NO: 50014 - DNA, 50 bp, Brevibacterium casei
  source 1..50: mol_type = genomic DNA
gtgttcccgtaagacactttgggtccacgcaatggagcactacgggaaca

SEQ ID NO: 50015 - DNA, 40 bp, Brevibacterium casei
  source 1..40: mol_type = genomic DNA
ggctcaaaactccttgaggccaggtgtggtggctcacacc

SEQ ID NO: 50016 - protein, 480 aa, Streptomyces lunaelactis
MTTAREYLRVSADHSGRERSPQEQHDENQAAADREGFTLGEPYKDTGSASKYAQKAREDFDRLVRDLEADAFGAETLVLWESSRGSRRVGEWITLIELCEERGVGIYVTTHGRMYDPGNPRDRRTLIEDATDSEYESAKIAVRVRRGLNANLVKGWFHGPCPYGYERDYDQRRRPLRQYPDPETAPHVVELFDRILKGHSLKAISKDWAARGIVSRSGTRFSPTTLRVMAAKVSYVGLRSHNNSGPVKGSWPALVDESVFWSVQRILTDPKRKTSRPGGAKHVLSMIIRCDVCGGPLVVTSARKNGKEAPAAYRCHNGGHVRVNQEETDEQVIGAMLAYLARPEIYAELAKGNGNDAELEKVRGELARARAELAEMEAAPPPRTVAALNKVTASIDSLAEDTAALEARERELSTPSVLAGLMTPGEDVATWWEAAEVSTRRAVAGLLLSPGLLGEVRVTRSAVPNRATPVADRLVWRRPS

SEQ ID NO: 50017 - DNA, 50 bp, Streptomyces lunaelactis
  source 1..50: mol_type = genomic DNA
ggggaccacggagcgaacagctctaccgagatatacccatagtggcctac

SEQ ID NO: 50018 - DNA, 40 bp, Streptomyces lunaelactis
  source 1..40: mol_type = genomic DNA
ggtgccgaagaacagaaacacgttctcatcgctctccgcc

SEQ ID NO: 50019 - DNA, 50 bp, Streptomyces lunaelactis
  source 1..50: mol_type = genomic DNA
ggggaccacggagcgaacagctctagcgagatatacccatagtggcctac

SEQ ID NO: 50020 - DNA, 40 bp, Streptomyces lunaelactis
  source 1..40: mol_type = genomic DNA
gggtctgaagataaggaacagcttatcttcggtctccgcc

SEQ ID NO: 50021 - protein, 589 aa, Klebsiella pneumoniae; identical to SEQ ID NO: 12416

SEQ ID NO: 50022 - DNA, 50 bp, Klebsiella pneumoniae; identical to SEQ ID NO: 12417
  source 1..50: mol_type = genomic DNA

SEQ ID NO: 50023 - DNA, 40 bp, Klebsiella pneumoniae
  source 1..40: mol_type = genomic DNA
gctcggcgtcaccatcggcaacaccgacggcaatattatc

SEQ ID NO: 50024 - DNA, 50 bp, Klebsiella pneumoniae
  source 1..50: mol_type = genomic DNA
aattatacccattacacttcagtgagcactaaagtaaaatacacctcatt

SEQ ID NO: 50025 - DNA, 40 bp, Klebsiella pneumoniae
  source 1..40: mol_type = genomic DNA
gctcggcgtcaccatacgcagccccatgtgttgtattatc

SEQ ID NO: 50026 - protein, 589 aa, Klebsiella pneumoniae
MSAYVTIPRNTLLPAKHNVMNRPRLYSYIRYSSERQGKGNSLERQKSYIAKMAKQIAEEYKLEVFEEYQDLGVSAYKGKNVQEGALSDFIAQVKSGVIPKGSFLLIESLDRFSRQNAMQAVNLFTGLLLNGITVITGIDRQVYKHTDANNDTFQQLMFSVMLFSRANEESSTKSQRTIASALSKIGRHQQRKPGDPVIAIKELGSDKWWTDSSSGYVNPHPVLFPIAKEIIQLKQDGWSNRMILQHLKNSYDGPIIGNKKSKGIWNMQHCSRILEPAIYGRKVITINNAEYILDDYYPAIISKDEYEALKLQVGNKGFAPNRESNPEIPLLSGIGILYCAHCSCYMVKAKSTLKNHPHAYRYQCASRDLHQDCNKWGFRASTLERTILQLIADRVFLPTKSQPSGLEGKIADIQSQIENYVLAIGSAKSPEIINNITSKIDQLEQEKQRLVVAKRLYDESIVQMNTEGWDKFREFDINDALAPLRAKIRASIKTVVMRVDCFRIDKKHNLFTITYRDQQKQRVVIENNSGWRKGKVYVEVQTINNTQLIESEGFILHDHIDILINRDKFMMEVKKRLENPRTLIDELTE

SEQ ID NO: 50027 - DNA, 50 bp, Klebsiella pneumoniae; identical to SEQ ID NO: 45382
  source 1..50: mol_type = genomic DNA

SEQ ID NO: 50028 - DNA, 40 bp, Klebsiella pneumoniae; identical to SEQ ID NO: 50023
  source 1..40: mol_type = genomic DNA

SEQ ID NO: 50029 - DNA, 50 bp, Klebsiella pneumoniae
  source 1..50: mol_type = genomic DNA
gattatacctattacacttcagtgagtactaaggtaaactacatcccatt

SEQ ID NO: 50030 - DNA, 40 bp, Klebsiella pneumoniae; identical to SEQ ID NO: 50025
  source 1..40: mol_type = genomic DNA

SEQ ID NO: 50031 - protein, 520 aa, Intestinibacillus massiliensis
MPYVAYLRKSRADQEAEQRGEGDTFARHEKILIDLAQRQKLPLTDIYRELVSGETISARPVMQQLLSEVEAGLWDGVLVVEVERLARGDTSDQGRVQKTFFYSNTLIVTPMKTYDPTNEYDQEYFEFGLFMSRREYKTINRRLQAGRISSIREGKYPGNIPPYGYLREKLPKEKGFILTPHPEQAPVVRQIFAWYADTENHLGVAKIATRLNQQHVPTFKGNEWTISTVQRILQNPVYCGYLIWGRRAHVKQMKNGEITTSRPWSKNYEKVKGLHEPLVDEETFDRVQQLFMLHPRRPVPKKKIMQNPLSGLIVCGMCGRKLQRRPYNSGRQATLICTQAGCANVSSDLRIVEQAVLESLRKWLEDYKTETSIDPDRRLNAELEGLKQSLHSLYEKQNELFKMQQRAYELVEQGVYTTAVFLERQQQLTAQRNNLEASISDLENQVSALENERETKKQLIPKVQHVLDVYGYAETDEEKNRLLTSVLEKVIYMKTTNNRWSTENDMELTIFPRFSLSCNH

SEQ ID NO: 50032 - DNA, 50 bp, Intestinibacillus massiliensis
  source 1..50: mol_type = genomic DNA
cactgataacattcatgttctgacgaactagcgcacgaactttatcaatg

SEQ ID NO: 50033 - DNA, 40 bp, Intestinibacillus massiliensis
  source 1..40: mol_type = genomic DNA
atcctcggtaggtaccgaagaactggctcatctggaaatg

SEQ ID NO: 50034 - DNA, 50 bp, Intestinibacillus massiliensis
  source 1..50: mol_type = genomic DNA
cactgataacattcatgttctgacagactagcgcacgaactttatcaatg

SEQ ID NO: 50035 - DNA, 40 bp, Intestinibacillus massiliensis
  source 1..40: mol_type = genomic DNA
atactaattagctccagaaagactggcccagctggacatg

SEQ ID NO: 50036 - protein, 414 aa, Burkholderia oklahomensis
MWGMAAKARVYSYLRFSDPKQAAGGSIDRQIEYAARWAANHEMELDATLSLRDEGLSAYHQRHVKQGALGVFLRAIEDGQVPAGSVLVVEGLDRLSRAEPLQAQTQLAQIVNAGITVVTASDGREYNRDRLKAQPMDLVYSLLVMIRAHEESDTKSKRVKAAIRRQCQGWIAGTWRAPIRVGKDPHWVRAAEGGGFELIPERAVAVRLVVEMFKQGHGAVRTVRELTERGLKISDTGRTAASHIYKLLANRMLIGEKSVEIDGETYQLERYYPSLLTAAEFADLRYLAEQRGRRKGKGEIPGVVTGLGITYCGYCGAAIVAQNLMGRKRQSDGRPHAGHRRLHCVTYSTGAGCKVSGSCSVVPVERALMLYCSDQINLSRLLEGNSSTTSTSAQLAHSRQRAADLEAQIQRFTV

SEQ ID NO: 50037 - DNA, 50 bp, Burkholderia oklahomensis
  source 1..50: mol_type = genomic DNA
ttaccctaccccgcggggccccgagagatactatacctatacgaggatta

SEQ ID NO: 50038 - DNA, 40 bp, Burkholderia oklahomensis
  source 1..40: mol_type = genomic DNA
agggccctcgggcacccgaggctgacgaacccgaccgtgg

SEQ ID NO: 50039 - DNA, 50 bp, Burkholderia oklahomensis
  source 1..50: mol_type = genomic DNA
ttaccctaccccgcggggccccgaaggatactatacctatacgaggatta

SEQ ID NO: 50040 - DNA, 40 bp, Burkholderia oklahomensis
  source 1..40: mol_type = genomic DNA
agggcggccggccacctgaagctgacgaccctgtgcctgg

SEQ ID NO: 50041 - protein, 494 aa, Caldalkalibacillus thermarum
MYAVGYVRQSKERKDRESISPETQIEKIKQFAKLQETKVVKIFRDIDISGFRVHYSKRTGLMDMLEYIKANNIKKVYVYNLARLSRRIKDFLEITNELEKYGCSVVSATEMIDMSTPQGRLFRNIMLSFNEYYSDSLSATIHDNHMKNVELKKWNGGHAPFGFSWNKADQKFEKNKDYETLLLIREKAVNMWGVKKISNHLNRRNILSPNGGKWTSQAVKYILLNPFYRGYLQYDGKLYESPLAPKVFSPEDWEKIQENLNRYVNLGPRGKATPHLLTGLLVCGACNSRMEIRYNGSNRVRRYICSNRQNGFVDKCSSSLLDADGIEQAVIKHIKSLTITRYIDQIIEEAQKISRPKANDLKSEIRHLERELEKVIQGQKELYEETFIRKNVTKERFYEMNRIFEEERQRLEEEIKELYKQMNAVDITYIFDYKEELENFSTVFDALSKEEQRTAIHSLVDKIVVHDECATIHLPVGKTKIKSTSNKRGTLYFM

SEQ ID NO: 50042 - DNA, 50 bp, Caldalkalibacillus thermarum
  source 1..50: mol_type = genomic DNA
aagggtggtttataaagattcgccccggcgagtctttgcaaaccacccca

SEQ ID NO: 50043 - DNA, 40 bp, Caldalkalibacillus thermarum
  source 1..40: mol_type = genomic DNA
cggaacggcgggatttgaacccgcgacctcacccacccca

SEQ ID NO: 50044 - DNA, 50 bp, Caldalkalibacillus thermarum
  source 1..50: mol_type = genomic DNA
aagggtggtttataaagattcgccctggcgagtctttgcaaaccacccca

SEQ ID NO: 50045 - DNA, 40 bp, Caldalkalibacillus thermarum
  source 1..40: mol_type = genomic DNA
tggacaggcaggttttgaactcccgacctcaaacaatcca

SEQ ID NO: 50046 - protein, 531 aa, Corynebacterium variabile
MTTVIPTRATTPTTDPSPAVQRVRAVLYVRISDDPEGLEKGVERQEADCRAYAESLGFEVVEVFRENDTSAFKQRTITLPTGEKVRRVVRPRFRALLSFLARGGGEAMIAYDLDRAVRDPRDLEDLIDAKVLYGFRVLSTTGSLRLDNDSDIAMARVLVAMANKSSADTARRVARASKQQAIEGKWHGGRAPYGYRMGDSTLYVIPEHAALIREAADRVLAGESLYVITRTWNERGERTGNGVEWSEKALAQVLRNPATKGVRIYRPTLPDGRSAEVPEVVTEGNWPAILDAERWQEVVDVLDARRARRTTWPGTVKRVHPFSGLIRCASCGTAMRKQGPQYICVNYQRGVCSRSINAREVAALIEEAVLSVFSRIALAPEQMPSRTAETDGEREALAEGLESDREALERLDDDHYDGIIDRATWMRQRTRLIERIRSRQHDYQQRLARIPVVDVSLDVSTVASEWEGRSATWRHEATRLVLDTVLIHAHPTGVPAVVPKRRGDTKESYRARLREHRNGLLARRVEFIWHA

SEQ ID NO: 50047 - DNA, 50 bp, Corynebacterium variabile
  source 1..50: mol_type = genomic DNA
ggactacttttgctcccctacggggtgccgtggggttgtaaacgtacctg

SEQ ID NO: 50048 - DNA, 40 bp, Corynebacterium variabile
  source 1..40: mol_type = genomic DNA
gaagcacccggcgtacggggtgcttccggggaggttctac

SEQ ID NO: 50049 - DNA, 50 bp, Corynebacterium variabile
  source 1..50: mol_type = genomic DNA
ggactacttttgctcccctacggggagccgtggggttgtaaacgtacctg

SEQ ID NO: 50050 - DNA, 40 bp, Corynebacterium variabile
  source 1..40: mol_type = genomic DNA
gaagcagcaggcatacgtggagcctctgaggaggtgatgc

SEQ ID NO: 50051 - protein, 517 aa, Geobacillus thermoleovorans
MYRPRNLDVFIYLRKSRKDIEEEKKAAESGASYDTLQRHRDNLLAIARKEGHNILGIFEEIVSGESIAERSEIQKLLRELETGVADAVLVMDIDRLGRGDMLDQGILDRAFRYSGTKIITPTEVYDPESETWELVFGVKSIVSREELKVITKRLQGGRRDSAAKGRSISKKPPYGYLRDENLKLYPDPETSWVVVKIFEMMRDGHGRQAIAAELDRLGVKPPDEKRAFWSPSTISAIIKNEVYLGHIIWGKVKYIKQNGKYKRKKMPRERWYIKENAHEPLVSKELWEAANKAYRSRWRPSTVESKPLANPLAGLLKCELCGYTMWYQPRKDRPHPLVRCPNPKCKGVQKGALLPLVEEKILQSLAEFVDQFEVQEEALARKEQRSVIPLKQKAIEKKEKELRELHKQKDTLHDLLERGVYTIETFLERQQTIVSRIKKTQEKIDQLREEIDKEQLKEKNINEYIPTVKKVLDAYRLTDDVEKKNRLLKSVLEKATYLRKPEWTKKDQFTIQLYPRI

SEQ ID NO: 50052 - DNA, 50 bp, Geobacillus thermoleovorans
  source 1..50: mol_type = genomic DNA
agggtagagggtgaacgattgtactgatacacttgttaatgctatacaca

SEQ ID NO: 50053 - DNA, 40 bp, Geobacillus thermoleovorans
  source 1..40: mol_type = genomic DNA
cgtggaatggcgattgtactggttgacttccccataccca

SEQ ID NO: 50054 - DNA, 50 bp, Geobacillus thermoleovorans
  source 1..50: mol_type = genomic DNA
agggtagagggtgaacgattgtacctatacacttgttaatgctatacaca

SEQ ID NO: 50055 - DNA, 40 bp, Geobacillus thermoleovorans
  source 1..40: mol_type = genomic DNA
ggtggaggggtgattcaaactgttgacttctccaaaacca

SEQ ID NO: 50056 - protein, 514 aa, Geobacillus kaustophilus
MYRPRNLDVFIYLRKSRKDIEEEKKAAESGASYDTLQRHRDNLLAVARKEGHNILGIFEEIVSGESIAERSEIQKLLRELETGVADAVLVMDIDRLGRGDMLDQGILDRAFRYSGTKIITPTEVYDPESETWELVFGVKSIVSREELKVITKRLQGGRRDSAAKGRSISKKPPYGYLRDEQLKLYPDPETSWVVVKIFEMVRDGHGRQAIAAELDRLGVKPPDEKRAFWSPSTISAIIKNEVYLGHIIWGKVKYIKQNGKYKRKKMPRERWYVKENAHEPLVSKELWEAANKAYRSRWRPSTVESKPLANPLAGLLKCEVCGYTMWYQPRKDRPHPLVRCPNPKCKGVQKGALLPLVEEKILQSLAEFVDQFEVQEDRKEQRSVIPLKQKAIEKKEKELRELHKQKDALHDLLERGVYTIETFLERQQTVVSRIKKTQEEIGQLREEIAKEQLKEKNISEYVPTVKKVLDAYRLTDDVEKKNRLLKSVLEKATYLRKPEWTKKDQFTIQLYPRI

SEQ ID NO: 50057 - DNA, 50 bp, Geobacillus kaustophilus
  source 1..50: mol_type = genomic DNA
agggtagagggtgaacgattgtactgatacaactatacacgctatacaca

SEQ ID NO: 50058 - DNA, 40 bp, Geobacillus kaustophilus; identical to SEQ ID NO: 50053
  source 1..40: mol_type = genomic DNA

SEQ ID NO: 50059 - DNA, 50 bp, Geobacillus kaustophilus
  source 1..50: mol_type = genomic DNA
agggtagagggtgaacgattgtacctatacaactatacacgctatacaca

SEQ ID NO: 50060 - DNA, 40 bp, Geobacillus kaustophilus; identical to SEQ ID NO: 50055
  source 1..40: mol_type = genomic DNA

SEQ ID NO: 50061 - protein, 517 aa, Geobacillus thermoleovorans
MYRPRNLDVFIYLRKSRKDIEEEKKAAESGASYDTLQRHRDNLLAVARKEGHNILGIFEEIVSGESIAERSEIQKLLRELETGIADAVLVMDIDRLGRGDLLDQGILDRAFRYSGTKIITPTEVYDPESETWELVFGVKSIVSREELKVITKRLQGGRRDSAAKGRSISKKPPYGYLRDENLKLYPDPETSWVVVKIFEMMRDGHGRQAIAAELDRLGVKPPDEKRAFWSPSTISAIIKNEVYLGHIIWGKVKYIKQNGKYKRKKMPRERWYVKENAHEPLVSKELWEAANKAYRSRWRPSTVESKPLANPLAGLLKCEVCGYTMWYQPRKDRPHPLVRCPNPKCKGVQKGALLPLVEEKILQSLAEFVDQFEVQEDTFARKEQRSVIPLKQKAVEKKEKELRELHKQKDALHDLLERGVYTIETFLERQQTIVSRIKKTQEEIDQLREEIAKEQLKEKNINEYIPTVKKVLDAYRLTDDVEKKNRLLKSVLEKATYLRKPEWTKKDQFVIQLYPRI

SEQ ID NO: 50062 - DNA, 50 bp, Geobacillus thermoleovorans
  source 1..50: mol_type = genomic DNA
agggtagagggtgaacgattgtactggtacaactatacacgctatacaca

SEQ ID NO: 50063 - DNA, 40 bp, Geobacillus thermoleovorans; identical to SEQ ID NO: 50053
  source 1..40: mol_type = genomic DNA

SEQ ID NO: 50064 - DNA, 50 bp, Geobacillus thermoleovorans
  source 1..50: mol_type = genomic DNA
agggtagagggtgaacgattgtacctgtacaactatacacgctatacaca

SEQ ID NO: 50065 - DNA, 40 bp, Geobacillus thermoleovorans; identical to SEQ ID NO: 50055
  source 1..40: mol_type = genomic DNA

SEQ ID NO: 50066 - protein, 547 aa, Mesorhizobium australicum
MPKAYSYLRFSTPEQSSGDSTRRQSTAAIEWCKRKGIELDQALSFRDLGRSGFTGANFREGALGAFFDAAEAGIVEKGSYLVIEALDRFSRENPMAAADRLFRLVRLGITLVTTDDGQEYSAERLSGTDPSAMLLLVVKMTQAHLESVRKSELVGKAWRQKKALARTEQRPLTPRCPEWLELRDGRFVERPERVAIVRRVFQETNDGAGRREIVRRLNAEGIPPFRGGKGWHTSSVAKVIQGRAVLGEYQPHTGTHRARNRKPDGDPILDFYPSIIDEVTYSRAQEATQGRRQRSAGRKGNAVHLLQGIARCASCEGAMHLRNHGAPPKGGIYLVCSSHERQAGCDNARRWRVDRLEPSLLTALGFVDAQAFSPLDDATPVAVERVTVARVKLEAANTRRKRWGDVLDDPDSVDDDEAKARYSAAAAEVKALKKELKAAETEAARLAADPGMIARLTDAATLSRQIEEADAEARRALRIRLSGILRELVERVECGELGAVMVLKPRLGPRRLEGVAPFTFRRDDRAVWSALLEADADEATQDAFLGW

SEQ ID NO: 50067 - DNA, 50 bp, Mesorhizobium australicum
  source 1..50: mol_type = genomic DNA
tgtcgaataatgtagcacaacgtcagcagattatgctacattaattgggt

SEQ ID NO: 50068 - DNA, 40 bp, Mesorhizobium australicum
  source 1..40: mol_type = genomic DNA
gccgggcggaccgaccatcagcaggttgtggccgccggca

SEQ ID NO: 50069 - DNA, 50 bp, Mesorhizobium australicum
  source 1..50: mol_type = genomic DNA
tgtcgaataatgtagcacaacgtcggcagattatgctacattaattgggt

SEQ ID NO: 50070 - DNA, 40 bp, Mesorhizobium australicum; identical to SEQ ID NO: 18675
  source 1..40: mol_type = genomic DNA

SEQ ID NO: 50071 - protein, 429 aa, Bradyrhizobium japonicum
MDTQRPAKAYSYVRFSTPEQAKGHSLQRQTDAAKAWAAANGMTLDEELTLQDKGVSGFTGANRETGALGVFLERVKDGTIPPSSWLLVENLDRISRQVARKAVRTIEDIVEAGITVVDLSDGGREYSAETLDKDPFLFVMMVMKFIRANEESATKGVRVAKAHAARRDKFRGQEKLTKPYTLRLPAWIRWDNETASYQLIEDRAERLQWIFEMADDGMGQHTIAAQLNESKVDTRGAGGWKAKFWHKSYIRKLLTNKAAIGVFVPHTVRKVDGKRTKERTPQEPILHRFPAAIDRELFERVNARMSTTGARGRNTNAPVQSIFAGVLKCRHCGGTVTRVNKGEHVYLVCSAAHAKSGTCKYESVPYLDAQSEMRRVIHQVLDGAPRGNDTAEMDEKIEQQRAMIDVGEERVRQLLEITIPKGSHALPCG

SEQ ID NO: 50072 - DNA, 50 bp, Bradyrhizobium japonicum
  source 1..50: mol_type = genomic DNA
catgggcactgagacaatcacatgagcaggtgattacgtcaatgacaatt

SEQ ID NO: 50073 - DNA, 40 bp, Bradyrhizobium japonicum
  source 1..40: mol_type = genomic DNA
gccgggcgcgccgatcatgagcaggtgatgtccgccggcg

SEQ ID NO: 50074 - DNA, 50 bp, Bradyrhizobium japonicum
  source 1..50: mol_type = genomic DNA
catgggcactgagacaatcacatgggcaggtgattacgtcaatgacaatt

SEQ ID NO: 50075 - DNA, 40 bp, Bradyrhizobium japonicum; identical to SEQ ID NO: 18675
  source 1..40: mol_type = genomic DNA

SEQ ID NO: 50076 - protein, 400 aa, Rhizobium pusense
MSRWTMDDGRVYTEEVLDQDPTSLLVAILVAVRAHEESATKARRLREAWGAKRSQAASRPLTRVAPAWVRLREDRSGFDLIPERAAIVRRIFQMTLNGVGQHAIASTFVQEGVPVFGRAKFWQRSYVSKILTNPATVGDFTPHRYDKINGKTVRTPTETVPNYYPAVIDRETFQRVSGLTSARAAISTSAGAKRANILAGLGKCPLCGATMTRVNKGARKKNSKPYLVCTAAKVGAGCEYHQVRLEYVHTAILGKAEELVADMPSPDDTLQSAWETLEGEVWGLEESISKIVGAISDGGHSRALLDRLSELESVLEAAKGHQEDLGAKIASTQTNRIQAVAYEEFLGAVEAEDIARINVTLRQLFERVVVNYRTGKLEMYWKHAPDEASEVFYAMPVDGQ

SEQ ID NO: 50077 - DNA, 50 bp, Rhizobium pusense
  source 1..50: mol_type = genomic DNA
agggggtcttttgttcataccatcagcatcgtatcgacaaatgacccatt

SEQ ID NO: 50078 - DNA, 40 bp, Rhizobium pusense
  source 1..40: mol_type = genomic DNA
gccgggcgggccgaccatcagcagattatggccgccggcg

SEQ ID NO: 50079 - DNA, 50 bp, Rhizobium pusense
  source 1..50: mol_type = genomic DNA
agggggtcttttgttcataccatcggcatcgtatcgacaaatgacccatt

SEQ ID NO: 50080 - DNA, 40 bp, Rhizobium pusense; identical to SEQ ID NO: 18675
  source 1..40: mol_type = genomic DNA

SEQ ID NO: 50081 - protein, 530 aa, Methylophilus methylotrophus
MAVALYARVSTVRQAEKDLSIPDQINQMRDWCQANGYVVAMEYIEPGASATDDRRPVFQQMIADATSDSEPYEAIIVHSRSRFFRDMFEFLNYERRLKRAHCKLVSITQITSDDPAGEMASKIFSLFDEYQSKENGKHTIRAMKENAKRGFMNGSRAPFGYRAIEIEIMGAKGKKKKKIDIDPVESEIVKKIFHLYLFGNEYGHMGAKEIATYLNDKNIRLRTQKWNRGRVHEVLSNKAYIGEYYFNKRNNKTGELKPSEEWIKVEIPAIIEASTFEDARIRRAERAPAKVPPRLVNSPTLLTGILKCGICGAGMTLATGKGGRYRYYKCNTRIGKGNHLCTMPAVPMEKLDNLILTTLADKVFTPERVSTMMQEMRKRVVQRNKEQTNHAQPLQKELEELNQRNERLFEAVEKGFLPMDETLQARSRSIQTRRQDILLEIAAMKRQQDMPVDALNQKNIKVFAQVLKEKLADRKSNFGKQYLKGLIQQIMLKDGEATILGSYDAMASAIVETKKMGTDLTVPTFASSWL

SEQ ID NO: 50082 - DNA, 50 bp, Methylophilus methylotrophus
  source 1..50: mol_type = genomic DNA
tgcccacttttgcatcaagttggctctccaattcagataaaactcataac

SEQ ID NO: 50083 - DNA, 40 bp, Methylophilus methylotrophus
  source 1..40: mol_type = genomic DNA
aaggctttttttatttggctcctcaacctgggctcgaacc

SEQ ID NO: 50084 - DNA, 50 bp, Methylophilus methylotrophus
  source 1..50: mol_type = genomic DNA
tgcccacttttgcatcaagttggccctccaattcagataaaactcataac

SEQ ID NO: 50085 - DNA, 40 bp, Methylophilus methylotrophus
  source 1..40: mol_type = genomic DNA
aaggcttttacaaatagggccctcaactgtggctcaaacc

SEQ ID NO: 50086 - protein, 478 aa, Paenibacillus peoriae
MESTLKMIRAAGYGRVSTEEQANEGHSLDAQREYNLKYIENEKWILSGYFEDPGYSGKNLNRPDMKRLIQEINDKNIDALVVHKLDRLTRDIKDLYEMLQMFEKHNIKFVSISEKIDTDTAMGRMFVFMLGIFAQWYRENLSEEVTKGMRARAKKGIPNVFVNMFGYTRTPDGELIINEEEAKWVRWIFEQYLNGKGTPTIAKELNNMNIRRTRGGRWSQTKVMDVLENQHYVGNITWKSRKDDEEDRIIRKGTHIGIIDQETFDKVQRWIQRRRDGFRSRNSYNYAFGGVLRCGKCGGRYKGKYSVSGGTITYNYVCSNKERYHTCDQSSISETKLVKMLFKSLDMDNQNLFWKDDVKESINSEEDQIRRAIKASEERRERWQMAYGDGFMPYQDFSKRMKEEMQRVVELEEKLSGLPGAVVSTLDPTEVISIMQDIQDNWWYMERSTQKQLIQELFQDILILKDGKEWGIKGIAFA

SEQ ID NO: 50087 - DNA, 50 bp, Paenibacillus peoriae
  source 1..50: mol_type = genomic DNA
gtttgtgcctgtgtaccttctggtaaaccacggggtacataggtacaaac

SEQ ID NO: 50088 - DNA, 40 bp, Paenibacillus peoriae
  source 1..40: mol_type = genomic DNA
tattatgcctccgattggtaaacttctgggcggcatgaat

SEQ ID NO: 50089 - DNA, 50 bp, Paenibacillus peoriae
  source 1..50: mol_type = genomic DNA
gtttgtgcctgtgtaccttctggtttaccacggggtacataggtacaaac

SEQ ID NO: 50090 - DNA, 40 bp, Paenibacillus peoriae
  source 1..40: mol_type = genomic DNA
tattatgcctccctttcatttacatagaggcagtatgaat

SEQ ID NO: 50091 - protein, 694 aa, Ensifer adhaerens
MSTDNAMKISANHLQRDAFLYVRQSSLRQVFENTESTKRQYALRDRAVALGWPIERVHVIDNDLGLSGAQSQDRDGFQRLVSEVAMGHAGIVLGLEVSRLARNNADWHRLLELAAMSRTLIMDEDGVYDVASFNDRMLLGLKGTMSEAELHILKSRLQGGILNKARRGELELPLPIGLVYTPDMRVVLDPDRQIQDTVRMLFDTFREAGSACAVVRRLRSEKILFPRRIRRGIGKGDVLWSEIDHSRLLQILHNPRYAGAFAYGRTRTGYNAKLKSVQQKMPRSEWQVLIPQAHEGYISWAEFERNQSNLQQNAVGFSAGLRGRMPRQGNGLLQGRVLCGRCGARMRVHYEQFEGKLRPYYVCNEAVVRHAGKTCQWARGPAIDDAVSALLLEAMAPTAIEVALAVQEEISQRVEQAASLRGKQLQRARYEAELARRRYLKVDPDNRLVADALEADWNGKLRDLDALQREHERQHEKDRSLLDGPTQERIRALAADFPSVWSNERTSAVERKRMLGLLIEDVTLLVDQQINIHIRWRGGRTQSLAVARPRPMAVIRKTPEAVVALINELLETDNDQQIASRLNALGHRNWRDEPFTLKKVMLVRRAYGLKTRFERLRESGMLTGEEVARQLGVSATTVHQLGRDGVLKRHRYATNHRYLYEPPGNVRLAKGIGGRYGSRKPRLIDAQPIQQGAP

SEQ ID NO: 50092 - DNA, 50 bp, Ensifer adhaerens
  source 1..50: mol_type = genomic DNA
aaggtgcaccgtgatgtctgctccttctttcaagtccaggactgcaggtc

SEQ ID NO: 50093 - DNA, 40 bp, Ensifer adhaerens
  source 1..40: mol_type = genomic DNA
gaacgcctcggccatgccgttcgactgtgggcttcgcacc

SEQ ID NO: 50094 - DNA, 50 bp, Ensifer adhaerens
  source 1..50: mol_type = genomic DNA
aaggtgcaccgtgatgtctgctccccctttcaagtccaggactgcaggtc

SEQ ID NO: 50095 - DNA, 40 bp, Ensifer adhaerens
  source 1..40: mol_type = genomic DNA
ggatgccccggccaggccccccgagtgtggcctccgagcc

SEQ ID NO: 50096 - protein, 694 aa, Sinorhizobium meliloti
MSTDNAMKISADHLRRDAFLYVRQSSLRQVFENTESTKRQYALRDRAVALGWPIERVHVIDNDLGLSGAQSQDRDGFQRLVTEVAMGHAGIVLGLEVSRLARNNADWHRLLELAAMSRTLIMDEDGVYDAASFNDRMLLGLKGTMSEAELHILKSRLQGGILNKARRGELELPLPIGLVYTPDMRVVLDPDRQIQDTVRMLFDTFREVGSACAVVRRLRSEKILFPRRIRRGIGKGDVLWSEIDHSRVIQILHNPRYAGAFAYGRTRTVYNAKLKSVQQKMPRSDWQVLIPQAHEGYISWDEFERNQTSLEQNAVGFSPGLRGRMPRQGNGLLQGRVLCGRCGARMRVHYEQFEGNLRPYYICNEAVVRHAGKACQWARGPAIDEAVSALLLEAMAPTAIEVALAVQEEISQRVEQAASLRDKQLQRARYEAELARRRYLKVDPDNRLVADALEADWNGKLRDLDTLQREHERQNETDQSLLDGAMQERIRALAADFPRIWNNERTSPVERKRMLGLLIEDVTLLVDEKINMHIRWRGGRTQSLAVARPRPMAVIRKTPEAVVALINELLETDNDQQIASRLNALGHRNWRGEAFTLKKVMLVRRAYGLKTRFERLRDSGMLTGEEVARRFGVSATTVHQLGRDGVLKRHRYATNHRYLYEPPGNVRLAKGVGGRYGSRQPRLIDAQQIQQGAS

SEQ ID NO: 50097 - DNA, 50 bp, Sinorhizobium meliloti
  source 1..50: mol_type = genomic DNA
aaggtgcatcgtgatgtctgctccttctttcaagtcccggactgcagttc

SEQ ID NO: 50098 - DNA, 40 bp, Sinorhizobium meliloti; identical to SEQ ID NO: 50093
  source 1..40: mol_type = genomic DNA

SEQ ID NO: 50099 - DNA, 50 bp, Sinorhizobium meliloti
  source 1..50: mol_type = genomic DNA
aaggtgcatcgtgatgtctgctccccctttcaagtcccggactgcagttc

SEQ ID NO: 50100 - DNA, 40 bp, Sinorhizobium meliloti; identical to SEQ ID NO: 50095
  source 1..40: mol_type = genomic DNA

SEQ ID NO: 50101 - protein, 694 aa, Sinorhizobium meliloti; identical to SEQ ID NO: 1231

SEQ ID NO: 50102 - DNA, 50 bp, Sinorhizobium meliloti
  source 1..50: mol_type = genomic DNA
aaggtgcatcgtgatgtctgctccttcttatcaagtccaggactgcagtt

SEQ ID NO: 50103 - DNA, 40 bp, Sinorhizobium meliloti; identical to SEQ ID NO: 50093
  source 1..40: mol_type = genomic DNA

SEQ ID NO: 50104 - DNA, 50 bp, Sinorhizobium meliloti
  source 1..50: mol_type = genomic DNA
aaggtgcatcgtgatgtctgctcccccttatcaagtccaggactgcagtt

SEQ ID NO: 50105 - DNA, 40 bp, Sinorhizobium meliloti; identical to SEQ ID NO: 50095
  source 1..40: mol_type = genomic DNA

SEQ ID NO: 50106 - protein, 638 aa, Cronobacter sakazakii
MKPKLYSYVRFSSVKQREGNSLERQQDTALKIAARYNLELDTTAFHDLGMSAFKGRNAHEGKLSEFIKQIGVKVPVGSWLVVENLDRISRDDAWTALDIFKSILSKGIVVVTGMDEKVYKYADVKNNPTDLIISLLMFTRAHDESLTKKNRVEAQARSLIRYNLTRKAGTPAKAIESVGQNVWWVDTKSGYVTPHPMYFSAAQKIIELKQNGETLLGIQRYLNEHYPAPKKRIYKDQTGQVLKPKTEQWGKHLIRTFLNPTVYGQKVFTLDKRDESGVVIYDQDSEQPLKETFVIPDYYPALISEIDYLTLSKLDRHRAVTRSSSKYPVGNPEPEIPLLSGIGILFCGKCGSFMFKSGSNENKYRYICGSKIVQGKPCGKKGFTSYQLEHSILQLIADHVWNNHQEDKTAWYESEIEKTSESIDKLLKLATLTDSLEELAEQIRSYKHKKATLEREFQQYKISRSEIQTTGWDQFQNFDVHDTKNPDRKRIRLKIKQAIKRINCYDIDGRHGHFEVTFADETKQRIVIKFNRNRSPGVSYVEAQTVNDHDLLKMQGFVMHSFIDELISPDKFAQQIKDKHEVSILHPTFITKLEDGVNRDEGNGLAIKVDSTTSKSYATVNGIKYEINSLEDLEKLSK

SEQ ID NO: 50107 - DNA, 50 bp, Cronobacter sakazakii
  source 1..50: mol_type = genomic DNA
aatgcgaataattgactattaggcttgcctaacatataattattcagtgt

SEQ ID NO: 50108 - DNA, 40 bp, Cronobacter sakazakii; identical to SEQ ID NO: 4758
  source 1..40: mol_type = genomic DNA

SEQ ID NO: 50109 - DNA, 50 bp, Cronobacter sakazakii
  source 1..50: mol_type = genomic DNA
aatgcgaataattgactattaggcgggcctaacatataattattcagtgt

SEQ ID NO: 50110 - DNA, 40 bp, Cronobacter sakazakii
  source 1..40: mol_type = genomic DNA
gcaggggttatctgcgggtgggcagttggggctgccctgg

SEQ ID NO: 50111 - protein, 492 aa, Nocardia farcinica
MTTKKDSGTLRIAVYLRFSQDRTGEGLGMARHEPRCRELAQKIAAQNGAAAQITVYRDNDISASRYSRKKRKAYIEMCERIERGDIDVVVAYHHDRLLRDKGREMEPFIDLIERNGVDVQFVTAGRWDLSTAAGRFQARIAGSVAAYESELKSERIKLQRIQQAMAGKFHGGIRPYGFEPDGVTVRADEAREIARMYEQVVAGVTLRQIVRDLNTRGVPTATQRGPWTSQAVRDIIRRPRNAGWSVHNGEVVGKAEWAALVSEDTWQAAVAVVSDPARRTSPGNTPKWLGSGLYLCGVCDRPELRVSAASSNRNKVYRCRSRELTGVAHVNRDAARLDALVEETIVSRLEQPDALAQLAAGFGTTGVDVAALRLEQAALRQRLDALATMFAAGEIDARQLATASTSLKAKITAMDGELAEAGRRSPLAELAGSDIRARWFGTQPDRSDGLSLGTRRAIVDLLLTVRVLPAPKGRRANGVYFDPSSIEMTWKV

SEQ ID NO: 50112 - DNA, 50 bp, Nocardia farcinica
  source 1..50: mol_type = genomic DNA
gtgtgtcttatccgcggaaccgtgaagacgacgctttagttgtgacacac

SEQ ID NO: 50113 - DNA, 40 bp, Nocardia farcinica
  source 1..40: mol_type = genomic DNA
cggtgggaccggggcgggcaagacgacgctgttgtccggc

SEQ ID NO: 50114 - DNA, 50 bp, Nocardia farcinica
  source 1..50: mol_type = genomic DNA
gtgtgtcttatccgcggaaccgtgtggacgacgctttagttgtgacacac

SEQ ID NO: 50115 - DNA, 40 bp, Nocardia farcinica
  source 1..40: mol_type = genomic DNA
cggtgggtcccgggtgggctggtgggcactgttgagtggc

SEQ ID NO: 50116 - protein, 494 aa, Paenibacillus odorifer
MKAAIYIRVSTDEQALEGFSIEAQKRRLLAYADSQDWEVAEVYIDDGWSAKDLKRPEMKRMISDIQDHIFDVVLVYKLDRMTRSASDCDHLLKIMETYNVKFQSCTESFETRTATGRLFIRLVADIAQWERENTAERVRFGMEQMVMEGRRPGGPINFGYDKDEKLVEDEVMQIRMLRKFYLEGDGIKGVAQKLNGMGFLRRGYKWTSFSVWYILDNPYYAGKLRYGGKKANGKYASRKKEGVVDLIIQEGSQETVFTWEEYEEHKAEMKRRSFDGYSKVREYWFSGVLICGKCGSKMSGRYHQNKRKDGSYNKITSYICVGRQTGRGCDMPMFRQELVEKLFLEWIEDRIAIDEGTMREIKVSKKEKANLSLRDDLNNELKRIKERRKKWQRMFADDLITQDELREHNKDEQENEKVVLSELEKLPEEETKLSEDMNEVLFGIPEVWPLMSDGDKKELILEIFKEIKLYTPVGKTHGRKGKFIPASIEQVIYN

SEQ ID NO: 50117 - DNA, 50 bp, Paenibacillus odorifer
  source 1..50: mol_type = genomic DNA
cgtgtgtgttttggcatcctcggtaatccgtagatatcattctacacacg

SEQ ID NO: 50118 - DNA, 40 bp, Paenibacillus odorifer
  source 1..40: mol_type = genomic DNA
aggatcattgtggtagggaaacgcatccagctcgtcaatg

SEQ ID NO: 50119 - DNA, 50 bp, Paenibacillus odorifer
  source 1..50: mol_type = genomic DNA
cgtgtgtgttttggcatcctcggtactccgtagatatcattctacacacg

SEQ ID NO: 50120 - DNA, 40 bp, Paenibacillus odorifer
  source 1..40: mol_type = genomic DNA
gggagcgtcctggtggggaaccgcattcagatccccaatg

SEQ ID NO: 50121 - protein, 566 aa, Peptacetobacter hiranonis
MKAALYIRVSTTYQIDKDSLPVQRQDLINYAKYAFNIDDYEIFEDAGFSGKNTNRPAFQEMMERIRNKEFSHLFVWKIDRVSRNLLDFCDMYEELKKYDCTFISKNEQFDTSSAMGEAMLKIILVFAELERKLTSERVTSIMLARAEKGMWNGANVPLGYDYDEETKYPVINESEAKTIHLIFDMYEDVKSTVKISNFLNDNNIATKRGGTWTSKTVGDILHNPFYYGTLRYNYRESGRGKKKSKDEWVIKEDNHIGIISKDQWNRCNKIIEFNSKRNSARWRQKNYVQHIFGGLLVCKDCGRKFEACLDRARSDGYRPTRYVCGARTKGGACHNKMSVSDVSIGDFVLHYVLNFIKSFNVVCISSEALESLLLSGDLFEDVLLTEDSIRDTFIAINYFQKTKQDITYEYNDEKEDNVNNTFIKHEHEKITSSLNNLERAKERLINLYLYSDHDMDENMYYEKKNDIDKKIKELKNKLETLEIKNNLSCDTDFLFIDNMNDFLFNLNINLDNNTVRELTLDGGRKILKDFFSNIIDRIIISNARVDSIVFKNGLTHTFIYKNKKIT

SEQ ID NO: 50122 - DNA, 50 bp, Peptacetobacter hiranonis
  source 1..50: mol_type = genomic DNA
ttcattgtgtaccagttcatctgacacccgaatgtacataaccccacgac

SEQ ID NO: 50123 - DNA, 40 bp, Peptacetobacter hiranonis
  source 1..40: mol_type = genomic DNA
gtcgtgctcattcatctgacacccgaacgtaccacagccc

SEQ ID NO: 50124 - DNA, 50 bp, Peptacetobacter hiranonis
  source 1..50: mol_type = genomic DNA
ttcattgtgtaccagttcatctgacccccgaatgtacataaccccacgac

SEQ ID NO: 50125 - DNA, 40 bp, Peptacetobacter hiranonis
  source 1..40: mol_type = genomic DNA
gtcttgctcattgttctgtcccccgcacctagcacagggt

SEQ ID NO: 50126 - protein, 559 aa, Bradyrhizobium septentrionale
MARKHLQTSETTSADTGKVSRNVLIYIRVSTDAQAQNALSLTDQENQLVARCKRDGDNIVGVFREEGESATNMKRPAFEQMIARATDGARSVNAILVYSFSRAFRNQFEQELTVRALRKHKVELISFAEPLTKDASGDLFRKFIGIVNEFQSAETSRATTRTMKENARRGYSNGGIIPFGYKSIDAELIGSKQKKKLAVEPVEAEIVVRAFDLARNGDGNSGPLGTKKIAIWLNERGFRSRNGSLFGTGTIHEILTREAYTGVRRFNEFDRKGDGDRKDAAEIVEYEVPTIIDRALFDEVQALLVGRQPRAKGSRLTSAPSLLGGLVRCDCEVSCALSTATGTSRTGKIYAYYKCIQATKQGRHKEGNGANCVNRKVPRPVIEKLVVEALIDQLLQPDRVTSILLALKARRDDRQASADRRIVDLARQASEAEERLGRLYATIEAGTIDGTDPTLKERVTALKGGRDKAVEALDYAKKSSAIPIAIDPIAIDRFTRLMREQLISGDVAARKAYLASMVDAIIVSEDKIRIVGSNDNIQSTFGPQGQPKHRVRKSVQEWC

SEQ ID NO: 50127 - DNA, 50 bp, Bradyrhizobium septentrionale
  source 1..50: mol_type = genomic DNA
ttcgtaaatctgttcaggaatggtgcaccattcagaataaacttgcgaac

SEQ ID NO: 50128 - DNA, 40 bp, Bradyrhizobium septentrionale
  source 1..40: mol_type = genomic DNA
ccgcggaagcggtcatggtgcccaggggcgggatcgaacc

SEQ ID NO: 50129 - DNA, 50 bp, Bradyrhizobium septentrionale
  source 1..50: mol_type = genomic DNA
ttcgtaaatctgttcaggaatggtccaccattcagaataaacttgcgaac

SEQ ID NO: 50130 - DNA, 40 bp, Bradyrhizobium septentrionale
  source 1..40: mol_type = genomic DNA
ccggggaagcggtcataggcccttgggccgggctcgggct

SEQ ID NO: 50131 - protein, 572 aa, Pseudomonas sp UW4
MPSKAYSYIRFSSPEQAKGDSYRRQRALAEAYCEKNGLELAAAKEYTFLDKGKSAYSGRHLDDEGQLRRFLDLVENGTIERGSYLLVESLDRLSREAVITALGAFLALLNKGIRIVTLSDNQTYTDESSDMQIIISIMHMSRAHSESSIKGQRVSAAWDHKKTLARTEGKPLGRACPYWLELVEGQYQPIAVRVETVQMIFELAIQGYGQSTIPRMLNERGIPVFGSRNRNHAGAWGNSSVSKLLSNRALLGEYQPTHILDGKRVNHGEPVANFFPAVIDETTFYQAQAVRAERRVFKPGRQSKQFNVFQGVTKCLKCRDAMHLVNKGRPPKGHTYLQCHSARKGVCDNGYVRIERAELVFREVLTKVDSLSLVQASAGQTMKELAAVNGRIQATDDRLRTSVELLTASPSSALATLVQNLENEQEALREEQQRLKEALAISQIESKEDFLDQLDLISFEGRHAANSLLKRLNVILSVGSSEPKWQLYQVRIGSPAGEMFGIIHVESEPVVLAFQDSTLARMELQGELTQKDTDFAADIQQMLKETVEKILEDNRELFARLGKKPPHESDSH

SEQ ID NO: 50132 - DNA, 50 bp, Pseudomonas sp UW4
  source 1..50: mol_type = genomic DNA
tgttttgtatccatacacaacctgctaacattgtgatacgttacaaaacc

SEQ ID NO: 50133 - DNA, 40 bp, Pseudomonas sp UW4
  source 1..40: mol_type = genomic DNA
agcgggtgcacataacctgctgttcagcgggccaccgggc

SEQ ID NO: 50134 - DNA, 50 bp, Pseudomonas sp UW4
  source 1..50: mol_type = genomic DNA
tgttttgtatccatacacaacctggtaacattgtgatacgttacaaaacc

SEQ ID NO: 50135 - DNA, 40 bp, Pseudomonas sp UW4
  source 1..40: mol_type = genomic DNA
agagggtgaacataaactggtggacaaagggccacatggt

SEQ ID NO: 50136 - protein, 405 aa, Pseudomonas nitrititolerans
MDLVYSLLVMIRAHEESDTKSKRVKAAIRRQCEGWKAGTYRGLIRNGKDPQWLRWDGGAWQLVPERVEAVRYALELYRQGDGATRAVRKMAERGYALSDRGVAGHQIYRLVKLPALRGAKRISIDGEDYLLEDYYPRLLSDEEFLELQGATNTRHGRRGASDIVGIVTGIGITWCGYCGTALTAQNMLSRAREDGTLLDGHRRLHCTSYSTGTGCKASSCSVVPVEKALLSYCSDQMNLTRLMEAVDDGQGVRRRLQVCRNKQAEVERQLSRVTDALLADDGAAAPLAFVRKARELEAELLQLQAEAAKLELEEAMQGRGHTPAAAEQWQRLADEAQDIYSPAREQLRQLVLDTFSRIVVYARGVVPDVKSKTIAMMLVSRTGQRVMLEVNRRSGAWVSRADRVG

SEQ ID NO: 50137 - DNA, 50 bp, Pseudomonas nitrititolerans
  source 1..50: mol_type = genomic DNA
tgtttagcaaatgaaacgtaggggcaccccaacgaaataaaccctatact

SEQ ID NO: 50138 - DNA, 40 bp, Pseudomonas nitrititolerans
  source 1..40: mol_type = genomic DNA
atcgaccgttgccttggggcaacccaggctcacaaatccg

SEQ ID NO: 50139 - DNA, 50 bp, Pseudomonas nitrititolerans
  source 1..50: mol_type = genomic DNA
tgtttagcaaatgaaacgtaggggagccccaacgaaataaaccctatact

SEQ ID NO: 50140 - DNA, 40 bp, Pseudomonas nitrititolerans
  source 1..40: mol_type = genomic DNA
gttaaccgtggccttggggagacccagactccacaatgct

SEQ ID NO: 50141 - protein, 536 aa, Brevibacillus laterosporus
MKKRVWALYRVSTDRQVTEEDIPMQRKAVHQFMQSKSNWVLEKELSELGVSGYKKSVSERDKIQLIKKGAENKEYDILLVWKDDRLGRNKFEIPFMLEYLKKNGIEVWSVVDGVLNKDERHEDSLVSFLRFWVAEGESKKTSTRVTEAIKQMNEEGKWTGARVPYGYEVYDTNQKHPKHEKTMKNIRINEEQSRIVKLMFLLVLEKGYGADRITNYLNECGIPSQSGVKWRNNVVRRILRNPIYKGEQRYGTTYSNNKLKPVEKIKLKPKRDDLVIISDEIFDEVQNIIDSRKIQKDESEYKVVAPSKYLLLNGLAKCGYCGSRLFVDSSTKTKIKKNGEKSSYTYWRYICREGTNHRETHPKCYFGAKKYDYETEEVIIETMKLIELNGLEEAVNESKKLKIENELIVRKNIIKEIDETKKQLEALKKLIIKIAMGESKLSEEYVEEQINNKEEELKEYQRRLDECNEKIADLENENKKTIKIKSELCNWEEKYRNADWDSKKTMLSKVLDSVEYGDVIKINFNIIINELLKQSM

SEQ ID NO: 50142 - DNA, 50 bp, Brevibacillus laterosporus
  source 1..50: mol_type = genomic DNA
aggcgtatttacataacgatgccatctgctacggtattgttatcgccccg

SEQ ID NO: 50143 - DNA, 40 bp, Brevibacillus laterosporus
  source 1..40: mol_type = genomic DNA
acctggaccacccgtgccatcgcctttcggatcaccggtt

SEQ ID NO: 50144 - DNA, 50 bp, Brevibacillus laterosporus
  source 1..50: mol_type = genomic DNA
aggcgtatttacataacgatgccagctgctacggtattgttatcgccccg

SEQ ID NO: 50145 - DNA, 40 bp, Brevibacillus laterosporus
  source 1..40: mol_type = genomic DNA
ccctggagcacccaagccagcgctggtaggatcatcggtg

SEQ ID NO: 50146 - protein, 560 aa, Clostridioides difficile
MPRIRKDKMARSYAEPFWKIGLYIRLSREDDNEDESESVINQEKILRDFVDSYFEPGTYVIVDVFADDGLTGTDTARPNFKRLEGCIVRKEVNCMIIKSLARGFRNLADQQKFLEEFIPINGARFICTGTPFIDTYANPHSASGLEVPIRGMFNEQFAATTSEEIRKTFKMKRERGEFIGAFAPYGYKKDPNDKNSLIVDEEAAEVVKSIYHWFVNEGYSKMGIAKRLNQMGEPNPEAYKKKKGFKYNNPNSDKNDGLWSASTIARILQNEVYTGVMVQGRNRVISYKVHKQINVPEEEWFVVPNTHEAIIDRETFEKAQALHKRDTRTAPGKQEVYLMSGFVRCADCKKAMRRKTARDIAYYSCRSYADKKICSKHSIRQDKLENAVLAALQMQIALVDRLAEEIERINNAPVINRESKRLSHSLKQAEKQLKQYNDASDSLYLDWKSGEITKEEYRRLKGKIAEQIQQLEANISYLKEEMQVMADGIGTDDPYLTAFLKYKNIQSLNRGIMVELVKAVWVHENGEITVDFNFADEYQRIIDYIENNHNVIRVIENKAI

SEQ ID NO: 50147 - DNA, 50 bp, Clostridioides difficile; identical to SEQ ID NO: 13407
  source 1..50: mol_type = genomic DNA

SEQ ID NO: 50148 - DNA, 40 bp, Clostridioides difficile
  source 1..40: mol_type = genomic DNA
aacagggccaacaggccctactggacctagaggcgcaacc

SEQ ID NO: 50149 - DNA, 50 bp, Clostridioides difficile
  source 1..50: mol_type = genomic DNA
tgttgtgcataaataaacggctcttctgccccgtcaatatatgcacaaca

SEQ ID NO: 50150 - DNA, 40 bp, Clostridioides difficile
  source 1..40: mol_type = genomic DNA
accagggcccacaggcacctctggccatggtggctctacc

SEQ ID NO: 50151 - protein, 533 aa, Pseudomonas aeruginosa
MTKKCFPYVRFSSTRQEDGSTRTRQNELIEAFVAKHGLEVDRHLEDAGTSAFHGKHAGSDGVLGQFLKEVRKGEIEKGSYLLIENFDRLSRDKIVRSNKIFTDLLFSGIKIVILDKNKIYDADNLDFGDWITALVEFERANAESQRKSDFSSKAWKLNRDKMHNGEIVTKKVPTWLKVENNTFIIDEVKIDRIRTLFRLSLSKGLQEATKEYNSLYGEKLAIHQAQYLLSNRKLIGEHQPKKIHYNENGRLIRKDEGNPIPNYYPQVIDEDLFLKVQSVITSRKPFSGRYSAQRYNVFRDLIFCRFCGGTIRYMNKGERDYFICTNSMTGKCGLKGQQSIRGKKVFGRFFKFTNGINIGTLLEENTNADEIKNELMKLENQKNKISNRLDDFKSQIKKMVMEGETIPETYNEIIVDLENSIIKYDAEIEIKNKELDKIISSFRSFYDLQGIDIEKIIYDKSQEAIEKRVQYNNELKNIIKKIQIDYLNDILHVEFSNGVNRHILNDELANEYNKDEIENSWASVVKSIAQKTN

SEQ ID NO: 50152 - DNA, 50 bp, Pseudomonas aeruginosa
  source 1..50: mol_type = genomic DNA
atggaaccttttgcagagcatatccagacgtgctatgttattggttccac

SEQ ID NO: 50153 - DNA, 40 bp, Pseudomonas aeruginosa; identical to SEQ ID NO: 24423
  source 1..40: mol_type = genomic DNA

SEQ ID NO: 50154 - DNA, 50 bp, Pseudomonas aeruginosa
  source 1..50: mol_type = genomic DNA
atggaaccttttgcagagcatatcgcgacgtgctatgttattggttccac

SEQ ID NO: 50155 - DNA, 40 bp, Pseudomonas aeruginosa
  source 1..40: mol_type = genomic DNA
cctcccggaggaggagatggcgtgatactcgcaaacacgg

SEQ ID NO: 50156 - protein, 533 aa, Pseudomonas aeruginosa; identical to SEQ ID NO: 27131

SEQ ID NO: 50157 - DNA, 50 bp, Pseudomonas aeruginosa; identical to SEQ ID NO: 3387
  source 1..50: mol_type = genomic DNA

SEQ ID NO: 50158 - DNA, 40 bp, Pseudomonas aeruginosa; identical to SEQ ID NO: 24423
  source 1..40: mol_type = genomic DNA

SEQ ID NO: 50159 - DNA, 50 bp, Pseudomonas aeruginosa
  source 1..50: mol_type = genomic DNA
atggaaccttttacagagcatatcgcgacgtgctatgttattggttccac

SEQ ID NO: 50160 - DNA, 40 bp, Pseudomonas aeruginosa; identical to SEQ ID NO: 50155
  source 1..40: mol_type = genomic DNA

SEQ ID NO: 50161 - protein, 533 aa, Pseudomonas aeruginosa
MTKKCFPYVRFSSTRQEDGSTRTRQNELIEAFVAKHGLEVDRHLEDAGTSAFHGKHAGSDGVLGQFLKEVRKGEIEKGSYLLIENFDRLSRDKIVRSNKIFTDLLFSGIKIVILDKNKIYDADNLDFGDWITALVEFERANAESQRKSDFSSKAWKLNRDKMHNGEIVTKKVPTWLKVENNTFIIDEVKIDRIRTLFRLSLSKGLQEATKEYNSLYGEKLAIHQAQYLLSNRKLIGEHQPQKIHYNENGRLIRKDEGNPIPNYYPQVIDEDLFLKVQSVITSRKPFSGRYSAQRYNVFRDLIFCRFCGGTIRYMNKGERDYFICTNSMTGKCGLKGQQSIRGKKVFGRFFKFTNGINIGTLLEENTNADEIKNELMKLENQKNKISNRLDDFKSQIKKMVMEGETIPETYNEIIVDLENSIIKYDAEIEIKNKELDKIISSFRSFYDLQGIDIEKIIYDKSQEAIEKRVQYNNELKNIIKKIQIDYLNDILHVEFSNGVNRHILNDELANEYNKDEIENSWASVVKSIAQKTN

SEQ ID NO: 50162 - DNA, 50 bp, Pseudomonas aeruginosa; identical to SEQ ID NO: 50152
  source 1..50: mol_type = genomic DNA

SEQ ID NO: 50163 - DNA, 40 bp, Pseudomonas aeruginosa; identical to SEQ ID NO: 24423
  source 1..40: mol_type = genomic DNA

SEQ ID NO: 50164 - DNA, 50 bp, Pseudomonas aeruginosa; identical to SEQ ID NO: 50154
  source 1..50: mol_type = genomic DNA

SEQ ID NO: 50165 - DNA, 40 bp, Pseudomonas aeruginosa; identical to SEQ ID NO: 50155
  source 1..40: mol_type = genomic DNA

SEQ ID NO: 50166 - protein, 546 aa, Pseudomonas aeruginosa
MTKKCYPYVRFSSTRQEDGSTRARQNELIDAFVAKHGLEVDRHLEDAGTSSYRGLNATDGVLGGFLRQVRLGEIEKGSYLLIENFDRLSRDKIVRSNQIFSDLLMAGIRIVVLDTNKIYESDNLNLGDWVNALVEFGRANAESQRKSDFSSKAWRENRDKMRSGEIVTKKVPTWLKVENDAFVIDIEKVERINTLFKLSLSSGLQEATKKYNELFNEKLAIHQTQYLLSNRKLIGEHSPQKIHYDENGNLKRKDEGEPIPNYYPAVVDEKLFYQVQEVIKSRKPFSGRYSNQRYNVFRDLIYCKWCGGTIRYMNKGERDYFICTNSMTGKCDLNSHFGQQSIRGKKLFSMFFAFTDNLNISALLEENTKADELKTELSKLVAQKDKLIPRIADFKEDVKRMILEGESIPSTYNEIITDFESTRTNLETEIEIKFKELNQIYTSEQSFEGLKENDVAEIIYDRTEAAVEKRIKYNNELKKIIKHIRVDFLNTVLEIEFFNDTLRFVDESGYTLEHPKVFDGVDYVGEIGNYDKELVSPADDLPPLKV

SEQ ID NO: 50167 - DNA, 50 bp, Pseudomonas aeruginosa
  source 1..50: mol_type = genomic DNA
gcggaaccttttacagagcatagccagacatgctatgttaaaggttccat

SEQ ID NO: 50168 - DNA, 40 bp, Pseudomonas aeruginosa; identical to SEQ ID NO: 24423
  source 1..40: mol_type = genomic DNA

SEQ ID NO: 50169 - DNA, 50 bp, Pseudomonas aeruginosa
  source 1..50: mol_type = genomic DNA
gcggaaccttttacagagcatagcgcgacatgctatgttaaaggttccat

SEQ ID NO: 50170 - DNA, 40 bp, Pseudomonas aeruginosa; identical to SEQ ID NO: 50155
  source 1..40: mol_type = genomic DNA

SEQ ID NO: 50171 - protein, 533 aa, Pseudomonas aeruginosa
MTKKCFPYVRFSSTRQEDGSTRTRQNGLIEAFVAKHGLEVDRHLEDAGTSAFHSKHAGSEGVLGQFLKEVRKGEIEKGSYLLIENFDRLSRDKIVRSNKIFTDLLFSGIKIVILDKNKIYDADNLDFGDWITALVEFERANAESQRKSDFSSKAWKLNRDKMHNGEIVTKKVPTWLKVVNNTFIIDEVKIDRIRTLFRLSLSKGLQEATKEYNSLYGEKLAIHQAQYLLSNRKLIGEHQPQKIHYNENGRLIRKDEGNPIPDYYPQVIDEDLFLKVQSVITSRKPFSGRYSAQRYNVFRDLIFCRFCGGTIRYMNKGERDYFICTNSMTGKCGLKGQQSIRGKKVFSRFFKFTNGINIGTLLEENTNADEIKNELMKLENQKTKISNRLDGFKSQIKKMILEGETIPETYNEIIVDLENSIIKLDDEIEIKNKELNSIISSFKSFYDLKEIDIETIIYDKSQEAIEKRVQYNNELKNIIKKIQIDYLNDILHVEFSNGVNRHILNDELANEYNKDEIENAWASVVKSMAKKTN

SEQ ID NO: 50172 - DNA, 50 bp, Pseudomonas aeruginosa
  source 1..50: mol_type = genomic DNA
atggcactattaacagaacatagccagacatgctatgttattggttccac

SEQ ID NO: 50173 - DNA, 40 bp, Pseudomonas aeruginosa; identical to SEQ ID NO: 24423
  source 1..40: mol_type = genomic DNA

SEQ ID NO: 50174 - DNA, 50 bp, Pseudomonas aeruginosa
  source 1..50: mol_type = genomic DNA
atggcactattaacagaacatagcgcgacatgctatgttattggttccac

SEQ ID NO: 50175 - DNA, 40 bp, Pseudomonas aeruginosa; identical to SEQ ID NO: 50155
  source 1..40: mol_type = genomic DNA

SEQ ID NO: 50176 - protein, 525 aa, Pseudomonas aeruginosa
MRFSSTRQEDGSTRTRQNGLIEAFVAKHGLEVDRHLEDAGTSAFHSKHAGSEGVLGQFLKEVRKGEIEKGSYLLIENFDRLSRDKIVRSNKIFTDLLFSGIKIVILDKNKIYDADNLDFGDWITALVEFERANAESQRKSDFSSKAWKLNRDKMHNGEIVTKKVPTWLKVENNTFIIDEVKIDRIRTLFRLSLSKGLQEATKEYNSLYGEKLAIHQAQYLLSNRKLIGEHQPQKIHYNENGRLIRKDEGNPIPNYYPQVIDEDLFLKVQSVITSRKPFSGRYSAQRYNVFRDLIFCRFCSGTIRYMNKGERDYFICTNSMTGKCGLKGQQSIRGKKVFSRFFKFTNGINIGTLLEENTNADEIKNELMKLENQKTKISNRLDGFKSQIKKMILEGETIPETYNEIIVDLENSIIKLDDEIEIKNKELNSIISSFKSFYDLKEIDIETIIYDKSQEAIEKRVQYNNELKNIIKKIQIDYLNDILHVEFSNGVNRHILNDELANEYNKDEIENAWASVVKSMAKKTN

SEQ ID NO: 50177 - DNA, 50 bp, Pseudomonas aeruginosa
  source 1..50: mol_type = genomic DNA
atggaaccttttacagagcatatccaggcgtgctatgttattagttccac

SEQ ID NO: 50178 - DNA, 40 bp, Pseudomonas aeruginosa; identical to SEQ ID NO: 24423
  source 1..40: mol_type = genomic DNA

SEQ ID NO: 50179 - DNA, 50 bp, Pseudomonas aeruginosa
  source 1..50: mol_type = genomic DNA
atggaaccttttacagagcatatcgcggcgtgctatgttattagttccac

SEQ ID NO: 50180 - DNA, 40 bp, Pseudomonas aeruginosa; identical to SEQ ID NO: 50155
  source 1..40: mol_type = genomic DNA

SEQ ID NO: 50181 - protein, 536 aa, Pseudomonas oleovorans
MTKKCFPYVRFSSTRQEDGSTRTRQNGLIEAFVAKHGLEVDRHLEDAGTSAFHSKHAGSEGVLGQFLKEVRKGEIEKGSYLLIENFDRLSRDKIVRSNKIFTDLLFSGIKIVILDKNKVYDADNLDFGDWITALVEFERANAESQRKSDFSSKAWKLNRDKMHNGEIVTKKVPTWLKVENNTFIIDEVKIDRIRTLFRLSLSKGLQEATKEYNTLYGEKLAIHQAQYLLSNRKLIGEHQPQKIHYNENGRLIRKDEGNPIPDYYPQVIDEDLFLKVQSVITSRKPFSGRYSAQRYNVFRDLIFCRFCGGTIRYMNKGERDYFICTNSMTGKCGLKGQQSIRGKKVFSRFFKFTNGINIGTLLEENTNADEIKNELMKLENQKTKISNRLDDFKSQIKKMIMEGETIPETYNEIIVDLENSIIKYDDEIEIKNKELDKIISSFRSFYDLKEIDIETIIYDKSQEAIEKRVQYNNELKNIIKKIQIDYLNDILHVEFSNGVNRHILNDELANEYNKDEIESSWASVVKSIANKANPQS

SEQ ID NO: 50182 - DNA, 50 bp, Pseudomonas oleovorans; identical to SEQ ID NO: 48247
  source 1..50: mol_type = genomic DNA

SEQ ID NO: 50183 - DNA, 40 bp, Pseudomonas oleovorans
  source 1..40: mol_type = genomic DNA
cctggcgaagcagtagatgcagccatgctcgcagccacgg

SEQ ID NO: 50184 - DNA, 50 bp, Pseudomonas oleovorans
  source 1..50: mol_type = genomic DNA
gcggaaccttttacagagcatatcgcgacgtgctatgttattggttccac

SEQ ID NO: 50185 - DNA, 40 bp, Pseudomonas oleovorans; identical to SEQ ID NO: 50155
  source 1..40: mol_type = genomic DNA

SEQ ID NO: 50186 - protein, 533 aa, Pseudomonas tohonis
MTKKCFPYVRFSSTRQEDGSTRTRQNELIEAFVAKHGLEVDRHLEDAGTSAFHGKHAGSDGVLGQFLKEVRKGEIEKGSYLLIENFDRLSRDKIVRSNKIFTDLLFSGIKIVILDKDKVYDADNLDFGDWITALVEFERANAESQRKSDFSSKAWKINRNKMHNGEIVTKKVPTWLKVENNTFIIDEVKIDRIRTLFRLSLSKGLQEATKEFNTLYGEKLAIHQAQYLLSNRKLIGEHQPQKIHYNENGRLIRKDEGNPIPNYYPQVIDEELFLKVQSVITSRKPFSGRYSAQRYNVFRDLIFCRFCGGTIRYMNKGERDYFICTNSMTGKCGLKGQQSIRGKKVFSRFFKFTNGINIGTLLEENTNADEIKNELMKLENQKTKISNRLDDFKSQIKKMILDGEVIPETYNEIVIDLESSIIKFDDEIEIKNKELNKIISSFKSFYDLKEIDIEKIIYDKSQEAIEKRVQYNNELKNIIKKIQIDYLNDILHVEFSNGVIRHILNDELANEYNKDEIENSWASVVKSIAQKTN

SEQ ID NO: 50187 - DNA, 50 bp, Pseudomonas tohonis; identical to SEQ ID NO: 3387
  source 1..50: mol_type = genomic DNA

SEQ ID NO: 50188 - DNA, 40 bp, Pseudomonas tohonis
  source 1..40: mol_type = genomic DNA
ccgcgcgtagcaatagatgcagccatgctcgcaaccacgg

SEQ ID NO: 50189 - DNA, 50 bp, Pseudomonas tohonis; identical to SEQ ID NO: 50159
  source 1..50: mol_type = genomic DNA

SEQ ID NO: 50190 - DNA, 40 bp, Pseudomonas tohonis; identical to SEQ ID NO: 50155
  source 1..40: mol_type = genomic DNA

SEQ ID NO: 50191 - protein, 539 aa, Pseudomonas aeruginosa
MTKKCYPYVRFSSTRQEDGSTRNRQNELIDAFVSKHGLEVDRHLEDAGTSAYHGKNAGSEGVLGKFLKEVRMGEIDKGSYLLIENFDRLSRDKIVRTNKIFTDLIFSGIKIVILDKNKIYEEENLDFADWVNALLEFERANAESKRKSDFSSKAWRINRGRMREGEIVTKKVPTWLKVENNAFVIDHEKVERINTLFKLSLSKGLQEATREYNDLYSEKLAIHQTQYLLSNRKLIGEHSPQKIHYDESGQLKRKDEGDSIPNYYPAVVDEQLFYQVQELIKSRRPFAGRYSNQRYNVFRDLIYCKWCGGTIRYMNKGERDYFICTNSMTGKCDLNSHFGQQSIRGKKLFGMFFAFTDGLNVSALLEENTNAKEIKTELLKLEAKRNQIANRLQDFKVEVKTMILDGKTIPSTYNEVIAELESNRNHIDSEIDTKTKELDQIYISEKSFMGLKDIDVSGIIYDRTNEAIEKRVQYNNELKKIIKHIRIDFLNTAIEIEFANKLCRLVDSDGNVIDYEIDHVPEDFTTIYNYDKDYINPDA

SEQ ID NO: 50192 - DNA, 50 bp, Pseudomonas aeruginosa
  source 1..50: mol_type = genomic DNA
gtggaacctatcattgaacacagccagacatgctacgctatacgttccat

SEQ ID NO: 50193 - DNA, 40 bp, Pseudomonas aeruginosa; identical to SEQ ID NO: 24423
  source 1..40: mol_type = genomic DNA

SEQ ID NO: 50194 - DNA, 50 bp, Pseudomonas aeruginosa
  source 1..50: mol_type = genomic DNA
gtggaacctatcattgaacacagcgcgacatgctacgctatacgttccat

SEQ ID NO: 50195 - DNA, 40 bp, Pseudomonas aeruginosa; identical to SEQ ID NO: 50155
  source 1..40: mol_type = genomic DNA

SEQ ID NO: 50196 - protein, 501 aa, Pseudomonas aeruginosa
MAKHGLEVDRHLEDAGTSAFHSKHAGSEGVLGQFLKEVRKGEIEKGSYLLIENFDRLSRDKIVRSNKIFTDLLFSGIKIVILDKNKIYDADNLDFGDWITALVEFERANAESQRKSDFSSKAWKLNRDKMHNGEIVTKKVPTWLKVENNTFIIDEVKIDRIRTLFRLSLSKGLQEATKEYNTLYGEKLAIHQAQYLLGNRKLIGEHQPQKIHYNENGRLIRKDEGNPIPDYYPQAIDEDLFLKVQSVITSRKPFSGRYSAQRYNVFRDLIFCRFCGGTIRYMNKGERDYFICTNSMTGKCGLKGQQSIRGKKVFGRFFKFTNGINIGTLLEENTNADEIKNELMKLQNQKTKISNRLDDFKSQIKKMIMEGETIPETYNEIIVDLENSIIKLDDEIEIKNKELNKIISSFKSFYDLKEIDIEKIIYDKSQEAIEKRVQYNNELKNIIKKIQIDYLNDILHVEFSNGVNRHILNDELANEYNKDEIENSWASVVKSIAQKTN

SEQ ID NO: 50197 - DNA, 50 bp, Pseudomonas aeruginosa; identical to SEQ ID NO: 36312
  source 1..50: mol_type = genomic DNA

SEQ ID NO: 50198 - DNA, 40 bp, Pseudomonas aeruginosa; identical to SEQ ID NO: 24423
  source 1..40: mol_type = genomic DNA

SEQ ID NO: 50199 - DNA, 50 bp, Pseudomonas aeruginosa
  source 1..50: mol_type = genomic DNA
atggaaccttttgcagagcatatcgcgacatgctatgttattggttccac

SEQ ID NO: 50200 - DNA, 40 bp, Pseudomonas aeruginosa; identical to SEQ ID NO: 50155
  source 1..40: mol_type = genomic DNA

SEQ ID NO: 50201 - protein, 536 aa, Pseudomonas aeruginosa
MTKKCFPYVRFSSTRQEDGSTRTRQNGLIEAFVAKHGLEVDRHLEDAGTSAFHSKHAGSEGVLGQFLKEVRKGEIEKGSYLLIENFDRLSRDKIVRSNKIFTDLLFSGIKIVILDKNKIYDADNLDFGDWITALVEFERANAESQRKSDFSSKAWKLNRDKMHNGEIVTKKVPTWLKVENNTFIIDEVKIDRIRTLFRLSLSKGLQEATKEYNSLYGEKLAIHQAQYLLSNRKLIGEHQPQKIHYNENGRLIRKDEGNPIPDYYPQVIDEDLFLKVQSVITSRKPFSGRYSAQRYNVFRDLIFCRFCGGTIRYMNKGERDYFICTNSMTGKCGLKGQQSIRGKKVFSRFFKFTNGINIGTLLEENTNADEIKNELMKLENQKTKISNRLDGFKSQIKKMILEGETIPETYNEIIVDLENSIIKLDDEIEIKNKELNKIISSFKSFYDLKEIDIEKIIYDKSQEAIEKRVQYNNELKNIIKKIQIDYLNDILHVEFSNGVNRHILNDELANEYNKDEIENAWASVVKSIANKTNPQS

SEQ ID NO: 50202 - DNA, 50 bp, Pseudomonas aeruginosa
  source 1..50: mol_type = genomic DNA
gcggaaccttttgcagagcatatccagacatgctatgttattggttccac

SEQ ID NO: 50203 - DNA, 40 bp, Pseudomonas aeruginosa; identical to SEQ ID NO: 24423
  source 1..40: mol_type = genomic DNA

SEQ ID NO: 50204 - DNA, 50 bp, Pseudomonas aeruginosa
  source 1..50: mol_type = genomic DNA
gcggaaccttttgcagagcatatcgcgacatgctatgttattggttccac

SEQ ID NO: 50205 - DNA, 40 bp, Pseudomonas aeruginosa; identical to SEQ ID NO: 50155
  source 1..40: mol_type = genomic DNA

SEQ ID NO: 50206 - protein, 533 aa, Pseudomonas aeruginosa
MTKKCFPYVRFSSTRQEDGSTRTRQNELIEAFVAKHGLEVDRHLEDAGTSAFHGKHAGSDGVLGQFLKEVRKGEIEKGSYLLIENFDRLSRDKIVRSNKIFTDLLFSGIKIVILDKNKIYDADNLDFGDWITALVEFERANAESQRKSDFSSKAWKLNRDKMHNGEIVTKKVPTWLKVENNTFIIDEVKIDRIRTLFRLSLSKGLQEATKEYNSLYGEKLAIHQAQYLLSNRKLIGEHQPQKIHYNENGRLIRKDEGNPIPNYYPQVIDEDLFLKVQSVITSRKPFSGRYSAQRYNVFRDLIFCRFCGGTIRYMNKGERDYFICTNSMTGKCGLKGQQSIRGNKVFGRFFKFTNGINIGTLLEENTNADEIKNELMKLENQKTKISNRLDDFKSQIKKMIMEGETIPETYNEIIVDLENSIIKYDDEIEIKNKELDKIISSFRSFYDLQGIDIEKIIYDKSQEAIEKRVQYNNELKNIIKKIQIDYLNDILHVEFSNGVNRHILNDELANEYNKDEIENSWASVVKSIAQRTN

SEQ ID NO: 50207 - DNA, 50 bp, Pseudomonas aeruginosa; identical to SEQ ID NO: 3387
  source 1..50: mol_type = genomic DNA

SEQ ID NO: 50208 - DNA, 40 bp, Pseudomonas aeruginosa; identical to SEQ ID NO: 24423
  source 1..40: mol_type = genomic DNA

SEQ ID NO: 50209 - DNA, 50 bp, Pseudomonas aeruginosa; identical to SEQ ID NO: 50159
  source 1..50: mol_type = genomic DNA

SEQ ID NO: 50210 - DNA, 40 bp, Pseudomonas aeruginosa; identical to SEQ ID NO: 50155
  source 1..40: mol_type = genomic DNA

SEQ ID NO: 50211 - protein, 533 aa, Pseudomonas aeruginosa
MTKKCFPYVRFSSTRQEDGSTRTRQNGLIEAFVAKHGLEVDRHLEDAGTSAFHSKHAGSEGVLGQFLKEVRKGEIEKGSYLLIENFDRLSRDKIVRSNKIFTDLLFSGIKIVILDKNKVYDADNLDFGDWITALVEFERANAESQRKSDFSSKAWKLNRDKMHNGEIVTKKVPTWLKVENNTFIIDEVKIDRIRTLFRLSLSKGLQEATKEYNTLYGEKLAIHQAQYLLGNRKLIGEHQPQKIHYNENGRLIRKDEGNPIPDYYPQVIDEDLFLKVQSVITSRKPFSGRYSAQRYNVFRDLIFCRFCGGTIRYMNKGERDYFICTNSMTGKCGLKGQQSIRGKKVFSRFFKFTNGINIGTLLEENTNADEIKNKLMKLENQKTKISNRLDGFKSQIKKMVLDGEAIPETYNEIIVDLENSIIKFDDEIEIQNKELNKIISSFKSFYDLKEIDIEKIIYDKSQEAIEKRIQYNNELKNIIKKIQIDYLNDILHVEFSNGVNRHILNDELANEYNKDEIENSWASVVKSIAQKTN

SEQ ID NO: 50212 - DNA, 50 bp, Pseudomonas aeruginosa
  source 1..50: mol_type = genomic DNA
atggaaccttttgcagagcatacccagacatgctatgttattagttccac

SEQ ID NO: 50213 - DNA, 40 bp, Pseudomonas aeruginosa; identical to SEQ ID NO: 24423
  source 1..40: mol_type = genomic DNA

SEQ ID NO: 50214 - DNA, 50 bp, Pseudomonas aeruginosa
  source 1..50: mol_type = genomic DNA
atggaaccttttgcagagcataccgcgacatgctatgttattagttccac

SEQ ID NO: 50215 - DNA, 40 bp, Pseudomonas aeruginosa; identical to SEQ ID NO: 50155
  source 1..40: mol_type = genomic DNA

SEQ ID NO: 50216 - protein, 573 aa, Bacillus halotolerans
MAEKLRVWASYRVSTDRQGAEGDDIPLQKSQCHAFAEKNGWEITKELTEKISGYKTAIEDRDTLKVIKQGAVDGEFDILLLYHSDRLGRQMEYSLYVASLYELGVQVWTVKEGEIKNQDHADSLMNFIRYWQSEGESKKTSMRVSDAMRQLNEEGAYLGGTIPYGYMLEDTGEKRNSKKDKTIKKLVVNPDEAKIVKMIFDMVTERSLGSSLIAQELNDMKVAKRGKQWRHNTITRMLRNPIYMGYKRYNTSKEVGNRGGTRKEVKRDGWLLQPFNSELVIVSKEQFKEVQETMDKRKKSGEDSADESNNTAPIQEINAVKKNRVPTSSKLLLSGMAVCGYCGKKLKADFSVKKNKRKDGTVNQYRTYKYTCHNARNNPAGHNQRAFGAVTIDQQVEEEVLSTISTINLDAFDAEKDSFDFEELDSRKIQLKELEGQYAEVSKALINVENLFDDVMSGKSSISLDFVSKKMEEYGGRKIELLGKIDALNKEIQEAEVKSTDLDKLKHQLDNWVETYKNCISLERRKTMLSKVVDEVVISKESIVIRFNITIEKALEGAYNSVNQGRVNDPLPT

SEQ ID NO: 50217 - DNA, 50 bp, Bacillus halotolerans
  source 1..50: mol_type = genomic DNA
gggagggttaatgacccactacccactggtaaagagtcaaatacccaccc

SEQ ID NO: 50218 - DNA, 40 bp, Bacillus halotolerans
  source 1..40: mol_type = genomic DNA
aggcggatgcccccacggtactggcacaggcggtccagga

SEQ ID NO: 50219 - DNA, 50 bp, Bacillus halotolerans
  source 1..50: mol_type = genomic DNA
gggagggttaatgacccactacccggtggtaaagagtcaaatacccaccc

SEQ ID NO: 50220 - DNA, 40 bp, Bacillus halotolerans
  source 1..40: mol_type = genomic DNA
agcagcatgtcctccagctggtggcccaggcggtccatga

SEQ ID NO: 50221 - protein, 549 aa, Clostridium innocuum; identical to SEQ ID NO: 17081

SEQ ID NO: 50222 - DNA, 50 bp, Clostridium innocuum
  source 1..50: mol_type = genomic DNA
agtttggaaaatgatgagcaagttgagacggtagcattattgtccaaact

SEQ ID NO: 50223 - DNA, 40 bp, Clostridium innocuum
  source 1..40: mol_type = genomic DNA
tccgcataccgtgcatgttgaatgcgtgtgtctgctagta

SEQ ID NO: 50224 - DNA, 50 bp, Clostridium innocuum
  source 1..50: mol_type = genomic DNA
agtttggaaaatgatgagcaagttgtgacggtagcattattgtccaaact

SEQ ID NO: 50225 - DNA, 40 bp, Clostridium innocuum
  source 1..40: mol_type = genomic DNA
tgagcctgccctgcaagttgtaagcctgtgtctgttagtc

SEQ ID NO: 50226 - protein, 558 aa, Escherichia coli
MRFSSAIQEKGTSIRRQRKLIEDWCKTKGVDLMNIYQDDGKSAWNVAKQDERKEFIQMQQDRQNNYLPEPIYLLVEDASRLSRLDFTEATAQMKRLIEMGFVVVFIATGKVYSPTNFRQLGDHISFLVDAETHHKASEQKSHHSRRNWKQLRDDAIATGKLISRSCARWCVPVATGAGLPNDSGRNTTFIFNDHAKTVKRIFAMRIAGDSMNTISAVLNAESIPTLTGKLNAWNQTTIHGILNNRAVTGEYVPSLKTVTEDAESIPGYYPRVVSDSDFMTVQSMREGKGRTSDSDNPTNINLFKGILKCVCGGAIISSSVTPERYGYYSCSMYRLKRCTCMETDHLGKGKGRGKKGTGVAIQRQLVDEAIVKGLLYQLPLLLSGSNNDNNILNELEAEAALIEQQLDNLEQNMMSMQSPRLQKRYAETEALLLAKHKQIDEHKSRMLTTACVETVNHLDLSTREGRVELNLIAKKYLKVITLDMKKKTCDIELHNGMKLFNYPVSYILDGDKWVERLQIIGETEFTFSGDETAAPLSVMLERATDAERHQFETEGGNL

SEQ ID NO: 50227 - DNA, 50 bp, Escherichia coli
  source 1..50: mol_type = genomic DNA
caattacgaaataaaattgcattggtcaacatacttgtgtatcgtaattg

SEQ ID NO: 50228 - DNA, 40 bp, Escherichia coli
  source 1..40: mol_type = genomic DNA
cagcacggtacggatgttagtcatggtcaggttgatgatc

SEQ ID NO: 50229 - DNA, 50 bp, Escherichia coli
  source 1..50: mol_type = genomic DNA
caattacgaaataaaattgcattgatcaacatacttgtgtatcgtaattg

SEQ ID NO: 50230 - DNA, 40 bp, Escherichia coli
  source 1..40: mol_type = genomic DNA
gagcagggaagggatggtgatcatgatgatgttgatgatg

SEQ ID NO: 50231 - protein, 516 aa, Streptomyces olivaceus
MSQPTCVIYDRLSRLFAEEAPDHRIAACKSYAEARGWKVVHVATDTNVSGASKLEDRPGMREVLAWLPRADYVLAAKLDRYARSVLEFQRLLRAADSTRTTIVTADGVVSPENASIIINVLAAFAEYERDMITARITESKKHFRSRGNHLGGLAPYGYAVSGPVNNKRWVIDETAAAVLREATDRLLRHGASLSGLARELNDRGTLPPADHARQRAGRELRGQRWHSTTLRDALYSPAVRGWLIQAVPGTKRGALTNQPVLDAAGNPVSAGPAILSAEDWSAVRALIDGKARGRGSDRTGKALLLHIARCSECDGPMYRQRRTVNGKDYSSYVCRKGVGKLGIHRPNVATANYIEEFVTADFLRRFGDFTLMRWAEPDGSAVLQLSEVTQQIERLAGNLAQLDPNGTAARVAIAQITALEARQAELQRESAHAVGRWVDTGTTIGSEWRQRDDEGRRALLADLGARLEIRPAVPGAPRRFDAGRLKLSYEGPAWRRGVDPLTASELEADLEEAAWN

SEQ ID NO: 50232 - DNA, 50 bp, Streptomyces olivaceus
  source 1..50: mol_type = genomic DNA
atgtacgcttaagcaagacatccgcccgagtgcctcgcttaacatcacat

SEQ ID NO: 50233 - DNA, 40 bp, Streptomyces olivaceus
  source 1..40: mol_type = genomic DNA
gtgcaccgtgccgcacccgccctcgtggccggtgttcagc

SEQ ID NO: 50234 - DNA, 50 bp, Streptomyces olivaceus
  source 1..50: mol_type = genomic DNA
atgtacgcttaagcaagacatccggacgagtgcctcgcttaacatcacat

SEQ ID NO: 50235 - DNA, 40 bp, Streptomyces olivaceus
  source 1..40: mol_type = genomic DNA
gtccccagtgccgctccaggactcgtggctggggttgggt

SEQ ID NO: 50236 - protein, 521 aa, Escherichia coli
MKVPVWCYARISTLKQIDGFGIQRQINTINQFLQCVELDHRLPFTLDVDNVTQMVAEGKSAFRDKNWNEKTKLGQYRKMVMDGVISDSVLIVENIDRLTRLDPYMAIEIISGLVNRGTTILEIETGMTYSRYIPESITVLVMQCNRANGESKRKSIMMQKSHANRYGKVSKVRPRWFDVVEIDGIKQYRPNETAKAIQRMYNDYINGIGAAHIVRTYGNTDNGKAWTLVTVLRALSDKRVADDARYPPIIDKELYDSVQALKAATNKKGNTHQKNMLNIFSGMSRCPVCNQSIIVKRNSHGNLFTVCLGKRTNKTCEARSISYFALERPLLTAIRGLDFSEVYKHEDKNVLTLRDQWIQNERDIAAFRERLSKASRYEKFVILDELETMNREQEELTIRLKSVDVPKDIQLTFDDDKLDLDTNYRIELNNRIKKLIQHINIVREDVTKSSYTIYCTIKYWTDVISHLVIIDVNIKRTGTGGTNTLTTTLRSVSSLNMDGTVSGNPDSDAWEYWKSFLDNLK

SEQ ID NO: 50237 - DNA, 50 bp, Escherichia coli
  source 1..50: mol_type = genomic DNA
cggtgtacattcttgcatgactacgaacagttatgttatgatgtacacca

SEQ ID NO: 50238 - DNA, 40 bp, Escherichia coli; identical to SEQ ID NO: 23868
  source 1..40: mol_type = genomic DNA

SEQ ID NO: 50239 - DNA, 50 bp, Escherichia coli
  source 1..50: mol_type = genomic DNA
cggtgtacattcttgcatgactacaaacagttatgttatgatgtacacca

SEQ ID NO: 50240 - DNA, 40 bp, Escherichia coli
  source 1..40: mol_type = genomic DNA
cagccccaccagaatcaataaaccatcaatcctgccacct

SEQ ID NO: 50241 - protein, 521 aa, Escherichia coli
MKVPVWCYARISTLKQIDGFGIQRQINTINQFLQYVVLDHRLPFTLDVDNVTQMVAEGKSAFRGGNWKPSTKLGKYRKMVMDGVISDSVLIVENIDRLTRLDPFQAVEIISGMINRGTTILEIETGMTYSRYIPESITVLTMQINRANGESKRKSIMMQKSHANRYGKVSKVRPRWFDVVEIDGIKQYRPNETAKAIQRMYNDYINGIGAAHIVRTYGNTDNGKAWTLVTVLRALSDKRVADDARYPPIIDKELYDRVQALKAATNKKGNTHQKNMLNIFSGISRCPVCNQSIIVKRNSHGNLFTVCLGKRTNKTCEARSISYFALERPLLTAIRGLDFSEVYKHEDKNVLTLRDQWIQNERDIAAFRERLNKASRHEKFAILDELEIMNREQEELTIRLKSVDVPKDIQLTFDDDKLDLDTNYRIELNNRIKKLIQYINIVREDVTKSSYTIYCTIKYWTDVISHLVIIDVNIKRTGTGGTNTLTTTLRSVSSLNMDGTVSGNPDSDAWEYWKSFLDNLK

SEQ ID NO: 50242 - DNA, 50 bp, Escherichia coli; identical to SEQ ID NO: 50237
  source 1..50: mol_type = genomic DNA

SEQ ID NO: 50243 - DNA, 40 bp, Escherichia coli; identical to SEQ ID NO: 23868
  source 1..40: mol_type = genomic DNA

SEQ ID NO: 50244 - DNA, 50 bp, Escherichia coli; identical to SEQ ID NO: 50239
  source 1..50: mol_type = genomic DNA

SEQ ID NO: 50245 - DNA, 40 bp, Escherichia coli; identical to SEQ ID NO: 50240
  source 1..40: mol_type = genomic DNA

SEQ ID NO: 50246 - protein, 528 aa, Escherichia coli
MKVPVWCYARISTLKQIDGFGIQRQINTINQFLQYVVLDHRLPFTLDVDNVTQMVAEGKSAFRGGNWKPSTKLGKYRKMVMDGVISDSVLIVENIDRLTRLDPFQAVEIISGMINRGTTILEIETGMTYSRYIPESITVLTMQINRANGESKRKSIMMQKSHANRYGKVSKVRPRWFDVVEIDGIKQYRPNETAKAIQRMYNDYINGIGAAHIVRTYGNTDNGKAWTLVTVLRALSDKRVADDARYPPIIDKELYDSVQALKAATNKKGNTHQKNMLNIFSGMSRCPVCNQSIIVKRNSHGNLFTVCLGKRTNKTCEARSISYFALERPLLTAIRGLDFSEVYKHEDKNVLTLRDQWIQNERDIAAFRERLNKASRHEKFAILDELEIMNREQEELTIRLKSVDVPKDIQLTFDDDKLDLDTNYRIELNNRIKKLIQYINIVREDVTKSSYTIYCTIKYWTDVISHLVIIDVNIKRTGTGGTNTLTTTLRSVSSLNMDGTVSGNPDSDAWEYWKSFLDGTIGLVDYKK

SEQ ID NO: 50247 - DNA, 50 bp, Escherichia coli; identical to SEQ ID NO: 50237
  source 1..50: mol_type = genomic DNA

SEQ ID NO: 50248 - DNA, 40 bp, Escherichia coli; identical to SEQ ID NO: 23868
  source 1..40: mol_type = genomic DNA

SEQ ID NO: 50249 - DNA, 50 bp, Escherichia coli; identical to SEQ ID NO: 50239
  source 1..50: mol_type = genomic DNA

SEQ ID NO: 50250 - DNA, 40 bp, Escherichia coli; identical to SEQ ID NO: 50240
  source 1..40: mol_type = genomic DNA

SEQ ID NO: 50251 - protein, 528 aa, Escherichia coli; identical to SEQ ID NO: 34446

SEQ ID NO: 50252 - DNA, 50 bp, Escherichia coli; identical to SEQ ID NO: 50237
  source 1..50: mol_type = genomic DNA

SEQ ID NO: 50253 - DNA, 40 bp, Escherichia coli; identical to SEQ ID NO: 23868
  source 1..40: mol_type = genomic DNA

SEQ ID NO: 50254 - DNA, 50 bp, Escherichia coli; identical to SEQ ID NO: 50239
  source 1..50: mol_type = genomic DNA

SEQ ID NO: 50255 - DNA, 40 bp, Escherichia coli; identical to SEQ ID NO: 50240
  source 1..40: mol_type = genomic DNA

SEQ ID NO: 50256 - protein, 532 aa, Shigella dysenteriae
MKVPVWCYARISTLKQVDGFGIQRQVNTINQFLQYVVLDHRLPFTLDIENITQMVAEGKSAFRGKNWNEKTKLGQYRKMVMDGVINDSVLIVENIDRLTRLDPFQAVEIISGLINRGTTILEIETGMTYSRYIPESITVLTMQINRANGESKRKSIMMQKSHANRYGNVSKVRPRWFDVVEIDGVKQYRPNETAKAIQRMYNDYINGIGAAQIVRTYGNTDNGKPWTLVTVLRALSDKRVADDARYPPIIDKDLYDRVQAMKASTNKKGNTHQKNMLNIFSGMSRCPVCNQSIIVKRNSHGNLFTVCLGKRTNKTCEARSIAYNALERPLLTAIRGLDFSEVYKHEDNNVLTLRDQWIQNERDIAAFRERLNKASRHEKFAILDELEIMNREQEELTIRLKSVDVPKDIQLTFDDDKLDLDTNYRIELNNRIKKLIQHINIVREDVSKSKYTIYCTIKYWSDALSHLVIIDVDIQRTGTGGTNTLTTTLRSVSSLSLDGTLSGDLDDDALEYWKNVVDGAMELATTMIDSRK

SEQ ID NO: 50257 - DNA, 50 bp, Shigella dysenteriae
  source 1..50: mol_type = genomic DNA
tggcgtacatactttaccaactacgaacagttgtgataggatgtacacca

SEQ ID NO: 50258 - DNA, 40 bp, Shigella dysenteriae; identical to SEQ ID NO: 23868
  source 1..40: mol_type = genomic DNA

SEQ ID NO: 50259 - DNA, 50 bp, Shigella dysenteriae
  source 1..50: mol_type = genomic DNA
tggcgtacatactttaccaactacaaacagttgtgataggatgtacacca

SEQ ID NO: 50260 - DNA, 40 bp, Shigella dysenteriae; identical to SEQ ID NO: 50240
  source 1..40: mol_type = genomic DNA

SEQ ID NO: 50261 - protein, 521 aa, Escherichia coli
MKVPVWCYARISTLKQIDGFGIQRQINTINQFLQCVELDHRLPFTLDVDNVTQMVAEGKSAFREKNWNEKTKLGQYRKLVMDGVVKESVLITESIDRLTRLDPYKAVEILSGLINRGTTILEVDTGMTYSRYIPESLSVLTMQINRANGESKRKSIMMQKSHANRYGKVSKVRPRWFDVVEIDGIKQYRPNETAKAIQRMYNDYINGIGAAHIVRTYGNTDNGKAWTLVTVLRALSDKRVADDARYPPIIDKELYDSVQALKAATNKKGNTHQKNMLNIFSGMSRCPVCNQSIIVKRNSHGNLFTVCLGKRTNKTCEARSISYFALERPLLTAIRGLDFSEVYKHEDKNVLTLRDQWIQNERDIAAFRERLSKASRYEKFVILDELETMNREQEELTIRLKSVDVPKDIQLTFDDDKLDLDTNYRIELNNRIKKLIQYINIVREDVTKSSYTIYCTIKYWTDVISHLVIIDVNIKRTGTGGTNTLTTTLRSVSSLNMDGTVSGNPDSDAWEYWKSFLDNLK

SEQ ID NO: 50262 - DNA, 50 bp, Escherichia coli; identical to SEQ ID NO: 50237
  source 1..50: mol_type = genomic DNA

SEQ ID NO: 50263 - DNA, 40 bp, Escherichia coli; identical to SEQ ID NO: 23868
  source 1..40: mol_type = genomic DNA

SEQ ID NO: 50264 - DNA, 50 bp, Escherichia coli; identical to SEQ ID NO: 50239
  source 1..50: mol_type = genomic DNA

SEQ ID NO: 50265 - DNA, 40 bp, Escherichia coli; identical to SEQ ID NO: 50240
  source 1..40: mol_type = genomic DNA

SEQ ID NO: 50266 - protein, 528 aa, Escherichia coli
MKVPVWCYARISTLKQIDGFGIQRQINTINQFLQYVVLDHRLPFTLDVDNVTQMVAEGKSAFRGGNWKPSTKLGKYRKMVMDGVISDSVLIVENIDRLTRLDPFQAVEIISGLINRGTTILEIETGMTYSRYIPESITVLTMQINRANGESKRKSIMMQKSHANRYGKVSKVRPRWFDVVEIDGIKQYRPNETAKAIQRMYNDYINGIGAAHIVRTYGNTDNGKAWTLVTVLRALSDKRVADDARYPPIIDKELYDSVQALKAATNKKGNTHQKNMLNIFSGMSRCPVCNQSIIVKRNSHGNLFTVCLGKRTNKTCEARSISYFALERPLLTAISGLDFSEVYKHEDKNVLTLRDQWIQNERDIAAFRERLNKASRHEKFAILDELEIMNREQEELTIRLKSVDVPKDIQLTFDDDKLDLDTNYRIELNNRIKKLIQHINIVREDVSKSKYTIYCTIKYWTDVISHLVIIDVNIKRTGTGGTNTLTTTLRSVSSLNMDGTVSGNPDSDAWEYWKSFLDGTIGLVDYKK

SEQ ID NO: 50267 - DNA, 50 bp, Escherichia coli; identical to SEQ ID NO: 50237
  source 1..50: mol_type = genomic DNA

SEQ ID NO: 50268 - DNA, 40 bp, Escherichia coli; identical to SEQ ID NO: 23868
  source 1..40: mol_type = genomic DNA

SEQ ID NO: 50269 - DNA, 50 bp, Escherichia coli; identical to SEQ ID NO: 50239
  source 1..50: mol_type = genomic DNA

SEQ ID NO: 50270 - DNA, 40 bp, Escherichia coli; identical to SEQ ID NO: 50240
  source 1..40: mol_type = genomic DNA

SEQ ID NO: 50271 - protein, 521 aa, Escherichia coli
MKVPVWCYARISTLKQIDGFGIQRQINTINQFLQCVELDHRLPFTLDVDNVTQMVAEGNSAYRIKNWNEKTKLGQYRKMVMDGVISDSVLIVENIDRLTRLDPYMAIEIISGLVNRGTTILEIETGMTYSRYIPESITVLVMQCNRANGESKRKSIMMQKSHANRYGKVSKVRPRWFDVVEIDGIKQYRPNETAKAIQRMYNDYINGIGAAHIVRTYGNTDNGKAWTLVTVLRALSDKRVADDARYPPIIDKKLYDSVQALKAATNKKGNTHQKNMLNIFSGMSRCPVCNQSIIVKRNSHGNLFTVCLGKRTNKTCSARSISYFALERPLLTAIRGLDFSEVYKHEDKNVLTLRDQWIQNERDIAAFRERLNKASRHEKFAILDELEIMNREQEELTIRLKSVDVPKDIQLTFDDDKLDLDTNYRIELNNRIKKLIQHINIVREDVTKSSYTIYCTIKYWTDVISHLVIIDVNIKRTGTGGTNTLTTTLRSVSSLNMDGTVSGNPDSDAWEYWKSFLDNLK

SEQ ID NO: 50272 - DNA, 50 bp, Escherichia coli
  source 1..50: mol_type = genomic DNA
cggtgtacattcttgtatgactacgaacagttatgttatgatgtacacca

SEQ ID NO: 50273 - DNA, 40 bp, Escherichia coli; identical to SEQ ID NO: 23868
  source 1..40: mol_type = genomic DNA

SEQ ID NO: 50274 - DNA, 50 bp, Escherichia coli
  source 1..50: mol_type = genomic DNA
cggtgtacattcttgtatgactacaaacagttatgttatgatgtacacca

SEQ ID NO: 50275 - DNA, 40 bp, Escherichia coli; identical to SEQ ID NO: 50240
  source 1..40: mol_type = genomic DNA

SEQ ID NO: 50276 - protein, 521 aa, Escherichia coli
MKVPVWCYARISTLKQIDGFGIQRQINTINQFLQCVELDHRLPFTLDVDNVTQMVAEGKSAFREKNWNEKTKLGQYRKLVMDGVVKESVLITESIDRLTRLDPYKAVEILSGLINRGTTILEVDTGMTYSRYIPESLSVLTMQINRANGESKRKSIMMQKSHANRYGKVSKVRPRWFDVVEIDDIKQYRPNETAKAIQRMYNDYINGIGAAHIVRTYGNTDNGKAWTLVTVLRALSDKRVADDARYPPIIDKDLYDSVQALKAATNKKGNTHQKNMLNIFSGMSRCPVCNQSIIVKRNSHGNLFTVCLGKRTNKTCSARSISYFALERPLLTAIRGLDFSEVYKHEDKNVLTLRDQWIQNERDIAAFRERLNKASRHEKFAILDELEIMNREQEELTIRLKSVDVPKDIQLTFDDDKLDLDTNYRIELNNRIKKLIQHINIVREDVSKSSYTIYCTIKYWTDVISHLVIIDVNIKRTGTGGTNTLTTTLRSVSSLNMDGTVSGNPDSDAWEYWKSFLDNLK

SEQ ID NO: 50277 - DNA, 50 bp, Escherichia coli
  source 1..50: mol_type = genomic DNA
cggtgtacattattgcatgactacgaacagttatgttatgatgtacacca

SEQ ID NO: 50278 - DNA, 40 bp, Escherichia coli; identical to SEQ ID NO: 23868
  source 1..40: mol_type = genomic DNA

SEQ ID NO: 50279 - DNA, 50 bp, Escherichia coli
  source 1..50: mol_type = genomic DNA
cggtgtacattattgcatgactacaaacagttatgttatgatgtacacca

SEQ ID NO: 50280 - DNA, 40 bp, Escherichia coli; identical to SEQ ID NO: 50240
  source 1..40: mol_type = genomic DNA

SEQ ID NO: 50281 - protein, 521 aa, Escherichia coli
MKVPVWCYARISTLKQIDGFGIQRQINTINQFLQYVVLDHRLPFTLDVDNVTQMVAEGKSAFRGKNWNEKTKLGQYRKMVMDGVINDSVLIVENIDRLTRLDTFQAVEIISGLVNRGTTILEIETGMTYSRYIPESITVLVMQCNRANGESKRKSIMMQKSHANRYGKVSKVRPRWFDVVEIDGIKQYRPNETAKAIQRMYNDYINGIGAAHIVRTYGNTDNGKAWTLVTVLRALSDKRVADDARYPPIIDKKLYDSVQALKAATNKKGNTHQKNMLNIFSGMSRCPVCNQSIIVKRNSHGNLFTVCLGKRNNKTCEARSFSYFALERPLLTAIRGLDFSEVYKHEDKNVLTLRDQWIQNERDIAAFRERLNKASRHEKFAILDELEIMNREQEELTIRLKSVDVPKDIQLTFDDDKLDLDTNYRIELNNRIKKLIQHINIVREDVTKSSYTIYCTIKYWTDVISHLVIIDVNIKRTGTGGTNTLTTTLRSVSSLNMDGTVSGNPDSDAWEYWKSFLDNLK

SEQ ID NO: 50282 - DNA, 50 bp, Escherichia coli; identical to SEQ ID NO: 50237
  source 1..50: mol_type = genomic DNA

SEQ ID NO: 50283 - DNA, 40 bp, Escherichia coli; identical to SEQ ID NO: 23868
  source 1..40: mol_type = genomic DNA

SEQ ID NO: 50284 - DNA, 50 bp, Escherichia coli; identical to SEQ ID NO: 50239
  source 1..50: mol_type = genomic DNA

SEQ ID NO: 50285 - DNA, 40 bp, Escherichia coli; identical to SEQ ID NO: 50240
  source 1..40: mol_type = genomic DNA

SEQ ID NO: 50286 - protein, 529 aa, Escherichia coli
MKVPVWSYARVSTLSQIDGFGIQRQVQTINQFIQYLVLDHRLPYTLDVDNITQMVAEGRSAFKGKNWNPKTKLGQYRKMVMDGVVPDSVLIVENIDRLTRLDPFQAVEIISGMINRGTTILEIETGMTYSRYIPESITVLTMQINRANGESKRKSIMMQKSHQNRYGNVSKVRPRWFDVVELDGVKQYRTNDTAKAIQRMYSDYANGVGAAHIVRTYGKTDNGKSWTLVTVLRALSDKRVADDPRYPPIIDKPLYEKVQAMKLATGKKGNTHQRNMLNIFSGMARCPVCKQSIIVKRNSHGGLYTVCLGKRTNKDCEAKGMAYNALERPLLTAIKGLDFSEVYNREESNVITLRDQWIQNERDIAAFRERLAKASRHEKFAILDELETISKEQEDLTIRLKSVDAPKDVQLDFNDDKLDLNVDYRIELNNRMKKLIQRIDVVRVDTSKSTYTIYCSIKYWTDAITHLVIIDAESVRTGKGGTNQLTTTLRSVSSISEDGTISGNPDLEALEYWEGVFEKATNMVIENLK

SEQ ID NO: 50287 - DNA, 50 bp, Escherichia coli
  source 1..50: mol_type = genomic DNA
tggtgtacatactttaccaactaggagcagtcgtgttagtatgtacacca

SEQ ID NO: 50288 - DNA, 40 bp, Escherichia coli; identical to SEQ ID NO: 23868
  source 1..40: mol_type = genomic DNA

SEQ ID NO: 50289 - DNA, 50 bp, Escherichia coli
  source 1..50: mol_type = genomic DNA
tggtgtacatactttaccaactagaagcagtcgtgttagtatgtacacca

SEQ ID NO: 50290 - DNA, 40 bp, Escherichia coli; identical to SEQ ID NO: 50240
  source 1..40: mol_type = genomic DNA

SEQ ID NO: 50291 - protein, 532 aa, Escherichia coli
MKVPVWSYARISTLKQVDGFGIQRQVNTINQFLQYVVLDHRLPFTLDTENITQMVAEGKSAFRGKNWNEKTKLGQYRKMVMDGVINDSVLIVENIDRLTRLDPFQAVEIISGLINRGTTILEIETGMTYSRYIPESITVLTMQINRANGESKRKSIMMQKSHANRYGKVSKVRPRWFDVVEIDGVKQYRPNETAKAIQRMYNDYINGIGAAQIVRTYGNTDNGKPWTLVTVLRALSDKRVADDARYPPIIDKDLYDRVQALKASTNKKGNTHQKNMLNIFSGMSRCPVCNQSIIVKRNSHGNLFTVCLGKRTNKTCEARSIAYNALERPLLTAIRGLDFSEVYKHEDNNVLTLRDQWIQNERDIAAFRERLNKASRHEKFAILDELEIMNREQEELTIRLKSVDVPKDIQLTFDDDKLDLDTNYRIELNNRIKKLIQHINIVREDVSKSKYTIYCTIKYWSDALSHLVIIDVDIQRTGTGGTNTLTTTLRSVSSLSLDGTLSGDLDDDALEYWKNVVDGAMALATTMIDSRK

SEQ ID NO: 50292 - DNA, 50 bp, Escherichia coli; identical to SEQ ID NO: 50257
  source 1..50: mol_type = genomic DNA

SEQ ID NO: 50293 - DNA, 40 bp, Escherichia coli; identical to SEQ ID NO: 23868
  source 1..40: mol_type = genomic DNA

SEQ ID NO: 50294 - DNA, 50 bp, Escherichia coli; identical to SEQ ID NO: 50259
  source 1..50: mol_type = genomic DNA

SEQ ID NO: 50295 - DNA, 40 bp, Escherichia coli; identical to SEQ ID NO: 50240
  source 1..40: mol_type = genomic DNA

SEQ ID NO: 50296 - protein, 528 aa, Escherichia coli
MKVPVWCYARISTLKQIDGFGIQRQINTINQFLQCVELDHRLPFTLDVDNVTQMVAEGKSAFRDKNWNEKTKLGQYRKLVMDGVISDSVLIVENIDRLTRLDPYMAIEIISGLVNRGTTILEIETGMTYSRYIPESITVLVMQCNRANGESKRKSIMMQKSHANRYGKVSKVRPRWFDVVEIDGIKQYRPNETAKAIQRMYNDYINGIGAAHIVRTYGNTDNGKAWTLVTVLRALSDKRVADDARYPPIIDKKLYDSVQALKAATNKKGNTHQKNMLNIFSGMSRCPVCNQSIIVKRNSHGNLFTVCLGKRTNKTCEARSISYFALERPLLTAIRGLDFSEVYKHEDKNVLTLRDQWIQNERDIAAFRERLSKASRYEKFVILDELETMNREQEELTIRLKSVDVPKDIQLTFDDDKLDLDTNYRIELNNRIKKLIQYINIVREDVTKSSYTIYCTIKYWTDVISHLVIIDVNIKRTGTGGTNTLTTTLRSVSSLNMDGTVSGDPDSDAWEYWKSFLDGTIGLVDYKK

SEQ ID NO: 50297 - DNA, 50 bp, Escherichia coli
  source 1..50: mol_type = genomic DNA
cggtgtacattcttgcatgactacgaacagttatgttatgatgtgcacca

SEQ ID NO: 50298 - DNA, 40 bp, Escherichia coli; identical to SEQ ID NO: 23868
  source 1..40: mol_type = genomic DNA

SEQ ID NO: 50299 - DNA, 50 bp, Escherichia coli
  source 1..50: mol_type = genomic DNA
cggtgtacattcttgcatgactacaaacagttatgttatgatgtgcacca

SEQ ID NO: 50300 - DNA, 40 bp, Escherichia coli; identical to SEQ ID NO: 50240
  source 1..40: mol_type = genomic DNA

SEQ ID NO: 50301 - protein, 528 aa, Escherichia coli
MKVPVWCYARISTLKQIDGFGIQRQINTINQFLQCVELDHRLPFTLDVDNVTQMVAEGKSAFREKNWNEKTKLGQYRKLVMDGVVKESVLITESIDRLTRLDPYKAVEILSGLINRGTTILEVDTGMTYSRYIPESLSVLTMQINRANGESKRKSIMMQKSHANRYGKVSKVRPRWFDVVEIDDIKQYRPNETAKAIQRMYNDYINGIGAAHIVRTYGNTDNGKAWTLVTVLRALSDKRVADDARYPPIIDKDLYDSVQALKAATNKKGNTHQKNMLNIFSGMSRCPVCNQSIIVKRNSHGNLFTVCLGKRTNKTCSARSISYFALERPLLTAIRGLDFSEVYKHEDKNVLTLRDQWIQNERDIAAFRERLNKASRHEKFAILDELEIMNREQEELTIRLKSVDVPKDIQLTFDDDKLDLDTNYRIELNNRIKKLIQHINIVREDVSKSSYTIYCTIKYWTDVISHLVIIDVNIKRTGTGGTNTLTTTLRSVSSLNMDGTVSGNPDSDAWEYWKSFLGSAIGLVDSND

SEQ ID NO: 50302 - DNA, 50 bp, Escherichia coli; identical to SEQ ID NO: 50237
  source 1..50: mol_type = genomic DNA

SEQ ID NO: 50303 - DNA, 40 bp, Escherichia coli; identical to SEQ ID NO: 23868
  source 1..40: mol_type = genomic DNA

SEQ ID NO: 50304 - DNA, 50 bp, Escherichia coli; identical to SEQ ID NO: 50239
  source 1..50: mol_type = genomic DNA

SEQ ID NO: 50305 - DNA, 40 bp, Escherichia coli; identical to SEQ ID NO: 50240
  source 1..40: mol_type = genomic DNA

SEQ ID NO: 50306 - protein, 528 aa, Escherichia coli; identical to SEQ ID NO: 34881

SEQ ID NO: 50307 - DNA, 50 bp, Escherichia coli
  source 1..50: mol_type = genomic DNA
cggtgtacattattgcatgactacgacagttgtgatatgatgtacaccac

SEQ ID NO: 50308 - DNA, 40 bp, Escherichia coli; identical to SEQ ID NO: 23868
  source 1..40: mol_type = genomic DNA

SEQ ID NO: 50309 - DNA, 50 bp, Escherichia coli
  source 1..50: mol_type = genomic DNA
cggtgtacattattgcatgactacaacagttgtgatatgatgtacaccac

SEQ ID NO: 50310 - DNA, 40 bp, Escherichia coli; identical to SEQ ID NO: 50240
  source 1..40: mol_type = genomic DNA

SEQ ID NO: 50311 - protein, 528 aa, Escherichia coli
MKVPVWCYARISTLKQIDGFGIQRQINTINQFLQYVVLDHRLPFTLDVDNVTQMVAEGKSAFRGGNWKPSTKLGKYRKMVMDGVISDSVLIVENIDRLTRLDPFQAVEIISGLINRGTTILEIETGMTYSRYIPESITVLTMQINRANGESKRKSIMMQKSHANRYGKVSKVRPRWFDVVEIDGIKQYRPNETAKAIQRMYNDYINGIGAAHIVRTYGNTDNGKAWTLVTVLRALSDKRVADDARYPPIIDKELYDSVQALKAATNKKGNTHQKNMLNIFSGMSRCPVCNQSIIVKRNSHGNLFTVCLGKRTNKTCEARSISYFALERPLLTAISGLDFSEVYKHEDKNVLTLRDQWIQNERDIAAFRERLNKASRHEKFAILDELEIMNREQEELTIRLKSVDVPKDIQLTFDDDKLDLDTNYRIELNNRIKKLIQHINIVREDVSKSSYTIYCTIKYWTDVISHLVIIDVNIKRTGTGGTNTLTTTLRSVSSLNMDGTVSGNPDSDAWEYWKSFLDGTIGLVDYKK

SEQ ID NO: 50312 - DNA, 50 bp, Escherichia coli; identical to SEQ ID NO: 50237
  source 1..50: mol_type = genomic DNA

SEQ ID NO: 50313 - DNA, 40 bp, Escherichia coli; identical to SEQ ID NO: 23868
  source 1..40: mol_type = genomic DNA

SEQ ID NO: 50314 - DNA, 50 bp, Escherichia coli; identical to SEQ ID NO: 50239
  source 1..50: mol_type = genomic DNA

SEQ ID NO: 50315 - DNA, 40 bp, Escherichia coli; identical to SEQ ID NO: 50240
  source 1..40: mol_type = genomic DNA

SEQ ID NO: 50316 - protein, 521 aa, Escherichia coli
MKVPVWCYARISTLKQIDGFGIQRQINTINQFLQCVELDHRLPFTLDVDNVTQMVAEGKSAFREKNWNEKTKLGQYRKLVMDGVVKESVLITESIDRLTRLDPYKAVEILSGLINRGTTILEVDTGMTYSRYIPESLSVLTMQINRANGESKRKSIMMQKSHANRYGKVSKVRPRWFDVVEIDGIKQYRPNETAKAIQRMYNDYINGIGAAHIVRTYGNTDNGKAWTLVTVLRALSDKRVADDARYPPIIDKKLYDSVQALKAATNKKGNTHQKNMLNIFSGMSRCPVCNQSIIVKRNSHGNLFTVCLGKRTNKTCEARSISYFALERPLLTAIRGLDFSEVYKHEDKNVLTLRDQWIQNERDIAAFRERLNKASRHEKFAILDELEIMNREQEELTIRLKSVDVPKDIQLTFDDDKLDLDTNYRIELNNRIKKLIQHINIVREDVSKSSYTIYCTIKYWTDVISHLVIIDVNIKRTGTGGTNTLTTTLRSVSSLNMDGTVSGNPDSDAWEYWKSFLDNLK

SEQ ID NO: 50317 - DNA, 50 bp, Escherichia coli; identical to SEQ ID NO: 50277
  source 1..50: mol_type = genomic DNA

SEQ ID NO: 50318 - DNA, 40 bp, Escherichia coli; identical to SEQ ID NO: 23868
  source 1..40: mol_type = genomic DNA

SEQ ID NO: 50319 - DNA, 50 bp, Escherichia coli; identical to SEQ ID NO: 50279
  source 1..50: mol_type = genomic DNA

SEQ ID NO: 50320 - DNA, 40 bp, Escherichia coli; identical to SEQ ID NO: 50240
  source 1..40: mol_type = genomic DNA

SEQ ID NO: 50321 - protein, 521 aa, Escherichia coli
MKVPVWCYARISTLKQVDGFGIQRQINTINQFLQYVVLDHRLPFTLDVDNVTQMVAEGKSAFRGGNWKPSTKLGKYRKMVMDGVISDSVLIVENIDRLTRLDPFQAVEIISGMINRGTTILEIETGMTYSRYIPESITVLTMQINRANGESKRKSIMMQKSHANRYGKVSKVRPRWFDVVEIDGIKQYRPNETAKAIQRMYNDYINGIGAAHIVRTYGNTDNGKPWTLVTVLRALSDKRVADDARYPPIIDKELYDRVQALKAATNKKGNTHQKNMLNIFSGMSRCPVCNQSIIVKRNSHGNLFTVCLGKRTNKTCSARSISYFALERPLLTAIRGLDFSEVYKHEDKNVLTLRDQWIQNERDIAAFRERLNKASRHEKFAILDELEIMNREQEELTIRLKSVDVPKDIQLTFDDDKLDLDTNYRIELNNRIKKLIQHINIVREDVSKSSYTIYCTIKYWTDVISHLVIIDVNIKRTGTGGTNTLTTTLRSVSSLNMDGTVSGNPDSDAWEYWKSFLDDLK

SEQ ID NO: 50322 - DNA, 50 bp, Escherichia coli; identical to SEQ ID NO: 50237
  source 1..50: mol_type = genomic DNA

SEQ ID NO: 50323 - DNA, 40 bp, Escherichia coli; identical to SEQ ID NO: 23868
  source 1..40: mol_type = genomic DNA

SEQ ID NO: 50324 - DNA, 50 bp, Escherichia coli; identical to SEQ ID NO: 50239
  source 1..50: mol_type = genomic DNA

SEQ ID NO: 50325 - DNA, 40 bp, Escherichia coli; identical to SEQ ID NO: 50240
  source 1..40: mol_type = genomic DNA

SEQ ID NO: 50326 - protein, 533 aa, Escherichia coli
MKAVPVWCYARISTLKQVDGFGIQRQVNTINQFLQCVVLDHRLPFTLDVNNVTQMVAEGKSAFKGKNWNPKTKLGQYRKMVMDGVISDSVLIVENIDRLTRLDPFQAVEIISGMINRGTTILEIETGMTYSRYIPESITVLTMQINRANGESKRKSIMMQKSHANRYGKVSKVRPRWFDVVEIDGIKQYRPNETAKAIQRMYNDYINGIGAAQIVRTYGNTDNGKPWTLVTVLRALSDKRVADDARYPPIIDKDLYDRVQALKAATNKKGNTHQKNMLNIFSGMSRCPVCNQSIIVKRNSHGNLFTVCLGKRTNKTCEARSIAYNALERPLLTAIRGLDFSEVYKHEDNNVLTLRDQWIQNERDIAAFRERLNKASRHEKFAILDELEIMNREQEELTIRLKSVDVPKDIQLTFDDDKLDLDTNYRIELNNRIKKLIQHINIVREDVSKSKYTIYCTIKYWSDALSHLVIIDVDIQRTGTGGTNTLTTTLRSVSSLSLDGTLSGDLDDDALEYWKNVVDGAMALATAMIDSRK

SEQ ID NO: 50327 - DNA, 50 bp, Escherichia coli
  source 1..50: mol_type = genomic DNA
tggcgtacatactttaccaactacgaacagttgtgataggatgtgcacca

SEQ ID NO: 50328 - DNA, 40 bp, Escherichia coli; identical to SEQ ID NO: 23868
  source 1..40: mol_type = genomic DNA

SEQ ID NO: 50329 - DNA, 50 bp, Escherichia coli
  source 1..50: mol_type = genomic DNA
tggcgtacatactttaccaactacaaacagttgtgataggatgtgcacca

SEQ ID NO: 50330 - DNA, 40 bp, Escherichia coli; identical to SEQ ID NO: 50240
  source 1..40: mol_type = genomic DNA

SEQ ID NO: 50331 - protein, 531 aa, Escherichia coli
MKVPVWSYARISTLKQVDGFGIQRQVNTINQFLQYVVLDHRLPFTLDTENITQMVAEGKSAFRGKNWNEKTKLGQYRKMVMDGVINDSVLIVENIDRLTRLDPFQAVEIISGLINRGTTILEIETGMTYSRYIPESITVLTMQINRANGESKRKSIMMQKSHQNRYGNVSKVRPRWFDVVEIDGVKQYRTNETAKAIQRMYNDYINGIGAAQIVRTYGNTDNGKPWTLVTVLRALSDKRVADDARYPPIIDKDLYDRVQALKASTNKKGNTHQKNMLNIFSGMSRCPVCNQSIIVKRNSHGNLFTVCLGKRTNKTCEARSIAYNALERPLLTAIRGLDFSEVYKHEDNNVLTLRDQWIQNERDIAAFRERLNKASRHEKFAILDELEIMNREQEELTIRLKSVDVPKDIQLTFDDDKLDLDTNYRIELNNRIKKLIQHINIVREDVSKSKYTIYCTIKYWSDALSHLVIIDVDIQRTGTGGTNTLTTTLRSVSSLSLDGTLSGDLDDDALEYWKNVVDGAMALATTMIDSR

SEQ ID NO: 50332 - DNA, 50 bp, Escherichia coli; identical to SEQ ID NO: 50257
  source 1..50: mol_type = genomic DNA

SEQ ID NO: 50333 - DNA, 40 bp, Escherichia coli; identical to SEQ ID NO: 23868
  source 1..40: mol_type = genomic DNA

SEQ ID NO: 50334 - DNA, 50 bp, Escherichia coli; identical to SEQ ID NO: 50259
  source 1..50: mol_type = genomic DNA

SEQ ID NO: 50335 - DNA, 40 bp, Escherichia coli; identical to SEQ ID NO: 50240
  source 1..40: mol_type = genomic DNA

SEQ ID NO: 50336 - protein, 528 aa, Escherichia coli; identical to SEQ ID NO: 34881

SEQ ID NO: 50337 - DNA, 50 bp, Escherichia coli; identical to SEQ ID NO: 50237
  source 1..50: mol_type = genomic DNA

SEQ ID NO: 50338 - DNA, 40 bp, Escherichia coli; identical to SEQ ID NO: 23868
  source 1..40: mol_type = genomic DNA

SEQ ID NO: 50339 - DNA, 50 bp, Escherichia coli; identical to SEQ ID NO: 50239
  source 1..50: mol_type = genomic DNA

SEQ ID NO: 50340 - DNA, 40 bp, Escherichia coli; identical to SEQ ID NO: 50240
  source 1..40: mol_type = genomic DNA

SEQ ID NO: 50341 - protein, 521 aa, Escherichia coli
MKVPVWCYARISTLKQIDGFGIQRQINTINQFLQCVELDHRLPFTLDVDNVTQMVAEGKSAFRDKNWNEKTKLGQYRKMVMDGVISDSVLIVENIDRLTRLDPYMAIEIISGLVNRGTTILEIETGMTYSRYIPESITVLVMQCNRANGESKRKSIMMQKSHANRYGKVSKVRPRWFDVVEIDGIKQYRPNETAKAIQRMYNDYINGIGAAHIVRTYGNTDNGKAWTLVTVLRALSDKRVADDARYPPIIDKKLYDSVQALKAATNKKGNTHQKNMLNIFSGMSRCPVCNQSIIVKRNSHGNLFTVCLGKRTNKTCEARSISYFALERPLLTAIRGLDFSEVYKHEDKNVLTLRDQWIQNERDIAAFRERLNKASRHEKFAILDELEIMNREQEELTIRLKSVDVPKDIQLTFDNDKLDLDTNYRIELNNRIKKLIQHINIVREDVSKSSYTIYCTIKYWTDVISHLVIIDVNIKRTGTGGTNTLTTTLRSVSSLNMDGTVSGNPDSDAWEYWKSFLDKLK

SEQ ID NO: 50342 - DNA, 50 bp, Escherichia coli; identical to SEQ ID NO: 50237
  source 1..50: mol_type = genomic DNA

SEQ ID NO: 50343 - DNA, 40 bp, Escherichia coli; identical to SEQ ID NO: 23868
  source 1..40: mol_type = genomic DNA

SEQ ID NO: 50344 - DNA, 50 bp, Escherichia coli; identical to SEQ ID NO: 50239
  source 1..50: mol_type = genomic DNA

SEQ ID NO: 50345 - DNA, 40 bp, Escherichia coli; identical to SEQ ID NO: 50240
  source 1..40: mol_type = genomic DNA

SEQ ID NO: 50346 - protein, 521 aa, Escherichia coli
MKVPVWCYARISTLKQIDGFGIQRQINTINQFLQYVVLDHRLPFTLDVDNVTQMVAEGKSAFRGKNWNEKTKLGQYRKMVMDGVINDSVLIVENIDRLTRLDTFQAVEIISGLVNRGTTILEIETGMTYSRYIPESITVLVMQCNRANGESKRKSIMMQKSHANRYGKVSKVRPRWFDVVEIDGIKQYRPNETAKAIQRMYNDYINGIGAAHIVRTYGNTDNGKAWTLVTVLRALSDKRVADDARYPPIIDKKLYDSVQALKAATNKKGNTHQKNMLNIFSGMSRCPVCNQSIIVKRNSHGNLFTVCLGKRTNKTCSARSISYFALERPLLTAIRGLDFSEVYKHEDKNVLTLRDQWIQNERDIAAFRERLNKASRHEKFAILDELEIMNREQEELTIRLKSVDVPKDIQLTFDDDKLDLDTNYRIELNNRIKKLIQHINIVREDVTKSSYTIYCTIKYWTDVISHLVIIDVNIKRTGTGGTNTLTTTLRSVSSLNMDGTVSGNPDSDAWEYWQSFLDNLK

SEQ ID NO: 50347 - DNA, 50 bp, Escherichia coli; identical to SEQ ID NO: 50272
  source 1..50: mol_type = genomic DNA

SEQ ID NO: 50348 - DNA, 40 bp, Escherichia coli; identical to SEQ ID NO: 23868
  source 1..40: mol_type = genomic DNA

SEQ ID NO: 50349 - DNA, 50 bp, Escherichia coli; identical to SEQ ID NO: 50274
  source 1..50: mol_type = genomic DNA

SEQ ID NO: 50350 - DNA, 40 bp, Escherichia coli; identical to SEQ ID NO: 50240
  source 1..40: mol_type = genomic DNA

SEQ ID NO: 50351 - protein, 532 aa, Escherichia coli
MKVPVWCYARISTLKQVDGFGIQRQVNTINQFLQYVVLDHRLPFTLDTENITQMVAEGKSAFRGKNWNEKTKLGQYRKMVMDGVINDSVLIVENIDRLTRLDPFQAVEIISGLINRGTTILEIETGMTYSRYIPESITVLTMQINRANGESKRKSIMMQKSHANRYGKVSKVRPRWFDVVEIDGVKQYRTNDTAKAIQRMYNDYINGIGAAQIVRTYGNTDNGKPWTLVTVLRALSDKRVADDARYPPIIDKDLYDRVQALKASTNKKGNTHQKNMLNIFSGMSRCPVCNQSIIVKRNSHGNLFTVCLGKRTNKTCEARSIAYNALERPLLTAIRGLDFSEVYKHEDNNVLTLRDQWIQNERDIAAFRERLNKASRHEKFAILDELEIMNREQEELTIRLKSVDVPKDIQLTFDDDKLDLDTNYRIELNNRIKKLIQHINIVREDVSKSKYTIYCTIKYWSDALSHLVIIDVDIQRTGTGGTNTLTTTLRSVSSLSLDGTLSGDLDDDALEYWKNVVDGAMALATTMIDSRK

SEQ ID NO: 50352 - DNA, 50 bp, Escherichia coli; identical to SEQ ID NO: 50257
  source 1..50: mol_type = genomic DNA

SEQ ID NO: 50353 - DNA, 40 bp, Escherichia coli; identical to SEQ ID NO: 23868
  source 1..40: mol_type = genomic DNA

SEQ ID NO: 50354 - DNA, 50 bp, Escherichia coli; identical to SEQ ID NO: 50259
  source 1..50: mol_type = genomic DNA

SEQ ID NO: 50355 - DNA, 40 bp, Escherichia coli; identical to SEQ ID NO: 50240
  source 1..40: mol_type = genomic DNA

SEQ ID NO: 50356 - protein, 532 aa, Escherichia coli
MKVPVWCYARISTLKQVDGFGIQRQVNTINQFLQYVVLDHRLPFTLDTENITQMVAEGKSAFRGKNWNEKTKLGQYRKMVMDGVINDSVLIVENIDRLTRLDPFQAVEIISGLINRGTTIIEIETGMTYSRYIPESITVLTMQINRSNGESRRKSIMMQKSHANRYGKVSKVRPRWFDVVEIDGVKQYRPNETAKAIQRMYNDYINGIGAAQIVRTYGNTDNGKPWTLVTVLRALSDKRVADDARYPPIIDKDLYDRVQALKAATNKKGNTHQKNMLNIFSGMSRCPVCNQSIIVKRNSHGNLFTVCLGKRTNKTCEARSIAYNALERPLLTAIRGLDFSEVYKHEDNNVLTLRDQWIQNERDIAAFRERLNKASRHEKFAILDELEIMNREQEELTIRLKSVDVPKDIQLTFDDDKLDLDTNYRIELNNRIKKLIQHINIVREDVSKSKYTIYCTIKYWSDALSHLVIIDVDIQRTGTGGTNTLTTTLRSVSSLSLDGTLSGDLDDDALEYWKNVVDGAMALATAMIDSRK

SEQ ID NO: 50357 - DNA, 50 bp, Escherichia coli; identical to SEQ ID NO: 50257
  source 1..50: mol_type = genomic DNA

SEQ ID NO: 50358 - DNA, 40 bp, Escherichia coli; identical to SEQ ID NO: 23868
  source 1..40: mol_type = genomic DNA

SEQ ID NO: 50359 - DNA, 50 bp, Escherichia coli; identical to SEQ ID NO: 50259
  source 1..50: mol_type = genomic DNA

SEQ ID NO: 50360 - DNA, 40 bp, Escherichia coli; identical to SEQ ID NO: 50240
  source 1..40: mol_type = genomic DNA

SEQ ID NO: 50361 - protein, 532 aa, Escherichia coli
MKVPVWCYARISTLKQVDGFGIQRQVNTINQFLQYVVLDHRLPFTLDTENITQMVAEGKSAFRGKNWNEKTKLGQYRKMVMDGVINDSVLIVENIDRLTRLDPFQAVEIISGLINRGTTIIEIETGMTYSRYIPESITVLTMQINRSNGESRRKSIMMQKSHANRYGKVSKVRPRWFDVVEIDGVKQYRPNETAKAIQRMYNDYINGIGAAQIVRTYGNTDNGKPWTLVTVLRTLSDKRVADDARYPPIIDKDLYDRVQALKASTNKKGNTHQKNMLNIFSGMSRCPVCNQSIIVKRNSHGNLFTVCLGKRTNKTCEARSISYFALERPLLTAIRGLDFSEVYKHEDNNVLTLRDQWIQNERDIAAFRERLNKASRHEKFAILDELEIMNREQEELTIRLKSVDVPKDIQLTFDDDKLDLDTNYRIELNNRIKKLIQHINIVREDVSKSKYTIYCTIKYWSDALSHLVIIDVDIQRTGTGGTNTLTTTLRSVSSLSLDGTLSGDLDDDALEYWKNVVDGAMALATAMIDSRK

SEQ ID NO: 50362 - DNA, 50 bp, Escherichia coli; identical to SEQ ID NO: 50257
  source 1..50: mol_type = genomic DNA

SEQ ID NO: 50363 - DNA, 40 bp, Escherichia coli; identical to SEQ ID NO: 23868
  source 1..40: mol_type = genomic DNA

SEQ ID NO: 50364 - DNA, 50 bp, Escherichia coli; identical to SEQ ID NO: 50259
  source 1..50: mol_type = genomic DNA

SEQ ID NO: 50365 - DNA, 40 bp, Escherichia coli; identical to SEQ ID NO: 50240
  source 1..40: mol_type = genomic DNA

SEQ ID NO: 50366 - protein, 521 aa, Escherichia coli
MKVPVWCYARISTLKQIDGFGIQRQINTINQFLQCVELDHRLPFTLDVDNVTQMVAEGKSAFRDKNWNEKTKLGQYRKMVMDGVISDSVLIVENIDRLTRLDPYMAIEIISGLVNRGTTILEIETGMTYSRYIPESITVLVMQCNRANGESKRKSIMMQKSHANRYGKVSKVRPRWFDVVEIDGIKQYRPNETAKAIQRMYNDYINGIGAAHIVRTYGNTDNGKAWTLVTVLRALSDKRVADDARYPPIIDKKIYDSVQALKAATNKKGNTHQKNMLNIFSGMSRCPVCNQSIIVKRNSHGNLFTVCLGKRTNKTCEARSISYFALERPLLTAIRGLDFSEVYKHEDKNVLTLRDQWIQNERDIAAFRERLSKASRYEKFVILDELETMNREQEELTIRLKSVDVPKDIQLTFDDDKLDLDTNYRIELNNRIKKLIQYINIVREDVTKSSYTIYCTIKYWTDVISHLVIIDVNIKRTGTGGTNTLTTTLRSVSSLNMDGTVSGNPDSDAWEYWKSFLDNLK

SEQ ID NO: 50367 - DNA, 50 bp, Escherichia coli; identical to SEQ ID NO: 50237
  source 1..50: mol_type = genomic DNA

SEQ ID NO: 50368 - DNA, 40 bp, Escherichia coli; identical to SEQ ID NO: 23868
  source 1..40: mol_type = genomic DNA

SEQ ID NO: 50369 - DNA, 50 bp, Escherichia coli; identical to SEQ ID NO: 50239
  source 1..50: mol_type = genomic DNA

SEQ ID NO: 50370 - DNA, 40 bp, Escherichia coli; identical to SEQ ID NO: 50240
  source 1..40: mol_type = genomic DNA

SEQ ID NO: 50371 - protein, 532 aa, Escherichia coli
MKVPVWCYARISTLKQVDGFGIQRQVNTINQFLQYVVLDHRLPFTLDTENITQMVAEGKSAFRGKNWNEKTKLGQYRKMVMDGVINDSVLIVENIDRLTRLDPFQAVEIISGLINRGTTIIEIETGMTYSRYIPESITVLTMQINRSNGESRRKSIMMQKSHANRYGKVSKVRPRWFDVVEIDGVKQYRTNDTAKAIQRMYNDYINGIGAAQIVRTYGNTDNGKPWTLVTVLRALSDKRVADDARYPPIIDKDLYDRVQALKAATNKKGNTHQKNMLNIFSGMSRCPVCNQSIIVKRNSHGNLFTVCLGKRTNKTCEARSIAYNALERPLLTAIRGLDFSEVYKHEDKNVLTLRDQWIQNERDIAAFRERLNKASRHEKFAILDELEIMNREQEELTIRLKSVDVPKDIQLTFDDDKLDLDTNYRIELNNRIKKLIQHINIVREDVSKSKYTIYCTIKYWSDALSHLVIIDVDIQRTGTGGTNTLTTTLRSVSSLSLDGTLSGDLDDDALEYWKNVVDGAMALATTMIDSRK

SEQ ID NO: 50372 - DNA, 50 bp, Escherichia coli; identical to SEQ ID NO: 50257
  source 1..50: mol_type = genomic DNA

SEQ ID NO: 50373 - DNA, 40 bp, Escherichia coli; identical to SEQ ID NO: 23868
  source 1..40: mol_type = genomic DNA

SEQ ID NO: 50374 - DNA, 50 bp, Escherichia coli; identical to SEQ ID NO: 50259
  source 1..50: mol_type = genomic DNA

SEQ ID NO: 50375 - DNA, 40 bp, Escherichia coli; identical to SEQ ID NO: 50240
  source 1..40: mol_type = genomic DNA

SEQ ID NO: 50376 - protein, 521 aa, Escherichia coli
MKVPVWCYARISTLKQIDGFGIQRQINTINQFLQCVELDHRLPFTLDVDNVTQMVAEGKSAFRDKNWNEKTKLGQYRKMVMDGVISDSVLIVENIDRLTRLDPYMAIEIISGLVNRGTTILEIETGMTYSRYIPESITVLVMQCNRANGESKRKSIMMQKSHANRYGKVSKVRPRWFDVVEIDGIKQYRPNETAKAIQRMYNDYINGIGAAHIVRTYGNTDNGKAWTLVTVLRALSDKRVADDARYPPIIDKKLYDSVQALKAATNKKGNTHQKNMLNIFSGMSRCPVCNQSIIVKRNSHGNLFTVCLGKRTNKTCSARSISYFALERPLLTAIRGLDFSEVYKHEDKNVLTLRDQWIQNERDIAAFRERLNKASRHEKFAILDELEIMNREQEELTIRLKSVDVPKDIQLTFDDDKLDLDTNYRIELNNRIKKLIQHINIVREDVSKSSYTIYCTIKYWTDVISHLVIIDVNIKRTGTGGTNTLTTTLRSVSSLNMDGTVSGNPDSDAWEYWKSFLDNIK

SEQ ID NO: 50377 - DNA, 50 bp, Escherichia coli; identical to SEQ ID NO: 50237
  source 1..50: mol_type = genomic DNA

SEQ ID NO: 50378 - DNA, 40 bp, Escherichia coli; identical to SEQ ID NO: 23868
  source 1..40: mol_type = genomic DNA

SEQ ID NO: 50379 - DNA, 50 bp, Escherichia coli; identical to SEQ ID NO: 50239
  source 1..50: mol_type = genomic DNA

SEQ ID NO: 50380 - DNA, 40 bp, Escherichia coli; identical to SEQ ID NO: 50240
  source 1..40: mol_type = genomic DNA

SEQ ID NO: 50381 - protein, 529 aa, Escherichia coli
MKAVRVWCYARISTLKQVDGFGIQRQVNTINQFLQCVVLDHRLPFTLDTQNVTQMVAEGKSAFRGKNWNEKTKLGQYRKMVMDGVIGDSILIVENIDRLTRLDPYKAVEIISGMINRGTTILEVETGMTYSRYIPESITVLTMQINRANSESKRKSIMMQKSHANRYGKVSKVRPRWFDVVEIDGIKQYRPNVTAKAIQRMYNDYINGIGAAHIVRTYGNTDNGKAWTLVTVLRALSDKRVADDARYPPIIDKKLYDSVQALKAATNKKGNTHQKNMLNIFSGMSRCPVCNQSIIVKRNSHGNLFTVCLGKRTNKTCEARSIAYFALERPLLTAIRGLDFSEVYKHEDKNVLTLRDQWIQNERDIAAFRERLNKASRHEKFAILDELEIMNREQEELTIRLKSVDVPKDIQLTFDDDKLDLDTNYRIELNNRIKKLIQSINILREDVSKSSYIIYCTIKYWTDVISHLVIIDVDIKRTGSGGTNTLTTTLKSVSSLNMDGTISGNPDSYAWEYWKSFLDSAIGLVDSND

SEQ ID NO: 50382 - DNA, 50 bp, Escherichia coli
  source 1..50: mol_type = genomic DNA
cggtgtacattcttgcatgactacgaacagttgtgataggatgtgcacca

SEQ ID NO: 50383 - DNA, 40 bp, Escherichia coli; identical to SEQ ID NO: 23868
  source 1..40: mol_type = genomic DNA

SEQ ID NO: 50384 - DNA, 50 bp, Escherichia coli
  source 1..50: mol_type = genomic DNA
cggtgtacattcttgcatgactacaaacagttgtgataggatgtgcacca

SEQ ID NO: 50385 - DNA, 40 bp, Escherichia coli; identical to SEQ ID NO: 50240
  source 1..40: mol_type = genomic DNA

SEQ ID NO: 50386 - protein, 521 aa, Escherichia coli
MKVPVWCYARISTLKQIDGFGIQRQINTINQFLQYVVLDHRLPFTLDVDNVTQMVAEGKSAFRGGNWKPSTKLGKYRKMVMDGVISDSVLIVENIDRLTRLDPFQAVEIISGMINRGTTILEIETGMTYSRYIPESITVLTMQINRANGESKRKSIMMQKSHANRYGKVSKVRPRWFDVVEIDGIKQYRPNETAKAIQRMYNDYINGIGAAHIVRTYGNTDNGKAWTLVTVLRALSDKRVADDARYPPIIDKELYDSVQALKAATNKKGNTHQKNMLNIFSGMSRCPVCNQSIIVKRNSHGNLFTVCLGKRTNKTCEARSISYFALERPLLTAIRGLDFSEVYKHEDKNVLTLRDQWIQNERDIAAFRERLNKASRHEKFAILDELEIMNREQEELTIRLKSVDVPKDIQLTFDDDKLDLDTNYRIELNNRIKKLIQYINIVREDVTKSSYTIYCTIKYWTDVISHLVIIDVNIKRTGTGGTNTLTTTLRSVSSLNMDGTVSGNPDSDAWEYWKSFLDNLK

SEQ ID NO: 50387 - DNA, 50 bp, Escherichia coli; identical to SEQ ID NO: 50237
  source 1..50: mol_type = genomic DNA

SEQ ID NO: 50388 - DNA, 40 bp, Escherichia coli; identical to SEQ ID NO: 23868
  source 1..40: mol_type = genomic DNA

SEQ ID NO: 50389 - DNA, 50 bp, Escherichia coli; identical to SEQ ID NO: 50239
  source 1..50: mol_type = genomic DNA

SEQ ID NO: 50390 - DNA, 40 bp, Escherichia coli; identical to SEQ ID NO: 50240
  source 1..40: mol_type = genomic DNA

SEQ ID NO: 50391 - protein, 521 aa, Escherichia coli
MKVPVWCYARISTLKQIDGFGIQRQINTINQFLQCVELDHRLPFTLDVDNVTQMVAEGKSAFRDKNWNEKTKLGQYRKLVMDGVVKESVLITESIDRLTRLDPYKAVEILSGLINRGTTILEVDTGMTYSRYIPESLSVLTMQINRANGESRRKSIMMQKSHANRYGKVSKVRPRWFDVVEIDGIKQYRPNETAKAIQRMYNDYINGIGAAHIVRTYGNTDNGKAWTLVTVLRALSDKRVADDARYPPIIDKKLYDSVQALKAATNKKGNTHQKNMLNIFSGMSRCPVCNQSIIVKRNSHGNLFTVCLGKRTNKTCEARSISYFALERPLLTAIRDLDFSEVYKHEDKNVLTLRDQWIQNERDIAAFRERLSKASRYEKFVILDELETMNREQEELTIRLKSVDVPKDIQLTFDDDKLDLDTNYRIELNNRIKKLIQYINIVREDVTKSSYTIYCTIKYWTDVISHLVIIDVNIKRTGTGGTNTLTTTLRSVSSLNMDGTVSGNPDSDAWEYWKSFLDNLK

SEQ ID NO: 50392 - DNA, 50 bp, Escherichia coli; identical to SEQ ID NO: 50237
  source 1..50: mol_type = genomic DNA

SEQ ID NO: 50393 - DNA, 40 bp, Escherichia coli; identical to SEQ ID NO: 23868
  source 1..40: mol_type = genomic DNA

SEQ ID NO: 50394 - DNA, 50 bp, Escherichia coli; identical to SEQ ID NO: 50239
  source 1..50: mol_type = genomic DNA

SEQ ID NO: 50395 - DNA, 40 bp, Escherichia coli; identical to SEQ ID NO: 50240
  source 1..40: mol_type = genomic DNA

SEQ ID NO: 50396 - protein, 528 aa, Escherichia coli; identical to SEQ ID NO: 34446

SEQ ID NO: 50397 - DNA, 50 bp, Escherichia coli
  source 1..50: mol_type = genomic DNA
cggtgtacattcttgcatgactacgacagttatgttatgatgtacaccac

SEQ ID NO: 50398 - DNA, 40 bp, Escherichia coli; identical to SEQ ID NO: 23868
  source 1..40: mol_type = genomic DNA

SEQ ID NO: 50399 - DNA, 50 bp, Escherichia coli
  source 1..50: mol_type = genomic DNA
cggtgtacattcttgcatgactacaacagttatgttatgatgtacaccac

SEQ ID NO: 50400 - DNA, 40 bp, Escherichia coli; identical to SEQ ID NO: 50240
  source 1..40: mol_type = genomic DNA

SEQ ID NO: 50401 - protein, 521 aa, Escherichia coli
MKVPVWCYARISTLKQVDGFGIQRQINTINQFLQYVVLDHRLPFTLDVDNVTQMVAEGKSAFRGGNWKPSTKLGKYRKMVMDGVISDSVLIVENIDRLTRLDPFQAVEIISGMINRGTTILEIETGMTYSRYIPESITVLTMQINRANGESKRKSIMMQKSHANRYGKVSKVRPRWFDVVEIDGIKQYRPNETAKAIQRMYNDYINGIGAAHIVRTYGNTDNGKAWTLVTVLRALSDKRVADDARYPPIVDKELYDRVQALKAATNKKGNTHQKNMLNIFSGMSRCPVCNQSIIVKRNSHGNLFTVCLGKRTNKTCEARSISYFALERPLLTAISGLDFSEVYKHEDKNVLTLRDQWIQNERDIAAFRERLNKASRHEKFAILDELEIMNREQEELTIRLKSVDVPKDIQLTFDDDKLDLDTNYRIELNNRIKKLIQHINIVREDVSKSSYTIYCTIKYWTDVISHLVIIDVNIKRTGTGGTNTLTTTLRSVSSLNMDGTVSGNPDSDAWEYWKSFLDNLK

SEQ ID NO: 50402 - DNA, 50 bp, Escherichia coli; identical to SEQ ID NO: 50237
  source 1..50: mol_type = genomic DNA

SEQ ID NO: 50403 - DNA, 40 bp, Escherichia coli; identical to SEQ ID NO: 23868
  source 1..40: mol_type = genomic DNA

SEQ ID NO: 50404 - DNA, 50 bp, Escherichia coli; identical to SEQ ID NO: 50239
  source 1..50: mol_type = genomic DNA

SEQ ID NO: 50405 - DNA, 40 bp, Escherichia coli; identical to SEQ ID NO: 50240
  source 1..40: mol_type = genomic DNA

SEQ ID NO: 50406 - protein, 521 aa, Escherichia coli
MKVPVWCYARISTLKQIDGFGIQRQINTINQFLQCVELDHRLPFTLDVDNVTQMVAEGNSAYRIKNWNEKTKLGQYRKMVMDGVISDSVLIVENIDRLTRLDPYMAIEIISGMINRGTTILEIETGMTYSRYIPESITVLTMQINRANGESKRKSIMMQKSHANRYGKVSKVRPRWFDVVEIDGIKQYRPNETAKAIQRMYNDYINGIGAAHIVRTYGNTDNGKAWTLVTVLRALSDKRVADDARYPPIIDKKLYDSVQALKAATNKKGNTHQKNMLNIFSGMSRCPVCNQSIIVKRNSHGNLFTVCLGKRTNKTCEARSISYFALERPLLTAIRGLDFSEVYKHEDKNVLTLRDQWIQNERDIAAFRERLSKASRYEKFVILDELETMNREQEELTIRLKSVDVPKDIQLTFDDDKLDLDTNYRIELNNRIKKLIQHINIVREDVSKSKYTIYCTIKYWTDVISHLVIIDVNIKRTGTGGTNTLTTTLRSVSSLNMDGTVSGNPDSDAWEYWKSFLDNLK

SEQ ID NO: 50407 - DNA, 50 bp, Escherichia coli; identical to SEQ ID NO: 50237
  source 1..50: mol_type = genomic DNA

SEQ ID NO: 50408 - DNA, 40 bp, Escherichia coli; identical to SEQ ID NO: 23868
  source 1..40: mol_type = genomic DNA

SEQ ID NO: 50409 - DNA, 50 bp, Escherichia coli; identical to SEQ ID NO: 50239
  source 1..50: mol_type = genomic DNA

SEQ ID NO: 50410 - DNA, 40 bp, Escherichia coli; identical to SEQ ID NO: 50240
  source 1..40: mol_type = genomic DNA

SEQ ID NO: 50411 - protein, 521 aa, Escherichia coli
MKVPVWCYARISTLKQIDGFGIQRQINTINQFLQYVVLDHRLPFTLDVDNVTQMVAEGKSAFRGKNWNEKTKLGQYRKMVMDGVINDSVLIVENIDRLTRLDTFQAVEIISGLVNRGTTILEIETGMTYSRYIPESITVLVMQCNRANGESKRKSIMMQKSHANRYGKVSKVRPRWFDVVEIDGIKQYRPNETAKAIQRMYNDYINGIGAAHIVRTYGNTDNGKAWTLVTVLRALSDKRVADDARYPPIIDKKLYDSVQALKAATNKKGNTHQKNMLNIFSGMSRCPVCNQSIIVKRNSHGNLFTVCLGKRTNKTCSARSISYFALERPLLTAIRGLDFSEVYKHEDKNVLTLRDQWIQNERDIAAFRERLNKASRHEKFAILDELEIMNREQEELTIRLKSVDVPKDIQLTFDDDKLDLDTNYRIELNNRIKKLIQHINIVREDVTKSSYTIYCTIKYWTDVISHLVIIDVNIKRTGTGGTNTLTTTLRSVSSLNMDGTVSGNPDSDAWEYWKSFLDNLK

SEQ ID NO: 50412 - DNA, 50 bp, Escherichia coli; identical to SEQ ID NO: 50272
  source 1..50: mol_type = genomic DNA

SEQ ID NO: 50413 - DNA, 40 bp, Escherichia coli; identical to SEQ ID NO: 23868
  source 1..40: mol_type = genomic DNA

SEQ ID NO: 50414 - DNA, 50 bp, Escherichia coli; identical to SEQ ID NO: 50274
  source 1..50: mol_type = genomic DNA

SEQ ID NO: 50415 - DNA, 40 bp, Escherichia coli; identical to SEQ ID NO: 50240
  source 1..40: mol_type = genomic DNA

SEQ ID NO: 50416 - protein, 542 aa, Escherichia coli
MIGCAPQLIGGKSMKAVRVWCYARISTLKQVDGFGIQRQINTINQFLQCVELDHRLPFTLDTQNVTQMVAEGKSAFREKNWNPKTKLGQYRKMVMDGVIGDSVLIVENIDRLTRLDPYKAIEIISGMINRGTTILEVETGMTYSRYIPESITVLVMQINRANSESKRKSIMMQKSHANRYGKVSKVRPRWFDVVEIDGIKQYRPNETAKAIQRMYNDYINGIGAAHIVRTYGNTDNGKAWTLVTVLRALSDKRVADDARYPPIIDKKLYDSVQALKAATNKKGNTHQKNMLNIFSGMSRCPVCNQSIIVKRNSHGNLFTVCLGKRTNKTCEARSIAYFALERPLLTAIRGLDFSEVYKHEDKNVLTLRDQWIQNERDIAAFRERLNKASRHEKFAILDELEIMNREQEELTIRLKSVDVPKDIQLTFDDDKLDLDTNYRIELNNRIKKLIQHINIVREDVSKSSYIIYCTIKYWTDVISHLVIIDVDIKRTGSGGTNTLTTTLKSVSSLNMDGTISGNPDSYAWEYWKSFLDSAIGLVDSND

SEQ ID NO: 50417 - DNA, 50 bp, Escherichia coli
  source 1..50: mol_type = genomic DNA
cggtgtacattcttgcatgactacgaacagttatgataggatgtgcacca

SEQ ID NO: 50418 - DNA, 40 bp, Escherichia coli; identical to SEQ ID NO: 23868
  source 1..40: mol_type = genomic DNA

SEQ ID NO: 50419 - DNA, 50 bp, Escherichia coli
  source 1..50: mol_type = genomic DNA
cggtgtacattcttgcatgactacaaacagttatgataggatgtgcacca

SEQ ID NO: 50420 - DNA, 40 bp, Escherichia coli; identical to SEQ ID NO: 50240
  source 1..40: mol_type = genomic DNA

SEQ ID NO: 50421 - protein, 528 aa, Escherichia coli
MKVPVWCYARISTLKQIDGFGIQRQINTINQFLQCVELDHRLPFTLDVDNVTQMVAEGKSAFRDKNWNEKTKLGQYRKLVMDGVISDSVLIVENIDRLTRLDPYMAIEIISGLVNRGTTILEIETGMTYSRYIPESITVLVMQCNRANGESKRKSIMMQKSHANRYGKVSKVRPRWFDVVEIDGIKQYRPNETAKAIQRMYNDYINGIGAAHIVRTYGNTDNGKAWTLVTVLRALSDKRVADDARYPPIIDKKLYDSVQALKAATNKKGNTHQKNMLNIFSGMSRCPVCNQSIIVKRNSHGNLFTVCLGKRTNKTCEARSISYFALERPLLTAIRDLDFSEVYKHEDKNVLTLRDQWIQNERDIAAFRERLSKASRYEKFVILDELETMNREQEELTIRLKSVDVPKDIQLTFDDDKLDLDTNYRIELNNRIKKLIQYINIVREDVTKSSYTIYCTIKYWTDVISHLVIIDVNIKRTGTGGTNTLTTTLRSVSSLNMDGTVSGNPDSDAWEYWKSFLDGTIGLVDYKK

SEQ ID NO: 50422 - DNA, 50 bp, Escherichia coli; identical to SEQ ID NO: 50297
  source 1..50: mol_type = genomic DNA

SEQ ID NO: 50423 - DNA, 40 bp, Escherichia coli; identical to SEQ ID NO: 23868
  source 1..40: mol_type = genomic DNA

SEQ ID NO: 50424 - DNA, 50 bp, Escherichia coli; identical to SEQ ID NO: 50299
  source 1..50: mol_type = genomic DNA

SEQ ID NO: 50425 - DNA, 40 bp, Escherichia coli; identical to SEQ ID NO: 50240
  source 1..40: mol_type = genomic DNA

SEQ ID NO: 50426 - protein, 521 aa, Escherichia coli
MKVPVWCYARISTLKQIDGFGIQRQINTINQFLQCVELDHRLPFTLDVDNVTQMVAEGKSAFRDKNWNEKTKLGQYRKLVMDGVISDSVLIVENIDRLTRLDPYMAIEIISGLVNRGTTILEIETGMTYSRYIPESITVLVMQCNRANGESKRKSIMMQKSHANRYGKVSKVRPRWFDVVEIDGIKQYRPNETAKAIQRMYNDYINGIGAAHIVRTYGNTDNGKAWTLVTVLRALSDKRVADDARYPPIIDKKLYDSVQALKAATNKKGNTHQKNMLNIFSGMSRCPVCNQSIIVKRNSHGNLFTVCLGKRTNKTCEARSISYFALERPLLTAIRGLDFSEVYKHEDKNVLTLRDQWIQNERDIAAFRERLNKASRHEKFAILDELEIMNREQEELTIRLKSVDVPKDIQLTFDDDKLDLDTNYRIELNNRIKKLIQHINIVREDVSKSSYTIYCTIKYWTDVISHLVIIDVNIKRTGTGGTNTLTTTLRSVSSLNMDGTVSGNPDSDAWEYWKSFLDKLK

SEQ ID NO: 50427 - DNA, 50 bp, Escherichia coli; identical to SEQ ID NO: 50237
  source 1..50: mol_type = genomic DNA

SEQ ID NO: 50428 - DNA, 40 bp, Escherichia coli; identical to SEQ ID NO: 23868
  source 1..40: mol_type = genomic DNA

SEQ ID NO: 50429 - DNA, 50 bp, Escherichia coli; identical to SEQ ID NO: 50239
  source 1..50: mol_type = genomic DNA

SEQ ID NO: 50430 - DNA, 40 bp, Escherichia coli; identical to SEQ ID NO: 50240
  source 1..40: mol_type = genomic DNA

SEQ ID NO: 50431 - protein, 521 aa, Escherichia coli
MKVPVWCYARISTLKQIDGFGIQRQINTINQFLQCVELDHRLPFTLDVDNVTQMVAEGKSAFREKNWNEKTKLGQYRKLVMDGVVKESVLITESIDRLTRLDPYKAVEILSGLINRGTTILEVDTGMTYSRYIPESLSVLTMQINRANGESKRKSIMMQKSHANRYGKVSKVRPRWFDVVEIDGIKQYRPNETAKAIQRMYNDYINGIGAAHIVRTYGNTDNGKPWTLVTVLRALSDKRVADDARYPPIIDKELYDRVQALKAATNKKGNTHQKNMLNIFSGMSRCPVCNQSIIVKRNSHGNLFTVCLGKRTNKTCSARSISYFALERPLLTAIRGLDFSEVYKHEDKNVLTLRDQWIQNERDIAAFRERLNKASRHEKFAILDELEIMNREQEELTIRLKSVDVPKDIQLTFDDDKLDLDTNYRIELNNRIKKLIQHINIVREDVSKSSYTIYCTIKYWTDVISHLVIIDVNIKRTGTGGTNTLTTTLRSVSSLNMDGTVSGNPDSDAWEYWKSFLDNLK

SEQ ID NO: 50432 - DNA, 50 bp, Escherichia coli; identical to SEQ ID NO: 50237
  source 1..50: mol_type = genomic DNA

SEQ ID NO: 50433 - DNA, 40 bp, Escherichia coli; identical to SEQ ID NO: 23868
  source 1..40: mol_type = genomic DNA

SEQ ID NO: 50434 - DNA, 50 bp, Escherichia coli; identical to SEQ ID NO: 50239
  source 1..50: mol_type = genomic DNA

SEQ ID NO: 50435 - DNA, 40 bp, Escherichia coli; identical to SEQ ID NO: 50240
  source 1..40: mol_type = genomic DNA

SEQ ID NO: 50436 - protein, 532 aa, Escherichia coli
MKVPVWCYARISTLKQVDGFGIQRQVNTINQFLQYVVLDHRLPFTLDTENITQMVAEGKSAFRGKNWNEKTLLGKYRKMVMDGVINDSVLIVENIDRLTRLDPFQAVEIISGLINRGTTILEIETGMTYSRYIPESLSVLTIQINRANGESKRKSIMMQKSHANRYGKVSKVRPRWFDVVELDGVKQYRTNDTAKAIQRMYNDYINGIGAAQIVRTYGNTDNGKPWTLVTVLRALSDKRVADDARYPPIIDKDLYDRVQALKASTNKKGNTHQKNMLNIFSGMSRCPVCNQSIIVKRNSHGNLFTVCLGKRTNKTCEARSIAYNALERPLLTAIRGLDFSEVYKHEDNNVLTLRDQWIQNERDIAAFRERLNKASRHEKFAILDELEIMNREQEELTIRLKSVDVPKDIQLTFDDDKLDLDTNYRIELNNRIKKLIQHINIVREDVSKSKYTIYCTIKYWSDALSHLVIIDVDIQRTGTGGTNTLTTTLRSVSSLSLDGTLSGDLDDDALEYWKNVVDGAMALATTMIDSRK

SEQ ID NO: 50437 - DNA, 50 bp, Escherichia coli; identical to SEQ ID NO: 50257
  source 1..50: mol_type = genomic DNA

SEQ ID NO: 50438 - DNA, 40 bp, Escherichia coli; identical to SEQ ID NO: 23868
  source 1..40: mol_type = genomic DNA

SEQ ID NO: 50439 - DNA, 50 bp, Escherichia coli; identical to SEQ ID NO: 50259
  source 1..50: mol_type = genomic DNA

SEQ ID NO: 50440 - DNA, 40 bp, Escherichia coli; identical to SEQ ID NO: 50240
  source 1..40: mol_type = genomic DNA

SEQ ID NO: 50441 - protein, 521 aa, Escherichia coli; identical to SEQ ID NO: 50386

SEQ ID NO: 50442 - DNA, 50 bp, Escherichia coli
  source 1..50: mol_type = genomic DNA
cggtgtccattcttgcatgactacgaacagttatgttatgatgtacacca

SEQ ID NO: 50443 - DNA, 40 bp, Escherichia coli; identical to SEQ ID NO: 23868
  source 1..40: mol_type = genomic DNA

SEQ ID NO: 50444 - DNA, 50 bp, Escherichia coli
  source 1..50: mol_type = genomic DNA
cggtgtccattcttgcatgactacaaacagttatgttatgatgtacacca

SEQ ID NO: 50445 - DNA, 40 bp, Escherichia coli; identical to SEQ ID NO: 50240
  source 1..40: mol_type = genomic DNA

SEQ ID NO: 50446 - protein, 528 aa, Escherichia coli
MKVPVWCYARISTLKQIDGFGIQRQINTINQFLQCVELDHRLPFTLDVDNVTQMVAEGKSAFRDKNWNEKTKLGQYRKLVMDGVISDSVLIVENIDRLTRLDPYMAIEIISGLVNRGTTILEIETGMTYSRYIPESITVLVMQCNRANGESKRKSIMMQKSHANRYGKVSKVRPRWFDVVEIDGIKQYRPNETAKAIQRMYNDYINGIGAAHIVRTYGNTDNGKAWTLVTVLRALSDKRVADDARYPPIIDKKLYDSVQALKAATNKKGNTHQKNMLNIFSGMSRCPVCNQSIIVKRNSHGNLFTVCLGKRTNKTCEARSISYFALERPLLTAIRGLDFSEVYKHEDKNVLTLRDQWIQNERDIAAFRERLSKASRYEKFVILDELETMNREQEELTIRLKSVDVPKDIQLTFDDDKLDLDTNYRIELNNRIKKLIQHINIVREDVTKSSYTIYCTIKYWTDVISHLVIIDVNIKRTGTGGTNTLTTTLRSVSSLNMDGTVSGNPDSDAWEYWKGFLDGTIGLVDYKK

SEQ ID NO: 50447 - DNA, 50 bp, Escherichia coli; identical to SEQ ID NO: 50237
  source 1..50: mol_type = genomic DNA

SEQ ID NO: 50448 - DNA, 40 bp, Escherichia coli; identical to SEQ ID NO: 23868
  source 1..40: mol_type = genomic DNA

SEQ ID NO: 50449 - DNA, 50 bp, Escherichia coli; identical to SEQ ID NO: 50239
  source 1..50: mol_type = genomic DNA

SEQ ID NO: 50450 - DNA, 40 bp, Escherichia coli; identical to SEQ ID NO: 50240
  source 1..40: mol_type = genomic DNA

SEQ ID NO: 50451 - protein, 532 aa, Escherichia coli
MKVPVWSYARISTLKQVDGFGIQRQVNTINQFLQYVVLDHRLPFTLDTENITQMVAEGKSAFRGKNWNEKTKLGQYRKMVMNGVINDSVLIVENIDRLTRLDPFQAVEIISGLINRGTTIIEIETGMTYSRYIPESITVLTMQINRSNGESRRKSIMMQKSHANRYGKVSKVRPRWFDVVEIDGVKQYRPNETAKAIQRMYNDYINGIGAAQIVRTYGNTDNGKPWTLVTVLRALSDKRVADDARYPPIIDKDLYDRVQALKASTNKKGNTHQKNMLNIFSGMSRCPVCNQSIIVKRNSHGNLFTVCLGKRTNKTCEARSIAYNALERPLLTAIRGLDFSEVYKHEDNNVLTLRDQWIQNERDIAAFRERLNKASRHEKFAILDELEIMNREQEELTIRLKSVDVPKDIQLTFDDDKLDLDTNYRIELNNRIKKLIQHINIVREDVSKSKYTIYCTIKYWSDALSHLVIIDVDIQRTGTGGTNTLTTTLRSVSSLSLDGTLSGDLDDDALEYWKNVVDGAIALATTMIDSRK

SEQ ID NO: 50452 - DNA, 50 bp, Escherichia coli; identical to SEQ ID NO: 50257
  source 1..50: mol_type = genomic DNA

SEQ ID NO: 50453 - DNA, 40 bp, Escherichia coli; identical to SEQ ID NO: 23868
  source 1..40: mol_type = genomic DNA

SEQ ID NO: 50454 - DNA, 50 bp, Escherichia coli; identical to SEQ ID NO: 50259
  source 1..50: mol_type = genomic DNA

SEQ ID NO: 50455 - DNA, 40 bp, Escherichia coli; identical to SEQ ID NO: 50240
  source 1..40: mol_type = genomic DNA

SEQ ID NO: 50456 - protein, 521 aa, Escherichia coli
MKVPVWCYARISTLKQIDGFGIQRQINTINQFLQCVELDHRLPFTLDVDNVTQMVAEGKSAFRDKNWNEKTKLGQYRKMVMDGVISDSVLIVENIDRLTRLDPYMAIEIISGLVNRGTTILEIETGMTYSRYIPESITVLVMQCNRANGESKRKSIMMQKSHANRYGKVSKVRPRWFDVVEIDGIKQYRPNETAKAIQRMYNDYINGIGAAHIVRTYGNTDNGKAWTLVTVLRALSDKRVADDARYPPIIDKELYDSVQALKAATNKKGNTHQKNMLNIFSGMSRCPVCNQSIIVKRNSHGNLFTVCLGKRTNKTCEARSISYFALERPLLTAIRGLDFSEVYKHEDKNVLTLRDQWIQNERDIAAFRERLSKASRYEKFVILDELETMNREQEELTIRLKSVDVPKDIQLTFDDDKLDLDTNYRIELNNRIKKLIQYINIVREDVTKSSYTIYCTIKYWTDVISHLVIIDVNIKRTGTGGTNTLTTTLRSVSSLNMDGTVSGNPDSDAWEYWKSFLDNLK

SEQ ID NO: 50457 - DNA, 50 bp, Escherichia coli; identical to SEQ ID NO: 50237
  source 1..50: mol_type = genomic DNA

SEQ ID NO: 50458 - DNA, 40 bp, Escherichia coli; identical to SEQ ID NO: 23868
  source 1..40: mol_type = genomic DNA

SEQ ID NO: 50459 - DNA, 50 bp, Escherichia coli; identical to SEQ ID NO: 50239
  source 1..50: mol_type = genomic DNA

SEQ ID NO: 50460 - DNA, 40 bp, Escherichia coli; identical to SEQ ID NO: 50240
  source 1..40: mol_type = genomic DNA

SEQ ID NO: 50461 - protein, 521 aa, Escherichia coli
MKVPVWCYARISTLKQIDGFGIQRQINTINQFLQYVVLDHRLPFTLDVDNVTQMVAEGKSAFRGGNWKPSTKLGKYRKMVMDGVISDSVLIVENIDRLTRLDPFQAVEIISGLINRGTTILEIETGMTYSRYIPESITVLTMQINRANGESKRKSIMMQKSHANRYGKVSKVRPRWFDVVEIDGIKQYRPNETAKAIQRMYNDYINGIGAAHIVRTYGNTDNGKPWTLVTVLRALSDKRAADDARYPPIIDKELYDRVQALKAATNKKGNTHQKNMLNIFSGMSRCPVCNQSIIVKRNSHGNLFTVCLGKRTNKTCEARSISYFALERPLLTAIRGLDFSEVYKHEDKNVLTLRDQWIQNERDIAAFRERLNKASRHEKFAILDELEIMNREQEELTIRLKSVDVPKDIQLTFDDDKLDLDTNYRIELNNRIKKLIQYINIVREDVTKSSYTIYCTIKYWTDVISHLVIIDVNIKRTGTGGTNTLTTTLRSVSSLNMDGTVSGNPDSDAWEYWKSFLDNLK

SEQ ID NO: 50462 - DNA, 50 bp, Escherichia coli; identical to SEQ ID NO: 50417
  source 1..50: mol_type = genomic DNA

SEQ ID NO: 50463 - DNA, 40 bp, Escherichia coli; identical to SEQ ID NO: 23868
  source 1..40: mol_type = genomic DNA

SEQ ID NO: 50464 - DNA, 50 bp, Escherichia coli; identical to SEQ ID NO: 50419
  source 1..50: mol_type = genomic DNA

SEQ ID NO: 50465 - DNA, 40 bp, Escherichia coli; identical to SEQ ID NO: 50240
  source 1..40: mol_type = genomic DNA

SEQ ID NO: 50466 - protein, 528 aa, Escherichia coli
MKVPVWCYARISTLKQIDGFGIQRQINTINQFLQCVELDHRLPFTLDVDNVTQMVAEGKSAFREKNWNEKTKLGQYRKLVMDGVVKESVLITESIDRLTRLDPYKAVEILSGLINRGTTILEVDTGMTYSRYIPESLSVLTMQINRANGESKRKSIMMQKSHANRYGKVSKVRPRWFDVVEIDGIKQYRPNETAKAIQRMYNDYINGIGAAHIVRTYGNTDNGKAWTLVTVLRALSDKRVADDARYPPIIDKELYDSVQALKAATNKKGNTHQKNMLNIFSGMSRCPVCNQSIIVKRNSHGNLFTVCLGKRTNKTCEARSISYFALERPLLTAIRGLDFSEVYKHEDKNVLTLRDQWIQNERDIAAFRERLNKASRHEKFAILDELEIMNREQEELTIRLKSVDVPKDIQLTFDDDKLDLDTNYRIELNNRIKKLIQYINIVREDVTKSSYTIYCTIKYWTDVISHLVIIDVNIKRTGTGGTNTLTTTLRSVSSLNMDGTVSGDPDSDAWEYWKSFLDGTIGLVDYKK

SEQ ID NO: 50467 - DNA, 50 bp, Escherichia coli; identical to SEQ ID NO: 50237
  source 1..50: mol_type = genomic DNA

SEQ ID NO: 50468 - DNA, 40 bp, Escherichia coli; identical to SEQ ID NO: 23868
  source 1..40: mol_type = genomic DNA

SEQ ID NO: 50469 - DNA, 50 bp, Escherichia coli; identical to SEQ ID NO: 50239
  source 1..50: mol_type = genomic DNA

SEQ ID NO: 50470 - DNA, 40 bp, Escherichia coli; identical to SEQ ID NO: 50240
  source 1..40: mol_type = genomic DNA

SEQ ID NO: 50471 - protein, 521 aa, Escherichia coli
MKVPVWCYARISTLKQIDGFGIQRQINTINQFLQCVELDHRLPFTLDVDNVTQMVAEGKSAFRDKNWNEKTKLGQYRKLVMDGVISDSVLIVENIDRLTRLDPYMAIEIISGLVNRGTTILEIETGMTYSRYIPESITVLVMQCNRANGESKRKSIMMQKSHANRYGKVSKVRPRWFDVVEIDGIKQYRPNETAKAIQRMYNDYINGIGAAHIVRTYGNTDNGKAWTLVTVLRALSDKRVADDARYPPIIDKELYDSVQALKAATNKKGNTHQKNMLNIFSGMSRCPVCNQSIIVKRNSHGNLFTVCLGKRTNKTCEARSISYFALERPLLTAIRGLDFSEVYKHEDKNVLTLRDQWIQNERDIAAFRERLNKASRHEKFAILDELEIMNREQEELTIRLKSVDVPKDIQLTFDDDKLDLDTNYRIELNNRIKKLIQYINIVREDVTKSSYTIYCTIKYWTDVISHLVIIDVNIKRTGTGGTNTLTTTLRSVSSLNMDGTVSGNPDSDAWEYWKSFLDNLK

SEQ ID NO: 50472 - DNA, 50 bp, Escherichia coli; identical to SEQ ID NO: 50237
  source 1..50: mol_type = genomic DNA

SEQ ID NO: 50473 - DNA, 40 bp, Escherichia coli; identical to SEQ ID NO: 23868
  source 1..40: mol_type = genomic DNA

SEQ ID NO: 50474 - DNA, 50 bp, Escherichia coli; identical to SEQ ID NO: 50239
  source 1..50: mol_type = genomic DNA

SEQ ID NO: 50475 - DNA, 40 bp, Escherichia coli; identical to SEQ ID NO: 50240
  source 1..40: mol_type = genomic DNA

SEQ ID NO: 50476 - protein, 532 aa, Escherichia coli
MKVPVWCYARISTLKQVDGFGIQRQVNTINQFLQYVVLDHRLPFTLDTENITQMVAEGKSAFRGKNWNEKTLLGKYRKMVMDGVINDSVLIVENIDRLTRLDPFQAVEIISGLINRGTTILEIETGMTYSRYIPESLSVLTIQINRANGESKRKSIMMQKSHANRYGKVSKVRPRWFDVVEIDGVKQYRTNDTAKAIQRMYNDYINGIGAAQIVRTYGNTDNGKPWTLVTVLRALSDKRVADDARYPPIIDKDLYDRVQALKASTNKKGNTHQKNMLNIFSGMSRCPVCNQSIIVKRNSHGNLFTVCLGKRTNKTCEARSIAYNALERPLLTAIRGLDFSEVYKHEDNNVLTLRDQWIQNERDIAAFRERLNKASRHEKFAILDELEIMNREQEELTIRLKSVDVPKDIQLTFDDDKLDLDTNYRIELNNRIKKLIQHINIVREDVSKSKYTIYCTIKYWSDALSHLVIIDVDIQRTGTGGTNTLTTTLRSVSSLSLDGTLSGDLDDDALEYWKNVVDGAMALATTMIDSRK

SEQ ID NO: 50477 - DNA, 50 bp, Escherichia coli; identical to SEQ ID NO: 50257
  source 1..50: mol_type = genomic DNA

SEQ ID NO: 50478 - DNA, 40 bp, Escherichia coli; identical to SEQ ID NO: 23868
  source 1..40: mol_type = genomic DNA

SEQ ID NO: 50479 - DNA, 50 bp, Escherichia coli; identical to SEQ ID NO: 50259
  source 1..50: mol_type = genomic DNA

SEQ ID NO: 50480 - DNA, 40 bp, Escherichia coli; identical to SEQ ID NO: 50240
  source 1..40: mol_type = genomic DNA

SEQ ID NO: 50481 - protein, 532 aa, Escherichia coli
MKVPVWCYARISTLKQVDGFGIQRQVNTINQFLQYVVLDHRLPFTLDTENITQMVAEGKSAFRGKNWNEKTKLGQYRKMVMDGVINDSVLIVENIDRLTRLDPFQAVEIISGLINRGTTIIEIETGMTYSRYIPESITVLTMQINRSNGESRRKSIMMQKSHANRYGKVSKVRPRWFDVVEIDGVKQYRPNETAKAIQRMYNDYINGIGAAQIVRTYGNTDNGKPWTLVTVLRALSDKRVADDARYPPIIDKDLYDRVQALKASTNKKGNTHQKNMLNIFSGMSRCPVCNQSIIVKRNSHGNLFTVCLGKRTNKTCEARSIAYNALERPLLTAIRGLDFSEVYKHEDNNVLTLRDQWIQNERDIAAFRERLNKASRHEKFAILDELEIMNREQEELTIRLKSVDVPKDIQLTFDDDKLDLDTNYRIELNNRIKKLIQHINIVREDVSKSKYTIYCTIKYWSDALSHLVIIDVDIQRTGTGGTNTLTTTLRSVSSLSLDGTLSGDLDDDALEYWKNVVDGAMALATTMIDSRK

SEQ ID NO: 50482 - DNA, 50 bp, Escherichia coli; identical to SEQ ID NO: 50257
  source 1..50: mol_type = genomic DNA

SEQ ID NO: 50483 - DNA, 40 bp, Escherichia coli; identical to SEQ ID NO: 23868
  source 1..40: mol_type = genomic DNA

SEQ ID NO: 50484 - DNA, 50 bp, Escherichia coli; identical to SEQ ID NO: 50259
  source 1..50: mol_type = genomic DNA

SEQ ID NO: 50485 - DNA, 40 bp, Escherichia coli; identical to SEQ ID NO: 50240
  source 1..40: mol_type = genomic DNA

SEQ ID NO: 50486 - protein, 521 aa, Escherichia coli
MKVPVWCYARISTLKQIDGFGIQRQINTINQFLQCVELDHRLPFTLDVDNVTQMVAEGKSAFREKNWNEKTKLGQYRKMVMDGVISDSVLIVENIDRLTRLQPYLAIEIISGLVNRGTTILEIETGMTYSRYIPESITVLVMQCNRANGESKRKSIMMQKSHANRYGKVSKVRPRWFDVVEIDGIKQYRPNETAKAIQRMYNDYINGIGAAHIVRTYGNTDNGKAWTLVTVLRALSDKRVADDARYPPIIDKELYDSVQALKAATNKKGNTHQKNMLNIFSGMSRCPVCNQSIIVKRNSHGNLFTVCLGKRTNKTCSARSISYFALERPLLTAIRGLDFSEVYKHEDKNVLTLRDQWIQNERDIAAFRERLNKASRYEKFAILDELEIMNREQEELTIRLKSVDVPKDIQLTFDDDKLDLDTNYRIELNNRIKKLIQHINIVREDVSKSSYTIYCTIKYWTDVISHLVIIDVNIKRTGTGGTNTLTTTLRSVSSLNIDGTVSGNPDSDAWEYWKSFLDNLK

SEQ ID NO: 50487 - DNA, 50 bp, Escherichia coli; identical to SEQ ID NO: 50237
  source 1..50: mol_type = genomic DNA

SEQ ID NO: 50488 - DNA, 40 bp, Escherichia coli; identical to SEQ ID NO: 23868
  source 1..40: mol_type = genomic DNA

SEQ ID NO: 50489 - DNA, 50 bp, Escherichia coli; identical to SEQ ID NO: 50239
  source 1..50: mol_type = genomic DNA

SEQ ID NO: 50490 - DNA, 40 bp, Escherichia coli; identical to SEQ ID NO: 50240
  source 1..40: mol_type = genomic DNA

SEQ ID NO: 50491 - protein, 521 aa, Escherichia coli
MKVPVWCYARISTLKQIDGFGIQRQINTINQFLQYVVLDHRLPFTLDVDNVTQMVAEGKSAFRGGNWKPSTKLGKYRKMVMDGVISDSVLIVENIDRLTRLDPFQAVEIISGMINRGTTILEIETGMTYSRYIPESITVLTMQINRANGESKRKSIMMQKSHANRYGKVSKVRPRWFDVVEIDGIKQYRPNETAKAIQRMYNDYINGIGAAHIVRTYGNTDNGKAWTLVTVLRALSDKRVADDARYPPIIDKELYDSVQALKAATNKKGNTHQKNMLNIFSGMSRCPVCNQSIIVKRNSHGNLFTVCLGKRTNKTCEARSISYFSLERPLLTAIRGLDFSEVYKHEDKNVLTLRDQWIQNERDIAAFRERLNKASRHEKFAILDELEIMNREQEELTIRLKSVDVPKDIQLTFDDDKLDLDTNYRIELNNRIKKLIQYINIVREDVTKSSYTIYCTIKYWTDVISHLVIIDVNIKRTGTGGTNTLTTTLRSVSSLNMDGTVSGNPDSDAWEYWKSFLDNLK

SEQ ID NO: 50492 - DNA, 50 bp, Escherichia coli; identical to SEQ ID NO: 50237
  source 1..50: mol_type = genomic DNA

SEQ ID NO: 50493 - DNA, 40 bp, Escherichia coli; identical to SEQ ID NO: 23868
  source 1..40: mol_type = genomic DNA

SEQ ID NO: 50494 - DNA, 50 bp, Escherichia coli; identical to SEQ ID NO: 50239
  source 1..50: mol_type = genomic DNA

SEQ ID NO: 50495 - DNA, 40 bp, Escherichia coli; identical to SEQ ID NO: 50240
  source 1..40: mol_type = genomic DNA

SEQ ID NO: 50496 - protein, 532 aa, Escherichia coli
MKVPVWCYARISTLKQVDGFGIQRQVNTINQFLQYVVLDHRLPFTLDTENITQMVAEGKSAFRGKNWNEKTKLGQYRKMVMNGVINDSVLIVENIDRLTRLDPFQAVEIISGLINRGTTIIEIETGMTYSRYIPESITVLTMQINRSNGESRRKSIMMQKSHANRYGKVSKVRPRWFDVVEIDGVKQYRTNDTAKAIQRMYNDYINGIGAAQIVRTYGNTDNGKPWTLVTVLRALSDKRVADDARYPPIIDKDLYDRVQALKAATNKKGNTHQKNMLNIFSGMSRCPVCNQSIIVKRNSHGNLFTVCLGKRTNKTCEARSIAYNALERPLLTAIRGLDFSEVYKHEDNNVLTLRDQWIQNERDISAFRERLNKASRHEKFAILDELEIMNREQEELTIRLKSVDVPKDIQLTFDDDKLDLDTNYRIELNNRIKKLIQHINIVREDVSKSKYTIYCTIKYWSDALSHLVIIDVDIQRTGTGGTNTLTTTLRSVSSLSLDGTLSGDLDDDALEYWKNVVDGAMALATTMIDSRK

SEQ ID NO: 50497 - DNA, 50 bp, Escherichia coli; identical to SEQ ID NO: 50257
  source 1..50: mol_type = genomic DNA

SEQ ID NO: 50498 - DNA, 40 bp, Escherichia coli; identical to SEQ ID NO: 23868
  source 1..40: mol_type = genomic DNA

SEQ ID NO: 50499 - DNA, 50 bp, Escherichia coli; identical to SEQ ID NO: 50259
  source 1..50: mol_type = genomic DNA

SEQ ID NO: 50500 - DNA, 40 bp, Escherichia coli; identical to SEQ ID NO: 50240
  source 1..40: mol_type = genomic DNA

SEQ ID NO: 50501 - protein, 475 aa, Mycolicibacterium smegmatis
MIGWAEDVDVSGAVDPFETPQLGDWLKNRAPEFDIIVAWKLDRITRSAIKLNNLISWCDEHDKIMLTTDNGLNTGSREGRLIAGIVGFLAEGELEAMRERQKSSRQKLRELARWPGGRPPYGYRAAPNPNGPGKVLEIDPEAHTVVQRIVQQVIDGVPLVRIVRDLNRDGVLPPRDYYRVQQGRQDTLTSWGTGPLRFLLSSPSLVGQAHLRGVVQRDDQGRPVQLAEPLVTEEQRMLVLAELERTRGVSRERAEPAALSGIALCWFCGGVLHMTTLVKKLRDGKRRYRYYRCPKGCGQMLPADDLEQLAEDNFLDLLGAVEVRKRVWVPGDDVEARKRSAVMGLETLLETAGRVSSPTAAAALQKQIEALSGQIAELESTPAQSGRWEHRPTGEFYRDVWERSSDPISRRELLKNAGVTIRIGVSGRERGTGGAWHIDLHTDLTDLLTPEQFERMMEERDRQAALWRRQWGISD

SEQ ID NO: 50502 - DNA, 50 bp, Mycolicibacterium smegmatis
  source 1..50: mol_type = genomic DNA
tctgttttctctcttgtaggtcgggccgtaccttgacctacgcatactac

SEQ ID NO: 50503 - DNA, 40 bp, Mycolicibacterium smegmatis
  source 1..40: mol_type = genomic DNA
tctgcgccccgtaggccgggccgtgcatgtagcacaccga

SEQ ID NO: 50504 - DNA, 50 bp, Mycolicibacterium smegmatis
  source 1..50: mol_type = genomic DNA
tctgttttctctcttgtaggtcggctcgtaccttgacctacgcatactac

SEQ ID NO: 50505 - DNA, 40 bp, Mycolicibacterium smegmatis
  source 1..40: mol_type = genomic DNA
tccgggccccgaagggctgctcgtggatgaaccagactga

SEQ ID NO: 50506 - protein, 542 aa, Flavonifractor plautii
MMTIRKLREQLRMGRSIYDLSLRVTYYARVSTEKVEQQGSLENQVQYYTEFIQKNPNWTFVQGYVDEGISGTSTYKRESFLRMIDDAHRGLFDFIITKEISRFSRSTLDSIQYTQELLDANVGVLFQNDNINTLDTDSEFRLVVMAGVAQDEVRKLSERLKFGFRQSIKNGHVLGNNRLWGYDKKDCKLTIIPEQAEAVRLIFELYATGKYGIRKISQELTRRGHTSLLGNEFNQLTIRHILTNPKYKGWYCGNKTQSLDYRTKKKAFLDESEWVMYPDPNIPAIVSEELWDQANAIFKQRSREVRTKATSYHNRYPYSGKIICGRHGTSFHRQSFKTQKGETEFWRCKTYRQKGKDGCDLPGIRTHEVDQVLADLFEKVVTEKKQIIRLVLDSIGETSCGVDYSAQIGRIEVQISQIGEKKDKLLELSMADAITLQEFKERNGRFNRQISALEEQRMSLCQQEQMQKSTEIDPKLLEKALWEELNFTNGIQSEVVATILDHIVVLEQSDDKQIYLEIYLRLGQQASAHFQRGGLVSCNSPL

SEQ ID NO: 50507 - DNA, 50 bp, Flavonifractor plautii
  source 1..50: mol_type = genomic DNA
attagtctcttgcaatagtcctttaataacggttgaagcaaacgacaaat

SEQ ID NO: 50508 - DNA, 40 bp, Flavonifractor plautii
  source 1..40: mol_type = genomic DNA
cctggtggcccacattgttaagaagtactatacccccaat

SEQ ID NO: 50509 - DNA, 50 bp, Flavonifractor plautii
  source 1..50: mol_type = genomic DNA
attagtctcttgcaatagtccttttataacggttgaagcaaacgacaaat

SEQ ID NO: 50510 - DNA, 40 bp, Flavonifractor plautii
  source 1..40: mol_type = genomic DNA
cctgatggcccacagtgaatagaagtactgtgtccactct

SEQ ID NO: 50511 - protein, 573 aa, Mycobacteroides abscessus
MTDNTTTGPQIAVSYLRVSTTRQMDTGADVDAEGNSIATQREANNAKAARMGAIIEKEFVEPGASAQTIDKRPVFKQLLAYLGEHPEVSLVIIYMRSRAFRNLGDAVITKRRLEAMGVKLVSAKEDFGEGIMADAMEAVTDIINEVQVRMSGEDIKVKMRHKAQMGGTNGRAPIGYRNVRLDHAGRQVNGIAVDEERAPLIKQAFELYATGDYSIDRLQETMADLGLKARPQGRGGTKQLSRSHLHRILSDPYYIGIVRYKGETFPGRHQPIISADLFERVQKVIEDRSARGQRDRVLYHYLKGLLYCERCRANGRTSRLVYTEAKGNGGNYAYYLCLARQRGECDLPHLPVPDVEWYVLDHYAKLGLPPKFLDYIREAIDRAMADAQTHVRGLHVTYRKKLDKLAQQEERLLDLAADGDLAPDKIRVRLRKIQAERTRAQQGLDETGEQLELGARKLQQYLDLLDDPQSLYVRAPEDGRRDLNTASFRKLWLDDAGVVTDELTPAISELHEAARAFTRHNSTSEADCATDNQQGPDQGETQKLPGDSREFRLDHRFRLADMFRVGSSKNVLV

SEQ ID NO: 50512 - DNA, 50 bp, Mycobacteroides abscessus
  source 1..50: mol_type = genomic DNA
gtcggttcgagtaagaacgttctggtgcacacgctgggccggtactcgaa

SEQ ID NO: 50513 - DNA, 40 bp, Mycobacteroides abscessus
  source 1..40: mol_type = genomic DNA
ggttgcctgctctgagctggtgccctcggtgagattcgaa

SEQ ID NO: 50514 - DNA, 50 bp, Mycobacteroides abscessus
  source 1..50: mol_type = genomic DNA
gtcggttcgagtaagaacgttctgaggcacacgctgggccggtactcgaa

SEQ ID NO: 50515 - DNA, 40 bp, Mycobacteroides abscessus
  source 1..40: mol_type = genomic DNA
ggtcgcctgcttcctgctgaggcccttggtgagtttcacg

SEQ ID NO: 50516 - protein, 597 aa, Enterobacter hormaechei
MGHADLLTLDQWRGILMSSKQKLYSYVRWSSEKQSTGTSSERQTSRAMRFAEENELEYVEIKDAGVSAFKGKNTTQGKLGVFISEVDKGVIPRDSWLYVENLDRLTREDVLTANELFLRLLRMGLTIVTGMDNRVFTRESVNNNPMDLMASILMFMRAHEESKTKSDRVTSHVLALLERQRKGLPVNIKAIGKHPFWIDDSGSAHEKVKKHPDFWLPAQEAVRLFLEGHGAFYVTDYLNQNYPVPPAFKKTQRREGGWPLQAIKKMRANMALVGTRIFNLSGKEYRLENYYPPLCTLGEFAQLQDIKTNNKRYSGKTSTAINLLGGMKILRCGHCKGTMTAFLQRGQLRYICEYGRSGGNCTAWSLKASIVERCLMPVLITGFLIGAYKTHSDLSLLDKQTNELKEQLKKVQSQQDNVIDAIADLGRTPKLDAKFKALENEEQRVSGKLQQLHQAKSLYASTKDFSENIVDFVAGQCHWMIVSDVHNPKREALRERIRSVINEAIVTKDNRCIRIEFRFPTGETFVFSGSRPGEYEVFLPRKVHEIPLDATEQEINEWERSDYEYNKNFLKLWYEVVNKNLLSHYPAIDGKDFWPKR

SEQ ID NO: 50517 - DNA, 50 bp, Enterobacter hormaechei; identical to SEQ ID NO: 36002
  source 1..50: mol_type = genomic DNA

SEQ ID NO: 50518 - DNA, 40 bp, Enterobacter hormaechei; identical to SEQ ID NO: 32078
  source 1..40: mol_type = genomic DNA

SEQ ID NO: 50519 - DNA, 50 bp, Enterobacter hormaechei
  source 1..50: mol_type = genomic DNA
aatgtattatttttgactttcgggatgcctaaagatataaatcctacttt

SEQ ID NO: 50520 - DNA, 40 bp, Enterobacter hormaechei
  source 1..40: mol_type = genomic DNA
gtacaccatgttcttctggatgctgcggcggaagaagccc

SEQ ID NO: 50521 - protein, 480 aa, Microbacterium oxydans
MTVRAAIYARISSDRKGTGEGVDRQERDCRDLAQRLGWDVVEVYVDNDISAASGKLRPEYRAMLEAVKAKHIDAILAWHPDRLHRRPTELEEFIAIVERHGTLIQTVTAGELDLSTPSGLMVARMLGVAARYEVDQTKKRIKAAVDQRAKEGRPAGGLRPFGYEKGGMVIRESEAAIVRECTDALLSGRTLASLARELRARGVTGTQGKPVTYNNLRDLLLKPRNAGIVARGLPNRNATTNNSTRPYEEIGPALWPAIVPEEKWRALVALLTDPGRRTYHGNLRESKHLGSSIYRCGIEGCGGKMRTAPNGGTPSKPGSRHTIYRCVTSAHLTVRASFTDDYVRGVVAEMVRDPRIQAALAPNADPQLAADREERAALSLRLQQFEDDYAAGKIRAEQLKRATDRVAAEIADIDARSARLLRTTAAAAILRAQDPGQAFLESPVDVQRAVLSTVLRVEVVPQERRGLAWSPARLRLSPAV

SEQ ID NO: 50522 - DNA, 50 bp, Microbacterium oxydans
  source 1..50: mol_type = genomic DNA
atatgtctaaaacttggtttctaggactagaaaccataaaatagacatat

SEQ ID NO: 50523 - DNA, 40 bp, Microbacterium oxydans
  source 1..40: mol_type = genomic DNA
cggcggacgccatctcgacgaccaggcgccctgcgtcgac

SEQ ID NO: 50524 - DNA, 50 bp, Microbacterium oxydans
  source 1..50: mol_type = genomic DNA
atatgtctaaaacttggtttctaggcctagaaaccataaaatagacatat

SEQ ID NO: 50525 - DNA, 40 bp, Microbacterium oxydans
  source 1..40: mol_type = genomic DNA
ccgcagccgccatcttgacgccgctgcgcccggcctccac

SEQ ID NO: 50526 - protein, 520 aa, Micromonospora tulbaghiae
MVRRKARSGNQGRFDSKDALLAGGGQVRALRYQRASQDKKEQGKSVHDQGVLNLAEITKRSWTDAGSFTDNHRSASRRATREREQFELLIEQIRAGKGDVLVVWEISRKERDLAVFVKIRDMCHEVGLYFWLVGGVLYDLRDKNDRMMLGFQAVQAEWMAEAIRDNVMRGIVGAAEAGRPHGKITYGYRRIYDQRTRALLRQEPDDEIRTAVAADGTVTEYSHAQVVRDNFRLIAAGMPLTAREAELNRLGTPASQGGVWRRGILRKQVMNPAYIGKRVLRGEIVGDGIWPALVSEETYWAVVRMLGDPARTTTRPGRAVHLLSYIVRCGVCDGPLSSQRQNRHGWTGQVYSCLHKRHVGVKAPILDEYVQRAVVAWLSRPDVHDILTATAGSDEDVTHARAEAQRLRGELEDWRRLAEDGDVTAIAYARAEKGLLAQIAEHEQRAADAGIPAVLRGRIGDHAVQAWQELDGNIPVKREIIRLVADIKLLPAAYKGDRSPFGRHRLHWNWNFDPHHHPKA

SEQ ID NO: 50527 - DNA, 50 bp, Micromonospora tulbaghiae
  source 1..50: mol_type = genomic DNA
ggcttctatagctacttgactacggtcaaggatcgttagaagctagggtc

SEQ ID NO: 50528 - DNA, 40 bp, Micromonospora tulbaghiae
  source 1..40: mol_type = genomic DNA
cggcgtcaccgtcggcactgtcaagagccagtgccacgac

SEQ ID NO: 50529 - DNA, 50 bp, Micromonospora tulbaghiae
  source 1..50: mol_type = genomic DNA
ggcttctatagctacttgactacggacaaggatcgttagaagctagggtc

SEQ ID NO: 50530 - DNA, 40 bp, Micromonospora tulbaghiae
  source 1..40: mol_type = genomic DNA
cgccttcactgtgggcacagacaacttccagcgccacgcc

SEQ ID NO: 50531 - protein, 534 aa, Paracoccus solventivorans
MAIIRAVGYSRYSTDLQNELSIEDQQALITRYALANGMAIQQFYSDAAQSGASIFRRDGLLQLLADAREGLFDAVIVEELDRLARDMEDLAGIHKRLSFAGIEIRAVHEGVANTVTVGLRGLVGQLFREDNARKIRRGMTGNISRGRTAGGRAFGYRPHPTERGELVIVPEEAEIIRRIFQEFADGRSAVEIAHGLTKDKCPMPRGARAWQASTIYGWAERRSGILRNDLYVGRIVWNKTRFVTDPETGRRVSRSNPAENWLHHDAPHLRIIDDAVWDQVQAMITPDRTTSHSDRAKMRRPTRPLSGLLRCGACGGGMSVKGKDRSGRVRIGCTRHVQSRTCPKPRTWYLDVVEEQVIGLLRGELQKPAMLDLYVSEYNKARAEYAAGMLRRRSKLESRIKQLDAEVSRLIDFVARGIGNTDRLAADYEARCEELASAKAELEDEPPAITPVMLHPAALVGYRLDLAKLAQIMGTDNSSETTRYAEILRGLIETVTISETAKGQMEITVAGKLRALIDAPTLKRRLSGGAVVAE

SEQ ID NO: 50532 - DNA, 50 bp, Paracoccus solventivorans
  source 1..50: mol_type = genomic DNA
gtcggggggtgctgtggtagcggaggtgcgtctcagcggcaacccacacc

SEQ ID NO: 50533 - DNA, 40 bp, Paracoccus solventivorans
  source 1..40: mol_type = genomic DNA
cgctgcatttggtagcggaggagggactcgaacccccgac

SEQ ID NO: 50534 - DNA, 50 bp, Paracoccus solventivorans
  source 1..50: mol_type = genomic DNA
gtcggggggtgctgtggtagcggaagtgcgtctcagcggcaacccacacc

SEQ ID NO: 50535 - DNA, 40 bp, Paracoccus solventivorans
  source 1..40: mol_type = genomic DNA
agctccatttggtggaggtagagggactctaaccacttcc

SEQ ID NO: 50536 - protein, 458 aa, Staphylococcus aureus; identical to SEQ ID NO: 13066

SEQ ID NO: 50537 - DNA, 50 bp, Staphylococcus aureus; identical to SEQ ID NO: 18812
  source 1..50: mol_type = genomic DNA

SEQ ID NO: 50538 - DNA, 40 bp, Staphylococcus aureus
  source 1..40: mol_type = genomic DNA
atgtatggcggcacttgtatcaatataggatgtatacctt

SEQ ID NO: 50539 - DNA, 50 bp, Staphylococcus aureus; identical to SEQ ID NO: 18814
  source 1..50: mol_type = genomic DNA

SEQ ID NO: 50540 - DNA, 40 bp, Staphylococcus aureus; identical to SEQ ID NO: 18815
  source 1..40: mol_type = genomic DNA

SEQ ID NO: 50541 - protein, 458 aa, Staphylococcus aureus; identical to SEQ ID NO: 11826

SEQ ID NO: 50542 - DNA, 50 bp, Staphylococcus aureus; identical to SEQ ID NO: 18812
  source 1..50: mol_type = genomic DNA

SEQ ID NO: 50543 - DNA, 40 bp, Staphylococcus aureus; identical to SEQ ID NO: 50538
  source 1..40: mol_type = genomic DNA

SEQ ID NO: 50544 - DNA, 50 bp, Staphylococcus aureus; identical to SEQ ID NO: 18814
  source 1..50: mol_type = genomic DNA

SEQ ID NO: 50545 - DNA, 40 bp, Staphylococcus aureus; identical to SEQ ID NO: 18815
  source 1..40: mol_type = genomic DNA

SEQ ID NO: 50546 - protein, 543 aa, Bacteroides stercoris
MKHILKKIHNMENFDLKGFAKGKKQQKEQIGGNAIIYTRVSSSEQVDGQSLEVQIDKCRKYAKVRSYTVIGEFGGTYESAKSDKERKEFNRMLAFIKQSNKKGSSQPVKTVIVFSTSRFSRTGSTTIIEEVEARGAYVVSATSNYDPRTPVGKYLQLMELANARFQNDEKRATTIENSVKALLKGRWIGKAPRGYDQKTTKKEQIITINEEGKLIRKAFLWKANNKLSNEEIRHRLAAEGFHICKQKLSELFKNPFYCGYMAHKFLQGDIILGNHPPLIPKEIFLKVNGELSKNHSGYEQKIDKEYAPLLGSIKCPCCGKNLSASISTKMRKRFGRTDIGYYVCSRKGCKYNSSTKKVHEAFEEEVNRYALSDKVSELLKMQLTITFEYMNQENRERAKSIKANIKAKEKELEQVETNYALCTDAKKQSICEKVMTKLEKEVRDLKTELSKVNTEILNLDKFIDFAFKMRSNLFELWELQGLEGRRRLQKLVFPDGFIYDKNNEHIEPKRVNQFFLLKYSYPTSNGDKKKETNRGKHDSSLRV

SEQ ID NO: 50547 - DNA, 50 bp, Bacteroides stercoris; identical to SEQ ID NO: 17302
  source 1..50: mol_type = genomic DNA

SEQ ID NO: 50548 - DNA, 40 bp, Bacteroides stercoris
  source 1..40: mol_type = genomic DNA
attaaaggattactcctgtactcgaagcgggacttgaacc

SEQ ID NO: 50549 - DNA, 50 bp, Bacteroides stercoris
  source 1..50: mol_type = genomic DNA
aaaacacgattcgtcccttagagttgccttaacggatgaaatattgaacc

SEQ ID NO: 50550 - DNA, 40 bp, Bacteroides stercoris
  source 1..40: mol_type = genomic DNA
ataaagggtttagccatgttgtccaagctggtcttgaact

SEQ ID NO: 50551 - protein, 535 aa, Pseudomonas helleri
MGQDFRDPKEACLPSPNTRITSEKPSDSLVLAAEYVRMSTDHQRYSTENQSAAIHAYAMSHGMAIVTTYRDEGKSGLDIGGRDALRTLLDDVQAGRTQFQVILVYDVSRWGRFQNTDESAHYEYLCTSSGIRVVYCAEPFENDGSPLATIYKGIKRSMAGEYSRELSQKVFAGQCRLVEKGFHQGGPAGYGLRRALIDEKSEFKAELSRGQQKSLQTDRVILIPGPKAEIEVVQRIYHQFSHNGMNEREIAHALNAEGLLTDFDRPWSRGSVHQVLTNEKYIGNNVYNKTSSKLRKRISRNPPDKWVRCDGAFQGVVSLEVFAGVREIILQRSHRMDDAQLLELLRTLLQRAGSLSGMLIDEQDNMPSSTVYINRFGGLLRAYTLIGYTPDRDYRYLEINRSLRQLHPQVLEDVLNHLKYVGARVELSDQNDLLTVNNQWTASVVIARCQPTPAGTLRWKLRFDNSLNPDITVAVRMEQANLQVRDYYLVPSIDMGAWPKRMAEENSPLIDSYRFATLDVLDGLAARCSLKEACQ

SEQ ID NO: 50552 - DNA, 50 bp, Pseudomonas helleri
  source 1..50: mol_type = genomic DNA
ggctattaactttgcccacctacacacattgtaggtgagcaaagttaacc

SEQ ID NO: 50553 - DNA, 40 bp, Pseudomonas helleri
  source 1..40: mol_type = genomic DNA
catctaccccagtcagtcacacatcagaagtccaaattgg

SEQ ID NO: 50554 - DNA, 50 bp, Pseudomonas helleri
  source 1..50: mol_type = genomic DNA
ggctattaactttgcccacctacattcattgtaggtgagcaaagttaacc

SEQ ID NO: 50555 - DNA, 40 bp, Pseudomonas helleri
  source 1..40: mol_type = genomic DNA
catctgctggggacagtcattcatcagaggaccaaatacg

SEQ ID NO: 50556 - protein, 556 aa, Streptomyces alboflavus
MTRAAGEGSGQTPEQQAGESDLELRGLPPGLLSPDELNELEGVVLLIAYSRISLDWRKHKSKRAEASKGWTAGKGVANQHRRNDKNAKRHGATIVRRYTDNDLSASKDNVVRGDFQAMLRHLRLGYTPEGYRIDGVICVDQDRVQRTDRDWEDFVDALTLEPARRFYTPSGPMDLTEESEIIKTGVMAVVNKAETLKKRRRIRDWHQDRILDGLPHSGPRPFGWNDDRMTLLAPEAQFLEWAIVHRIKGKAMSTLCSEAKKRRLTGTRGGEIKPQTLTQMMTAPRVCGYRANRGVLVLDETGAPVVGKWERVCTPEQWRAVCATFGDGSTYLARGSGTARITGVPKTIKYLASSLLRCQYKVPVTTKTGDPVIKEDGTQATRICNTPVGGSKADSKTSPYVYTCHGCSRNAIAGPMVDEQLTKLLMAKLKQQQATYKPPEDAWPHEKRLIERTEKLASLEKQWEESTISDAMFFRLAPKIEAEVKKLRREKARYEHELLQENEPPADIMRKWKSGEYDLEQKRKILFEVFAAVKLTPGKKGAGIPDPKRLTPVWNS

SEQ ID NO: 50557 - DNA, 50 bp, Streptomyces alboflavus
  source 1..50: mol_type = genomic DNA
taccgggttgtcttcatctactgacaccagtacattatcagaagcataag

SEQ ID NO: 50558 - DNA, 40 bp, Streptomyces alboflavus
  source 1..40: mol_type = genomic DNA
ttcgtgggccatcacatgacaccagtggcagctcgagtac

SEQ ID NO: 50559 - DNA, 50 bp, Streptomyces alboflavus; identical to SEQ ID NO: 50557
  source 1..50: mol_type = genomic DNA

SEQ ID NO: 50560 - DNA, 40 bp, Streptomyces alboflavus
  source 1..40: mol_type = genomic DNA
ctcctcttccatcatgtggcaccagtggcaggtggagtac

SEQ ID NO: 50561 - protein, 504 aa, Faecalibacterium prausnitzii
MAKRKFNKGGEVRLVAYYRYSGGSGQTEQSIEGQRRDCEAYARLHNMTIQKEYVDRHISGKTDDRAAFQQMITDSDKGAFDMVICWKTDRFARNRYDSAVYKKRLRDNGVEIVYAAESNISGAEGIIIEGVMEALAEYYSAELAEKMRRGMRESALKGQAISRCRALGLKTDEHKRFVIDEKTAPTVRFIFEHYAAGESATSIVDKLNAKGLRTSQGNPFNKSSIPRIIQNEAYRGVYISKSYDVRIEGAIPAIIDDELWERAQTMLKLNRQLKAKNEPKADYILSGKLYCSCGSLMRGMSGHSATGEVYRYYTCPNKDCHLRNIPKDDLEGKVMQSIVDHLLQPESMEALAEAMVEVQKADVEKPNAERVAIEQSLSDVRRRSKNILDAIENGTANAQLCARLDDLTEQEQTLSFQLSSLEKEKPVVFTKEQYLFLLEQFLMEPSERTPEYGRRLVNTFVTSMVVSGRELVINFNVSDETVNKNKKTSQTNLQKESSSGMRLV

SEQ ID NO: 50562 - DNA, 50 bp, Faecalibacterium prausnitzii
  source 1..50: mol_type = genomic DNA
aagttcgtctgggatgcgtctggtccaccttgcacatcaacaagcgaact

SEQ ID NO: 50563 - DNA, 40 bp, Faecalibacterium prausnitzii; identical to SEQ ID NO: 34998
  source 1..40: mol_type = genomic DNA

SEQ ID NO: 50564 - DNA, 50 bp, Faecalibacterium prausnitzii
  source 1..50: mol_type = genomic DNA
aagttcgtctgggatgcgtctggttgaccttgcacatcaacaagcgaact

SEQ ID NO: 50565 - DNA, 40 bp, Faecalibacterium prausnitzii
  source 1..40: mol_type = genomic DNA
tggtttaattttgttttgctggggtgggaagaatagaaat

SEQ ID NO: 50566 - protein, 506 aa, Clostridioides mangenotii
MNVTMYLRKSRADLEAEQIGEFETLAKHKAVLLDVAKKKNLNIVDIKEEIVSGDSIINRPQMIKLLQEVEDNKYDAVLVMDIDRLGRGGMKDQGLILETFKYSNTKIITPQKIYDLDDDLDEQMTEMQTFIARQELKMIKKRLTRGQLKSFRDGNYVFGDPPFGYKNQYDCAGKRHLVQDENAETVYLIYDLYVNQNLGVYKIARYLDSLGVKPAKTDSWHPTSVTSILKNKAYCGYFSRGRVKQTRKLNENGNYIFEKQEEDKVEYIKANIKPIISVEMFERAQTIRSGKLKHRGKWPIKNPFSGLVVCGKCGASMNYNTKDVGIYLRCNKTCGNRQVRFEVFEDIVIGALQDTLDSYKIPVNKIDYEEKDKSKESEDLFIINKFESELKELEQQKIKLYDLLERGIYDDDVFLERSENLKYRITNIKGKLKELEKGNINESPKKTEKEIIDGLKNVIDLYPTITNIEKKNSLLKAVIKKIYCIKEPNTKKDDFKIEIELNLDIN

SEQ ID NO: 50567 - DNA, 50 bp, Clostridioides mangenotii
  source 1..50: mol_type = genomic DNA
taagggtaattagtagatggcgacctatcatcatgtccgtattaccccac

SEQ ID NO: 50568 - DNA, 40 bp, Clostridioides mangenotii
  source 1..40: mol_type = genomic DNA
aagctcagccgatgaagcactatcaccgtcaacccctcca

SEQ ID NO: 50569 - DNA, 50 bp, Clostridioides mangenotii
  source 1..50: mol_type = genomic DNA
taagggtaattagtagatggcgaccaatcatcatgtccgtattaccccac

SEQ ID NO: 50570 - DNA, 40 bp, Clostridioides mangenotii
  source 1..40: mol_type = genomic DNA
atcctcacccgctccagcacacccaccctcaccccctcca

SEQ ID NO: 50571 - protein, 538 aa, Streptomyces olivaceus
MLPRQATSPPRDLEPWLGYIRVSTWKEEKISPELQETAIESWARRTGRRIVGWITDLDATGRNFKRRIMQGIEQVEHGEPVGIAVWKFSRFGRNDLGIAINLARLEHAGGQLASATEDVDARTAVGRFNRAILFDLAVFESDRAGEQWKETHAHRRALKLPATGRPRFGYIWHPRRIPDATAPGGIRLQDERYERHPDLGPIGAELYERKLEREGFAALAHWLNDELGIPTTRGNRWAPNTVQRYLDSGFAAGLLYVHDPECTCGLGRDHFSGCTAGRMIYVAGAQPALITPEQWEDYQKHRTDTKNTPPRARRATYSTTGIGACGNCHGTAVARSSRYGKGDTLVCYNHKNKGKSACETGLYVRRDEVEQEIRLWLKRDVAEDVDSAPAMPSQRTVPPDPRKQAAENRARLQAELAKADAALDRLVTDHVLDPDKYPSDTFGRVRDQLMKRKEELVKDLQAVEDVETTPDRADFRPLAVGLLAEWDTITDVEKNAFLRQLLRRVVVTCTKADQGAQWALHRAYEFHPVFEPDPWADR

SEQ ID NO: 50572 - DNA, 50 bp, Streptomyces olivaceus
  source 1..50: mol_type = genomic DNA
gagtgtcctttagagccactgacccacgacagtggctctaaaggacagca

SEQ ID NO: 50573 - DNA, 40 bp, Streptomyces olivaceus
  source 1..40: mol_type = genomic DNA
cgccgtgctgccgttcttccacatctacggcctcaccgcc

SEQ ID NO: 50574 - DNA, 50 bp, Streptomyces olivaceus
  source 1..50: mol_type = genomic DNA
gagtgtcctttagagccactgacccccgacagtggctctaaaggacagca

SEQ ID NO: 50575 - DNA, 40 bp, Streptomyces olivaceus
  source 1..40: mol_type = genomic DNA
cgccgtgctgtgctacttccccatctcctgccccactccg

SEQ ID NO: 50576 - protein, 567 aa, Pseudomonas aeruginosa
MPTAYAYLRYSSKAQGGDDKDSIDRQMASIRALSAHYGVDLLPENIYRDDGVSSFDGSNKKTGKLKDLIDLILNQSINEGDIVFVESIDRLSRQKFRLSKDLVYSILDKGVILITTIDNRIYQRTDDSSKDFEQDLYLTLIAQRAHEESKTKSIRRKSAWNKAKERAEKENKIFNAHNPPYGIIYNKEKDQFEIDEDKANEIRFIFKSLQSTGVSNTIKKVNEFSIKKWTNKTIQILIDSKYPIGYYKAQKRDENKKKVFDRFIENYYPSIITFEDYNNAVSSMKNRSHRKHYGNQSVSSLNIFRHSLFCDECGATMFFETNKNPKGLKFSYYHCSRKKETRQGCDAKRLRFEHIIGLLFDAIEKTFEEYELIKDFTNEELKELEIAIEKDLEKGTEFSKSVLWMKELAELLSGKNKNNDADDKIKRLNNILIKEKMTLENLNKSIEDFGGSIPKIVLKNMIEVESKIEKYEIELNTLKSQSVIDAVLNISSVQDFIELIKKEEGRIEINNFFIKNNISFYAGFSELENSPYLEIHKDNQRIFWNFKKFDLHNPLKLYDFTKITDYE

SEQ ID NO: 50577 - DNA, 50 bp, Pseudomonas aeruginosa
  source 1..50: mol_type = genomic DNA
agtgtgtagaacacccctaccagttgagagcggggggtagtattctcaca

SEQ ID NO: 50578 - DNA, 40 bp, Pseudomonas aeruginosa; identical to SEQ ID NO: 21653
  source 1..40: mol_type = genomic DNA

SEQ ID NO: 50579 - DNA, 50 bp, Pseudomonas aeruginosa
  source 1..50: mol_type = genomic DNA
agtgtgtagaacacccctaccagtgcagagcggggggtagtattctcaca

SEQ ID NO: 50580 - DNA, 40 bp, Pseudomonas aeruginosa
  source 1..40: mol_type = genomic DNA
aggtcctgcacgggctgctgcacatctttgcgctcgtcat

SEQ ID NO: 50581 - protein, 507 aa, Citrobacter freundii
MKRVISYIRFSSEKQARGDSLRRQSKMVTDWLKAHPEYYLDESLTFRDLGVSGFTGKHLQGGLGDFLTAIEKGLVKAGDTLLIESLDRLSRQDVDQASELLRNILRSGVDVVTLSDGEHYTKESLKDPLALIKSILIMQRAHEESLRKSERIQAAWDAKKESAKAGIKISKRCPAWLKLNDDRKSFSVIPEKVETVKRCFQLRLEGKSIWDIVRTLNAEGHQTLNQYKAGSFGQTSVQDLLKNRSVIGYFTPKGCEEISGYYPSIIPETDFYRVQQLSYSRYGRKPVSENPMAVNLFKGVIRCSECGHTLIINGFTEKRHGIYRCPCKQENRCNAKGLSRKQTDGTLLALLSRIDRFEPEQINVIDTLKLQREGILKNIEKLVELSLIIDDMTAITSKLKQLKSDLSLIESDIEKENQRIKSIDTGSLSDCDLRTKAGRIEAQLIIRGVVKEAVLDTTNKRCKVVFHNGKVIDLPITENPLEAVTEAIQSLSEIASKGLLDIDEFSL

SEQ ID NO: 50582 - DNA, 50 bp, Citrobacter freundii
  source 1..50: mol_type = genomic DNA
aggtgtatttagaccttgctaatgctggacagacacgtttaaatacacca

SEQ ID NO: 50583 - DNA, 40 bp, Citrobacter freundii; identical to SEQ ID NO: 7518
  source 1..40: mol_type = genomic DNA

SEQ ID NO: 50584 - DNA, 50 bp, Citrobacter freundii
  source 1..50: mol_type = genomic DNA
aggtgtatttagaccttgctaatggtggacagacacgtttaaatacacca

SEQ ID NO: 50585 - DNA, 40 bp, Citrobacter freundii
  source 1..40: mol_type = genomic DNA
tggggaaaacggggtgattgtgcacagaggcccagcacgc

SEQ ID NO: 50586 - protein, 540 aa, Escherichia coli; identical to SEQ ID NO: 13256

SEQ ID NO: 50587 - DNA, 50 bp, Escherichia coli; identical to SEQ ID NO: 13257
  source 1..50: mol_type = genomic DNA

SEQ ID NO: 50588 - DNA, 40 bp, Escherichia coli
  source 1..40: mol_type = genomic DNA
aatttcccagtgaccagacggggtgtctttaccggatgac

SEQ ID NO: 50589 - DNA, 50 bp, Escherichia coli
  source 1..50: mol_type = genomic DNA
caatatctttaagtatgtgataccaaagtttcacataattaaagatacca

SEQ ID NO: 50590 - DNA, 40 bp, Escherichia coli
  source 1..40: mol_type = genomic DNA
aacttcctagtggccagaaaaggtgaatttgctggatgtg

SEQ ID NO: 50591 - protein, 468 aa, Carnobacterium divergens
MEINKLKAALYVRVSTTEQANEGYSISAQTEKLTNYAKAKDYQIVKTYTDPGISGAKLDRPALQNMITDIEKGMIDIVLVYKLDRLSRSQKNTLYLIEDVFLKNKVDFISMNESFDTSTSFGRAMIGILSVFAQLERDAITERTRMGKIERAKEGKWQGGGNFAPFGYRYENDILKVNEFEKIIVQEMFDLYLEGYGTNKIAEILGTKYPGKVKSPNLVKGILRNKIYIGKINFAGEIYDGLHETFIDKKIFQNVQEIYGKRANKTYKGDYNQKGLLLGKIYCAKCGAKYYRQVTGSVKYRYVKYACYSQNRSLSSKTMVKDRNCVNKRYNAEELEQSTIDKINKLTVAELTSTTNLKLLDNRKTIEKEIKNLESQINKLIDLFQLGNISTELLSSRIDNLNIQKNNLEIELSKLKKVKTKKEIESKLQTLKDFDWDTETTINKIKMIDEFIDKITINDDEVLIHWRL

SEQ ID NO: 50592 - DNA, 50 bp, Carnobacterium divergens
  source 1..50: mol_type = genomic DNA
ttttaggtggttggcacccctaccgacatagctatatcaaccctcaataa

SEQ ID NO: 50593 - DNA, 40 bp, Carnobacterium divergens
  source 1..40: mol_type = genomic DNA
ttcccttggatgagctaccgattgacttaatcccccaaca

SEQ ID NO: 50594 - DNA, 50 bp, Carnobacterium divergens
  source 1..50: mol_type = genomic DNA
ttttaggtggttggcacccctaccagcatagctatatcaaccctcaataa

SEQ ID NO: 50595 - DNA, 40 bp, Carnobacterium divergens
  source 1..40: mol_type = genomic DNA
ttccctttgatgaatcaacagttcactgaatcactaaaca

SEQ ID NO: 50596 - protein, 476 aa, Metabacillus idriensis
MKCVIYRRVSTEMQREEGFSLEAQKSRLLSYIESQGWTLVEDYADEGVSAKNIERPALQRLIADMRLGKFEVVLVYRLDRLVRSVTDLHAMLQEFERNSVKFKSATEVFDTTSAMGRLFITMVGAMAQWERENLAERVTMGMQKKHEEGKRNGARAPFGYDIGEDGELIPNEAEAKWVRYIFEAFKTKGRKMIAQELNNNGVRTKLGALWNDFALHYIVTNPVYYGALRWNYRKTSGARTHEETVITASHVPLITKELYDEVQEVRTARKGSGFKSDTHYPFTGVIKCARCGKSFVGAKRKKKDGEYRFYRCRGRFTYGVCDMPIIPEEVIEEEMIREFPLQEIAKYAEPIEEETDVDVEALRKELERINSAEKRLKDMYKWGDLTEVEYRGDMAALKERRSLIEDNLRTDSASLALEEIKEAFDIISENWAEMSYEGRKNIIKELISSATIEVTGAVKGGPGNRPNIKITDYQWR

SEQ ID NO: 50597 - DNA, 50 bp, Metabacillus idriensis
  source 1..50: mol_type = genomic DNA
tggtatctttgcgatagccaaggatctccgtgacaatcataaagtaaccg

SEQ ID NO: 50598 - DNA, 40 bp, Metabacillus idriensis
  source 1..40: mol_type = genomic DNA
ccgttcttccttccaaggatctcctttcatgtgatatccg

SEQ ID NO: 50599 - DNA, 50 bp, Metabacillus idriensis; identical to SEQ ID NO: 50597
  source 1..50: mol_type = genomic DNA

SEQ ID NO: 50600 - DNA, 40 bp, Metabacillus idriensis
  source 1..40: mol_type = genomic DNA
ccattcttccttccaagcttctccatacacttgatgtttg

SEQ ID NO: 50601 - protein, 559 aa, Burkholderia sp IDO3
MAAKARVYSYLRFSDPKQAAGGSIDRQLEYAARWAADHELELDASLSLRDEGLSAYHQRHVRQGALGVFLRAVEDGQVPTGSVLVVEGLDRLSRAEPLQAQAQLAQIVNAGITVVTASDGREYNRERLKAQPMDLVYSLLVMIRAHEESDTKSKRVKAAIRRQCQGWIAGTWRTPIRVGKDPHWVRECDGGTFELIPERAEAVRHVIAMFRQGHGAVRIVRDLAERGLQITESGRTQSSNLYRLLANRMLLGEKSIEVDGETFRLEGYYPALLTPAEFADLRYLAEQRGRRKGKGEIPGVVTGLGITYCGYCGAAVVAQNLMGRRRMPDGRPTPGHRRLHCVTYSTSSGCKISGSCSVAPVERALMLYCSDQINLTRLLEGDAGTASLAAQLASSRQRVADLEAQVQRVTDALLLDDGEAPAAVLRRVRELESQLASERRDVDSFEHRLAASASNVAPAAAEAWRDLVSSVEHLDYDARMLARQLVADTFSRIVIYQSGFRPDVDDGSIGLLLTAKRGTTRMLHVDRRTGEWRSAEELGTSCPEHVPIPTASADVGAPE

SEQ ID NO: 50602 - DNA, 50 bp, Burkholderia sp IDO3
  source 1..50: mol_type = genomic DNA
ggcatattttggatgactctcgggcacccgagggataccatacctatacg

SEQ ID NO: 50603 - DNA, 40 bp, Burkholderia sp IDO3
  source 1..40: mol_type = genomic DNA
gtcgacgagcgccttcgggcagccgagcgaaacgaagcct

SEQ ID NO: 50604 - DNA, 50 bp, Burkholderia sp IDO3
  source 1..50: mol_type = genomic DNA
ggcatattttggatgactctcgggggcccgagggataccatacctatacg

SEQ ID NO: 50605 - DNA, 40 bp, Burkholderia sp IDO3
  source 1..40: mol_type = genomic DNA
tccgagcggcgcctgctgggggcggagggagacgaagcct

SEQ ID NO: 50606 - protein, 553 aa, Burkholderia ubonensis
MWGMAAKSRVYSYLRFSDPKQAAGGSIDRQLEYAARWAADREMELDASLSLRDEGLSAYHQRHVRQGALGVFLRAIEDGQVPAGSVLVVEGLDRLSRAEPLQAQAQLAQIVNAGITVVTASDGREYNRERLKAQPMDLVYSLLVMIRAHEESDTKSKRVKAAIRRQCEGWIAGTWRAPIRVGKDPHWVRETEGGGFELAADRASAVRLVIEMFRQGHGAVRIVRELAERGLQISETGRTHSSNIYKILANRMLIGEKSVEVDGETYQLDNYYPALLTPAEFADLRYLAEQRGRRKGKGEIPGVVTGLGITYCGYCSAAIVAQNLMGRKRLPDGRPYPGHRRLHCVTYSQSVGCKISGSCSVVPVERALMLYCSDQMNLTRLLEGDAGTASISAQLASARQRVAELEAQIRRVTDALLFDDGDAPAAVLRRVRELESQLASERRDVESFEHHLAASASNVAPAAADAWRELVQGVEQLDYDARLMARQLVADTFSRIVIYQSGFQPETDHGTIGVVLVGKRGNTRMLNVDRRTGEWRSAEDIELSGLATIPLPA

SEQ ID NO: 50607 - DNA, 50 bp, Burkholderia ubonensis
  source 1..50: mol_type = genomic DNA
ggtatattttcaatatactttgggcacccgagggatactatacctatacg

SEQ ID NO: 50608 - DNA, 40 bp, Burkholderia ubonensis
  source 1..40: mol_type = genomic DNA
gtcgaccagcgctttcgggcagccgagggatacgaaccct

SEQ ID NO: 50609 - DNA, 50 bp, Burkholderia ubonensis
  source 1..50: mol_type = genomic DNA
ggtatattttcaatatactttgggggcccgagggatactatacctatacg

SEQ ID NO: 50610 - DNA, 40 bp, Burkholderia ubonensis; identical to SEQ ID NO: 50605
  source 1..40: mol_type = genomic DNA

SEQ ID NO: 50611 - protein, 482 aa, Janibacter melonis
MTKRVALYARISVSKEESVSVARQLDAGRKLAEARGWEVVLVEKDDGVSASKSRPEDRDGWGRILHSDEPYDAVVIWKLDRLARRTIDFLHADGALQARRRPAAVVSVEESIDMTTPIGRVVATILAAFAELEASSISARVSAAKSYLAEVGRWPGGTAPYGWHAVQREGLPGWYLEKDPRTTEYVEGAARLVLSGASVYSAKQWLEAQGAPLPEASQGTRVRTGWSYRTVERVLRSPLLAGMTRKGDDVVRGADGRPRVDESLAVLTEGERRLLLALLDDKTDPRRQPRSSSVTTPFLAGVAVCDDCEKTMTRGTTSKRPALICTACHMTISRVQLEEHLVARLLDERGDEPVIEVTREAPSIDEAALADVEAEIQGATDAMREDDADVAALAERLVALKKARTKIKSMPSNSPDDFPWTFSGQTVKEAWAAAGDNHLARRQVLVGQLDGDRFRIRRGKVGRYLDTSRVVIAWNEGFPAMA

SEQ ID NO: 50612 - DNA, 50 bp, Janibacter melonis
  source 1..50: mol_type = genomic DNA
ccataggactctttacctgtctgcctgggtgcaggcagagcatcacacgg

SEQ ID NO: 50613 - DNA, 40 bp, Janibacter melonis
  source 1..40: mol_type = genomic DNA
gcagggtcgtcttgcccgcctgcgtgccgccggcgacgag

SEQ ID NO: 50614 - DNA, 50 bp, Janibacter melonis; identical to SEQ ID NO: 50612
  source 1..50: mol_type = genomic DNA

SEQ ID NO: 50615 - DNA, 40 bp, Janibacter melonis
  source 1..40: mol_type = genomic DNA
gcagggtggttgtccccagctgggagccgcaggcgatgag

SEQ ID NO: 50616 - protein, 478 aa, Brevibacterium epidermidis
MVELVSLRKTNEVAAYVRASMDRKGDRWTVETQLRKIRALAEAKDWKVVEVYDDNAVSATKKRRAGTRWAEMLEDARAGKFSMVVAVDMDRLLRSTKDLNTLIDLGLRVVTVDGEIDLSTADGEFRATMLAALARFEARRKAERQIRSNERRRAEGIPTSAWKAFGWTRDGELIEEEAAAVRRAFDAFLGEPSLSIRRIREDLNSAGHFTARGSEFSVDAVRYLLANPLYCGYIKHYASGELYPVQGEAFPPIVGEQTWRAAVAKLEDNVRRSARQGNQPKYLLSTIGLCGKCGATLVSGTNSRKQSTYRCGEQFHLTRQREPVDAMVTEAVLTRLSSVDVHDLVMPQEDDGPDREELLTERNALVDRVKELSPLLRDIHQPVLEITAAINDVKARIDEIDAELLDRSVSAAAKLLADVEEPVGTAERREVVEAKWKALDVDRRRMLVDELVTVTIEPITPGHVKFDPDLIRIEPRRD

SEQ ID NO: 50617 - DNA, 50 bp, Brevibacterium epidermidis; identical to SEQ ID NO: 41162
  source 1..50: mol_type = genomic DNA

SEQ ID NO: 50618 - DNA, 40 bp, Brevibacterium epidermidis
  source 1..40: mol_type = genomic DNA
gaggtagagcgggttctcatagcgcatatcgatgacccct

SEQ ID NO: 50619 - DNA, 50 bp, Brevibacterium epidermidis
  source 1..50: mol_type = genomic DNA
caacgccataactcagacatgcgcgggcgcatgtagcggttgcaacaccc

SEQ ID NO: 50620 - DNA, 40 bp, Brevibacterium epidermidis
  source 1..40: mol_type = genomic DNA
gaggtagaggaggggctcagggccctctccgatgccccct

SEQ ID NO: 50621 - protein, 540 aa, Flavonifractor plautii; identical to SEQ ID NO: 12131

SEQ ID NO: 50622 - DNA, 50 bp, Flavonifractor plautii; identical to SEQ ID NO: 2472
  source 1..50: mol_type = genomic DNA

SEQ ID NO: 50623 - DNA, 40 bp, Flavonifractor plautii
  source 1..40: mol_type = genomic DNA
catctcaaaatgggagcaaggcctgtccgtcccggactcc

SEQ ID NO: 50624 - DNA, 50 bp, Flavonifractor plautii; identical to SEQ ID NO: 38974
  source 1..50: mol_type = genomic DNA

SEQ ID NO: 50625 - DNA, 40 bp, Flavonifractor plautii
  source 1..40: mol_type = genomic DNA
cctcagaaaaagggagtgaagcctgtgcatcctggacgcc

SEQ ID NO: 50626 - protein, 589 aa, Klebsiella quasipneumoniae; identical to SEQ ID NO: 49991

SEQ ID NO: 50627 - DNA, 50 bp, Klebsiella quasipneumoniae; identical to SEQ ID NO: 45382
  source 1..50: mol_type = genomic DNA

SEQ ID NO: 50628 - DNA, 40 bp, Klebsiella quasipneumoniae
  source 1..40: mol_type = genomic DNA
gctcggcgtcaccatcggcaacaccgacggcaatatcatc

SEQ ID NO: 50629 - DNA, 50 bp, Klebsiella quasipneumoniae
  source 1..50: mol_type = genomic DNA
gattatacctattacacttcagtgattactaaggtaaactacatcccatt

SEQ ID NO: 50630 - DNA, 40 bp, Klebsiella quasipneumoniae
  source 1..40: mol_type = genomic DNA
catcgtcgtcaccatcatcatcatcgtcgtcaccatcatc

SEQ ID NO: 50631 - protein, 450 aa, Rhodococcus sp 008
MRTAIYTRISLDRTGERLGVERHFEDCVELAESLNWEVVEHYSDNDISASKDLVRPRYEDMLADIQAGKIDAVVVYHADRLYRSPLELERLIDFIAHTQIRTVKSGPLDLTTYSGRMLARILGSVARAEVDAMSDRRKRANDQKAASGIWIASRRPFGYTIDGELLEPEATAIREAVQSVLSGMSVRQVAREWNAAGLRTAHGGQEWKSTSVRRVLKNPRYAALRVHRGAVVGTGQWPAIIDVDAHYGIVAFLDDPKRSSGLGFERKWQGSGVYRCGVCDERMVVHVDANKRRSYKCPQNHVRRQGVALDELVDGVVIARLSMPDAAVVLQSDEIDVAGLQVERDSLQARAEQIAGMFGSGAMDAGQFEAANAALQLQVDRVDAELGKARMGDPLVELVLAGDRLVEVWESKSPDLRGKIIDALMVVRVHPSDKGLRRFDPRFIEIERKV

SEQ ID NO: 50632 - DNA, 50 bp, Rhodococcus sp 008; identical to SEQ ID NO: 47057
  source 1..50: mol_type = genomic DNA

SEQ ID NO: 50633 - DNA, 40 bp, Rhodococcus sp 008
  source 1..40: mol_type = genomic DNA
aggcggtgcaacctttctcggcctcgaggaggcgccgcac

SEQ ID NO: 50634 - DNA, 50 bp, Rhodococcus sp 008
  source 1..50: mol_type = genomic DNA
cagtggtccaccttgacatccgttagaactgattgtcaagtactacacgc

SEQ ID NO: 50635 - DNA, 40 bp, Rhodococcus sp 008
  source 1..40: mol_type = genomic DNA
aggctgggcatcatctctcagcctggaggaggagacgcca

SEQ ID NO: 50636 - protein, 450 aa, Rhodococcus qingshengii
MRTAIYTRISLDRTGEGLGVERHFEDCSALAKTLNWEVVEHYSDNDISASRGLVRPRYEDMLADIQAGKIDAVIVYHADRLYRSPLELERLIAIFANTEIRTVKSGTLDLTTYSGRMVARILGSVARAEVDAMSDRRKRANDQKAASGLWIASRRPFGYTIDGELLEPEATAIREAVQSVLSGMSVRQVAREWNAAGLRTAHGGQEWKSTSVRRVLKNPRYAALRVHRGAVVGSGQWPAIIDVDAHYGIVAFLDDPKRSSSLGFERKWQGSGVYRCGVCDERMVVHVDANKRRSYKCPQNHVRRQGVALDELVDGVVIARLSMPDAAVVLQSDEIDVAGLQVERDSLQVRAEQIAGMFGSGAMDAGQFEAANAALQLQVDRVDAELGKARMGDPLVELVLAGGRLVEVWEGKSPDLRGKIIDALMVVRVHPSDKGLRRFDPRFIEIERKV

SEQ ID NO: 50637 - DNA, 50 bp, Rhodococcus qingshengii; identical to SEQ ID NO: 36182
  source 1..50: mol_type = genomic DNA

SEQ ID NO: 50638 - DNA, 40 bp, Rhodococcus qingshengii; identical to SEQ ID NO: 50633
  source 1..40: mol_type = genomic DNA

SEQ ID NO: 50639 - DNA, 50 bp, Rhodococcus qingshengii
  source 1..50: mol_type = genomic DNA
cagtggacaaccctgacatctgttaggactgattgtcaagtactacacgc

SEQ ID NO: 50640 - DNA, 40 bp, Rhodococcus qingshengii; identical to SEQ ID NO: 50635
  source 1..40: mol_type = genomic DNA

SEQ ID NO: 50641 - protein, 516 aa, Paenibacillus aquistagni
MLKVVIYARVSTKRDAQKNSLENQVSYAMNLAAQNGWSVVGQYIDDGISGATRNKREGIQRLLYGAKKKNFDAVIAKSVSRLGRNAVENLQTAHEIESVGIRLILPEDNYDTETSSSRLMFNLKAVLAEEESAKLSERIKIGLRASARQGVYKASLPAFGYKRDPLRKRLELDENFAPIVRKIFDLYLCKDWGMYKISNHLIDQGIPTPRTVSGGSNAGELWHQSTVKLILSNIVYTGTLVQHQEETKDFISKRRKQVEPDKQIVFKDAHPAIISIEEYNAVQEKMRQKGTSKSNGRESLFAHLAVCADCGKGMVFRTDRRKSGAYVCGGYVKHSRSYCSSHIVEFDTLLQAVKDDLKELIADNVKLEKLYGAAHGKANEQQAKINKELTSVSKRLNQLNKEFQSLLQLYSEKVIDIVQFKSQNEHIQEEQARLTHKKAEIESLLVTKKDMDEQLHAFRKQIARFAKLDINDEQVFKQILHRLIQRIEVNEEGMINAIHYNITCPQSFRALEKRGA

SEQ ID NO: 50642 - DNA, 50 bp, Paenibacillus aquistagni
  source 1..50: mol_type = genomic DNA
ttttagtaacactgtacactccacatgtgacgagtagacagtgacaacaa

SEQ ID NO: 50643 - DNA, 40 bp, Paenibacillus aquistagni
  source 1..40: mol_type = genomic DNA
gcgacacacagcactccacatgactcgtatgcgggaacat

SEQ ID NO: 50644 - DNA, 50 bp, Paenibacillus aquistagni
  source 1..50: mol_type = genomic DNA
ttttagtaacactgtacactccacgcgtgacgagtagacagtgacaacaa

SEQ ID NO: 50645 - DNA, 40 bp, Paenibacillus aquistagni
  source 1..40: mol_type = genomic DNA
tagacacacagtgctccatgcgtcttgtatcctgcaacat

SEQ ID NO: 50646 - protein, 492 aa, Corynebacterium macginleyi
MAHPLTKITLPAGIYVRISLDKHDGAGVERQEQACRTLATELGLEVGRVYSDNSISAYSGKVRPGFIDLVADVKARKIGAVLSFAPDRISRNVSEYGLFKATLKNMHCRLVYVNGGEQALDDPNADLISTMLSGVSQWESAIKSTRVAAAYAQQRARGDYPSKPNRLFGYTHDGELHPTEAPLVREAATRILAGESLRRIAREWEDNGVTTTAGGRPTAQNLRTVLLTPTTGGFTHYKLKKKDYSAAEWEQLSAWDKLGIIGRGTWEPVLDPEVWQALWAHLTNPVRKTNLVGNTPQHLLSGIVRCGKCGERMYCRNKWYKKKNEKEPKRVYWCKSRGGGHPTRIADPLERYVTDLVLTRLHQSDIVGELAAGVDSDRRAELTTTRDMVRGRMADLEQQATLGNVSMEQFGRMNRTLADQLEAIDAELVELAGAGGVLAELAGVTDVRAWWVTATLELKREVIRTLMTITIEHTGGPQAKFNPEFVTVEWKI

SEQ ID NO: 50647 - DNA, 50 bp, Corynebacterium macginleyi
  source 1..50: mol_type = genomic DNA
gtttacaccaatccaccaattagcaaccttgttagtgaattggtgtaaaa

SEQ ID NO: 50648 - DNA, 40 bp, Corynebacterium macginleyi
  source 1..40: mol_type = genomic DNA
cgggccgacgactcccgcaaacctggcgtgcctgtgccag

SEQ ID NO: 50649 - DNA, 50 bp, Corynebacterium macginleyi
  source 1..50: mol_type = genomic DNA
gtttacaccaatccaccaattagctcccttgttagtgaattggtgtaaaa

SEQ ID NO: 50650 - DNA, 40 bp, Corynebacterium macginleyi
  source 1..40: mol_type = genomic DNA
caggctgccgcctcccccatccctggcctccccgtgtctg

SEQ ID NO: 50651 - protein, 492 aa, Corynebacterium macginleyi
MAHPLTKITLPAGIYVRISLDKHDGAGVERQEQACRTLATELGLEVGRVYSDNSISAYSGKVRPGFIDLVADVKARKIGAVLSFAPDRISRNVSEYGLFKATLKNMHCRLVYVNGGEQALDDPNADLISTMLSGVSQWESAIKSTRVAAAYAQQRARGDYPSKPNRLFGYTHDGELHPTEAPLVREAATRILAGESLRRIAREWEDNGVTTTAGGRPTAQNLRTVLLTPTTGGFTHYKLKKKDYSAAEWEQLSAWDKLGIIGRGTWEPVLDPEVWQALWAHLTNPARKTNLVGNTPQHLLSGIVRCGKCGERMYCRNKWYKKKNEKEPKRVYWCKSRGGGHPTRIADPLERYVTDLVLTRLHQSDIVGELAAGVDSDRRAELTTTRDMVRGRMADLEQQATLGNVSMEQFGRMNRTLADQLEAIDAELVELAGAGGVLAELAGVTDVRAWWVTATLELKREVIRTLMTITIEHTGGPQAKFNPEFVTVEWKI

SEQ ID NO: 50652 - DNA, 50 bp, Corynebacterium macginleyi; identical to SEQ ID NO: 50647
  source 1..50: mol_type = genomic DNA

SEQ ID NO: 50653 - DNA, 40 bp, Corynebacterium macginleyi; identical to SEQ ID NO: 50648
  source 1..40: mol_type = genomic DNA

SEQ ID NO: 50654 - DNA, 50 bp, Corynebacterium macginleyi; identical to SEQ ID NO: 50649
  source 1..50: mol_type = genomic DNA

SEQ ID NO: 50655 - DNA, 40 bp, Corynebacterium macginleyi; identical to SEQ ID NO: 50650
  source 1..40: mol_type = genomic DNA

SEQ ID NO: 50656 - protein, 630 aa, Salmonella enterica
MPQLYSYIRWSTDRQDKGTTRNRQLAAAKVYAAEAGLEMVEIEDPGVSAFRGKNTNTGKLGDFIDAVKQGAIASDSWLYVENLDRITRQNVTTAQKLFIELLELGLTLVTGMDKRVYTLDSVNKNPTELMISLLLFSRANEESETKSNRTIGNVVALVERHQAGLPVNIKSVGRHPFWIDDSGSQYEAVKEHPVYWSIAREAIDMFLDGNGIYTVKRYLDEKYPNGLKGKEWDYQVLKKMRDNRALIGERTINVGGATYKLDNYYPWLCKDEAEFLTLAERKQQNNYKAKKDKTEEIKLLSGLQVLRCSKCGGTMHSFMNHGSARYICTNGVHLQKNCSGWSISAQLVEHCTIISLLIGYMDKSRKDGIDTTAIEEEISRKEILITDLESRIANMAQAIAIAPDVSALAVQLNTFDLERKKTVLEVDKLKERLHSLKGKGSLEVDITDFLMLIQWSVFTNMEDADRNKIRKIISSIIESIIVEKADGCITIKIKCHHKDEWLVFGGVNRKPFWAFTIEYSTNDAKEIEGGDSSNFVSNTLFQKAVEQLDSIKQSYLKLFETANTMLGVVGYSDIRGASFWPNTGQYERANVEYEGIAYSIAMNGRVSKAITAALEATGLSRKDFIERYKV

SEQ ID NO: 50657 - DNA, 50 bp, Salmonella enterica; identical to SEQ ID NO: 46807
  source 1..50: mol_type = genomic DNA

SEQ ID NO: 50658 - DNA, 40 bp, Salmonella enterica
  source 1..40: mol_type = genomic DNA
atcaacgaggtttttcggacagcccagggaaacgaagccg

SEQ ID NO: 50659 - DNA, 50 bp, Salmonella enterica
  source 1..50: mol_type = genomic DNA
taatttattttttgattattaggggtccctaatgatataaatccaatctt

SEQ ID NO: 50660 - DNA, 40 bp, Salmonella enterica
  source 1..40: mol_type = genomic DNA
aggatcgatgcgttcctgagttcccagggaaacgaggccg

SEQ ID NO: 50661 - protein, 531 aa, Pluralibacter gergoviae
MKVPVWSYARVSTVTQVDGFGIQRQINTINQFLQYLTLDHRLPFTIDTDNITQMVAEGRSAFKGKNWNDKTKLGQYRKMVMDGVLPDSVLIVENVDRLVRIDPYKAVEIISGMINRGTTILEIETGMTYSRYIPESITVLTMQINRANGESKRKSIMMKKSHENRYGNVSRVRPRWFDVVEIDGIKQYRINETAKAIQRMFGDYVNGIGAAQIVRTYGKTDNGKGWTLVTVLRTLSDKRVADDPRYPPIIDKVLYERVQAMKLATNKSGNTHQRNMLNIFSGMSRCPVCNKAIIVKRNSHGGLFTVCLGKRTDKVCKAKAMAYNAIERPLLEAIRGLDFSEVYNHEESTVLTLRDQWIQNERDITAFRERLAKASRHEKFAILDELETISKEQEELSIRLKSMDAPKDVQISYNDDKLDLDVEYRIELNNRMKKLIQEINIGRVDTSKSAYTIYCTIKYWTDKVKHLVIIDTESTRIGKGGANTLTTSLRSVSSINADGTFYGNPDEEAVRYWQQAINKVFVEAGEPAPFK

SEQ ID NO: 50662 - DNA, 50 bp, Pluralibacter gergoviae
  source 1..50: mol_type = genomic DNA
gggcgtacatactgtactagctacgagcagttgtgatagtatgttcactc

SEQ ID NO: 50663 - DNA, 40 bp, Pluralibacter gergoviae
  source 1..40: mol_type = genomic DNA
ggggcccatcagcagtaaagagcagtctgtggtgccgccg

SEQ ID NO: 50664 - DNA, 50 bp, Pluralibacter gergoviae
  source 1..50: mol_type = genomic DNA
gggcgtacatactgtactagctacctgcagttgtgatagtatgttcactc

SEQ ID NO: 50665 - DNA, 40 bp, Pluralibacter gergoviae
  source 1..40: mol_type = genomic DNA
ggggcaccccagcaatggactgcagcctggagtgcggccg

SEQ ID NO: 50666 - protein, 479 aa, Mycobacterium avium
MAKMKSAGQRAGVRSAAIYARISADVEGTGLGVARQLEDCRKLSTDRGWPVGDEYVDNDVSAFSGKPRRQYARMLADLASGARDAVIVYNLDRLHRRPVELEEFVALCESVGVRDVATVTADIDLGNDDGLFMARIFAAFAAKESGRKSARIRRKMLQNAEQGLPHGSVRPFGYEDDKITLRTSEAAVVREMVDRYLAGQSLLSLTVWLNDSGVSPAVAKSWQTSAVRQILCSGRIAGLREHRGEVIGPAKWPAIITPAERDRILARIAARSVTKTRAARTYVLSGMLRCGRCGNRLYSQARHSNPDHRVRRYVCLKGPDHGGCGRLTVVAEPVEALLTDAVLTRLDSRDLAKVLAGKASPNHDVAALAAAVEADQTRLDELAGLYADGAISAREWIAARDPITSRIQQARRDIAEATDTSEVYELAGTGGALRGQWPDLDVERQRSIVKSILDHAVIAPGTPGSRSLDINRVQPHWRI

SEQ ID NO: 50667 - DNA, 50 bp, Mycobacterium avium
  source 1..50: mol_type = genomic DNA
ggggttggttacggacttgtcagcaaagttagatgctgctaatatacccc

SEQ ID NO: 50668 - DNA, 40 bp, Mycobacterium avium
  source 1..40: mol_type = genomic DNA
gggtattaccaatggcgcaaatcccgcaaccgtgggccca

SEQ ID NO: 50669 - DNA, 50 bp, Mycobacterium avium
  source 1..50: mol_type = genomic DNA
ggggttggttacggacttgtcagctgagttagatgctgctaatatacccc

SEQ ID NO: 50670 - DNA, 40 bp, Mycobacterium avium
  source 1..40: mol_type = genomic DNA
gactatgaccagaggcacatgtgcctcaacagtcggccca

SEQ ID NO: 50671 - protein, 543 aa, Agrobacterium tumefaciens
MEKVESRESSAIKRAVGYFRVSTGRQAESDLSIPDQRKQVIEYCNRKGWELVQEFVEPGQSATDDNRPALQEMIAQATTHGSPYDVILVHSYSRFFRDSFAMEYYIRKLAKAEVEVVSITQELGNAPAQIMMRHIIGLFDEYQSRETAKHTLRSMKENARQGFYNGAPLPLGYKAVEVEVRGQRVKKKIVVDLTEAETVRLIFQLYLRGDGTSGALGCKALVSWLNERGYRTKTSARFGVGSVAFILKNRSYTGEFLFNRMEAKTRKLKPASEQVSVGVPPIVSLEEFEAVQATLHARNPRVTAPRTVTAPTLLSGLAFCSQCNSSLILRTGTSHTGKVHRYYSCRANLRSGKVACEGVSIKMETLDTEVVQHLSEQMLTVGRLTELISSISLARNENNAGASRRLSDLSSELGDTEARLKRIYLSIENGTAEVDDLFRSRIAQLQTERQRTVDALARLRATTKIVEVVTPEAIVKFSGVMRENIADGEPSFRRAYMRSVIERIMVGSDTIKIIGLKSTLENAVGTDSLPYIPVRSFERKWRP

SEQ ID NO: 50672 - DNA, 50 bp, Agrobacterium tumefaciens
  source 1..50: mol_type = genomic DNA
ttcgcagttttgaacgtaaatggcgacccactagagacgaaaatctgaac

SEQ ID NO: 50673 - DNA, 40 bp, Agrobacterium tumefaciens
  source 1..40: mol_type = genomic DNA
ggacccagctagaaatggcgacccctgcaggattcgaacc

SEQ ID NO: 50674 - DNA, 50 bp, Agrobacterium tumefaciens
  source 1..50: mol_type = genomic DNA
ttcgcagttttgaacgtaaatggctgcccactagagacgaaaatctgaac

SEQ ID NO: 50675 - DNA, 40 bp, Agrobacterium tumefaciens
  source 1..40: mol_type = genomic DNA
ggacccaggaagacacccctgcacctgcaggcttcgaagt

SEQ ID NO: 50676 - protein, 524 aa, Paeniclostridium sordellii
MIAAIYSRKSKFTGKGESIENQIQLCMDYGKNLGIKDFLIYEDEGFSGKTTDRPKFKEMLKDAKNKKFDYLICYRLDRISRNVSDFSTLIEDLNKLDISFISIKEQFDTSTPMGRAMMYISSVFAQLERETIAERVRDNMYELARTGRWLGGKTPHGFVSKQISYFDENMRERNMYQLSVDENEMETIKLVFDKYLELRSLSKLYKYVYSNGIKGPRGGNFDPSSLSIILRSPAYVKANDEVLNYLRNNNMEVIGTPNSSFGILTYAKNTTTPIAAVAKHDGVINADKWLEAQSLLNINKDKAPRVGTGKKTLLSGLLKCSKCNSNMRVNYKHSNTGTIIYYVCGTKKTLGVSICNCKNIRADKLESIIVDKIRNQNTDSIINAYNEIKNENTKDNDDLIKDLKKLKDKIKDKETLIDTLIMQLARLTDISTSELIINKLEIMNKELAVLKQELESLEDISNTLNKTEIDIDILIDNINKFQSEIGSADLERQKFLLSTIIENIIWYDENETAVINYLGIKKKV

SEQ ID NO: 50677 - DNA, 50 bp, Paeniclostridium sordellii
  source 1..50: mol_type = genomic DNA
agttgcactttgaaacacatagcagaggcgctatctacaaaagtactact

SEQ ID NO: 50678 - DNA, 40 bp, Paeniclostridium sordellii
  source 1..40: mol_type = genomic DNA
agttactcacgatataggtgaagctatatcaatgtctgat

SEQ ID NO: 50679 - DNA, 50 bp, Paeniclostridium sordellii
  source 1..50: mol_type = genomic DNA
agttgcactttgaaacacatagcaagggcgctatctacaaaagtactact

SEQ ID NO: 50680 - DNA, 40 bp, Paeniclostridium sordellii
  source 1..40: mol_type = genomic DNA
cgtttccaacgatatagctagagctatacaaatatctact

SEQ ID NO: 50681 - protein, 638 aa, Citrobacter freundii; identical to SEQ ID NO: 13566

SEQ ID NO: 50682 - DNA, 50 bp, Citrobacter freundii; identical to SEQ ID NO: 13567
  source 1..50: mol_type = genomic DNA

SEQ ID NO: 50683 - DNA, 40 bp, Citrobacter freundii
  source 1..40: mol_type = genomic DNA
gcatggcgtattagcgggcttgccatcaggcataccaggg

SEQ ID NO: 50684 - DNA, 50 bp, Citrobacter freundii
  source 1..50: mol_type = genomic DNA
actgagaataattgactgttaggcgagcctaacatataattattcactgt

SEQ ID NO: 50685 - DNA, 40 bp, Citrobacter freundii
  source 1..40: mol_type = genomic DNA
gcatgacttattagagtgtgagcttttaggcagacctggg

SEQ ID NO: 50686 - protein, 626 aa, Enterocloster bolteae
MISTLTDTPQIIDGYVRLSRDDNKRNYSSIENQKKIIQQYAEENNMIIRHIYEDDGISGYSFNRPDFQKMMASLDTINVIVAKDLSRIGRHNAKVLLFLEEMEEMGKRVILIDDNYDSFYSDDDIIGIKTWDNERHVKNTSRKVKRIKRMEQESGTLVSQTPFGYTRHPLNKQIILIDEEAAAILNLEKEIYLDGNGIRKTAEILTERGVPTPSMIDKERHESLGLVYNKKVAYQWSFGMVKDTLFNDYNNGVLRTHKRERVTINGKDKKVPKENQYIFPNHHPKIFDDDTMKLLNEVKDSRHHSQYRGQRAHINLFSGCLYCKDCGMKLTAINRPNRGKYYLCGTYNKKGKQFCRYAHLVTEETLMDALVKYLVLCRDSLANIIQNFDLSKLKVETYTPTDSKQRLEAELEKVKEELKILITQKVKEITANPSMNEIITETYAALQSDKMERISAIEKTLQDLTKEPHIPSTTIKPSLQTALDIMNEVLEKKELSRKDIEVLVEKIIVDKDGNIDIYLKHGLGNLASYDFRADKENLKLTMLIESIRLLEKDETGFTSVKFLADSLKEMGYPMHKKKFVTYMEHLLDLGLVEKTGIYHYPYRIVASRQQLRDVEKMFIVVGQTGG

SEQ ID NO: 50687 - DNA, 50 bp, Enterocloster bolteae
  source 1..50: mol_type = genomic DNA
atgttcatcgtggtagggcagacaggcggccgacctaaccacgatgtaac

SEQ ID NO: 50688 - DNA, 40 bp, Enterocloster bolteae
  source 1..40: mol_type = genomic DNA
ggttctcggcggacgcgcaggcggcatgcctcagatggtc

SEQ ID NO: 50689 - DNA, 50 bp, Enterocloster bolteae
  source 1..50: mol_type = genomic DNA
atgttcatcgtggtagggcagacactcggccgacctaaccacgatgtaac

SEQ ID NO: 50690 - DNA, 40 bp, Enterocloster bolteae; identical to SEQ ID NO: 18965
  source 1..40: mol_type = genomic DNA

SEQ ID NO: 50691 - protein, 499 aa, Finegoldia magna
MKRAVAYGRYSTDMQREESIDAQFRAIRDYCQRNEIELVSTYADEGISGTTDNRPQFQQMIKDAESGAFDYVVVHKLDRFSRSKYDSAIYKRKLKLLNVQLLSVLENLDGSPESLILESVLEGMSEYFSRNLSREVKKGMRENALSCKFNGGTPPLGYDIDENKNYVINAHEAEAIKLIFDMFINNYSYSDMMRELNRLGYKTKRGREFTRNSFYEILNNERYIGTYFYSKEDYDGFREKRNYHKKRDKNKMIRIENGVPAIVDKETWAKAQEKLKNNRNLNRTNKNGRFYLLKGLLFCGECGSPMSGNMQSNGQGNRYYYYKCNRKSRTHKCHAPVVRAEKIEKEVLDCFEDVIFTKTNKDAVIKSMLKYLDKETNTRDQKRNLEKELTAVEKQIDNILDAIMSGISSPSVNDKLSELETKKETLKSSIRKCNIISYESLGAIEDIKKFLNENNSIYDFTPQEQSVILKNFIDKITYKDKKITVQLKMLDRADFNGAG

SEQ ID NO: 50692 - DNA, 50 bp, Finegoldia magna
  source 1..50: mol_type = genomic DNA
cgtgcggatttcaatggtgcgggaaaccctgtgccagatatatacgcaca

SEQ ID NO: 50693 - DNA, 40 bp, Finegoldia magna
  source 1..40: mol_type = genomic DNA
gcttgatgttggtgcgggaaagaggacttgaacccccact

SEQ ID NO: 50694 - DNA, 50 bp, Finegoldia magna
  source 1..50: mol_type = genomic DNA
cgtgcggatttcaatggtgcgggataccctgtgccagatatatacgcaca

SEQ ID NO: 50695 - DNA, 40 bp, Finegoldia magna
  source 1..40: mol_type = genomic DNA
gctgcatgtggttggtggatagaggactctgagccccact

SEQ ID NO: 50696 - protein, 597 aa, Buttiauxella noackiae
MPLLYSYIRWSSDRQAKGTTLERQLASAKAFALSKGLELVEITDPGVSAFRGKNQQHGKLGDFIDAVKNGVIPSDTWLYVENLDRLTRQDITTAQKLFIELLDLGLTLVTGMDKRIYTLDSVNKNPTELMISILLFSRAYEESKTKQTRTVGNVEALVDRHKQGLPVNIKSCGKHPFWIDDTGSQYESVRQHPKYWTIAREAIEMFLEGHGIYKVKRHLDEKYPNGLNEKEWDYQVIKRMRESRALIGERTITIGAQTHKLHDYYPALCKNETEFLKLQELKTQNGHKSKKDPSKENIKLLSGLSILRCSKCGGTMSSFMNREKPRYICLNGRHLQKGCVGWSVAAPLVEHCVMVALLMGYMDANRKEGHDTTELSATIVAKEEAITELNISISNIAHAIESGANILELVSRLKVLSANRETLLKEVDRLKERKALVERKGSFEINMMEFINLIQWGVFADLANESRNKIRSTIDNIIEHVVIDKTDGCITIKIKCRGSDQWLVFGGHTRKPKWRFDIELYDEDDWGFVNGDLPTHSSVDTDDTRFSPFLESELFAETMEHFHSLKSTYHQYFDKVNQILMAVGYPAIDGSAFWPNR

SEQ ID NO: 50697 - DNA, 50 bp, Buttiauxella noackiae
  source 1..50: mol_type = genomic DNA
caatctatatattgattgttagggcaccctaatgataaaaatccaatctt

SEQ ID NO: 50698 - DNA, 40 bp, Buttiauxella noackiae
  source 1..40: mol_type = genomic DNA
atcgacgaggttttttgggcagccgagggagacaaagcca

SEQ ID NO: 50699 - DNA, 50 bp, Buttiauxella noackiae
  source 1..50: mol_type = genomic DNA
caatctatatattgattgttaggggaccctaatgataaaaatccaatctt

SEQ ID NO: 50700 - DNA, 40 bp, Buttiauxella noackiae
  source 1..40: mol_type = genomic DNA
aggcatgagggtttgtggggagctgggggtgacaaaggca

SEQ ID NO: 50701 - protein, 474 aa, Pseudoclavibacter helvolus
MTTRHLKAVPPATAQPRAVLYLRQSTHREESISLELQETAARAYCEKHGYKVVAVEADPGISGRTWKRPAVQRVMAMVEGRAADVIVLWRWSRLSRSRLDWAVAADRCDVAGGRIESATEPNDPTAAGRFARGVMTELAAFESERIGEGWKEAHARRVDQGMPAHGLQRFGYDYDKATGFTPHPLEGPILAETYRRYLSGESIYSLADWLTGSVVKTSRAGSSIWSSRTVRRVLDSGFGAGYFTVHNELRKGVHEPLITEDEWKRYLEARDSRRVRRSGERSAYPLSGLIYCICGSRMHGSRMGEHGRRYRCADSKEKRTHAGGFVKAERVEQEVHDWLRSQNDEWIRAEAAAKIETRPAVRPVHDPSARIRADLARLDQRMDTLVERLVDGIPQDAFARARDRIIEERAALEHELRGAEVRAIRAPVTLLPELVERWNDLPPAEARELLRAVVERITVKTGRPAAIVTVTPKT

SEQ ID NO: 50702 - DNA, 50 bp, Pseudoclavibacter helvolus
  source 1..50: mol_type = genomic DNA
aagagggtttaggcaccaatgacgatcgtgactgtggtctgacccctcct

SEQ ID NO: 50703 - DNA, 40 bp, Pseudoclavibacter helvolus
  source 1..40: mol_type = genomic DNA
cacaattcctgccgacattatcgtgatcaatacccacccg

SEQ ID NO: 50704 - DNA, 50 bp, Pseudoclavibacter helvolus
  source 1..50: mol_type = genomic DNA
aagagggtttaggcaccaatgacggccgtgactgtggtctgacccctcct

SEQ ID NO: 50705 - DNA, 40 bp, Pseudoclavibacter helvolus
  source 1..40: mol_type = genomic DNA
cacattttctgaagacattgccttgatcccttcccactca

SEQ ID NO: 50706 - protein, 510 aa, Hyphomonas atlantica
MVAAMRETPERSAVIYARVSSRKQVKEGGGIESQATRCRAYAASRGYEVVAMFTDDMTGQNARRPGMDAMLSFLRQNKTNPHVVLIDDISRLARGLKAHIELRDELARAGGILESPSVVFGDDSDSQFLENVLASSAQHFAQKNREQTINRMKARLMNGYYVNARPPLGYKYIKGHGKELVRDEPMASIVQEALEGLASGRFGSQGEVRQFLEAQPEFPRNGKGEVTHERANQLLTQPVYAGMIEAPAWGISMRKAQHQGLISWETFQKVQERLADGGRVQNRADLHEDFILRGAVDCGDCDKPLTACWSKGKNKHYPYYLCFNKECDSYRKSIARDALEEEFEELLAELQPSRNLFTVASKMFRDLWDHMALSNRERQTRLKADLSRMESDMTRLVDKMLDTDNHIVIEQIEKRMTALEGEKLLLSEKIEKLGAPVRGFDEMFEHALTFLANPYNIWKNGTLADRRNVLKLAFAERLKYSRDEGLRTPQTSMPFKVLGGFWDGEKELAH

SEQ ID NO: 50707 - DNA, 50 bp, Hyphomonas atlantica
  source 1..50: mol_type = genomic DNA
ggatggtgaaaaagaattggcgcacctagaaggagaaacttcgaacgcgc

SEQ ID NO: 50708 - DNA, 40 bp, Hyphomonas atlantica
  source 1..40: mol_type = genomic DNA
aagaaacaggaatggcgcacccaagaggattcgaacctct

SEQ ID NO: 50709 - DNA, 50 bp, Hyphomonas atlantica
  source 1..50: mol_type = genomic DNA
ggatggtgaaaaagaattggcgcaaatagaaggagaaacttcgaacgcgc

SEQ ID NO: 50710 - DNA, 40 bp, Hyphomonas atlantica
  source 1..40: mol_type = genomic DNA
aagaaataaatattccccaaacaagagggttcaaacctca

SEQ ID NO: 50711 - protein, 534 aa, Vibrio cholerae
MSNFNMTPNQPPAKCYSYVRFSTVSQGKEGKDSYIRQTLAAKEYAERMGLEYQDKSFSDLGISGFRSSKKRDGLSSMLEAIQSGAIEPTSTICIDGFDRLSRASFEHTYDTVRLIVGTGVKLHVVQDDMTLDKSSLNDLISIVRLALQSDLAHQESAKKSYLIKQSRLRAREAHRVTGKLPAWIKRDDSTPTGFAFNEMVDCIKELVRLRVEGKSLQSIAKNLNAMGYTTTTGAPWSSAGCRSIIESRALHGSKSYHETDPETGRMLLEPVDIVAGIFPALIDFDVWKSIQQKSKSAPTKVTKVSKKGAYSGLLRCGCCSAGMVMRTTTYTPKESGVPEVRMYRKCIRATEGSCTQTEQVREPETYIDLALSNLKYVTSEKRHVSRVPEIREQIATLEKTEDILLQRGMAEKLADLYMKIDDLKTKLVKAQEEDSKHKVPTETSFAKVIEIKDLEHRNMVLRGLLRGVYFTLLWKYKTQSKWKVTIEQINGLKTTFILSQKHGFGNSHIELLADPLRWTNLVQSDLEPWEVDQN

SEQ ID NO: 50712 - DNA, 50 bp, Vibrio cholerae
  source 1..50: mol_type = genomic DNA
acgtatgagactatgtgtagaataaaggtactatacagactctgatacgt

SEQ ID NO: 50713 - DNA, 40 bp, Vibrio cholerae; identical to SEQ ID NO: 21748
  source 1..40: mol_type = genomic DNA

SEQ ID NO: 50714 - DNA, 50 bp, Vibrio cholerae
  source 1..50: mol_type = genomic DNA
acgtatgagactatgtgtagaatatgggtactatacagactctgatacgt

SEQ ID NO: 50715 - DNA, 40 bp, Vibrio cholerae
  source 1..40: mol_type = genomic DNA
ttttgcttcacgtgtggtgtgactgttctgtctcactgag

SEQ ID NO: 50716 - protein, 511 aa, Microbacterium resistens
MAAVPAVTPRQARRALGIIRVSWERDGTTSPEIQRHAIEQHAARTNTPVVDWIVAADDRRYSASRNDSKWWAKLDSAIARLEAGEVEALFVWQLSRSARHRLRWAVAIDRIESAGGVLESATELLDTTTSAGRFSRDVIVAHNVMQAELIGETWRETHQRRVRKGLPPTGGHRFGYVQPVHSDNCPKSCERTRPHGIHEPDPVTGQVLRELYRMYIAGAGYAKITRHLNESGHTDGRERWTYAGVIRMLDSGFGAGLLGHTEVVNKKRVIPPPWKRRYSQGVHDAVIDTATWDAYVARRASGSGRSARARTPYLLAGIVRCGDCGRSMHGKRTDGQYTYVCSRAATTTGVRKVSVVAWRVEKFVEEWLFGFAEDADARVAAQAARVGKRRDSEFTLRRARARIEKADERLAALTIKLADGTVSDAAYRAAAESIQADRDAAEEAVRAATSNPVIERAPAEVPRNLRDLWATLNTEQKNLLLRPLLDRVVVAPAAHRGFRGDRFTIVPRWEA

SEQ ID NO: 50717 - DNA, 50 bp, Microbacterium resistens
  source 1..50: mol_type = genomic DNA
agggtggttggccgtttctacatcacgatgtcgaaagagctttccatacg

SEQ ID NO: 50718 - DNA, 40 bp, Microbacterium resistens
  source 1..40: mol_type = genomic DNA
ctggtgatccaccttggaaacgatgtcgaacgaagagtca

SEQ ID NO: 50719 - DNA, 50 bp, Microbacterium resistens
  source 1..50: mol_type = genomic DNA
agggtggttggccgtttctacatcgggatgtcgaaagagctttccatacg

SEQ ID NO: 50720 - DNA, 40 bp, Microbacterium resistens
  source 1..40: mol_type = genomic DNA
caggtgaccttccctggtaggcatgtcaaaagaagtgtca

SEQ ID NO: 50721 - protein, 577 aa, Coprococcus comes
MISNSSATHAKVAIYIRVSTLHQIDRDSLPMQRHDLIAYAKLILNTDDVTIFEDAGYSGKNTIRPEFQKMMSQLRTGTYTHLLVWKIDRISRNLLDFAEMYQELKDLGVTFVSKNEQFDTSTAMGEAMLKIILVFAELERNMTSERVTATMISRASNGQWNGGRIPYGYDYDPEEQGFSFNSDEYNIAHLIHDKYEELRSLVYLARYLNEHGYRTRAGNDWSPVSLDIILRSVFYCGDYQYNRLKEGDRQRPKDKSEWITVKDHHPAIVSREQKERILALLESNRRLKSFRKSGKSKYTHIFSGLLICGNCGQPMTSSISTIKKTTGRRYSLYFCPTHRKSKLWCTGKSTSDPIIGEFVFNYILNMLNAQKAFSSETSIQELEQQLLSGDTFSPVAAIAPDGLQDLFHTLRTGTIKGEVFGKDVKIKTGSEPPLQLSKLKKEKVRLERAIDRLNKLFLYSEKAMSESEYLTQKIQLSDSLEEVEDKLAFLASEGSLQQSITDDEFIAKASNFILSQKLTDRNYISFQSLSATVSPEVLDSFLSSIIDNIVFKDGAVNSITFRNGLSHTFIYREKPEV

SEQ ID NO: 50722 - DNA, 50 bp, Coprococcus comes
  source 1..50: mol_type = genomic DNA
tcgctctacaaaatcatcatggcatcccccatgtagagggtgtgccttca

SEQ ID NO: 50723 - DNA, 40 bp, Coprococcus comes
  source 1..40: mol_type = genomic DNA
ctattctataaacatcgcatccccaaagctgaagaatcga

SEQ ID NO: 50724 - DNA, 50 bp, Coprococcus comes
  source 1..50: mol_type = genomic DNA
tcgctctacaaaatcatcatggcaacccccatgtagagggtgtgccttca

SEQ ID NO: 50725 - DNA, 40 bp, Coprococcus comes
  source 1..40: mol_type = genomic DNA
ctattcaatatgcacaggaaccccaaaggttcagaatcta

SEQ ID NO: 50726 - protein, 450 aa, Enterococcus faecium; identical to SEQ ID NO: 47881

SEQ ID NO: 50727 - DNA, 50 bp, Enterococcus faecium
  source 1..50: mol_type = genomic DNA
atgtgtactaacttatatattccgggaaggataatataggttagtacacg

SEQ ID NO: 50728 - DNA, 40 bp, Enterococcus faecium
  source 1..40: mol_type = genomic DNA
gcgatggaataacattaccagaaggatgattatgcgctaa

SEQ ID NO: 50729 - DNA, 50 bp, Enterococcus faecium
  source 1..50: mol_type = genomic DNA
atgtgtactaacttatatattccgtcaaggataatataggttagtacacg

SEQ ID NO: 50730 - DNA, 40 bp, Enterococcus faecium
  source 1..40: mol_type = genomic DNA
taggtgaaataacattttctcaaagatgtttataccctaa

SEQ ID NO: 50731 - protein, 450 aa, Enterococcus faecium; identical to SEQ ID NO: 47881

SEQ ID NO: 50732 - DNA, 50 bp, Enterococcus faecium
  source 1..50: mol_type = genomic DNA
tgtgtactaacttatatattccggggaaggataatataggttagtacacg

SEQ ID NO: 50733 - DNA, 40 bp, Enterococcus faecium; identical to SEQ ID NO: 50728
  source 1..40: mol_type = genomic DNA

SEQ ID NO: 50734 - DNA, 50 bp, Enterococcus faecium
  source 1..50: mol_type = genomic DNA
tgtgtactaacttatatattccggtcaaggataatataggttagtacacg

SEQ ID NO: 50735 - DNA, 40 bp, Enterococcus faecium; identical to SEQ ID NO: 50730
  source 1..40: mol_type = genomic DNA

SEQ ID NO: 50736 - protein, 625 aa, Clostridium symbiosum
MISTLTDTPQIIDGYVRLSRDDNKRNYSSIENQKKIIQQYAEENNMIIRHIYEDDGISGYSFNRPDFQKMMASLDTINVIVAKDLSRIGRHNAKVLLFLEEMEEMGKRVILIDDNYDSFYSDDDIIGIKTWDNERHVKNTSRKVKRIKRMEQESGTLVSQTPFGYTRHPLNKQIILIDEEAAAILNLEKEIYLDGNGIRKTAEILTERGVPTPSMIDKERHESLGLVYNKKVAYQWSFGMVKDTLFNDYNNGVLRTHKRERVTINGKDKKVPKENQYIFPNHHPKIFDDDTMKLLNEVKDSRHHSQYRGQRAHINLFSGCLYCKDCGMKLTAINRPNRGKYYLCGTYNKKGKQFCRYAHLVTEETLMDALVKYLVLCRDSLANIIQNFDLSKLKVETYTPTDSKQRLEAELEKVKEELKILITQKVKEITANPSMNEIITETYAALQSDKMERISAIEKTLQDLTKEPHIPSTTIKPSLQTALDIMNEVLEKKELSRKDIEVLVEKIIVDKDGNIDIYLKHGLGNLASYDFRADKENLKLTMLIESIRLLEKDETGFTSVKFLADSLKEMGYPMHKKKFVTYMEHLLDLGLVEKTGIYHYPYRIVASRQQLRDVEKMFIVVGQTG

SEQ ID NO: 50737 - DNA, 50 bp, Clostridium symbiosum; identical to SEQ ID NO: 50687
  source 1..50: mol_type = genomic DNA

SEQ ID NO: 50738 - DNA, 40 bp, Clostridium symbiosum
  source 1..40: mol_type = genomic DNA
agtgttgggcggccgcgcaggcggtatgccggaaatgatc

SEQ ID NO: 50739 - DNA, 50 bp, Clostridium symbiosum
  source 1..50: mol_type = genomic DNA
atgttcatcgtggtagggcagacaatcggccgacctaaccacgatgtaac

SEQ ID NO: 50740 - DNA, 40 bp, Clostridium symbiosum
  source 1..40: mol_type = genomic DNA
agtgttggtcggccggtcaatcggtcggacacacatcatc

SEQ ID NO: 50741 - protein, 625 aa, Clostridium symbiosum; identical to SEQ ID NO: 46546

SEQ ID NO: 50742 - DNA, 50 bp, Clostridium symbiosum; identical to SEQ ID NO: 18962
  source 1..50: mol_type = genomic DNA

SEQ ID NO: 50743 - DNA, 40 bp, Clostridium symbiosum; identical to SEQ ID NO: 50738
  source 1..40: mol_type = genomic DNA

SEQ ID NO: 50744 - DNA, 50 bp, Clostridium symbiosum
  source 1..50: mol_type = genomic DNA
atgttcatcgtggtagggcagactatcggccgacctaagcatgatgtaac

SEQ ID NO: 50745 - DNA, 40 bp, Clostridium symbiosum; identical to SEQ ID NO: 50740
  source 1..40: mol_type = genomic DNA

SEQ ID NO: 50746 - protein, 574 aa, Nocardia cerradoensis
MTNVVVPTEPTALNLAVSYLRVSSKRQLDTARDIDPDGNSIATQREYVGRKADALAAHVVREFFDPGISAQTIDKRREFQELIDYLKEHPDVRYVIVYARSRAFRNYIDAAITKRLLDKLGVKLVSAREDFGEGIFAEAMEAMTDIFNDVQNKLSGEDIRLKMRNKAIKGGTIGVAKLGYRNARVEIEGRQVNTIELDEERAPLVLRAFELYATGDYSIDRLEATMADSGLTSRRTSRHPGERPVAASTLHKMLTDPYYLGYVVYKGEKYPGRHPAIVGQELFERVQDVFNARSAEGQRDRILLHYLKGALFCARCADKGRTSRFIYVEAKGRTGKRYGYFLCRGRQEKVCDIPHLPVDLVEQAIIDHYRTLELPPDFVDSIHQRLEEAVSNEQAATHTMHASLRNRLKDIDKQENRLLDLAADGAMPQAKIRAKLLDLTAERERVETGLSSTTRELGTGATALRHALHLVADPHSLYQGVTDDARRHLNQTFFRKIFLDDTTVTHDEKTPIFQEITEARYVYRSRSAAGANDDKSDYKRSPRSARASGASALTDPPTLARVYTVSGSSRPVMV

SEQ ID NO: 50747 - DNA, 50 bp, Nocardia cerradoensis
  source 1..50: mol_type = genomic DNA
gttctagtagaccggtcatggtcggccttctcgaacgctactcaaaacag

SEQ ID NO: 50748 - DNA, 40 bp, Nocardia cerradoensis
  source 1..40: mol_type = genomic DNA
tcccggtcgtctgtggtcgggatgacaggatttgaacctg

SEQ ID NO: 50749 - DNA, 50 bp, Nocardia cerradoensis
  source 1..50: mol_type = genomic DNA
gttctagtagaccggtcatggtcgctcttctcgaacgctactcaaaacag

SEQ ID NO: 50750 - DNA, 40 bp, Nocardia cerradoensis
  source 1..40: mol_type = genomic DNA
tgccggttgtctttgtttactatggcaggatttagagctg

SEQ ID NO: 50751 - protein, 456 aa, Mycobacterium kansasii
MTTKAGVYLRISSDPSGEQLGVTRQREDCLTLCEAKGWTPVEYVDNDTSASTGKKRPAYTRMLSDIRDGAIAAVVAWDLDRLHRRPVELEEFMALADQRHLALATVSGDVDLSTAQGRLVARLKGSVAAHEIEHKRARQLRAAKQKADRGEPRWTRAFGYLGDTRQPDPATAPLVKQAYASVLAGGSITDVAKAWNAVGAFGLNGKPWRASTVSLFLRKARNAGLRSHNGEIVGKGTWPALVDESLWKATQSLLNTPGRGPGKKSVRRHLLTGVLKCGKEGCGGYLSGNHTLDHRITYSCKTCHGISVRAEHVEPLVYGVVAQRLAQPDAVDLLKAEVHDQAEAEALRTEANSLLAQLDMIADDYTEGLLTGQQVKRATDNVQAKLDAIERRQQDAEKLRVFDGLPLGSDEVTEKVQQLSADRLRAVIAVLAEFTVAPVGKGRHIFDPQRVHVVWR

SEQ ID NO: 50752 - DNA, 50 bp, Mycobacterium kansasii
  source 1..50: mol_type = genomic DNA
aagtgtatttcgcgaagtcgcagccaacagcgacttgctgaagtacattt

SEQ ID NO: 50753 - DNA, 40 bp, Mycobacterium kansasii
  source 1..40: mol_type = genomic DNA
caagtgctactgccgcacgcatcatttgatgaagacgttt

SEQ ID NO: 50754 - DNA, 50 bp, Mycobacterium kansasii
  source 1..50: mol_type = genomic DNA
aagtgtatttcgcgaagtcgcagcccacagcgacttgctgaagtacattt

SEQ ID NO: 50755 - DNA, 40 bp, Mycobacterium kansasii
  source 1..40: mol_type = genomic DNA
atagtgctactgtcgaactcctcatttaacaaagccattt

SEQ ID NO: 50756 - protein, 521 aa, Longicatena caecimuris
MARRKTKLNDNNLAIAYYRYSSHSQNEASIEQQRELAHEWADAHGLKIVREYEDAAISGTKEDRPGFQLMLSEVAKIRPNTLIAWKTDRLGRDKYVLAMAKKTIRDAGCEIHLLAENIPTDTAEGILIEGLMEALAEYYSRNLSVHIQRGMDFNAEHANFNGHKVFGFKTEKVDKKRKYVIDPDTAPFVQLMFAKYAEGEPMQSICDEFNEAGLRTSRGNPFGVKTMHRMLKNRAYIGEYRHGEFVVPGGMPALVDGETFDRAQKRLAENKRKGSQRARGMDEDGAPRYWLTGKLYCGECGETMQGVSGTSKTGRTYYYYYCSAQRKKLCTKKKVKKDWIEDLVTDVLRYIIDDSENLMSLAVDAAVYYKEHYKETGYLEGLEAKRKEVEKGIANLMKAIEGGALSDTLIERLNQLEAQKASLNDAIQAENVKVSLCEDEHSIKAYFEKFLHADFDNPETRDKILEYFVDKIYLYDEKLVVTSWYSEDKTEITWDMLKGADGDPFVKGEAAEFDCFPLGST

SEQ ID NO: 50757 - DNA, 50 bp, Longicatena caecimuris; identical to SEQ ID NO: 37162
  source 1..50: mol_type = genomic DNA

SEQ ID NO: 50758 - DNA, 40 bp, Longicatena caecimuris
  source 1..40: mol_type = genomic DNA
agttcaactctcgccacctccaccatatataaggttaacg

SEQ ID NO: 50759 - DNA, 50 bp, Longicatena caecimuris; identical to SEQ ID NO: 42984
  source 1..50: mol_type = genomic DNA

SEQ ID NO: 50760 - DNA, 40 bp, Longicatena caecimuris
  source 1..40: mol_type = genomic DNA
agtttaattctggccacattcaccgtatgaaatgttagag

SEQ ID NO: 50761 - protein, 572 aa, Intestinibacillus massiliensis
MLIKNAGADKIGVCNPVLADCPPMKGAEIVQRQSDRITALYCRLSRDDELQGDSNSIVNQKAILSKYAKEYSFKNTLFFVDDGYSGTNFNRPSWCELLERIENGEVATLIVKDMSRLGRDYLKVGFYTEVLFVEKGVRFIAINNGIDSANQQDSDFTPFLNIINEWYAKDTSKKIRAVMKSKGEAGEHLCTNPPYGYMKDADNPKQWVVDCEAAEVVKRIFALCLEGYGPTQIARILKEDNVITPTIHFQRTGRATRNMPPDNPYHWTGDTVADILERPEYQGHTVNFKTYKQSYKSKKTCYNPIEKQLVFENTHEAIIDADTWERVQELRKNKRRPTRTGKTNLFSGTVRCADCGKKLYYCTSKNFEARQDHFVCSTSRLKGKEICPTHFIRAVVLEQGVLAHMRLTIACVANHEEQFRKAMGAKQKAEAKKELVAKRRQLTQAERRIEELDRLFKRIYEDNANGKLSDSRFQMLSDDYEQEQEELREKLLQLNEEITQQEEQAENIDRFISKVRKYLDLDELTPAILNDMIKAVYVHAPDKSSGQREQQIDISYDLVGILPASLLNDLQN

SEQ ID NO: 50762 - DNA, 50 bp, Intestinibacillus massiliensis
  source 1..50: mol_type = genomic DNA
atgctgttttatgagtgccgccctttcggtagctactcataaaacagtat

SEQ ID NO: 50763 - DNA, 40 bp, Intestinibacillus massiliensis
  source 1..40: mol_type = genomic DNA
catagaaaaagggcgccgcttaggcgcccttttttcagtc

SEQ ID NO: 50764 - DNA, 50 bp, Intestinibacillus massiliensis
  source 1..50: mol_type = genomic DNA
atgctgttttatgagtgccgccctctcggtagctactcataaaacagtat

SEQ ID NO: 50765 - DNA, 40 bp, Intestinibacillus massiliensis
  source 1..40: mol_type = genomic DNA
cagagagaaacggggcagcctgggagccctttattcagaa

SEQ ID NO: 50766 - protein, 548 aa, Streptomyces ambofaciens
MNTQTDDTSHLIDLVCRKSQAVKSKTGRREISVSAQEARGRKTAELLGLTVRHVWREVGSASRFRRSKKVPKQDLALQALDRGEIGALWVFRLDRWTRRGAGAILSIVEPADGRPRRLLIDNGDADNPGIGLDSANPRDRSELIRRAEDAREETEVLSERVRNTKTFQLENGEWLNGVAPYGLRVVTVSAFDEDGEEIEERKLQRDPETSAGIPGEPQVTKMEIARLVTYEWPVARVTKREMARRLNERGVPSPTGGDWAFSTVANMIGNPAYAGWQITGRSDNRSRRMLYLNENGEKVSVMVGPPLLTDEEYNEAQAASRGNGPPADAESWKAKHLLTDLLECCGCFSSMPSAGTSYACWRSRAGGVCPAPANAAAYSAEEYVFQRWSARLHSADLDDPLLVIVAERWAARKDPQASEEEQTARAALADAERVLSRLWQDRRAGLFDGPSERFFAPQLTEANAAVMAAQKALDGIRGTGPVDISFLLDLEQQREAWEAADLPLKRDLLRLAIRRIRVRRAPKRGVQFDGDSRMEINWLDEPAWDTAA

SEQ ID NO: 50767 - DNA, 50 bp, Streptomyces ambofaciens
  source 1..50: mol_type = genomic DNA
acttcggggggtgtacaacacgcctcggagggttgcacacttccctaagc

SEQ ID NO: 50768 - DNA, 40 bp, Streptomyces ambofaciens
  source 1..40: mol_type = genomic DNA
catcagccggtagcggccctcggcgcgctggtagcagtcg

SEQ ID NO: 50769 - DNA, 50 bp, Streptomyces ambofaciens; identical to SEQ ID NO: 50767
  source 1..50: mol_type = genomic DNA

SEQ ID NO: 50770 - DNA, 40 bp, Streptomyces ambofaciens; identical to SEQ ID NO: 3885
  source 1..40: mol_type = genomic DNA

SEQ ID NO: 50771 - protein, 619 aa, Enterocloster bolteae
MAGIRTENKVYEVGMYCRLSKDDGTDNESASIATQKSILTDYVKKQGWHLAKTYVDDGYSGTNFQRPSFQNMIKDIESGVINCVITKDLSRLGRNYLDCGLYLEVFFPEHNVRYIAVNDGVDTLNKSAMDITPFRNILNEMYAADISVKIKSAFRARFQQGKYMATSAPYGYIKDPADHNHLLIDDKVAHIVREIFDLALQGYGIPKIRKHINKQHILRPAAYAAERGETGFERYFEDNEENRYIWGENSIRNILRSPIYAGNLAGYKRISPSMKSRKRLSKLPEEWEVIPDTHEGIVTQEEFDTVQRLMTSRRREENAGGFKNIFAGIIKCADCGYALRATSVHRRKRPDIIDCVQYSCNNYARNGNGVCTAHNIEARDLFNAVLADINRFADMAVNDEKAVRAIEKRLTETDHSRAKALEKEQRKLNKRLAELDRLFSSLYEDKVMERITERNFEMMSGKYQKEQLEIEARLKEVSETLTESYEKSQGVRDFLSLIRNYQGIKELDATIINALIDKIIVSERETIADGTVRQEIKIYYKFIGFVGELHIIPTKRWAALKPKNCTVCGIEYVPNSGISKYCPECRERIRKVRGTEAKIRSRERNRQACIELSAKNDRL

SEQ ID NO: 50772 - DNA, 50 bp, Enterocloster bolteae; identical to SEQ ID NO: 11112
  source 1..50: mol_type = genomic DNA

SEQ ID NO: 50773 - DNA, 40 bp, Enterocloster bolteae
  source 1..40: mol_type = genomic DNA
ctgtccgtggagaccgggagacctcgcccagcgcaaaggc

SEQ ID NO: 50774 - DNA, 50 bp, Enterocloster bolteae; identical to SEQ ID NO: 37649
  source 1..50: mol_type = genomic DNA

SEQ ID NO: 50775 - DNA, 40 bp, Enterocloster bolteae
  source 1..40: mol_type = genomic DNA
cttgccgtggagaactggtgccctcccccaccgcctcggc

SEQ ID NO: 50776 - protein, 530 aa, Halomonas profundi
MFMLALPNECQTVRARDMDNQQQRPKAYSYLRFSTPEQMQGDSFRRQSQLAKEYAERNGLELDENSFDDFGLSAYQGRNQETGSLRLFMRTVEDGAIPSGSYLLVESLDRISRQSARKASNLLGDICDMGITVVTLFDGKAYDAKSLDSDPVAFIMAILIFQRAHEESATKAYRLRSVWQEKRKKIASGEPVRLTSRGPQWLRPAGDGVSFEIIPERGEVVRRIYQMALDGVGKKSISEALNSEGVQVFGRGQYWHTSYINKILNNPATYGTLTPFTSRPERKTDREACDPIEGYYPAVIDKKTYEDFQALQSSKAPRRGKHSKSQVENVLGGLSVCPLCASTMARVSKNKAKGWVYLVCQRARQGAGCKYNAIRYDRVEPMIYSKIHSLIDACPSGDDSLDSQIEDAKLELKLKEKSIDRMLEVIEQGEMPPNAKGIPFLQERLAKRRLELDELKAGIADLYHQRSILGTELARHRAEGLRAVVLGTPEDKTLINTKMRECFSKVVIDFQTDSLVFYWKQGGHTSLRYK

SEQ ID NO: 50777 - DNA, 50 bp, Halomonas profundi
  source 1..50: mol_type = genomic DNA
gtgggtctccaaaaccataacagtagcaggttgtgtatttcaagacccat

SEQ ID NO: 50778 - DNA, 40 bp, Halomonas profundi
  source 1..40: mol_type = genomic DNA
gcccggtgggcctgcaaaaagtaagttgtggccaccagct

SEQ ID NO: 50779 - DNA, 50 bp, Halomonas profundi
  source 1..50: mol_type = genomic DNA
gtgggtctccaaaaccataacagtgacaggttgtgtatttcaagacccat

SEQ ID NO: 50780 - DNA, 40 bp, Halomonas profundi
  source 1..40: mol_type = genomic DNA
ggccggtggggctggaaaggatactatcgggccagcagct

SEQ ID NO: 50781 - protein, 544 aa, Enterobacter kobei
MYTTVHKREKQGMKVPVWSYARVSTLSQVDGFGIQRQVQTINQFIQYLVLDTRLPFTLDVDTITQMVAEGRSAFRGKNWNPKTTLGQYRKMVMDGVVPESVLIVENIDRLTRLDPFQAVEIISGMINRGTTILEIETGMTYSRYIPESITVLTMQINRANGESKRKSIMMKKSHENRFGNVSKVRPRWFDVVEIDGMKQYRPNDTAKAIQRMYGDYVNGIGAAQIVRTYGKTDNGKQWTLVTVLRALSDKRVADDARYPSIVDKELYERVQAMKIATNKTGSTHQKNMLNIFSGMSRCPVCKQAIIVKRNSHGGLFTVCLGKRTNKTCTARSMAYNALERPLLEAIKDLDFSEVYNHEESNIVTLRDQWIQNERDIAAFRERLANASRYEKFAILDELESISKEQEELSIRLKSLDAPKDVQLTYNDDKLDMDVDYRIELNNRMKKLIQEINIGRVDTSKSTYTIYCTIKYWTDKVKHLVIIDSESIRTGKGGANTLTTTLRSVSSINADGTFYGNPDDEAVQYWKQSVNKVFIEAGKEAPFNS

SEQ ID NO: 50782 - DNA, 50 bp, Enterobacter kobei
  source 1..50: mol_type = genomic DNA
cggtgtacttacttgatcaactaggagcagttatgttagtatgtacacca

SEQ ID NO: 50783 - DNA, 40 bp, Enterobacter kobei
  source 1..40: mol_type = genomic DNA
cggccccatcagcagcagcgagcagtccgttgtacccccg

SEQ ID NO: 50784 - DNA, 50 bp, Enterobacter kobei
  source 1..50: mol_type = genomic DNA
cggtgtacttacttgatcaactagctgcagttatgttagtatgtacacca

SEQ ID NO: 50785 - DNA, 40 bp, Enterobacter kobei
  source 1..40: mol_type = genomic DNA
ccgcccgctcagaagcatcctgcagtcagttctccacctg

SEQ ID NO: 50786 - protein, 551 aa, Intestinimonas butyriciproducens; identical to SEQ ID NO: 45361

SEQ ID NO: 50787 - DNA, 50 bp, Intestinimonas butyriciproducens
  source 1..50: mol_type = genomic DNA
agtttggacaacgaacagcaagttgagacggttgtcttgctttccaaggg

SEQ ID NO: 50788 - DNA, 40 bp, Intestinimonas butyriciproducens
  source 1..40: mol_type = genomic DNA
tccccggaccgcccacgtggagacggtggtgctgctgcaa

SEQ ID NO: 50789 - DNA, 50 bp, Intestinimonas butyriciproducens
  source 1..50: mol_type = genomic DNA
agtttggacaacgaacagcaagttctgacggttgtcttgctttccaaggg

SEQ ID NO: 50790 - DNA, 40 bp, Intestinimonas butyriciproducens; identical to SEQ ID NO: 19130
  source 1..40: mol_type = genomic DNA

SEQ ID NO: 50791 - protein, 551 aa, Intestinimonas butyriciproducens; identical to SEQ ID NO: 45361

SEQ ID NO: 50792 - DNA, 50 bp, Intestinimonas butyriciproducens; identical to SEQ ID NO: 45362
  source 1..50: mol_type = genomic DNA

SEQ ID NO: 50793 - DNA, 40 bp, Intestinimonas butyriciproducens; identical to SEQ ID NO: 50788
  source 1..40: mol_type = genomic DNA

SEQ ID NO: 50794 - DNA, 50 bp, Intestinimonas butyriciproducens
  source 1..50: mol_type = genomic DNA
agtttggacaacgaacagcaagttctgacggtagtacttttgtccaaact

SEQ ID NO: 50795 - DNA, 40 bp, Intestinimonas butyriciproducens; identical to SEQ ID NO: 19130
  source 1..40: mol_type = genomic DNA

SEQ ID NO: 50796 - protein, 552 aa, Burkholderia gladioli
MATKARVYSYLRFSDPKQAAGGSIDRQLEYAARWAAERDLLLDASLSLRDEGLSAYHQRHVKQGALGVFLRAVEDGHVPPGSVLIVEGLDRLSRAEPLQAQAQLAQIVNAGITVVTASDGREYNRERLKAQPMDLVYSLLVMIRAHEESDTKSKRVKAAIRRQCQGWIAGTWRAPIRVGKDPQWVREVEGKFELIPERAAAIRVVVDMYKKGHGAVRTLRDLHNSGMTITNAGLPSAPQLYKLLANRMLIGEKAVELDGEQFRLEGYYPPVLSPAEFADLRNAAGERGRRKGKGEIPGVVTGLGITYCGYCGAAVVAQNIMGRRRMANGLPYPGHRRLHCVTYSSSAGCKVSGSCSVAPVERALMLYCSDQMNLTRLLEGDSGVTALHAELAHARAAVADMERQIGRVTDALLTDEGQAPAALLKRMRGMEEELERERQRCEALELRVHAIATAEAPAAADAWSALVRGVEELDYDARMQARQLVADTFSRIVVYQSGFYPETDDGQIGLMLVAKRGSTRLLHVDRKTGEWRGADDLQFDLDLPLPTRATHL

SEQ ID NO: 50797 - DNA, 50 bp, Burkholderia gladioli
  source 1..50: mol_type = genomic DNA
cgatttatattgcataccctatgggcagccgagggatactatacctatcc

SEQ ID NO: 50798 - DNA, 40 bp, Burkholderia gladioli
  source 1..40: mol_type = genomic DNA
agtcgaccagggccttggggcagccgagggatacgaaccc

SEQ ID NO: 50799 - DNA, 50 bp, Burkholderia gladioli
  source 1..50: mol_type = genomic DNA
cgatttatattgcataccctatggcaagccgagggatactatacctatcc

SEQ ID NO: 50800 - DNA, 40 bp, Burkholderia gladioli
  source 1..40: mol_type = genomic DNA
agttgatgagggttttgggcaggcagagggaatcgaactc

SEQ ID NO: 50801 - protein, 479 aa, Hydrogeniiclostidium mannosilyticum
MIGLAEAGKVKTVIVKDMSRMGRDYLKVGYYTESFFAERDIRYIAINDGVDSDKGDNDFTPFRNLFNDFYARDTSRKIRAILTAKANAGEHMGKQPYGYLRDKDNPKQWVVDEEAAEVVNKIFALCVDGKGPMQIARILQKEKILTVNSYYAKCAGKPLPDNPYLWDANSVSKILARFEYCGHTVNFKTYSKSNKLKKRYENTPENRRIFRNTHEAIIDEKLFERVQELRASKRRPAKQAERQGLFSNLIFCADCGSKLHFHTASSLTPSQDSYRCSRYKSNTGSCTAHYIREETLKRIVLQRIFAVTAMFIDDITSFRDVVYEQRFEKMEKDMKRRKKALEQARKRIAELDWIFKRIYEDDVNGTISHERFLKLSAEYEAEQKELTEFVHAEQNAVHIFEQDKADFDNFAAVIRKYVGVKELTPTIVNEFVKKIIVHAPDKSSGHRRQKVQIVWNFIGEVNLPGDSQVIERQRKSRTA

SEQ ID NO: 50802 - DNA, 50 bp, Hydrogeniiclostidium mannosilyticum
  source 1..50: mol_type = genomic DNA
ttacttccttatcactactcaagacaagataaagagggataaggaactat

SEQ ID NO: 50803 - DNA, 40 bp, Hydrogeniiclostidium mannosilyticum
  source 1..40: mol_type = genomic DNA
aatggaagtagacactcaccaaactgtgggtgcctacttt

SEQ ID NO: 50804 - DNA, 50 bp, Hydrogeniiclostidium mannosilyticum
  source 1..50: mol_type = genomic DNA
ttacttccttatcactactcaagatcagataaagagggataaggaactat

SEQ ID NO: 50805 - DNA, 40 bp, Hydrogeniiclostidium mannosilyticum
  source 1..40: mol_type = genomic DNA
catggaagtaagtactcactcaaatatgtgggctttcttt

SEQ ID NO: 50806 - protein, 512 aa, Clostridium gasigenes
MNKIAIYCRVSSDDQKERETIENQVDTLETYIEMKDNFTFYEKYLDDGVSGTVAFENRPGGKELISDASKGLFDSILVYKIDRFGRDTLTGLSTIETLRKYNIEIISMTEPFDLNTATGRFQFITYLNMAELERNNILDRMFLGATRAAKKGQWLGGIVPYGYVTNKKFLEIDPDESEIIKKIFDLYSIDKLSSLDIAVYLNNLDIPSSCKEGKGKRTKNITGLWRSSSIQRILKNTTYMGIHEYGKRGTRRKETIFREVPAIISKDQWDICEKQRSINIKVSKRNQKNRQFLLRSLLTCEHCGKNFYGNTYKNRSDVYICSGKRSDNRRVLGIKCSTLNINADYIEELVWNDCEYILKNYDSILSQLRLVDSKSDKSKLNDEISKIKKSLNDKKNEKNNILNIYRKGIITEKEVEDQLKDIKSEEEKINKLLNYLYEKNDIYDNEDKLINDTIKIMEHYYNRLDILSINEKIDIIKILLKSIKVSTVIEDGEKKSVFNIIYSLVRLDVFKD

SEQ ID NO: 50807 - DNA, 50 bp, Clostridium gasigenes
  source 1..50: mol_type = genomic DNA
ggtcagacttgatgtattcaaggacatgggtgaacatagcaagtttgaca

SEQ ID NO: 50808 - DNA, 40 bp, Clostridium gasigenes
  source 1..40: mol_type = genomic DNA
acttatacccccacaaggacagggattaaaggctccgact

SEQ ID NO: 50809 - DNA, 50 bp, Clostridium gasigenes
  source 1..50: mol_type = genomic DNA
ggtcagacttgatgtattcaaggaaatgggtgaacatagcaagtttgaca

SEQ ID NO: 50810 - DNA, 40 bp, Clostridium gasigenes
  source 1..40: mol_type = genomic DNA
acctagagcagaaaaaggaaatggactaaaggctctgact

SEQ ID NO: 50811 - protein, 537 aa, Streptomyces malaysiensis
MGKRTKSRSAAERQTYNVEAEWTEADLALLEELKKAESLLPDDAPRALLSVRLSVLTDDTTSPVRQELDLRIKAREMGCRVVGVASDLNVSATKVPPWKRKQLGDWLNNRAPEFDALLFWKLDRFVRRLSDLSTMIDWCLKYGKNLVSKHDSIDLTTTAGKIMVTIIGGIAEIEAANTSTRVASLWDYAKTQKEWIIGKPTYGYMTDEDENGKLTLVFDPTAYKALHWSRRMALRGVSARRQVKVLKRAELVTQGLTPSTQLRRLKNPGLMGYRVEEDKNGGQRRSKLILGKDGRPIKIAEPIFTEEEYETLQAALTMRAKGQPARQPGGATKFLGVLICKDCETHMTVQNTTNKFGTYKYLRCGACKSGGLGAPNPDEIYNRLVEDVLSAIGDFPVQTREYAQGAEARKEVKRLEESVAYYMKELEPGGRFAKTRFTREQAEETLDKLIAELGAIDPETTQDRWVNVHNGKTFRERWEDGGMEAMAADLVRVGIKCEVSRNKIPKVRAPEVHLRLLVPKDVRERLILKEDDFAARF

SEQ ID NO: 50812 - DNA, 50 bp, Streptomyces malaysiensis
  source 1..50: mol_type = genomic DNA
ggcctacttgtacccaagtatccatctggggccatatggacacggactta

SEQ ID NO: 50813 - DNA, 40 bp, Streptomyces malaysiensis
  source 1..40: mol_type = genomic DNA
atctggatctcggtctgcatctgcgggcagacgccgcagt

SEQ ID NO: 50814 - DNA, 50 bp, Streptomyces malaysiensis
  source 1..50: mol_type = genomic DNA
ggcctacttgtacccaagtatccaggtggggccatatggacacggactta

SEQ ID NO: 50815 - DNA, 40 bp, Streptomyces malaysiensis
  source 1..40: mol_type = genomic DNA
atctggagctcgacatggaggtgtaggcagaagctgcaga

SEQ ID NO: 50816 - protein, 564 aa, Enterobacter roggenkampii; identical to SEQ ID NO: 39811

SEQ ID NO: 50817 - DNA, 50 bp, Enterobacter roggenkampii; identical to SEQ ID NO: 39812
  source 1..50: mol_type = genomic DNA

SEQ ID NO: 50818 - DNA, 40 bp, Enterobacter roggenkampii; identical to SEQ ID NO: 27543
  source 1..40: mol_type = genomic DNA

SEQ ID NO: 50819 - DNA, 50 bp, Enterobacter roggenkampii
  source 1..50: mol_type = genomic DNA
tgtggcctttgtattgaaaactgcatgcatactttaggagaaaggccgta

SEQ ID NO: 50820 - DNA, 40 bp, Enterobacter roggenkampii
  source 1..40: mol_type = genomic DNA
gtgtgatttttttagagtgatgcaaatattcatgccgtaa

SEQ ID NO: 50821 - protein, 545 aa, Flavonifractor plautii; identical to SEQ ID NO: 15631

SEQ ID NO: 50822 - DNA, 50 bp, Flavonifractor plautii
  source 1..50: mol_type = genomic DNA
agttgtccctgtcaggccggacctaagggcgaggctccacaggggtatca

SEQ ID NO: 50823 - DNA, 40 bp, Flavonifractor plautii
  source 1..40: mol_type = genomic DNA
attcttccccggcggaagtaaattccgccggggcaaggtt

SEQ ID NO: 50824 - DNA, 50 bp, Flavonifractor plautii
  source 1..50: mol_type = genomic DNA
agttgtccctgtcaggccggacctatgggcgaggctccacaggggtatca

SEQ ID NO: 50825 - DNA, 40 bp, Flavonifractor plautii
  source 1..40: mol_type = genomic DNA
ctccttccccggcggcagtatgttccgccgcaccaagagg

SEQ ID NO: 50826 - protein, 541 aa, Pseudomonas aeruginosa
MNMQSPHVALRAALYLRVSTTRQAEHDVSIPDQRKQGEAYCVSRGYQLVETFVEAGASATNDRRPEFQRMIEAGTSKPAPFDVVVVHSFSRFFRDHFELEFNVRKLAKNGVKLVSITQEMGDDPMHVMMRQIMALFDEYQSKENGKHVIRALKENARQGFWNGSLPPIGYRVVDAEQRGAKMKKKLEIDPLHADTVRLIFRLASEGDGTSGPMGVKNIVSHLNRHRMFTRNGGRWGIGQLHRVLTRRTYIGEHRFNRRSNKGVVKPEEEIVTVPVPPLIDLEIFEAVQNRLKVNNPKVTPPRVVSGPNLLTGICHCGNCGGAMTLRTGKNGRYRYYACSIRARQGETGCKGRAIPMDKLDRMVVTHIEERLLDPERIEDVLASLLDRRQEGVERRSQHIAELNHRAAEADNRLKRLYDAIEAGSLDPAESSLGERIAGLTALRDQARADATRIEAMLASSTHHRLTGAAVRELASEARTRLRLGKGGYRREHVRAFAQHVEVADDAIYIKGSKNVLLRTLVAAKGGKSAGIGVPGFIPKWR

SEQ ID NO: 50827 - DNA, 50 bp, Pseudomonas aeruginosa
  source 1..50: mol_type = genomic DNA
ttcccggttttataccgaagtggcgggccgaagccgacgaaacagagaac

SEQ ID NO: 50828 - DNA, 40 bp, Pseudomonas aeruginosa
  source 1..40: mol_type = genomic DNA
ttttcgtcttgaatatggtgggtcgtgtaggattcgaacc

SEQ ID NO: 50829 - DNA, 50 bp, Pseudomonas aeruginosa
  source 1..50: mol_type = genomic DNA
ttcccggttttataccgaagtggcctgccgaagccgacgaaacagagaac

SEQ ID NO: 50830 - DNA, 40 bp, Pseudomonas aeruginosa
  source 1..40: mol_type = genomic DNA
tttttgtcttgattctggtctttggtgcaggatgtaaagc

SEQ ID NO: 50831 - protein, 542 aa, Pseudomonas aeruginosa
MNAQSPNVALRAALYLRVSTARQAEHDVSIPDQRKQGEAYCAARGYQLVEIFVEPGNTATNDRRPEFQRMIEAGTSKPAPFDVVLVHSFSRFFRDAFDMEYYYRKLAKNDVRLISITQELGDDPIHDMMRRIMSLFDEYQSKENGKHVTRALKENARQGFWNGALPPIGYRITAAEQRGAKTKKKLEIDPLHADTIRLIYRLALEGQGDSGQMGVKAIVKHLNAKGIFTRDGGRWGIGQVHRVLTRRTYIGEHEWGKRSKHNDPRAPGEIVIVPVPAIIERETFDAVQCLLQARNPKTELPARVVIGPTLLTGICYCGNCGGAMTIRTGKSGRYRYYACSIKARQGETGCKGRAIPMDKLDDMVVNHIEDRLLDPARLEKLLGSILGRREDQAERRREHIASLQRQATESESRLKRLYDAIEAGVADLDDPALKERIAGLKVIRDQARADADRAQALLESPGHSALSPAMIEGFARRARERIRGHEGGYRRDHLRALAQRVEVADDAIRIMGSKTELLKALSAGQGRQSAAIGVPRGGLKWR

SEQ ID NO: 50832 - DNA, 50 bp, Pseudomonas aeruginosa
  source 1..50: mol_type = genomic DNA
tgcccagaggcggactgaaatggcgggccatgcgggataccgatgagaac

SEQ ID NO: 50833 - DNA, 40 bp, Pseudomonas aeruginosa; identical to SEQ ID NO: 50828
  source 1..40: mol_type = genomic DNA

SEQ ID NO: 50834 - DNA, 50 bp, Pseudomonas aeruginosa
  source 1..50: mol_type = genomic DNA
tgcccagaggcggactgaaatggcctgccatgcgggataccgatgagaac

SEQ ID NO: 50835 - DNA, 40 bp, Pseudomonas aeruginosa; identical to SEQ ID NO: 50830
  source 1..40: mol_type = genomic DNA

SEQ ID NO: 50836 - protein, 484 aa, Mycobacteroides abscessus; identical to SEQ ID NO: 35351

SEQ ID NO: 50837 - DNA, 50 bp, Mycobacteroides abscessus
  source 1..50: mol_type = genomic DNA
taagggggtacctagccaaataatggttatttgtcgtaaactccgctttt

SEQ ID NO: 50838 - DNA, 40 bp, Mycobacteroides abscessus
  source 1..40: mol_type = genomic DNA
tagacggtgtcgaagaagtgcttgagggcgccggacatgt

SEQ ID NO: 50839 - DNA, 50 bp, Mycobacteroides abscessus
  source 1..50: mol_type = genomic DNA
taagggggtacctagccaaataatccttatttgtcgtaaactccgctttt

SEQ ID NO: 50840 - DNA, 40 bp, Mycobacteroides abscessus
  source 1..40: mol_type = genomic DNA
ttgaggctgtcgaagaagtccctgaggactctgcccttgt

SEQ ID NO: 50841 - protein, 484 aa, Mycobacteroides abscessus; identical to SEQ ID NO: 35356

SEQ ID NO: 50842 - DNA, 50 bp, Mycobacteroides abscessus; identical to SEQ ID NO: 50837
  source 1..50: mol_type = genomic DNA

SEQ ID NO: 50843 - DNA, 40 bp, Mycobacteroides abscessus; identical to SEQ ID NO: 50838
  source 1..40: mol_type = genomic DNA

SEQ ID NO: 50844 - DNA, 50 bp, Mycobacteroides abscessus; identical to SEQ ID NO: 50839
  source 1..50: mol_type = genomic DNA

SEQ ID NO: 50845 - DNA, 40 bp, Mycobacteroides abscessus; identical to SEQ ID NO: 50840
  source 1..40: mol_type = genomic DNA

SEQ ID NO: 50846 - protein, 478 aa, Mycobacterium chimaera
MRKTKTPGRQVVCSAAIYARISADVDGKSLGVQRQLEDCRKLAADRGWPVGREYVDNHVSAFSGKPRQQYARMLADLESGARDAVIVYNLDRLHRRPVELEDFVALCERAGVSQVATVTADIDMGNDDGLFMARIFAAFAAKESGRKSARIRRKMLQNAEQGLPHGSVRPFGYESDKITVRADEAAVVRQMVDRYLAGQSLLSLTVWLNASGVAPAVAKSWQTSAVRQILCSGRIAGLREHRGEVIGPATWPAIITVAERDRVLARVAARAVTKTRAARTYLLSGMLRCGRCGNRLYSQARHVNPENRVRRYVCLKGPDHGGCGRLTVVAEPVEALLTDAVLARLDSPRLAKALAGKSSPDADVAALAAQVEADQARLDELAGLYADGSVSAREWITARDPITARISQARREIAEATDTSAVYELAGTGGALREQWDGLELGRQQAIIKSVLDHAVIAPGTPGARSLDINRVQPQWRI

SEQ ID NO: 50847 - DNA, 50 bp, Mycobacterium chimaera
  source 1..50: mol_type = genomic DNA
ggggcagattaacgatttgtcagcaagctgacattctgctaatatacccc

SEQ ID NO: 50848 - DNA, 40 bp, Mycobacterium chimaera
  source 1..40: mol_type = genomic DNA
tgggcgcaccgtcgcggagaacctgaaatgcctgtgccgc

SEQ ID NO: 50849 - DNA, 50 bp, Mycobacterium chimaera
  source 1..50: mol_type = genomic DNA
ggggcagattaacgatttgtcagcacgctgacattctgctaatatacccc

SEQ ID NO: 50850 - DNA, 40 bp, Mycobacterium chimaera
  source 1..40: mol_type = genomic DNA
tgggctcacctccccagtgaccctgagagggctgtgctgc

SEQ ID NO: 50851 - protein, 479 aa, Mycobacterium intracellulare
MPSKKTTGQRVGVGSAAIYARISADAEGTGLGVARQLEDCRKLAADRGWPVGDEYVDNDVSAFSGKPRQQYARMLADLGSGARDAVIVYNLDRLHRRPVELEEFVALCETVGVRDVATVTADIDLGNDDGLFMARIFAAFAAKESGRKSARIRRKMLQNAEAGLPHGSVRPFGYEDDKITLRESEAAVVRQMVDRYLAGQSLRSLTLWLNDTGVSPAIAKSWQTSAVRQVLCSGRIAGLREHRGEVIGEAVWPAIITSAERDRVLARIAARSVTKTRAARTYLLSGMLRCGRCGNRLYSQARHSNPDNRVRRYVCLKGPDHGGCGRLTVVAAPVEELLVEAVLTRLDSAQLADALAGKASTDADVAALAAQVEADQERLDELAGLYADGAITAREWIAARDPITDRIQHARRDIAAATDTTAVYELAGTGSVLRTGWADLDLGRQQAIVKAVLDHAVIAPGTPGSRSLDIDRVRPVWRV

SEQ ID NO: 50852 - DNA, 50 bp, Mycobacterium intracellulare
  source 1..50: mol_type = genomic DNA
agggcatatcaacgacttgtcactaaggtgagatgttggtaatataccct

SEQ ID NO: 50853 - DNA, 40 bp, Mycobacterium intracellulare; identical to SEQ ID NO: 50848
  source 1..40: mol_type = genomic DNA

SEQ ID NO: 50854 - DNA, 50 bp, Mycobacterium intracellulare
  source 1..50: mol_type = genomic DNA
agggcatatcaacgacttgtcactacggtgagatgttggtaatataccct

SEQ ID NO: 50855 - DNA, 40 bp, Mycobacterium intracellulare; identical to SEQ ID NO: 50850
  source 1..40: mol_type = genomic DNA

SEQ ID NO: 50856 - protein, 561 aa, Comamonas aquatica
MPTAYSYIRFSTPEQLKGDSLRRQLELSEKYAIENGLELDTTLKLRDLGLSAYHKANVEKGALGAFFEAIKDGRIKRGSYLLVESLDRLSRASVLDAQRQFQDIILAGITIVTLADGMVYSEESIKSNFANLMYSLVIMSRAHEESRTKAQRLKAVWEKKRQDAHTKIVTSMIPSWLEIQDGKIVVIEEKAEVLREVFRLIRNGYGMHLIERKLNSEGVKPFGRGKQWHRSYLMKLVHGRAVLGEYQPMTGRGTELRPNGPPLVGYYPAILTEEEYYAAHNALGVRTTKGGRKGHGIANVFSGLCKCGYCGGTMRYLNKGEGTSWQYLGCARAKSGMGCKHVLWQYYDFETTILSKLAGVDIAGVLRDDSAEKDMIKLTSETAKLDEVRSRIKKLVRIAEVADDVDDISIRLTELKAQERLLHQSVRELQELTQLPQLTRKHFQQFKRLREALDSASGEELIDLRLRVSHELKRLLDRIEIYPDGDEPWSHSMDLIGVKPGKEGRFAVAVFKTGEGRVLHGVNSMATIWPGPKTSAGIANAHMLPFLKKPSDKPTAEAANE

SEQ ID NO: 50857 - DNA, 50 bp, Comamonas aquatica
  source 1..50: mol_type = genomic DNA
tgggtctaaatagacatgcaatcaggatataattttcctattagacccag

SEQ ID NO: 50858 - DNA, 40 bp, Comamonas aquatica
  source 1..40: mol_type = genomic DNA
ccgggcgggccgaccatcagcacggcatggctgccggcgg

SEQ ID NO: 50859 - DNA, 50 bp, Comamonas aquatica
  source 1..50: mol_type = genomic DNA
tgggtctaaatagacatgcaatcaagatataattttcctattagacccag

SEQ ID NO: 50860 - DNA, 40 bp, Comamonas aquatica
  source 1..40: mol_type = genomic DNA
cccggctggcctaccaggaaggctgcctggctgctggcgt

SEQ ID NO: 50861 - protein, 437 aa, Rhodococcus erythropolis
MVARYSDNDISALNGKERPGYLELMAAADRGEFDQIVAYGLSRLWRSRRERADAIGTLSEARIGIALVKGSDFDLTSAAGRMYAGILGEFDTAESEVKAERVGRAAQQRAEEGRANGACAYGWTREYVRDDQGRVISWKDVVNEGAADVVRSIVRDLLGGVTLRAITAKLNEAGIAAPLGGKWITSSVRKLAIRDLNIGIRRHGTNTYPGAWESIVDAGDHAKVKALLADPKRRTQKAAARTHLLTFGIGKCGVCDGVLVVSRKGPQGAKTSLYVCKDPGCVGRREEWVDELVVATVCTRLSRPDALAIFDTDDVESEQAREKLTGLRARLDGAADAYAAGLIDTEQLARITAQVRPLMEVAERNARPPALVPTVVHHLIASPDTRKAWSALDISQQRAVLEALRIEVVIKKARGGPGFKPESVDVLWPSVTLNSSG

SEQ ID NO: 50862 - DNA, 50 bp, Rhodococcus erythropolis
  source 1..50: mol_type = genomic DNA
gctttgttgtccgtccaagacctccggggaatgccgagtgtcgactaagg

SEQ ID NO: 50863 - DNA, 40 bp, Rhodococcus erythropolis
  source 1..40: mol_type = genomic DNA
gcggtcttgccgacgccgccggggaagagtgagtcaccgg

SEQ ID NO: 50864 - DNA, 50 bp, Rhodococcus erythropolis
  source 1..50: mol_type = genomic DNA
gctttgttgtccgtccaagacctcgcgggaatgccgagtgtcgactaagg

SEQ ID NO: 50865 - DNA, 40 bp, Rhodococcus erythropolis
  source 1..40: mol_type = genomic DNA
gcggtcttgcagacgatgcgcaggaagcgccagccgccgc

SEQ ID NO: 50866 - protein, 622 aa, Vibrio splendidus
MFKPSPYPEVYSYRRFSNIEQEKGSSLARQDKYAYDIAEKYGLTVNKDLVLTDKGLSAFHAEHKTKGSFGVFLSLVKSKHVKSGSYLIVESMDRMSREQVFQAHATMTELITAGITVVVAKEGKVFNRKTMSADPLGTMLYAILEMQRSHEESLRKQGFSVDYIYQQVANFKDGLVSDVAGSLPFWLSRKPKPHPKVKTGFELNEHKITALMIVSLYLNERMGLGAIRQELRRLGIKSPTGKAIWGVSTISSVLANPTLCGRKVFTISYLKHGEAENENFDLHNYYPALISEGEYEAIQALKKRKYNAMSGDKSAVSDDALVYLLTDYGNKSFCSKCGKSIGSQPQKQKSRIRRRLNCSTEKESKNCCKSIIQDYLEDAFLVAVSRHIDYDLINKDIDSTAKLTIDEKIKEIDQQMNNILDTLTIISDGEKRATEKAKYQDLEKKKDELKKESGEFETYRISSESIKAFISNVQAARDYQNRDARLIVKDVLVKSIKKISVHMEAEPLSFYGYEKILDDCLVNVIDVEFYSGREISIFVSSNKDDSKLLFTRIHDDFVDDARGSYTSAQLDNWNEHGFDALLECLDEAQITNDPSDPENIWGGYDLAGALAEMVTEELIDSE

SEQ ID NO: 50867 - DNA, 50 bp, Vibrio splendidus
  source 1..50: mol_type = genomic DNA
ttagtgtttagtgttcgctcgccgtctgtctggcgaacactcatcactat

SEQ ID NO: 50868 - DNA, 40 bp, Vibrio splendidus
  source 1..40: mol_type = genomic DNA
gaaataaccaaatgcgccgtctgtccagtggatatcttgc

SEQ ID NO: 50869 - DNA, 50 bp, Vibrio splendidus
  source 1..50: mol_type = genomic DNA
ttagtgtttagtgttcgctcgccgagtgtctggcgaacactcatcactat

SEQ ID NO: 50870 - DNA, 40 bp, Vibrio splendidus; identical to SEQ ID NO: 19170
  source 1..40: mol_type = genomic DNA

SEQ ID NO: 50871 - protein, 546 aa, Vibrio splendidus
MKKENENNRVNEYLVPQVYLYMRFSKNKQEEGDSFRRQMSLAQKVSKERKIPINDDLVMRDKGLSAFKAEHVKRGALGKFLAAVKTGVVVKGSILIVESMDRLSRDVPLTAQDQFNSLMSNGITVITSNDQFVYDKRSMNSGNGQVYTVMGSMQRAHDESKHKHIRSMGVIEGKIKHFHEEGKAKSIGGDPFWVKTENGYLALDEKKAESVKLIIKLYLQEHKGLNLIARELTERGYKTPTGRNKSWGVTTIRKILDNPALYGLKKYSLTYLIDGEYETKGPFIHENFYPPLVSKEEFDIIQERKKNCVKARDSSKEGKVYLLSSYGKDKCVCADCGRATRSQYQKQKNRKGEFTGKEVLRLHCGKHKETKDCNSSILCHELETAFIRSIATHVNPKFLEKGSVGKIDEERLRKDISLLDAQIDELLKTLDSVNSIEIIIKLNEKIKKFDSERQELKELLTKSYEQDTGAEDSNEMRELAEKCTDPNNSEERGKFKRLLLQSIDKIIVSFKDKSLSAHFKNGNHFSLSKDNNGKYQTIVFYKRRPK

SEQ ID NO: 50872 - DNA, 50 bp, Vibrio splendidus
  source 1..50: mol_type = genomic DNA
gtagataacttttgacgcggagcctcagctctgtacacaaagttaactac

SEQ ID NO: 50873 - DNA, 40 bp, Vibrio splendidus; identical to SEQ ID NO: 50868
  source 1..40: mol_type = genomic DNA

SEQ ID NO: 50874 - DNA, 50 bp, Vibrio splendidus
  source 1..50: mol_type = genomic DNA
gtagataacttttgacgcggagccagagctctgtacacaaagttaactac

SEQ ID NO: 50875 - DNA, 40 bp, Vibrio splendidus; identical to SEQ ID NO: 19170
  source 1..40: mol_type = genomic DNA

SEQ ID NO: 50876 - protein, 533 aa, Vibrio cyclitrophicus
MSAQVYSYKRFSSIEQRKGSSLERQTDYAKKIAKKYNLRLNEELNMTDEALSAFHAEHVTKGMLGTFIQAVKDGAVAPGSILIVESLDRLSRQQPLQAQMQFNELLENEITIITATDSQVYNKQSLSRDPYKLFSSLSVMLRAHEESLIKQDRAISSIRSKIKSFRNKGEKSIPGTVPFWIDKTEKGFVLNQHKSTVELIVKLYLKQNGLNSISRELASKNIPTPTGKHKNWGITTIRKVLDNKALFGVRVVSMRYLKDATAITETEELASYYPAVISEEDYFVIQQRKKKKENSREGYGKATYLLSSYGKNKAICASCGYALGSQLQKQVNRRNEYTQSVLRLHCKKHKESLSCVPSIRAGRLESAFLDSIHHHLDANFLKPRLSYSKMESLGAELEVINEQISNLLDSLIYLKNKDTKDSLYKKIEKLEIKKEKLTKRIEENRLDKASIEDVKKLRDLAEKAKKISNNEERKLLKQILLQSLSKIIISLPNQSLIAQFFNGNELHLSFDPVAQKFVTIVTYGFKVNKFDEI

SEQ ID NO: 50877 - DNA, 50 bp, Vibrio cyclitrophicus
  source 1..50: mol_type = genomic DNA
gtagtagacattttgcctttgacgtcccctaaatgtacgatgtctactgc

SEQ ID NO: 50878 - DNA, 40 bp, Vibrio cyclitrophicus; identical to SEQ ID NO: 8008
  source 1..40: mol_type = genomic DNA

SEQ ID NO: 50879 - DNA, 50 bp, Vibrio cyclitrophicus
  source 1..50: mol_type = genomic DNA
gtagtagacattttgcctttgacgagccctaaatgtacgatgtctactgc

SEQ ID NO: 50880 - DNA, 40 bp, Vibrio cyclitrophicus; identical to SEQ ID NO: 19170
  source 1..40: mol_type = genomic DNA

SEQ ID NO: 50881 - protein, 491 aa, Mycolicibacterium rutilum
MGTRTAANAAIYCRISRDKTGAGLGVERQEEDCRRLAKQLGWKVIKVYTDNDISAYSGKRRPEYEALLAAMRSGLVTGVLAWHPDRLHRSATELDRYIKLANERQVTTHTAQAGQWDLSTPAGRLNARVVGDFAVYESEHRSDRIRRANEQRAVKRGGWHGGRRCYGWEPDGLTPREAEAAELRKAAEQIAEGISLRAVVADLNARKVPTTTGSKPWTSATLRGALVSPRQAGLCSYRGEIVGEAEWPAIIAPDLWHAVHRILTDPARRTNHTGGAVKWLGSGIYHCGVCGSAEHMRARLTTEGRKRYRCRNRIKGDPVVHVGRDAPLLDAYVEANLVERLSDPKVMRRITKALDRGHVNAPKLRAELAAKRDVLTEAAQMFTAGEITRAQLATITADARARIEGIEGQLAQAGTSSPLAQFTTAEDVGLVWFGPGGPAGDRTGGLSLGTRREVLRLLCDVTILPAPFGRAPGGAYFKPDCIRIDWRGPAA

SEQ ID NO: 50882 - DNA, 50 bp, Mycolicibacterium rutilum
  source 1..50: mol_type = genomic DNA
acgtgtattcggtaggtaaccggtaaacccgtcatgcacctagtgcacac

SEQ ID NO: 50883 - DNA, 40 bp, Mycolicibacterium rutilum
  source 1..40: mol_type = genomic DNA
cggtgccaccggctccggaaagtccgaactgttacgcacc

SEQ ID NO: 50884 - DNA, 50 bp, Mycolicibacterium rutilum
  source 1..50: mol_type = genomic DNA
acgtgtattcggtaggtaaccggtgaacccgtcatgcacctagtgcacac

SEQ ID NO: 50885 - DNA, 40 bp, Mycolicibacterium rutilum
  source 1..40: mol_type = genomic DNA
cagtgccaacggccccggcgaggaaaaactgttccgcagc

SEQ ID NO: 50886 - protein, 503 aa, Rhodococcus rhodochrous
MTKAAVYLRQSMDRAGEELAIDRQREDVMRYVNAMGWHLVGEFVDNDVSATSGKRRPEFERMMALVDEGAVDVVVVRHLDRLLRRMIELETVLERCVPHGVRVISTGEGIDTGTDGGRTTARILCSVAQGEVERKSARQRSAAEQAARLGRWVGGRRPFGYEADGVTVRETEAALIRQAYDDILVGESCHAIARRWNALGVMATQKKRDGSGEPARWSHSTVRDVLTNPRHAGLRRYRPGASAVREKRKDGTVWSDRAAIRQNPRLGIVGKAEWPALVPEETWYAAVDVLTNPARWKPAKGGKRLLTGVATCGVPGCGLYVHGGAAGHGKPGYRCRSGAHIARLAEPIDQYIELLALKRLLKPDAVAVFARPAEKESAVPLVRELEGVRRRLDEVPLEFADGVLDARQLKLITTRLREREADLQQRIAQLGQTDVIGPLIVADNIEDAWRSLSTARKRTVISLLFEQVVIHPVGRGVRNFRPTSVTVVWRNPATAEMGDSAPD

SEQ ID NO: 50887 - DNA, 50 bp, Rhodococcus rhodochrous
  source 1..50: mol_type = genomic DNA
ttctgctgttttcttgttctagtagtcgcgtggactcaacaatcacacat

SEQ ID NO: 50888 - DNA, 40 bp, Rhodococcus rhodochrous
  source 1..40: mol_type = genomic DNA
agcggatcgggcactgcgggtcgcgtggacgctgagcgac

SEQ ID NO: 50889 - DNA, 50 bp, Rhodococcus rhodochrous
  source 1..50: mol_type = genomic DNA
ttctgctgttttcttgttctagtacccgcgtggactcaacaatcacacat

SEQ ID NO: 50890 - DNA, 40 bp, Rhodococcus rhodochrous
  source 1..40: mol_type = genomic DNA
ggcgggacgggctctgggtcccgcgcggccgctgaggggc

SEQ ID NO: 50891 - protein, 462 aa, Rhodococcus pyridinivorans
MYLRQSQDRAGDEYGVDRQRADCRRLVETRWPSATVVEYVDNDVSATARKPRPAYGRLLAAVEAGRVDVIVSRHLDRLLRRLAELEHLLAVAEPHGTVIVTASDSIDTSTDGGRLTARILASVAQGEVERKSARQRSAVAQAAAQGRWVGGRRAFGYEPDGMTLRPDEAAAVAEAYRALLAGESLGAIARTWNAAGLTPTQSAEWDRSGVRDVLLNARYAGLRRHRPEGSHHEYRRDPAAFVVGRAQWPAVVDEETWRAAVALLTDPSRRTGVPGARALLTGVARCGACGAHVHSGGRRRMNPAYRCSAAHHLSRKSEPVDAYVQELAVRRLQMPDVLAALAEGEGVDTTPLRLEADTLRRRLDDLAADYAEGVLTRTQLHAGTAKLRGRLAEIDAELAEAGRGDVLEGFTSAEAVPALWDELSTDRRRAVIDLLMEVTLHPLGRGVRSFRPESVGIVWRAG

SEQ ID NO: 50892 - DNA, 50 bp, Rhodococcus pyridinivorans
  source 1..50: mol_type = genomic DNA
atctgccaatccgcaaccctaggggtcgcatggacatgctaaaggcgtaa

SEQ ID NO: 50893 - DNA, 40 bp, Rhodococcus pyridinivorans; identical to SEQ ID NO: 50888
  source 1..40: mol_type = genomic DNA

SEQ ID NO: 50894 - DNA, 50 bp, Rhodococcus pyridinivorans
  source 1..50: mol_type = genomic DNA
atctgccaatccgcaaccctagggcccgcatggacatgctaaaggcgtaa

SEQ ID NO: 50895 - DNA, 40 bp, Rhodococcus pyridinivorans; identical to SEQ ID NO: 50890
  source 1..40: mol_type = genomic DNA

SEQ ID NO: 50896 - protein, 470 aa, Mycobacteroides chelonae
MPMHHSVIRFPPMRAVIYTRVSDDHTGRSRSTQEQEADCRAQCERQGWPVKTVLCDQDIGASRYSSGTRESYERLREVLEPGDVLVTWEASRSQRDLDAYVRLRNFSAERGVLWSYNGRLYDMNHGDDRFVTALDVALAEKEVEQLRSRVMRGKRSAAQQGKPGGKPPWGYKVLREEQTGRSINFTYDLEELHLVRDAARSVMEGETLRSIVRRINTPESRPGIRPSTSSALRRALLNPQISGKRVYQGKVIGDALWEPIISPDAHELLVAFLTNPDRMTRLGGIEPKHLLSGIAQCSVCGSAVGLVGNRSRTKPYYACKGRTGCVSRQMEYADEVVKQAVLTVLEQMDPALFAEDDDSAKDALAELRALEDRLEAFTDSAAEGEVSAKALAKIEQKLLPQIEAARRRLRASQKACAALAIAGPDARRLWGNLEVKDQRSIVRSFFRVTIKPLGRGRKLVPESIGIELLN

SEQ ID NO: 50897 - DNA, 50 bp, Mycobacteroides chelonae
  source 1..50: mol_type = genomic DNA
atcacactaacgtgcatcgccgtccagatgccgatgcaccacagtgtgat

SEQ ID NO: 50898 - DNA, 40 bp, Mycobacteroides chelonae
  source 1..40: mol_type = genomic DNA
gtcccaggtccccgccgtccagatgccgatatcgtgcgtc

SEQ ID NO: 50899 - DNA, 50 bp, Mycobacteroides chelonae
  source 1..50: mol_type = genomic DNA
atcacactaacgtgcatcgccgtctagatgccgatgcaccacagtgtgat

SEQ ID NO: 50900 - DNA, 40 bp, Mycobacteroides chelonae
  source 1..40: mol_type = genomic DNA
atccctggtctctgcccactagatgctgatagcatgcctc

SEQ ID NO: 50901 - protein, 565 aa, Pectobacterium brasiliense
MSGLKPHIYIRVSKANQVQGSGLDEQEARIREYIKGKNHLFNGEPIVWKDEGVSAYGSKNVETGQLAKFISEVDQGRIGDGNCLIIYSLDRLSRRSAWDEDTIQYIVKSGVEIHDVSTPVILKRDDPFTKIIMELIVQRANNESRIKSERSTSGWQARFNNMVTNGKVMTRRLPRWLDSNENGYLIKENEVAIIHQIFNDYINGQTSPVIAKRLNAENKLINGSLWRPNGITKLIKDRRLLGFFCRNINDEEVPDVFPRVIDDETFQHANSILKVASSGIKGRPRYNEEQRTVRNILTGIIRCGKCGGRVTTSVNSRGERYIRCRNRINFEICNADGFKYALAEKVIFAHVKQVDFASIINGTSKLDKLSGLKSELLQLEIEENEWLTAIDERKKAKQRISIAFATGLSDVQERIDLVKQEIVELSLNETIPDFEQFDIDILLNPENVDMRLAARKMLLQVLDTVAYTRDESRIGFNIKYRNSVFLHALIANIKTHKVISHGSVSIEGDGQVILKNNFFDLNMLNGEMTMHDVTDLEELEEAKESLDFWKTYLEHIASLIQQRSK

SEQ ID NO: 50902 - DNA, 50 bp, Pectobacterium brasiliense
  source 1..50: mol_type = genomic DNA
ttgtgtgaaacattgactatcaccgtggtattaggtaacatttcacacac

SEQ ID NO: 50903 - DNA, 40 bp, Pectobacterium brasiliense
  source 1..40: mol_type = genomic DNA
gtggcgcaatgcggaaaccgtagtcattggtcgtgcccag

SEQ ID NO: 50904 - DNA, 50 bp, Pectobacterium brasiliense
  source 1..50: mol_type = genomic DNA
ttgtgtgaaacattgactatcaccatggtattaggtaacatttcacacac

SEQ ID NO: 50905 - DNA, 40 bp, Pectobacterium brasiliense
  source 1..40: mol_type = genomic DNA
atggagccattcgcagacaatagccattgtttgtgcccag

SEQ ID NO: 50906 - protein, 492 aa, Faecalibacterium prausnitzii
MTAVIYARYSSDNQREESIEGQIRECTAYAEKNGITIVKHYIDRAISAKTDNRPEFQQMIKDSDKKLFDIVLVWKLDRFARNRYDSARYKTQLKKNGVKLMSATEIISEGPEGIILESVLEGYAEYYSADLAEKVVRGQTENILKGRCNGGRGTFGYTLDSERKFHIDPLTSPFVLESFKKYNEGSTMKEIRDWLNENGIKNPVGGAFTYNSVEHMLKNRRYIGELKFRDVVVPDAIPPIIPLELFEDVQEKIAKNKKAPARRKAEDDYLLTTKLFCGHCGALMFGESGTSRTGEVHRYYKCATAKKHKGCKKKTVRKQWLEDLVVNQTMQLVKDDAAMESIIAKVMELQNKENTNIPLYEKQLRDAESGIQNMLNAIQAGILTSSTKERLEQLEETKRELEARIAEEKLAKPKVTEEFIRFWLLRFRKLDMSLKDQRQALVDTFINAIYLYDDKVLITFNYKEGTQTVTFGEATEVASEGNGSDLDCFTAP

SEQ ID NO: 50907 - DNA, 50 bp, Faecalibacterium prausnitzii
  source 1..50: mol_type = genomic DNA
ggttcggatttggattgctttactgcaccaaaccatgaaaatccgaactt

SEQ ID NO: 50908 - DNA, 40 bp, Faecalibacterium prausnitzii
  source 1..40: mol_type = genomic DNA
ggttcgagtcccttccatcgcaccatgacgaatgttctta

SEQ ID NO: 50909 - DNA, 50 bp, Faecalibacterium prausnitzii
  source 1..50: mol_type = genomic DNA
ggttcggatttggattgctttactcaaccaaaccatgaaaatccgaactt

SEQ ID NO: 50910 - DNA, 40 bp, Faecalibacterium prausnitzii
  source 1..40: mol_type = genomic DNA
ggttccagtcacttacaaccaaccatgactgatgcaaata

SEQ ID NO: 50911 - protein, 494 aa, Aeromonas dhakensis; identical to SEQ ID NO: 19196

SEQ ID NO: 50912 - DNA, 50 bp, Aeromonas dhakensis
  source 1..50: mol_type = genomic DNA
ccgtgtagtatcgttgtacgctgcgagctaagcacggcagtatgccacaa

SEQ ID NO: 50913 - DNA, 40 bp, Aeromonas dhakensis
  source 1..40: mol_type = genomic DNA
ctgcggcggggtgccaaccgacgtgcgcatcaccacccgc

SEQ ID NO: 50914 - DNA, 50 bp, Aeromonas dhakensis
  source 1..50: mol_type = genomic DNA
ccgtgtagtatcgttgtacgctgccggctaagcacggcagtatgccacaa

SEQ ID NO: 50915 - DNA, 40 bp, Aeromonas dhakensis
  source 1..40: mol_type = genomic DNA
aggcggcggggagccagcacgtgtgcgcagctccgccctc

SEQ ID NO: 50916 - protein, 628 aa, Aeromonas rivipollensis; identical to SEQ ID NO: 35411

SEQ ID NO: 50917 - DNA, 50 bp, Aeromonas rivipollensis; identical to SEQ ID NO: 35412
  source 1..50: mol_type = genomic DNA

SEQ ID NO: 50918 - DNA, 40 bp, Aeromonas rivipollensis
  source 1..40: mol_type = genomic DNA
gtcttccagcgcgccgggttggccgtaggcgccgttgttg

SEQ ID NO: 50919 - DNA, 50 bp, Aeromonas rivipollensis
  source 1..50: mol_type = genomic DNA
tacccccgacaaagtaactatggccggccgtagtgtctatgttagatgga

SEQ ID NO: 50920 - DNA, 40 bp, Aeromonas rivipollensis
  source 1..40: mol_type = genomic DNA
ggctgcccgcgcgccgggtcggccgttggtgccgctccgc

SEQ ID NO: 50921 - protein, 547 aa, Ralstonia pseudosolanacearum
MSKARVYSYLRFSDPKQAAGSSADRQIEYARRWAAERQLALDDSLSLRDEGLSAYHQKHVKQGALGVFLSAVEDGTIPMGSVLIVEGLDRLSRAEPIQAQAQAQLAQIVNAGITVVTASDGKEYNRERLRAQPMDLVYSLLVMIRAHEESDTKSKRVKAAIRRQCQGWIAGSWRGIVRNGNDPAWVAPVDGKFELVPEREAAVRAAISMFNRGYGGVRIVRELTESGLQLTGQENGGQHLYKLLRNRALVGERVLTVDREEFVLKGYYPAILTEEEFAGLQHLASKRAGRAVRGTIPSVVTGTGITFCGYCGRPLASQNLTNRRRRPDNSLADGHRRVLCTSYAKDSGCPVGGSCSVAPIERAIMSFCADQMNLTRLLDGDNGASVIAGKLSVARLKVTDIEAQIRRITDALLSDDGEAPAAFMRRARELEESLADKQKDVAARESELVVASSTATPAAAEAWAALAEGVMNIDHEARVQARQLVVDTFSRITVFHRGFRPDDEDGSSIGTQLIAKHGNMRLLNVDRRSGRWRAAEDVNVAALGFTA

SEQ ID NO: 50922 - DNA, 50 bp, Ralstonia pseudosolanacearum
  source 1..50: mol_type = genomic DNA
agtatagattcgttgcgttaagggcacccaagcgataccattcctatacg

SEQ ID NO: 50923 - DNA, 40 bp, Ralstonia pseudosolanacearum
  source 1..40: mol_type = genomic DNA
atccacgagggctttgggacaaccgaggctgacgaacccc

SEQ ID NO: 50924 - DNA, 50 bp, Ralstonia pseudosolanacearum
  source 1..50: mol_type = genomic DNA
agtatagattcgttgcgttaagggagcccaagcgataccattcctatacg

SEQ ID NO: 50925 - DNA, 40 bp, Ralstonia pseudosolanacearum
  source 1..40: mol_type = genomic DNA
atccacaaggacccagggaagactgaggctgaggactgcc

SEQ ID NO: 50926 - protein, 452 aa, Mycolicibacterium elephantis
MRAAVYLRQSVDKLGDELAVSRQREDCLKLCERRGWTPVEYVDNDTSASNGKRRPAYTQMLADIRAGRVGAVVAWDADRLHRQPRELEDFIDLADAHKLALATVGGDFDLSTPTGRGNARMKGVFARMEMEQKSARQKRAERQLAESGKPHRGGRRPFGYTRDNKVFEPEASAVRDGYADILAGATLHSVAARWNAAGLKTTAGNDWTGTTVKQTLTKPRYAGLRAYHGEIVGKAEWEAIVTEDVWRSLCDLLAQRSPSRPFPARKYLLTSIAVCGVCGRPVGSSAKTDSAPVYKCKECGGVTRQIDKTDRWVIEHVVARLSQPDAAQVLVRENRADMPALRAEANALRSRLDALATDFAEGDLTASQLRTATERIKAKLSAVESQMFDANSRRMFDGLIGAEDVRAAFDALPLDRQRAVVDALLSVTIMPVGKGRAFDPERVVLKWKTGRG

SEQ ID NO: 50927 - DNA, 50 bp, Mycolicibacterium elephantis
  source 1..50: mol_type = genomic DNA
taagtcccttaagcaatcttcgggttacctaacattgtgctagggtattt

SEQ ID NO: 50928 - DNA, 40 bp, Mycolicibacterium elephantis
  source 1..40: mol_type = genomic DNA
gtcgtcccacgtcagcgggttgccgaagatctgtgcccag

SEQ ID NO: 50929 - DNA, 50 bp, Mycolicibacterium elephantis
  source 1..50: mol_type = genomic DNA
taagtcccttaagcaatcttcgggagacctaacattgtgctagggtattt

SEQ ID NO: 50930 - DNA, 40 bp, Mycolicibacterium elephantis
  source 1..40: mol_type = genomic DNA
gcgggcccatggcagagggaggctgcagagctgagcccag

SEQ ID NO: 50931 - protein, 449 aa, Mycobacterium marseillense; identical to SEQ ID NO: 35371

SEQ ID NO: 50932 - DNA, 50 bp, Mycobacterium marseillense
  source 1..50: mol_type = genomic DNA
ggggtagcttgggaacttgtcagcaaggtcataagctgttaaactacccc

SEQ ID NO: 50933 - DNA, 40 bp, Mycobacterium marseillense
  source 1..40: mol_type = genomic DNA
cggccccactcatccgtcgaacctcaagctcctctgccga

SEQ ID NO: 50934 - DNA, 50 bp, Mycobacterium marseillense
  source 1..50: mol_type = genomic DNA
ggggtagcttgggaacttgtcagcatggtcataagctgttaaactacccc

SEQ ID NO: 50935 - DNA, 40 bp, Mycobacterium marseillense
  source 1..40: mol_type = genomic DNA
cagccccccacctccctccatcctccacctcctctgctgt

SEQ ID NO: 50936 - protein, 537 aa, Streptomyces griseoaurantiacus
MSKRGQRRLAAERAAYNVEAEWTAADLALLEELKQAEALLPEDAPRALLSIRLSVLTDETTSPVRQELDLRILARERGCRVVGVASDLNVSATKVPPWKRKELGDWLNNRSPEFDEILFWKLDRFVRRLSDLSTMIEWSLKRGKNLVSKNDSLDLTTTAGKIMVTIVGGIAEIEAANTSTRVTSLWDYAKSQEEWLIGKPAYGYVTDEDDTGRVVLVIDPEAHKALHWARRMALRGRSARFMVRCLKRAGLMSQGLTVVTLLRRLRNPALLGYRVEEDKNGGQRRSKPVLGKDGKPIRVAPPIFTEEEFETLGAALDKRMKKQPPRRPGGATQFLGVLLCAECKTNMTVQVTRNGVGTYPYLRCRNCKSGGHGAPNPERVYERLVEDVLKVLGDFPVQVRQYAEGAEARREIKRLQESIALYMKELEPGGRYTKTRFTKEQAETTLDKLIEELEAIDPETAKDRWVNVHGGKTFREHWQEGGMEAMSADLYRVGIRCEVTRTKVPGVRAPKVHLRLLIPKDVRERLVIREDDFAQAF

SEQ ID NO: 50937 - DNA, 50 bp, Streptomyces griseoaurantiacus
  source 1..50: mol_type = genomic DNA
agttgcggccatgtatcgaactgagggcatatggaaaaacactcaaaagc

SEQ ID NO: 50938 - DNA, 40 bp, Streptomyces griseoaurantiacus
  source 1..40: mol_type = genomic DNA
aatactggtgtccatctgggggcacaccccgcagtcgaag

SEQ ID NO: 50939 - DNA, 50 bp, Streptomyces griseoaurantiacus
  source 1..50: mol_type = genomic DNA
agttgcggccatgtatcgaactgaaggcatatggaaaaacactcaaaagc

SEQ ID NO: 50940 - DNA, 40 bp, Streptomyces griseoaurantiacus
  source 1..40: mol_type = genomic DNA
aataccggtgcccacctggaggcacagagcgctgtggata

SEQ ID NO: 50941 - protein, 557 aa, Microbacterium fandaimingii
MTIVDAEQSALNSLVTPSRPMGAVAVTYLRVSTKEQAERGGTDEGFSIPAQRDANHRKADDLGATIVEEFVDAGESARKADRPDLMRMIKYVTKHKVDYCIVHKVDRLARNRADDVAIHLALRDSGVMLVSATENIDETPSGMLLHGIMSTIAEFYSRNLATETVKGLSQKAASGGTVTKAPLGYRNVGVRDEYGREVRTVEVDQERGKLIRWAFQVYASGEWSTNQLHAELTARGLTTPPTPRRPSKPIGRSSLHRILTNPYYKGDVTYQGVTYKGTHQALVPAEVWYQVQTVLSMHRSAADATQIHDHYLKGTVFCGQCGARLLVCNAKNARGNIYPYFVCAARHSGRGTCTRQAMLIEEVERLIERHYETVQITKQTRQAVAAKLHATFDELMASESDALEAMTTERNRLEDEQLRVLQAHYAGAVPLDLLKKEQDRISAALETIEHRITAHHGEYAEARANLDDSLDLLEHAAEVYANCDDANRRLCNQAFFKAIYIDEDNDVQVGYATPFDALTDRELQTNALVWAEDGRNESEVRTLTGSTVESSHLAHLG

SEQ ID NO: 50942 - DNA, 50 bp, Microbacterium fandaimingii
  source 1..50: mol_type = genomic DNA
agttcacacctcgcacatctggggtccctccgtgacacgttcagcaacat

SEQ ID NO: 50943 - DNA, 40 bp, Microbacterium fandaimingii
  source 1..40: mol_type = genomic DNA
actggggccggaacctgggtgagtaacgggacttgaaccc

SEQ ID NO: 50944 - DNA, 50 bp, Microbacterium fandaimingii
  source 1..50: mol_type = genomic DNA
agttcacacctcgcacatctgggggtcctccgtgacacgttcagcaacat

SEQ ID NO: 50945 - DNA, 40 bp, Microbacterium fandaimingii
  source 1..40: mol_type = genomic DNA
tctgtggccggaacctggggtagtactggaagctgctcct

SEQ ID NO: 50946 - protein, 583 aa, Shewanella algae
MTNNHQTPSPRSTSTTTSTPPSVVSYSRYSTKKQSKGFSLERQDENLKRWSDANGIPISDLSFADLGISAFSGTAVREGLSNMLEAVRHGAVPRGWWIAFERIDRLSRRGITETRRLIDQILQHEVNIVCIGEGIELRSDDDANDELKGSLMVAIHAHLAREQSAKASERIRATAAAKRRRARETGAPIKKRLPYWLELSPDGTKYQFKAGRIETVRYIVKRRLEGRGFHGICAELNAMNTPPLTRMSKQWNDMAVASTVRNVALFGQYQPAITNEVEKVDSDGRRKMVRVAIPDGDPLDSYFPAVIDRATWDAIQSDSRTKMKAGRRGDNPVSGLTFCRHCGGTLPMKPASKTSTNGTRHTYRYWTCRGAVDGKCDHGKGIKDLDQFVIKACRRIVPRTLGQGGGGQDPAAAFEYQSLLERRGKVTTQIATLDAAMADPELGAAALKHIARQIDVATDNLEQVDAEIAAVEARQKAELDTTPEAVERLKQLEGDPVAYNLHLKTLVHRIVAGAVRLDDGSWSDVALLFRFTVELLNGQRIEVTVSRRNRWDKNPVEFYSHSEDATAGVDVEQDLYPWEQDQD

SEQ ID NO: 50947 - DNA, 50 bp, Shewanella algae
  source 1..50: mol_type = genomic DNA
attccacccaatcaaatatacattataatgtaattgatattgcacaactc

SEQ ID NO: 50948 - DNA, 40 bp, Shewanella algae; identical to SEQ ID NO: 27743
  source 1..40: mol_type = genomic DNA

SEQ ID NO: 50949 - DNA, 50 bp, Shewanella algae
  source 1..50: mol_type = genomic DNA
attccacccaatcaaatatacattgtaatgtaattgatattgcacaactc

SEQ ID NO: 50950 - DNA, 40 bp, Shewanella algae
  source 1..40: mol_type = genomic DNA
ctccagtgcaggcaacagagtgagagcgtgtttcaaaaaa

SEQ ID NO: 50951 - protein, 622 aa, Lentzea atacamensis
MGGPEALREWAGPRRVDRAHPLSGPAVHAEPSFIRVAFVARTSTYDQQDPTLSIPRQLRSCHSVLPDNAVIVAHFYDIESGRKDLSDRGRGNAHELFQIPVPRDGGIQDLLDEAVRPDRRFDVVICEDISRVSRRSYTSTEIEHRLESAGVMLICADEPFRLDAKGRRAKTSTQVLTRRVKQGVAEWYVIEMLGKAWDGFETHTEQGYNVGKPCYGYLAKKIPHPVPAKRAKGLKKTRLEVHPVEGPVVRKSFGWRVAERLGYQAIADRLNQDLVTNPPPTPVDPDNAVGLWTYSNVRDMLTNPKHTGHMVWNRRARKGGGKNRMNPVSEWVWSPEPTHEANIDLETFVQAQQIAEQRERSRTASKSRDPQAKRTYKLRSYIFCVLCKRRLYGKTKHQHAYYVCAPKMAWVPEGHPASTYWVREQSMLDGLTAFLAAQVFGPYRRQLLTASLRELDENGEKDRKAKITALRRAITEAETKRKNLVRNLELTDVDQDFVRDVNERRAELQSEIEELRAQLVKAEDEVQHAPNPGLLDFLPVTPVELAELPDELSRKLFEALRLEIHYDYVSRSATCRVTLLGDTIEAVSQATQEAVVIPFPKQKGPTMDELHGGTVCVVPPAG

SEQ ID NO: 50952 - DNA, 50 bp, Lentzea atacamensis
  source 1..50: mol_type = genomic DNA
cgggaccgtctgtgtagtgcccccggcaggacacacaacagatgggaaca

SEQ ID NO: 50953 - DNA, 40 bp, Lentzea atacamensis
  source 1..40: mol_type = genomic DNA
ccatgttctgcgtgcccccggcaggattcgaacctgcgca

SEQ ID NO: 50954 - DNA, 50 bp, Lentzea atacamensis; identical to SEQ ID NO: 50952
  source 1..50: mol_type = genomic DNA

SEQ ID NO: 50955 - DNA, 40 bp, Lentzea atacamensis
  source 1..40: mol_type = genomic DNA
ccttgttccacgtggccctggccagatttgatcctgctca

SEQ ID NO: 50956 - protein, 533 aa, Bacteroides nordii
MENFDLKGFAKGKKQQKEQIGGNAIIYTRVSSSEQVDGQSLEVQQDKCREYAQSHSYTVVAEFGGTYESAKSDKERKEFNRMLDFIKKSNKKGNTQKVDVVIVFSTSRFSRTGSTTIIEEVEARGAYVVSATSSYDPRTAVGKYMQLMELANARFQNDEKRATTIENSVKALLKGRWIGKAPRGYDQKTTKKEQIITINEEGKLIRKAFLWKANNKLSNEEIRHRLEAEGLHICKQKLSELFKNPFYCGYMAHKFLQGDIVQGNHPPLISKEIFLKVNGELSKNHSGYEQKIDKEYAPLLGSIKCPCCGKNLSASISTKMRKRFGRTDIGYYVCSRKGCKYNSSTKKVHEAFEEEVNRYALSDKVSELLKMQLTITFEYMNQENRERAKSIKANIKAKEKELEQVETNYALCTDAKKQSICEKVMTKLEKEVRDLKTEFSKVNTEILNLDKFIDFAFKMRSNLFELWELQGLEGRRRLQKLVFPDGFIYDKNNEHIEPKKVNQFFLLKYSYPTGNGDKKKETNREKHDSSLRV

SEQ ID NO: 50957 - DNA, 50 bp, Bacteroides nordii; identical to SEQ ID NO: 17302
  source 1..50: mol_type = genomic DNA

SEQ ID NO: 50958 - DNA, 40 bp, Bacteroides nordii
  source 1..40: mol_type = genomic DNA
tttcacaaagaacactcgtactcgaagcgggacttgaacc

SEQ ID NO: 50959 - DNA, 50 bp, Bacteroides nordii; identical to SEQ ID NO: 17304
  source 1..50: mol_type = genomic DNA

SEQ ID NO: 50960 - DNA, 40 bp, Bacteroides nordii
  source 1..40: mol_type = genomic DNA
tgtctcaaaaaaaactcctcttcaatgggagtcttgaacc

SEQ ID NO: 50961 - protein, 558 aa, Microbacterium sp TPU 3598
MTTTDANRAAIDSLVAPTPFVGTIAVSYLRVSTKEQAEKGGSAEGFSIPAQREANQRKADQLGATIVEEFVDAGESARKADRPELMRMIQYVTKYKTNYCIVHKVDRLARNRADDVTIHLALKDAGVTLVSATENIDETPSGMLHGIMSSIAEFYSRNLATEVVKGLSQKAAQGGTVSKAPIGYRNIGVRDEFGREVRTVELDEERAPLVRWAFQRFASGDWTTSQLHHELVARGLTTAPSPRRPSRPIGKSSVHRTLTNPYYKGCVRYQGVTFAGAHEALVPNEVWDQVQTVLGTHRSAADATQVHEHYLKGTVFCGQCGSRLIVCNAKSSQGTIYPYFVCGSRHGGRGDCTRQAMLIEHVERLVEQFYDHVQISAETKLALSSMLHARFDGMMSEGAAELADLATRRTQLEGEQEKLLRAHYAGAVPLELLKREQDRITASLETMQNRIDAHHGEYAFARANLDDSLTLLSNAADIYKTADDANRRLCNQALFKAIYVDEDNDVRVGYKTPYDGLNIEGLQADALTWAAEAKKMGQVRTPTKGGPLVESSNLTHWG

SEQ ID NO: 50962 - DNA, 50 bp, Microbacterium sp TPU 3598
  source 1..50: mol_type = genomic DNA
aagttcaaacctgacccattggggtgcctgagtagtacgttcggcaactc

SEQ ID NO: 50963 - DNA, 40 bp, Microbacterium sp TPU 3598
  source 1..40: mol_type = genomic DNA
cgggccttcttcaggagggtgagtaacgggactcgaaccc

SEQ ID NO: 50964 - DNA, 50 bp, Microbacterium sp TPU 3598
  source 1..50: mol_type = genomic DNA
aagttcaaacctgacccattggggtccctgagtagtacgttcggcaactc

SEQ ID NO: 50965 - DNA, 40 bp, Microbacterium sp TPU 3598
  source 1..40: mol_type = genomic DNA
ctggtcttctctaggagggtctgtagctggtcttgatccc

SEQ ID NO: 50966 - protein, 580 aa, Hungatella hathewayi
MYNMSPYSLSRSFRDKPCRAVIYGRASTEHEAQVKALQNQMQWYDDVARFHPQWNVINRYIDQGITGTQVYKRDAFMRMMEDAKQQKFDLIVTREVCRFARNTVDALVCVRQLAAIGIEVYFVNDNIWTLDGDGELRLTIMATMAQEESRKISERSLAGQRVSREKGVLYGNGNIFGYTRNKLTKQFEIDPDQAETVKMIFDLYDSGMGETLVAKELTRLGRKNGVGKVKWDAGKVSKIIKRKNYLGYTVYCQSYSNNYLEQKRIKRDESEFVYVKGGFPQIISEEQYERCNAIRRSRTKRLTDEKGHTRSFGIQQAQNVWGRKMRCRCGSPMLRHRWRTNNAGKPIYGYECKRHHDTPRIRLQNEQGNPTPICEIKPVGQSKLELMASKIFERVWGDQREIVLQTCKMLDACYKPDADRRADLMKAKDDSIQLLQQQLDDLVVVRARGEIEQDKFLQRTIEIQQQMEALRQSKAQIASEDYNPGRLDMEAIEAALCEAVEMHDGLVSEDFIDLFVSQVTPLSDSRFAWCLDFSPQPTVAFLNLAGQRKYTTCSMDSKLHFGPFADEEGHTIPFPGSLRR

SEQ ID NO: 50967 - DNA, 50 bp, Hungatella hathewayi; identical to SEQ ID NO: 15592
  source 1..50: mol_type = genomic DNA

SEQ ID NO: 50968 - DNA, 40 bp, Hungatella hathewayi
  source 1..40: mol_type = genomic DNA
gcaagactggctgcggctcaggcggcgcttaataataaat

SEQ ID NO: 50969 - DNA, 50 bp, Hungatella hathewayi
  source 1..50: mol_type = genomic DNA
atatacacaaggtatgtacggcgctggctgctatcaagaacccccgcaag

SEQ ID NO: 50970 - DNA, 40 bp, Hungatella hathewayi
  source 1..40: mol_type = genomic DNA
gcaagcctggctgaggctgtggtggcccttctgaccaaat

SEQ ID NO: 50971 - protein, 427 aa, Pseudomonas alkylphenolica
MSRAHEESATKGGRVSSAWRAKQKEARTTGKPLGKLRPLWLDVTPDSYVLNPDKAAVVRRIFDLSTKGHGSRIIAATLNQEGIPAFSAGRKNFSGLWGFSTVRHILDSRTTIGEYQPHIFIDGKRTPDGEPIKGYFPSVVTEDEYYLAHAARSSRKTHTVTKTTTNFNVLAGILNCYKCGAAMHLQGQRGRKYYKCSKVTRGLCDAGIISAPRTEEVFKEMLPKVDSLSLVQDSSGRLQKSLHIVEGRIASLKVRQDDAEASHAEFPSRITAKLLHELEAEIGALESECAAISEQLASDRVMNKDDFFKKLDLVSFEGRVAANNLIKRLGLYIFVNKNGRTDETYWVTKNNAIPTLFSAESPNLLFYLMHQGGNIRFEAMHDEHVDLQVIQGDLNEVEATFAKTESWDELPSELLAMWKARHGTVKE

SEQ ID NO: 50972 - DNA, 50 bp, Pseudomonas alkylphenolica
  source 1..50: mol_type = genomic DNA
agtagtgttttgttgcataacatcaagaagtgttgccacaattacctacc

SEQ ID NO: 50973 - DNA, 40 bp, Pseudomonas alkylphenolica
  source 1..40: mol_type = genomic DNA
cgccagcgggcagaaattcaagaagtgctgcgccagttac

SEQ ID NO: 50974 - DNA, 50 bp, Pseudomonas alkylphenolica
  source 1..50: mol_type = genomic DNA
agtagtgttttgttgcataacatcgggaagtgttgccacaattacctacc

SEQ ID NO: 50975 - DNA, 40 bp, Pseudomonas alkylphenolica; identical to SEQ ID NO: 3915
  source 1..40: mol_type = genomic DNA

SEQ ID NO: 50976 - protein, 538 aa, Salmonella enterica; identical to SEQ ID NO: 13576

SEQ ID NO: 50977 - DNA, 50 bp, Salmonella enterica; identical to SEQ ID NO: 13577
  source 1..50: mol_type = genomic DNA

SEQ ID NO: 50978 - DNA, 40 bp, Salmonella enterica
  source 1..40: mol_type = genomic DNA
aggcaacaagcggtggaataatacgcagcggttcaagcaa

SEQ ID NO: 50979 - DNA, 50 bp, Salmonella enterica
  source 1..50: mol_type = genomic DNA
ttgcttctttatcacacataagcatctgctcatgtacggtaaggaagcaa

SEQ ID NO: 50980 - DNA, 40 bp, Salmonella enterica
  source 1..40: mol_type = genomic DNA
atgaaacaagcagtggaaatccaggctgcagtttcagcaa

SEQ ID NO: 50981 - protein, 524 aa, Salinibacterium hongtaonis
MIDPTSTAPSLLVDLYVRLSIDKEGKDSLERQEADLRAWADREGLVVRRVWRDRGKSGYKASVKRPDFDAAVAAVTSGEVAALAVWKLDRLSRRGAGQVGTVLDDVTAVGGRLHFLKDGLDSSVSNSRMLIVMLSELARAESTNTSLRVRAKKEASRREGKYLGGARPFGWLVTDGQKLRRHPDEAPIVREAVERLLAGETMNAICRDWNARGIPTRRRGSHWRASTLSAAMRSPVLSGLVPERRVEADSGYWGTDIRPWKHPDTGESVSLLAEGESPIATEGERMALLRELDSRLRRYGRGMRAVKQPESLLGGLVECASCGRTANSFGGSYRCRRWHEIGEPCTAPLNVSLGTLELAVKHAWARGLAALEPDDPVLWAVADRWLAKNDPAPMQERDELTKQLATLRARVKDVDNDRYVRGSLSADRHAALARTLEAHIAEVTHQLAALPKPDADLAALLDPELSIPAIESASALEARVLLRLAIDRVIVEPAPYPGARFHAHKRMRIVWANESSMDDSSAAK

SEQ ID NO: 50982 - DNA, 50 bp, Salinibacterium hongtaonis
  source 1..50: mol_type = genomic DNA
cctcggcacatggaacgcacatcctcgaccgtctgtgctgagtaacgagc

SEQ ID NO: 50983 - DNA, 40 bp, Salinibacterium hongtaonis
  source 1..40: mol_type = genomic DNA
ggcgttgatccagatttcctcgatgttcgggtcatctagg

SEQ ID NO: 50984 - DNA, 50 bp, Salinibacterium hongtaonis
  source 1..50: mol_type = genomic DNA
cctcggcacatggaacgcacatccaggaccgtctgtgctgagtaacgagc

SEQ ID NO: 50985 - DNA, 40 bp, Salinibacterium hongtaonis
  source 1..40: mol_type = genomic DNA
gggcaggatcaagatttccaggaggttcgggtcatggtgc

SEQ ID NO: 50986 - protein, 540 aa, Faecalibacterium prausnitzii; identical to SEQ ID NO: 12131

SEQ ID NO: 50987 - DNA, 50 bp, Faecalibacterium prausnitzii; identical to SEQ ID NO: 2472
  source 1..50: mol_type = genomic DNA

SEQ ID NO: 50988 - DNA, 40 bp, Faecalibacterium prausnitzii
  source 1..40: mol_type = genomic DNA
ggtgtccaagtgggagaacggcacctcggagccgaacacc

SEQ ID NO: 50989 - DNA, 50 bp, Faecalibacterium prausnitzii; identical to SEQ ID NO: 49079
  source 1..50: mol_type = genomic DNA

SEQ ID NO: 50990 - DNA, 40 bp, Faecalibacterium prausnitzii
  source 1..40: mol_type = genomic DNA
gctgtcccagtgggacaacatcagctcagacccaacaagc

SEQ ID NO: 50991 - protein, 540 aa, Faecalibacterium prausnitzii
MKQPYNTTIYNTALYLRLSRDDELQGESGSIQTQRMMLRQYAAEHGLTVVDEYIDDGWSGTNFERPSFQRMIDDIEDGKINCVVTKDLSRLGRNYILTGQYTEIYFPSKGVRYIAINDNVDTINGESELAPFLNILNEMHARQTSKKVKAAMHTRFANGAHYGAYAPLGYVKDPDKKGHLLIDPETRWIVEKIFDLAVHGRGAASITRILVEEKVPTPGWLNYERYGTFANIYTGAPPEKAYAWTIAQVKSILKEETYIGHSVHNKQSNISFKNKKKVRKPQEEWYRVENTHEAIISEEVFQKVQELIASRRRRQKNGTTQIFSGLVKCADCGWSLAYGVNSQNKNPYAHYHCSKYGQGLRQCSMHYIRYDVLYAYVLARLQYWSMLAQKDEDKLLKRLLNASDRERNSAKKKQAAELKKAEKRKAEVDGLFAKMYEDWSAGRITEYNFNMLSEKYQNEQRELETKIRQLHETMEAAVQTAADAEKWIALMKQYVNPVELTAELLNTLIEKITVHEAVKGEDGSREQEVEIYYRFIGKID

SEQ ID NO: 50992 - DNA, 50 bp, Faecalibacterium prausnitzii; identical to SEQ ID NO: 3657
  source 1..50: mol_type = genomic DNA

SEQ ID NO: 50993 - DNA, 40 bp, Faecalibacterium prausnitzii; identical to SEQ ID NO: 50988
  source 1..40: mol_type = genomic DNA

SEQ ID NO: 50994 - DNA, 50 bp, Faecalibacterium prausnitzii; identical to SEQ ID NO: 17834
  source 1..50: mol_type = genomic DNA

SEQ ID NO: 50995 - DNA, 40 bp, Faecalibacterium prausnitzii; identical to SEQ ID NO: 50990
  source 1..40: mol_type = genomic DNA

SEQ ID NO: 50996 - protein, 547 aa, Phocaeicola sartorii
MKCILLVRVSTEAQSYEEQEKELYDLAHFYGYKDKDISSIATKESAIKLDEEERFGLNRMKELLETGEYDCVFAWEISRIARRKKILFSILEYLTTKGIQLIIKEPRIRLLKDDKTIDEGAETIFTLYAQLAESEMRNKIARFSRAKKEGFNKGKYMGGKITLGYKVSEDGYWQIDEEGSKLVRLVFDMYISGEYSLTELGKELKSRGYFKNLSVTNVKAEMYGLLKNPIYRGIRTSNNIYPQIIDDDTWEKCRKKREENRTRSKAKTPHLLTPLIRCSCGASYSVNLMDATYSCRVKHNAVEKGLLHSPDINVNVIESLAWYVALQELHEDMICKRNDAKETYEEEIRIYNQKIAYSRGILESTMQRRSDLDENYFVHGRFTKEKYEELTKKQNGIIKAEQDNIRKYEAAIQNMEKQIQADITFDDMLDSLNQSYDTLKNGTDMETMRRITHRYITDINIEPWKGKATSFWKKVTIRTIHDMGKKKKIEQLKEQGLDNMTFTLVGTFYVNTLHKKAYWDKDMINCVPMVYIERLTRKRKDTRINKK

SEQ ID NO: 50997 - DNA, 50 bp, Phocaeicola sartorii; identical to SEQ ID NO: 3977
  source 1..50: mol_type = genomic DNA

SEQ ID NO: 50998 - DNA, 40 bp, Phocaeicola sartorii
  source 1..40: mol_type = genomic DNA
ccaccataccatctcgcaagtcgccatggtaggcggcgga

SEQ ID NO: 50999 - DNA, 50 bp, Phocaeicola sartorii; identical to SEQ ID NO: 3979
  source 1..50: mol_type = genomic DNA

SEQ ID NO: 51000 - DNA, 40 bp, Phocaeicola sartorii
  source 1..40: mol_type = genomic DNA
ccaccccacctcctccagcctcgccatggtaggcagctga

SEQ ID NO: 51001 - protein, 522 aa, Blautia obeum
MIESKSRVAIYCRLSEEDRNKQSETDDSNSIQNQKSMLLQYSLEHGWEVYNIYSDDDYTGSDRRRPEFNRLLEDAKNRKFDIVLCKTQSRFTRELELVEKYIHGLFPIWGIRFISIVDNADTANKGNKKSRQINGLVNEWYLEDMSENIKSVLTDRRKNGHHIGAFALYGYKKDPDVKGHLIIDEEAAEVVREVFTLFSQGYGKTAIARMLNDRGIPNPTEYKRLHGLRYKQPKTKNSTLWKYFAISDMLVNEIYIGNMVQGKYGSVSYKTKQNKPRPKDEWYRVEGTHEPIIDRELWDRVQTLVAQKAKPFTVGTIGLFARKARCMNCGYTMRSSKNRGKHYLQCSNRHVAKDACIGSFISVDKLEKAVIDELNKLSAEYLDKDELEQNVQVNNDLRGQKEALETEIAAYQKKIAEYTKGIRELYLDKVKGILSELDYLDLSKDFSTQKERLEKLVIDTQKQLDVIERKMQVGDNRRQLIEQYTNLEHLDREIVEKLIDYVLVGKKDPVTKEVPIEIHWNF

SEQ ID NO: 51002 - DNA, 50 bp, Blautia obeum; identical to SEQ ID NO: 12237
  source 1..50: mol_type = genomic DNA

SEQ ID NO: 51003 - DNA, 40 bp, Blautia obeum
  source 1..40: mol_type = genomic DNA
cgttgcccgggctttctgttccgcagcaaggtcttcaaac

SEQ ID NO: 51004 - DNA, 50 bp, Blautia obeum
  source 1..50: mol_type = genomic DNA
tgttgtctttacacaatcgtaccacttggtgcgacctcgtaagaacaaca

SEQ ID NO: 51005 - DNA, 40 bp, Blautia obeum
  source 1..40: mol_type = genomic DNA
ccttgtccctgctttctgccttgcaactaggtcttcacat

SEQ ID NO: 51006 - protein, 585 aa, Azospirillum brasilense
MRQAAVYARVSTVRQSDNDRVSLPDQIRRCREAAERSGYTVPGEFVFQDAVSGEKDEENRPGFGAMIAAGRGRQFEALFFWSLDRLARDTIVGLKALNELEKNGVAVRSVSEPGVVENQAVRTFMLGWAQEERERIKARTQGGRAGARARGRWTNGMAPYGLRLAEGGQLQVDPIEGPLVREMFDRIIAGHGRIAICRWLNETGVLPPIAEFKKGEKKTRLRTNDKRIGSTWEGLSRFMAESKLEFHTRKPIWVESAVWKIVTNPIYTGRSERGDTYDIQPAALVAASTHRQANAVMTERWRKGKVPPESMLLTGRLVCGHPGCVRAYSMTRSGRAGGYLNYYQCLGRRHGVCDNPSVRADATDAIVAEKVSEFLVSRLGSQDFLAALTRDTEKKLGDLQAELRLVQERKDSAEKERASLLDNIRYLRAQKVGEAALRDDVDRLRIVGQEIEKIEAQEVELLSDIAGLERSAVANDREVRDAVLRGLIDLHLEAQRPKGVEAEFLIDPKEVIALAVERVYVHPSGSLDVRFREDPASLAAIVRHVAAFALRANRRLTDAQAAGLIPIDIGPFLDLTPSEMINNDK

SEQ ID NO: 51007 - DNA, 50 bp, Azospirillum brasilense
  source 1..50: mol_type = genomic DNA
cctagcgagatgatcaacaatgacaagtcattgttgactacgatgcaaac

SEQ ID NO: 51008 - DNA, 40 bp, Azospirillum brasilense
  source 1..40: mol_type = genomic DNA
cgtgtagtgccacagggtgaagccgttggcgtaggcaagg

SEQ ID NO: 51009 - DNA, 50 bp, Azospirillum brasilense
  source 1..50: mol_type = genomic DNA
cctagcgagatgatcaacaatgacaggtcattgttgactacgatgcaaac

SEQ ID NO: 51010 - DNA, 40 bp, Azospirillum brasilense
  source 1..40: mol_type = genomic DNA
cttgtagtgcttcacgttgaggcccttggcgttgtcgaag

SEQ ID NO: 51011 - protein, 472 aa, Streptococcus pyogenes
MQTKRKVAIYSRVSTLHQAEEGYSIGQQIEALTKYCQAMGWVIYDNYSDGGFSGGKLERPAMQKMIQDAKSGKFDTVVVYKLDRLSRNVRDTLYLVKDVFNANNVDFVSLQENIDTKSAMGNLFITLLSAIAEFEREQIKERMQLGVKGRAKSGKTTSWTTPPFGYKYDTNTQSMTVDHYQAEIVRDMFNKIISGWSIMGITTYMRENYDGKWTHVKVKRILENITYIGKVKYRNEIFDGEHAPILTEEIFYKAQKALEERTSKKDNTRPFQGLYMLSNIAKCGYCGTPLKIDSYKPRKDGTRKRTYTCINRNPKRIKTAIYNDGEQCKESGRYDVKDVERYVLNEISKLQLNPKSIESLYRDKPEENITAHQERLKKLETKLSKLNDLYINELISMEALKQKSAELLKEKSSLETFINNNKRKINNKPAFEKVAKMDDVFKMSYDDQKKIVKTLIKRVEVKRDEINVIFKL

SEQ ID NO: 51012 - DNA, 50 bp, Streptococcus pyogenes
  source 1..50: mol_type = genomic DNA
atttaggagcaccgactagtatagttgtgcatgaatcagaacttttaacc

SEQ ID NO: 51013 - DNA, 40 bp, Streptococcus pyogenes
  source 1..40: mol_type = genomic DNA
tttttaccgacgaatatagttgtacatgccattatcagtc

SEQ ID NO: 51014 - DNA, 50 bp, Streptococcus pyogenes
  source 1..50: mol_type = genomic DNA
atttaggagcaccgactagtataggtgtgcatgaatcagaacttttaacc

SEQ ID NO: 51015 - DNA, 40 bp, Streptococcus pyogenes
  source 1..40: mol_type = genomic DNA
ttttaacttaagcatataagtgtacatgcattcatgagtc

SEQ ID NO: 51016 - protein, 540 aa, Blautia producta; identical to SEQ ID NO: 17726

SEQ ID NO: 51017 - DNA, 50 bp, Blautia producta; identical to SEQ ID NO: 3657
  source 1..50: mol_type = genomic DNA

SEQ ID NO: 51018 - DNA, 40 bp, Blautia producta
  source 1..40: mol_type = genomic DNA
ggtgagtaagtgggagcgggggctgagtcttccggacatt

SEQ ID NO: 51019 - DNA, 50 bp, Blautia producta; identical to SEQ ID NO: 3657
  source 1..50: mol_type = genomic DNA

SEQ ID NO: 51020 - DNA, 40 bp, Blautia producta; identical to SEQ ID NO: 19345
  source 1..40: mol_type = genomic DNA

SEQ ID NO: 51021 - protein, 462 aa, Mycolicibacterium baixiangningiae
MRVALYLRQSQDRSGEQLGIDRQREDCLRLIAARGWTIAAEFVDNDVSALSRKPRPQFIAMMARVDAGEFDVIVARHMDRLLRRLAELESVLERCQSTSTTIVTAADGIDTGTDGGRTVARIMASIAQGEVERKAARHRSASVQAAQQGRWVGGGRPFGYDADGMTIRPNEAALIRQGFADFLAGESFGEIARRWVAAGYRTPQGNEWSRYAVRDVLTNPRYCGLRRHVPNDQLGAMRKNPELGIVGPAQWAAIVDEPTWRAVARTMASDDRRRAPVAAKGLLTGVGLCGVCGQTVQRSGASVAAPQYRCRSRQHVTRRAEPVDQYVSAVAVARLAAPDAGSLWTTDTPDAAELMAEADALRRRRDDLAELVADGAMTPAQFRSANERVLTKLGDVETRIAAFGRSSPLAIVAETDVEAAWAGLSVAQRRSVIDALMVPVLHLPGRGTRTFNPETVEIRWKG

SEQ ID NO: 51022 - DNA, 50 bp, Mycolicibacterium baixiangningiae
  source 1..50: mol_type = genomic DNA
ctgtgtgattgtgtggtgcttgtcgtagcgcacaccacgcgataacgtaa

SEQ ID NO: 51023 - DNA, 40 bp, Mycolicibacterium baixiangningiae
  source 1..40: mol_type = genomic DNA
gtcaggcagtatcggtgtcgtgacgctgatactgctctac

SEQ ID NO: 51024 - DNA, 50 bp, Mycolicibacterium baixiangningiae
  source 1..50: mol_type = genomic DNA
ctgtgtgattgtgtggtgcttgtccaagcgcacaccacgcgataacgtaa

SEQ ID NO: 51025 - DNA, 40 bp, Mycolicibacterium baixiangningiae
  source 1..40: mol_type = genomic DNA
gtcaggcctgatctctgaccacaccctgatactgctacac

SEQ ID NO: 51026 - protein, 550 aa, Streptococcus dysgalactiae; identical to SEQ ID NO: 45696

SEQ ID NO: 51027 - DNA, 50 bp, Streptococcus dysgalactiae; identical to SEQ ID NO: 12327
  source 1..50: mol_type = genomic DNA

SEQ ID NO: 51028 - DNA, 40 bp, Streptococcus dysgalactiae
  source 1..40: mol_type = genomic DNA
tccacagacgcatcacgtggagtgcgtagtgttgctacaa

SEQ ID NO: 51029 - DNA, 50 bp, Streptococcus dysgalactiae
  source 1..50: mol_type = genomic DNA
ggtttggacaatgatgagcacgttcagacggtagcacttttgtccaaact

SEQ ID NO: 51030 - DNA, 40 bp, Streptococcus dysgalactiae
  source 1..40: mol_type = genomic DNA
tccacggacccataacgtgcattgagtaccattgctaata

SEQ ID NO: 51031 - protein, 550 aa, Streptococcus dysgalactiae; identical to SEQ ID NO: 45841

SEQ ID NO: 51032 - DNA, 50 bp, Streptococcus dysgalactiae; identical to SEQ ID NO: 45792
  source 1..50: mol_type = genomic DNA

SEQ ID NO: 51033 - DNA, 40 bp, Streptococcus dysgalactiae; identical to SEQ ID NO: 51028
  source 1..40: mol_type = genomic DNA

SEQ ID NO: 51034 - DNA, 50 bp, Streptococcus dysgalactiae
  source 1..50: mol_type = genomic DNA
agtttggacaatgatgaacaagttcagacggtagcgttattgtccaaact

SEQ ID NO: 51035 - DNA, 40 bp, Streptococcus dysgalactiae; identical to SEQ ID NO: 51030
  source 1..40: mol_type = genomic DNA

SEQ ID NO: 51036 - protein, 550 aa, Streptococcus dysgalactiae
MSKEKIKVYLYTRVSTSIQIEGYSLEAQKSRMKAFAIYNDYEIVGEYEDAGKSGKSIEGRKQFNRMMEDIKSGKDGVSFVLVFKLSRFARNAADVLSTLQIMQDYGVNLICVEDGIDSSKDAGKLMISVLSAVAEIERENIRIQTMEGRIQKAREGKWNGGFAPYGYKLEDGKLFINEEEAVAIRTIFDQYVNTTIGANGLSKYLENHGIRKIPRQNGKNPLFDAGLIRKILKNPVYNGKIAFGRRTLEKVHGTRNEYKQVEQDEYIISEGIHEAIVSDEVWQAAQVKLKSQAKKYEHVNKGKDTRTHLLSGIVKCPICGVGMFGNKCTKKKKDGTKYKDFYYYGCKHRQMIRGHKCTFRKQIREELLDDAVAEVIVKIVSNPKFASMMQEKINMKVDTSEIEKEIDNYQKELRKSHSTKFKLIEEIDNLDVEDKHYKRRKQDLDDRLYRMYDKIDELESSLIDAKAKKQTIEAEKLTGDNIYKVLIYFDKLYKVMNDVERRQLITALISEIQVYEEKQPNGQWLKSITFKLPIIDDDLNISLDNDEQVE

SEQ ID NO: 51037 - DNA, 50 bp, Streptococcus dysgalactiae; identical to SEQ ID NO: 37717
  source 1..50: mol_type = genomic DNA

SEQ ID NO: 51038 - DNA, 40 bp, Streptococcus dysgalactiae; identical to SEQ ID NO: 51028
  source 1..40: mol_type = genomic DNA

SEQ ID NO: 51039 - DNA, 50 bp, Streptococcus dysgalactiae
  source 1..50: mol_type = genomic DNA
agtttggacaatgatgaacaagttcagacggtagcacttttgtccaaact

SEQ ID NO: 51040 - DNA, 40 bp, Streptococcus dysgalactiae; identical to SEQ ID NO: 51030
  source 1..40: mol_type = genomic DNA

SEQ ID NO: 51041 - protein, 550 aa, Streptococcus dysgalactiae; identical to SEQ ID NO: 45751

SEQ ID NO: 51042 - DNA, 50 bp, Streptococcus dysgalactiae
  source 1..50: mol_type = genomic DNA
ggtttggacaatgatgaacaagttgagactatagcgttgatacaaaagat

SEQ ID NO: 51043 - DNA, 40 bp, Streptococcus dysgalactiae; identical to SEQ ID NO: 51028
  source 1..40: mol_type = genomic DNA

SEQ ID NO: 51044 - DNA, 50 bp, Streptococcus dysgalactiae
  source 1..50: mol_type = genomic DNA
ggtttggacaatgatgaacaagttcagactatagcgttgatacaaaagat

SEQ ID NO: 51045 - DNA, 40 bp, Streptococcus dysgalactiae; identical to SEQ ID NO: 51030
  source 1..40: mol_type = genomic DNA

SEQ ID NO: 51046 - protein, 550 aa, Streptococcus dysgalactiae
MSKEKIKVYLYTRVSTSIQIDGYSLEAQKSRMKAFALYNDYEIVGEYEDEGKSGKSIEGRIQFTRMMEDIKSGKDGVSFVLVFKLSRFARNAADVLSTLQTMQDFGVNLICVEDGIDSSKDAGKLMISVLSAVAEIERENIRVQTMEGRIQKAREGKWNGGFAPYGYQLIDGKLLINEEEAIAIRTIFDQYVNTSIGANGLSKYLENHGIRKIPRQNGKNPLFDAGLIRKILKNPVYNGKIAFGRRTLEKVHGTRNEYRQVDQDDYIVAEGIHEAIIPDELWQAAQVKLKAQAKKYEHVNKGKNMRTHLLSGIVKCPICGAGMFGNKSIKYKKDGTKYKDFYYYGCKHRLMNRGHKCTYNKQIREELLDDAVAEVIIKLVSNPKFASMMQEKINMKVDTSAIENEIDNYQKELRKSHSTKFKLIEEIDNLDVEDKHYKRRKNDLDDRLYRMYDKIEELESLLIDAKAKKQTIEAEKLTGDNIYKVLIYFDKLYKVMNDVERRQLITALISEIQIYEEKQPNGQWLKSITFKLPIIDKDLNIGLDNDEQVE

SEQ ID NO: 51047 - DNA, 50 bp, Streptococcus dysgalactiae; identical to SEQ ID NO: 45752
  source 1..50: mol_type = genomic DNA

SEQ ID NO: 51048 - DNA, 40 bp, Streptococcus dysgalactiae; identical to SEQ ID NO: 51028
  source 1..40: mol_type = genomic DNA

SEQ ID NO: 51049 - DNA, 50 bp, Streptococcus dysgalactiae
  source 1..50: mol_type = genomic DNA
ggtttggacaatgatgaacaagttcagacggtagcattattgtccaaact

SEQ ID NO: 51050 - DNA, 40 bp, Streptococcus dysgalactiae; identical to SEQ ID NO: 51030
  source 1..40: mol_type = genomic DNA

SEQ ID NO: 51051 - protein, 550 aa, Streptococcus dysgalactiae; identical to SEQ ID NO: 43801

SEQ ID NO: 51052 - DNA, 50 bp, Streptococcus dysgalactiae; identical to SEQ ID NO: 1837
  source 1..50: mol_type = genomic DNA

SEQ ID NO: 51053 - DNA, 40 bp, Streptococcus dysgalactiae; identical to SEQ ID NO: 51028
  source 1..40: mol_type = genomic DNA

SEQ ID NO: 51054 - DNA, 50 bp, Streptococcus dysgalactiae; identical to SEQ ID NO: 1839
  source 1..50: mol_type = genomic DNA

SEQ ID NO: 51055 - DNA, 40 bp, Streptococcus dysgalactiae; identical to SEQ ID NO: 51030
  source 1..40: mol_type = genomic DNA

SEQ ID NO: 51056 - protein, 550 aa, Streptococcus dysgalactiae
MSKEKIKVYLYTRVSTSIQIDGYSLEAQKSRMKAFALYNDYEIVGEYEDAGKSGKSIEGRIQFTRMMEDIKSGKDGVSFVLVFKLSRFARNAADVLSTLQTMQDFGVNLICVEDGIDSSKDAGKLMISVLSAVAEIEREIIRVQTMEGRIQKAREGKWNGGFAPYGYQLIDGKLLINEEEAIAIRTIFDQYVNTSIGANGLSKYLENHGIRKIPRQNGKNPLFDAGLIRKILKNPVYNGKIAFGRRTLEKVHGTRNEYRQVDQDDYIVAEGIHEAIIPDELWQAAQVKLKAQAKKYEHVNKGKNMRTHLLSGIVKCPICGAGMFGNKSIKYKKDGTKYKDFYYYGCKHRLMNRGHKCTYNKQIREELLDDAVAEVIIKLVSNPKFASMMQEKINMKVDTSAIENEIDNYQKELRKSHSTKFKLIEEIDNLDVEDKHYKRRKNDLDDRLYRMYDKIEELESLLIDAKAKKQTIEAEKLTGDNIYKVLIYFDKLYKVMNDVERRQLITALISEIQIYEEKQPNGQWLKSITFKLPIIDKDLNIGLDNDEQVE

SEQ ID NO: 51057 - DNA, 50 bp, Streptococcus dysgalactiae; identical to SEQ ID NO: 45752
  source 1..50: mol_type = genomic DNA

SEQ ID NO: 51058 - DNA, 40 bp, Streptococcus dysgalactiae; identical to SEQ ID NO: 51028
  source 1..40: mol_type = genomic DNA

SEQ ID NO: 51059 - DNA, 50 bp, Streptococcus dysgalactiae; identical to SEQ ID NO: 51049
  source 1..50: mol_type = genomic DNA

SEQ ID NO: 51060 - DNA, 40 bp, Streptococcus dysgalactiae; identical to SEQ ID NO: 51030
  source 1..40: mol_type = genomic DNA

SEQ ID NO: 51061 - protein, 519 aa, Streptococcus dysgalactiae
MKAFALYNDYEIVGEYEDAGKSGKSIEGRIQFTRMMEDIKSGKDGVSFVLVFKLSRFARNAADVLSTLQTMQDFGVNLICVEDGIDSSKDAGKLMISVLSAVAEIERENIRVQTMEGRIQKAREGKWNGGFAPYGYQLIDGKLLINEEEAIAIRTIFDQYVNTSIGANGLSKYLENHGIRKIPRQNGKNPLFDAGLIRKILKNPVYNGKIAFGRRTLEKVHGTRNEYRQVDQDDYIVAEGIHEAIIPDELWQAAQVKLKAQAKKYEHVNKGKNMRTHLLSGIVKCPICGAGMFGNKSIKYKKDGTKYKDFYYYGCKHRLMNRGHKCTYNKQIREELLDDAVAEVIIKLVSNPKFASMMQEKINMKVDTSAIENEIDNYQKELRKSHSTKFKLIEEIDNLDVEDKHYKRRKNDLDDRLYRMYDKIEELESLLIDAKAKKQTIEAEKLTGDNIYKVLIYFDKLYKVMNDVERRQLITALISEIQIYEEKQPNGQWLKSITFKLPIIDKDLNIGLDNDEQVE

SEQ ID NO: 51062 - DNA, 50 bp, Streptococcus dysgalactiae; identical to SEQ ID NO: 45752
  source 1..50: mol_type = genomic DNA

SEQ ID NO: 51063 - DNA, 40 bp, Streptococcus dysgalactiae; identical to SEQ ID NO: 51028
  source 1..40: mol_type = genomic DNA

SEQ ID NO: 51064 - DNA, 50 bp, Streptococcus dysgalactiae; identical to SEQ ID NO: 51049
  source 1..50: mol_type = genomic DNA

SEQ ID NO: 51065 - DNA, 40 bp, Streptococcus dysgalactiae; identical to SEQ ID NO: 51030
  source 1..40: mol_type = genomic DNA

SEQ ID NO: 51066 - protein, 550 aa, Streptococcus dysgalactiae; identical to SEQ ID NO: 45751

SEQ ID NO: 51067 - DNA, 50 bp, Streptococcus dysgalactiae; identical to SEQ ID NO: 45752
  source 1..50: mol_type = genomic DNA

SEQ ID NO: 51068 - DNA, 40 bp, Streptococcus dysgalactiae; identical to SEQ ID NO: 51028
  source 1..40: mol_type = genomic DNA

SEQ ID NO: 51069 - DNA, 50 bp, Streptococcus dysgalactiae; identical to SEQ ID NO: 51049
  source 1..50: mol_type = genomic DNA

SEQ ID NO: 51070 - DNA, 40 bp, Streptococcus dysgalactiae; identical to SEQ ID NO: 51030
  source 1..40: mol_type = genomic DNA

SEQ ID NO: 51071 - protein, 550 aa, Streptococcus dysgalactiae
MLKEKIKVYLYTRVSTSIQIEGYSLEAQKSRMKAFAIYNDYEIVGEYEDAGKSGKSIEGRKQFNRMMEDIKSGKDGVSFVLVFKLSRFARNAADVLSTLQIMQDYGVNLICVEDGIDSSKDAGKLMISVLSAVAEIERENIRIQTMEGRIQKAREGKWNGGFAPYGYKLEDGKLFINEEEAVAIRTIFDQYVNTTIGANGLSKYLENHGIRKIQRQNGKNPLFDAGLIRKILKNPVYNGKIAFGRRTLEKVHGTRNEYKQVEQDEYLISEGIHEAIVSDEVWQAAQVKLKSQAKKYEHVNKGKDTRTHLLSGIAKCPICGVGMFGNKCTKKKKDGTKYKDFYYYGCKHRQMIRGHKCTFSKQIREELLDDAVAEVIVKIVSNPKFASMMQEKINMKVDTSEIEKEIDNYQKELRKSHSTKFKLIEEIDNLDVEDKHYKRRKQDLDDRLYRMYDKIDELESSLIDVKAKKQTIEAEKLTGDNIYKILIYFDKLYKVMNDVERRQLITALISEIQVYEEKQPNGQWLKSITFKLPIIDDDLNISLDNNEQVE

SEQ ID NO: 51072 - DNA, 50 bp, Streptococcus dysgalactiae; identical to SEQ ID NO: 1837
  source 1..50: mol_type = genomic DNA

SEQ ID NO: 51073 - DNA, 40 bp, Streptococcus dysgalactiae; identical to SEQ ID NO: 51028
  source 1..40: mol_type = genomic DNA

SEQ ID NO: 51074 - DNA, 50 bp, Streptococcus dysgalactiae; identical to SEQ ID NO: 1839
  source 1..50: mol_type = genomic DNA

SEQ ID NO: 51075 - DNA, 40 bp, Streptococcus dysgalactiae; identical to SEQ ID NO: 51030
  source 1..40: mol_type = genomic DNA

SEQ ID NO: 51076 - protein, 550 aa, Streptococcus pyogenes
MSKEKIKVYLYTRVSTSIQIDGYSLEAQKSRMKAFALYNDYEIVGEYEDAGKSGKSIEGRVQFTRMMEDIKSGKDGVSFVLVFKLSRFARNAADVLSTLQIMQDFGVNLICVEDGIDSSKDAGKLMISVLSAVAEIERENIRVQTMEGRIQKAREGKWNGGFAPYGYQLIDGKLLINEEEAIAIRTIFDQYVNTSIGANGISKYLENHGIRKIPRQNGKNPLFDAGLIRKILKNPVYNGKIAFGRRTLEKVHGTRNEYKQVEQDEYLISEGIHEAIVSDEVWQAAQVKLKSQAKKYEHVNKGKDTRTHLLSGIVKCPICGVGMFGNKCIKKKKDGTKYKDFYYYGCKHRQMIRGHKCTFSKQIREELLDDAVAEVIIKLVSNPKFASMMQEKINMKVDTSEIEKEIDNYQKELRKSHSTKFKLIEEIDNLDVEDKHYKRRKQDLDDRLYRMYDKIEELESLLIDAKAKKQTIEAEKLTGDNIYKVLIYFDKLYKVMNDVERRQLISALISEIQIYEEKQPNGQWLKSITFKLPIIDENINIGLDNDEHVE

SEQ ID NO: 51077 - DNA, 50 bp, Streptococcus pyogenes
  source 1..50: mol_type = genomic DNA
ggtttggacaacgatgaacacgttgagacggtagcacttttgtccaaact

SEQ ID NO: 51078 - DNA, 40 bp, Streptococcus pyogenes
  source 1..40: mol_type = genomic DNA
tccgcagacccatcacgtcgagtgcgtagtgttgctaatc

SEQ ID NO: 51079 - DNA, 50 bp, Streptococcus pyogenes
  source 1..50: mol_type = genomic DNA
ggtttggacaacgatgaacacgttcagacggtagcacttttgtccaaact

SEQ ID NO: 51080 - DNA, 40 bp, Streptococcus pyogenes; identical to SEQ ID NO: 51030
  source 1..40: mol_type = genomic DNA

SEQ ID NO: 51081 - protein, 538 aa, Mycobacteroides abscessus; identical to SEQ ID NO: 15161

SEQ ID NO: 51082 - DNA, 50 bp, Mycobacteroides abscessus
  source 1..50: mol_type = genomic DNA
gggttcgaagatcgcctctttggtggggctaaggggaacactctcgaacc

SEQ ID NO: 51083 - DNA, 40 bp, Mycobacteroides abscessus
  source 1..40: mol_type = genomic DNA
tctgacctgggattatggtggagctaaggggactcgaacc

SEQ ID NO: 51084 - DNA, 50 bp, Mycobacteroides abscessus
  source 1..50: mol_type = genomic DNA
gggttcgaagatcgcctctttggtgcggctaaggggaacactctcgaacc

SEQ ID NO: 51085 - DNA, 40 bp, Mycobacteroides abscessus
  source 1..40: mol_type = genomic DNA
tcgggcctgggatgagggtgcagccagtgagactctcacc

SEQ ID NO: 51086 - protein, 487 aa, Bacillus wiedmannii
MAYAVYVRVSSDKDEQVSSVENQIDICRYWLENNGFEWDEHTVYFDDGISGTAWLERHAMQRILNKARKKELDTVIFKSIHRLARDLKDALEIKEILLGHGVRLITIEEGYDSYYEGKNDMKFEMYAMFASQLPKTLSVSVTAALAAKVRRGGYTGGFVPYGYEIVDDKYAINDEEAALVKEIFELYSQGFGYIKIANTINDKGARTRKGAPWTFSTLCKMIKNPAYKGTYTMQKYGTVKVNGRKKKVINPKEKWVIFEDHHPAIISHELWDMVNDKDPNKFKKKRRVSTSNELRGITVCAHCGTAMSKRNSINVSKNGKATEYSYMICNWSRTTARRECVKHVPIHYKDLRALVLDKLKEKESVLEKEFYSDENRLHVKLKKLNKDIKDLKVKKERLLDLYLEGERIDKDTFTVRNKKLEKEIEVKELEIQKANNIETQMKEKQEVRDAFALLEESKDLNSVFKKLIKRIEVAQDGAVDIHYRFAE

SEQ ID NO: 51087 - DNA, 50 bp, Bacillus wiedmannii
  source 1..50: mol_type = genomic DNA
tatacgccttattgacataccgcaagtgcggtgtataattaaggcataaa

SEQ ID NO: 51088 - DNA, 40 bp, Bacillus wiedmannii
  source 1..40: mol_type = genomic DNA
tatagcgtttgagggagcgagcgcggttggtaagagcagc

SEQ ID NO: 51089 - DNA, 50 bp, Bacillus wiedmannii
  source 1..50: mol_type = genomic DNA
tatacgccttattgacataccgcaggtgcggtgtataattaaggcataaa

SEQ ID NO: 51090 - DNA, 40 bp, Bacillus wiedmannii
  source 1..40: mol_type = genomic DNA
aaaggcgagtgaggaggcgggcgcgggtgggaggagcagc

SEQ ID NO: 51091 - protein, 630 aa, Cronobacter muytjensii
MPQLYSYIRWSTDRQDKGTTRNRQLAAAKVYAAEAGLEMVEIEDPGVSAFRGKNTNTGKLGDFIDAVKQGAIASDSWLYVENLDRITRQNVTTAQKLFIELLELGLTLVTGMDKRVYTLDSVNKNPTELMISLLLFSRANEESETKSNRTIGNVVALVERHQAGLPVNIKSVGRHPFWIDDSGSQYEAVKEHPVYWSIAREAIDMFLDGNGIYTVKRYLDEKYPNGLKGKEWDYQVLKKMRDNRALIGERTINVGGATYKLDNYYPWLCKDEAEFLTLAERKQQNNYKAKKDKTEEIKLLSGLQVLRCSKCGGTMHSFMNHGSARYICTNGVHLQKNCSGWSISAQLVEHCTMISLLIGYMDKSRKDGINTTAIEEEISRKEILITDLEFRIANMAQAIAIAPDVSALAVQLNTFDLERKKTVLEVDKLKERLHSLKGKGSLEVDITDFLMLIQWSVFTNMEDADRNKIRKIISSIIESIIVEKADGCITIKIKCHHKDEWLVFGGVNRKPFWAFTIEYSTNDTKEIEGGDSSNFVSNPLFQKAVEQLDSIKQNYLKLFETANTMLGVVGYSDIRGASFWPNTGQYERANVEYEGITYNIAMNGRVSKAITAALEATGLSRKDFIERYKV

SEQ ID NO: 51092 - DNA, 50 bp, Cronobacter muytjensii; identical to SEQ ID NO: 46807
  source 1..50: mol_type = genomic DNA

SEQ ID NO: 51093 - DNA, 40 bp, Cronobacter muytjensii
  source 1..40: mol_type = genomic DNA
gtccaccaggtttttcgggcagcccaacgaaacaaagcca

SEQ ID NO: 51094 - DNA, 50 bp, Cronobacter muytjensii
  source 1..50: mol_type = genomic DNA
taatttattttttgattattagggatccctaatgatataaatccaatctt

SEQ ID NO: 51095 - DNA, 40 bp, Cronobacter muytjensii
  source 1..40: mol_type = genomic DNA
gtcccctgggctttccaggatgcccccaggaacaaagcca

SEQ ID NO: 51096 - protein, 524 aa, Vibrio parahaemolyticus
MKLVAYIRISSHGQKDKGDSLDGQRQYIKSWALTGKHTIKKWYIDEAVSAFKGKRLNFELMLDELDSGLVQADAVIVYSLSRFSRNLVTQLNATKTLEKLGMSLLSASESLPNSPDDKYLVVTMLGLINEHQSRQNSRVVSDRLRDTARKGFYTGGPIPFGYNAITVSGDTSKKRKKLVVNLQESPVVKLIFELAEKGTNGKGFGVKNIAVHLNKNGYSNRGKKWNKNSVCNILNNRVYMGEFLFGKSKPNKLGDERIVVKVPSIVSSSKFERVRQYVEERALSNTGIKSARSNSLLTGVLTCPICHGSIRVTHGKSGKYKYYQCSQQVMYSPDSCSFKRIRKEEADKLIIESLINRIFTEQNLSEIYLQTRNLLKERVAKNRMELTSLSQRIGSEKSRANHLIELISEHKIEATKVVSDTLKKHSDQIAHLEEELARKKISSSLPVKNFGMEKIKQFTHDVHSYIKKADEASLKQLILATIDKVYIIPEKKLTFTVVTWLLSILSHIQKRELISQFPLSSQSG

SEQ ID NO: 51097 - DNA, 50 bp, Vibrio parahaemolyticus
  source 1..50: mol_type = genomic DNA
ttcccgctttcgtctcaaagtggcgggaaacttgggacgattatgggaac

SEQ ID NO: 51098 - DNA, 40 bp, Vibrio parahaemolyticus
  source 1..40: mol_type = genomic DNA
aggcttcctgtatagtggcggagagatagggatttgaacc

SEQ ID NO: 51099 - DNA, 50 bp, Vibrio parahaemolyticus
  source 1..50: mol_type = genomic DNA
ttcccgctttcgtctcaaagtggccagaaacttgggacgattatgggaac

SEQ ID NO: 51100 - DNA, 40 bp, Vibrio parahaemolyticus
  source 1..40: mol_type = genomic DNA
aggctctctgtttagtggccaagagatactggttttatag

SEQ ID NO: 51101 - protein, 560 aa, Metabacillus idriensis
MLTGVIYARVSTEEQASEGYSIEAQKQLLRDYAKHRNIQIIDEYIDEGRSGKSIEGRPQMLRLLRDAKDTKFDAVITYKLDRLARKTRDSLEIIETLERHNVQLMSYSESIDTSTPGGKMFYTVLSSISEMERSTIIDRVKMGMNQRAKQGKWNGGIVFGYNVIDKELVVNEDEAAVVQDIFNLADKGYGFKKIAYDLNKRGIKTKKNKEFSTISVKTILNNPMYIGKIRFNQHENWSERRRKGKNPDPVLVDGTHTPIIEASQWNQVQEKLQKRSRRPAQSAKPYFLGRLLRCPSCGYGMVAAKSKGENGKVYRMYQCGQYKNKGRTVCQAHSINADKAEKYVLDELNRVVTLPYFIERLVEKMNQERSDAEHPLQEELNRLVSSKQKTEKQLDNLVSLLMDDPELRDIYKKKMKEQKDFLLNIEERIEHVKKQLLNVSKDPVDADALKQLLKNLDSILERADAAEKKELLALFVENIQITKERVSFKEGRQITQINLMFDFTIEALQGSASVLLNSMDHINCIAPIDHSIISQISKEDMYREALASLNLLPLFMIRFS

SEQ ID NO: 51102 - DNA, 50 bp, Metabacillus idriensis
  source 1..50: mol_type = genomic DNA
ttttacccttatttatgatacggttcaccgtaccggtttgtagggtaaaa

SEQ ID NO: 51103 - DNA, 40 bp, Metabacillus idriensis
  source 1..40: mol_type = genomic DNA
catttacttatgatacggttctccccgattaatccgaaaa

SEQ ID NO: 51104 - DNA, 50 bp, Metabacillus idriensis
  source 1..50: mol_type = genomic DNA
ttttacccttatttatgatacggtctaccgtaccggtttgtagggtaaaa

SEQ ID NO: 51105 - DNA, 40 bp, Metabacillus idriensis
  source 1..40: mol_type = genomic DNA
catttccctatgttaccatcttccccagtcaatctgtaaa

SEQ ID NO: 51106 - protein, 540 aa, Enterobacter asburiae
MPKAISYIRFSSKIQASGDSTKRQNKYIYEWLKNNPDYQLDESLRFQDLGISGYSGANAKSGAFGEFLAAVESGVIQAGSVLLVESLDRVSRQDIDTARERLRKILLAGVDVVTLADNSWYKKESLNDPLSLIKAVLIMQRANEESATKSKRLRSAWDAKREDAAKGKIMTRRCVAWLRVSGDMSHFELIPDNVKAVQRVFQLRLEGLPFVRIARQMNEEGFYTLNQRNPVKGAWSHTTVKALLDNRSVIGFKVPSNCTVTQGVKEIPNYYPAVISEEQFYAVQQLKQGAGRRPSSEKPLLTNLFKGVMRCGECGFVTVVNCATEKWHGVYRCSMRYEGRCDAKSINRRLADKALVQGLLYNTNRLSLNRGNGSAIGSLQSELEQLQKQRERLIKLAMLADDTESMAKDLKALNSQIKDAEKSVSEVHQREQSSQLETISHLDLTVKKDRIEAQIIIKRIIKEIRLNTAGKKCDVFLHNGLRLLNFPLDRVVDGAQWIEILPLIDGDEFDFEGFTTKPRHIALEEAPEWVKELEFNSKIQ

SEQ ID NO: 51107 - DNA, 50 bp, Enterobacter asburiae; identical to SEQ ID NO: 47037
  source 1..50: mol_type = genomic DNA

SEQ ID NO: 51108 - DNA, 40 bp, Enterobacter asburiae
  source 1..40: mol_type = genomic DNA
gttggtgtgcagcgttgacagcaccagatgaccggtctgg

SEQ ID NO: 51109 - DNA, 50 bp, Enterobacter asburiae
  source 1..50: mol_type = genomic DNA
gtaagttattagagagttgtaatttggactacacatctcttatgataaac

SEQ ID NO: 51110 - DNA, 40 bp, Enterobacter asburiae
  source 1..40: mol_type = genomic DNA
gtgggattgcagaattggttgagccagattaccggtctgg

SEQ ID NO: 51111 - protein, 618 aa, Streptococcus pneumoniae; identical to SEQ ID NO: 11111

SEQ ID NO: 51112 - DNA, 50 bp, Streptococcus pneumoniae; identical to SEQ ID NO: 11112
  source 1..50: mol_type = genomic DNA

SEQ ID NO: 51113 - DNA, 40 bp, Streptococcus pneumoniae
  source 1..40: mol_type = genomic DNA
tgtaccgtggagaccaagtgacattcagcaacgcaatgga

SEQ ID NO: 51114 - DNA, 50 bp, Streptococcus pneumoniae; identical to SEQ ID NO: 11114
  source 1..50: mol_type = genomic DNA

SEQ ID NO: 51115 - DNA, 40 bp, Streptococcus pneumoniae
  source 1..40: mol_type = genomic DNA
taacccttagagaccaagtagcattgaccaaacctatgga

SEQ ID NO: 51116 - protein, 498 aa, Aeromonas jandaei
MKSKAWLYARFSSSQQADGDSINRQVKAAQQWCGANGVELQQTSFRDLGVSGWKSIKRPMFEQLIKAMQEGKIPRGSYVLFESTDRLSRRGWEHTRELIKQITVQHGCNLVILDKNQVYTKANVNDVVQNILLMFSADLAEKESQRKSDLVSAAYKSKRQKGDVSRWPFWLDKVDDKFVFNEKAEIIKLIVDLRLQGIGALGIAAELNRRGYKSSRGSNWGHTSVRIAIENSALYGTKDFFSTKSKKDFDESGNEIRTSNSELVSSISNAFPAICDFDTWQKIQIKGEKPGRKSNGTAFHNMIFCKCGAAMSVQIGSGGEKYRKCSRSKVGACNQKMIRNFDQTLVECLGRITYKSVSNPVVSKLPELTERLAKLEKVKAMLVEIGDVDSLKEVYQDITSVKNEIAAESKIVSLPTTEIKEVFQLDINEQRLILKQLIEKVMVDRTNGLCKIKVKLTNGHKKVFGVNIGTGKKSGKNTIVFESDTEKFLAEIKSLNGD

SEQ ID NO: 51117 - DNA, 50 bp, Aeromonas jandaei
  source 1..50: mol_type = genomic DNA
aatgtgttgaattgacattgtaacttgttagagtgtaaaatacacacgag

SEQ ID NO: 51118 - DNA, 40 bp, Aeromonas jandaei
  source 1..40: mol_type = genomic DNA
cacagtgttccagtgttgcttgttcatatgccaacccggt

SEQ ID NO: 51119 - DNA, 50 bp, Aeromonas jandaei
  source 1..50: mol_type = genomic DNA
aatgtgttgaattgacattgtaactagttagagtgtaaaatacacacgag

SEQ ID NO: 51120 - DNA, 40 bp, Aeromonas jandaei
  source 1..40: mol_type = genomic DNA
cacagggttccagtgctgctaaatgagatgaagacccagt

SEQ ID NO: 51121 - protein, 532 aa, Vibrio rotiferianus
MRNHLNISDLNDFVITGYGRNSLAQQSKGDTQRRQSDLIDDFCTLYNLPLSAFIHDNGKSGYTGANITGNAEFARYLRTAQNRDDLETPIVLIIENLDRLCRLDPHRASGLFNDMMEVNIVIVDLVDEHIYFKGQPMEAINKANNVFDRAHKESLLKSRRVAAKRANRRTMASPNKWKNCPFWLTLDAANDVYNPIPEHVALIRKIFLMAAGGAGSMVIAKKLNAQGHTTIKGKAWTTGNIVKLLRNRSLIGEYHHTLRTVVNGKRKDVPADKVSFDYYPEVLDKALFDRVQSLMDAKSRNRVITRKKDRYVNLTRGICFCPACGLDLVLKTQPDAVYLQCPNHATGLCTANARPFNLSVFEGWLRDVWASAEYVVSVAADVPEAAQLAEAEAELHALTNEVTDLTALWIELGREPAIRAELVERTRAKQQTEAKVRELKAELANYDSQTASTQYRRDLLSLALKRGDDLEVLAARDELVSLLNQLKGMHLHKSPDSVFTIEVITPMGESVVSTSIPRPYDKRSKRVGSPWV

SEQ ID NO: 51122 - DNA, 50 bp, Vibrio rotiferianus
  source 1..50: mol_type = genomic DNA
ccctatgccaactaatacggcttgatgaatctagttttgggtagcatagg

SEQ ID NO: 51123 - DNA, 40 bp, Vibrio rotiferianus
  source 1..40: mol_type = genomic DNA
ctccatgttgaccaccatcatgatgcccaagtgaatagga

SEQ ID NO: 51124 - DNA, 50 bp, Vibrio rotiferianus
  source 1..50: mol_type = genomic DNA
ccctatgccaactaatacggcttgctgaatctagttttgggtagcatagg

SEQ ID NO: 51125 - DNA, 40 bp, Vibrio rotiferianus
  source 1..40: mol_type = genomic DNA
ctcctcgctggccaccatcctgctgcccaacagaagaagc

SEQ ID NO: 51126 - protein, 597 aa, Citrobacter koseri
MQQVDAFGLDRQISTVLDFLENAKLPAELGYRLDPSNYEVLESDKGLSGYKGHNFTKGSLGQFKRRVEAGEITEGCLLIESVDRFSRKQGYDAIDEFTFLIKRNIDIVEVETGQIYSYKLDHRLSTLSTSIERAYMESKRKARISQKSWRNRKETSVKEGVALNNNTPDWLSLSDDKKTYEIDSSKVVTIIKIFELYRDGVGVTDIVQQLNESGERYNGKGWNTVKVYNKLRDRRLNGYLVGKYQIMTRKDNESVSDTERRVLENIKIKKEANDNAKRIYPIVIDDELFTKVQSMMDKNSLSKKQRSTTSKQRNLFNGLTKCHECGSPMIVQSMTNGGQYLRCYRQRTKDEKCNSKMLRYFESERVLLEHIKGLNLDEVYGDKKHNQSLDSLKSTLSDINEKITLLNEKIKSANDEDELFAIMSFKRKRIAEKDEVITRINSLENESEVVRLVYDYDIEKIVNQDNTVLRRKTNEHISKIISSVKCLRMDSIYIGAYYMFDIEYHKDVLKHLLITDSSGNLVSEITITQQNNERIYSVQEDGNTVFKVESNGIVWSLHASRKKTIDDLLHYMNIMMVGREPEGFDYVLNEDMIEWID

SEQ ID NO: 51127 - DNA, 50 bp, Citrobacter koseri
  source 1..50: mol_type = genomic DNA
ttgatgtatttcactttacgcttcttccagcgtgctatagaatacatatt

SEQ ID NO: 51128 - DNA, 40 bp, Citrobacter koseri
  source 1..40: mol_type = genomic DNA
gggctgcatcaatggcttcttccagcgtagcgtacatagt

SEQ ID NO: 51129 - DNA, 50 bp, Citrobacter koseri; identical to SEQ ID NO: 51127
  source 1..50: mol_type = genomic DNA

SEQ ID NO: 51130 - DNA, 40 bp, Citrobacter koseri
  source 1..40: mol_type = genomic DNA
agcctgcatcaatggctttttctcacgttgcatacaaaga

SEQ ID NO: 51131 - protein, 611 aa, Citrobacter koseri
MRIVKAYVYSRVSSMQQVDAFGLDRQISTVLDFLENAKLPAELGYRLDPSNYEVLESDKGLSGYKGHNFTKGSLGQFKRRVEAGEITEGCLLIESVDRFSRKQGYDAIDEFTFLIKRNIDIVEVETGQIYSYKLDHRLSTLSTSIERAYMESKRKARISQKSWRNRKETSVKEGVALNNNTPDWLSLSDDKKTYEIDSSKVVTIIKIFELYRDGVGVTDIVQQLNESGERYNGKGWNTVKVYNKLRDRRLNGYLVGKYQIMTRKDNESVSDTERRVLENIKIKKEANDNAKRIYPIVIDDELFTKVQSMMDKNSLSKKQRSTTSKQRNLFNGLTKCHECGSPMIVQSMTNGGQYLRCYRQRTKDEKCNSKMLRYFESERVLLEHIKGLNLDEVYGDKKHNQSLDSLKSTLSDINEKITLLNEKIKSANDEDELFAIMSFKRKRIAEKDEVITRINSLENESEVVRLVYDYDIEKIVNQDNTVLRRKTNEHISKIISSVKCLRMDSIYIGAYYMFDIEYHKDVLKHLLITDSSGNLVSEITITQQNNERIYSVQEDGNTVFKVESNGIVWSLHASRKKTIDDLLHYMNIMMVGREPEGFDYVLNEDMIEWID

SEQ ID NO: 51132 - DNA, 50 bp, Citrobacter koseri; identical to SEQ ID NO: 51127
  source 1..50: mol_type = genomic DNA

SEQ ID NO: 51133 - DNA, 40 bp, Citrobacter koseri; identical to SEQ ID NO: 51128
  source 1..40: mol_type = genomic DNA

SEQ ID NO: 51134 - DNA, 50 bp, Citrobacter koseri; identical to SEQ ID NO: 51127
  source 1..50: mol_type = genomic DNA

SEQ ID NO: 51135 - DNA, 40 bp, Citrobacter koseri; identical to SEQ ID NO: 51130
  source 1..40: mol_type = genomic DNA

SEQ ID NO: 51136 - protein, 593 aa, Pseudomonas lactis
MPLCFSYVRFSTQKQKDGNSETRQTERIDSFVSRYNLTIDTRLEDHGISSFRGANAKKGQLSVFLQRVRDGEIPNGSYLLIENWDRLSRQVLDASIEMFSDLIRSGIKIAVLDEDTVYDDLTSNSFIRAIVQFERAHSESLRKSDMSKASWSAKHKKMAEGTIATEKCPQWLIVEDKVWIKREDICLHIETMFSLAQTYGVAETGRRLNAQFGTSYKTHQIQYLLRNRRLLGEHSPVELSKEHGKNVPTGQVLEHYYPQVIPPATFEEVQTILKSRKPFSGRQDATNLNIFRNLLVCAECGGSTRFMLRSGKEFYYCTASMTGGCVDDQIRSIRGEFLRRVLFKFEHWTAIRDYIAAGSDVLKTLKKEETVAVAKLNRLEVRADGLKNKHAAEDDEDKAETYVGLLTDTRKAIATAKADIDRIKLELASLDGAFALSDSNVDSFESMLTSDSEQARTDRQRLNRYLRGIFLKLELHFPTRKLVTQPIPALANRISPVVAYIEQPKDNRTGDDYGHHTWITKDKQTLIIRSIKARLRRAGISSPTFELVKPIYDDVALSLLPKRKPQCKNRPKLADLPEELKDVVWKAPDLFLK

SEQ ID NO: 51137 - DNA, 50 bp, Pseudomonas lactis
  source 1..50: mol_type = genomic DNA
tcggtacgaattgttgagtacggccagccgtgctagattatacgtaccga

SEQ ID NO: 51138 - DNA, 40 bp, Pseudomonas lactis
  source 1..40: mol_type = genomic DNA
ccgcgcatagcagtagatgcaaccatgctcacaaccgcga

SEQ ID NO: 51139 - DNA, 50 bp, Pseudomonas lactis
  source 1..50: mol_type = genomic DNA
tcggtacgaattgttgagtacggcttgccgtgctagattatacgtaccga

SEQ ID NO: 51140 - DNA, 40 bp, Pseudomonas lactis
  source 1..40: mol_type = genomic DNA
ccaagtatagcactggatgttcccattctcacaacctctt

SEQ ID NO: 51141 - protein, 520 aa, Streptomyces olivaceus
MGKREEVISKLRGVPEGLPSVEEVRAMLAADPDLKCVVCYARISFDGRVKDAHGIEDQHRDMTARAGGFRWLVVYRYTDNDKSASKENVVRDDFEQLLNDLTVGTTSEGYPIHGVMAVNDDRLYRRPSDWERYLKAFTSQEDRVYHDSNGLQDLYAEGFEIKGLVGVAMSLSETRKKQRRSRNSHRSRAIRGQAVAAWRPFGWEDDKITLRQQEADAIRKAVHDVIAGASISEITRQWKDAGFITSRGNPFQYQTVKQVLMNARLCGYREIKGELVRDGDDQPIVGEWDTIITPKQWFAVTAKIRERGGGTGVPRGGLVHKYLMTGILRCGHELEDGTVCNNKMIGIKANDWLKYKHAYMCKKTVDGGCNKTYKRGDKADEAIEELVIAKLERDAATKAQEVPDWDKADALERALKSRKELERRWHDDEDTDIDDEAFFRNLPVLERRIKELRADEKAHEALKAEAEEATGDIRKSWESKTLTQKRDAIKKVLSAVVAVPGGKGNKTFDPDLLKPVWRTS

SEQ ID NO: 51142 - DNA, 50 bp, Streptomyces olivaceus
  source 1..50: mol_type = genomic DNA
gtgatgctttgactaatcttcatcgagtaaagcattattagaacccacac

SEQ ID NO: 51143 - DNA, 40 bp, Streptomyces olivaceus
  source 1..40: mol_type = genomic DNA
gtcctgcgagatcttcatggagcagaacttcggcccgcac

SEQ ID NO: 51144 - DNA, 50 bp, Streptomyces olivaceus
  source 1..50: mol_type = genomic DNA
gtgatgctttgactaatcttcatcaagtaaagcattattagaacccacac

SEQ ID NO: 51145 - DNA, 40 bp, Streptomyces olivaceus
  source 1..40: mol_type = genomic DNA
atcctgggagatctacctgaaggagaactacctccagaac

SEQ ID NO: 51146 - protein, 490 aa, Microbacterium sp BH-3-3-3
MTPRKTTPRAAIYVRQSVAEPEGIQRQLAACRALAESRDYVVVAVYEDDNVSGYKARGEGTAFGRMLDDARAGRFDVLIVRKLDRLGRSLSALESLTAARVNTVTTDGALDLASPSGRLVANVLTSVSRAESEIKAERRVFANADRRTKGVPTSGRVPYGYQWVPTSERGDGDAYITDPSRAGDVLAVFDDFLAGVPLGSIARELNAKGRRTVPTKRHPEGVPFTPTTLRRMLMSPYYAALLPLPAEDGAQQPYDQRSISRETCVPGRWQAIVSVEAWEEARARLEHPERKTSPGPSRKWLLSGLAVCGTEGCGLPIRAGGGEAGIHSYRCASMAHFMRRGDPLDDFVQRVVIARLSRPDAADLLEDRERHDVEEIRAERRRLETAIRQAGDDEMDGLIDRAERVRLIRRANGRVAELDEKLRAGVDTSALADIVTAEDVGAAWHALSLGKKRGVLEALATVVVFSVGQGNRRRMSDEAMARTVRFDWHR

SEQ ID NO: 51147 - DNA, 50 bp, Microbacterium sp BH-3-3-3
  source 1..50: mol_type = genomic DNA
atgtgcctgatctactcaacagtcgcgactgttgtgtatttgaagcatac

SEQ ID NO: 51148 - DNA, 40 bp, Microbacterium sp BH-3-3-3
  source 1..40: mol_type = genomic DNA
cccggcgaaggcgacggcggccatggtcgcgatggcgtat

SEQ ID NO: 51149 - DNA, 50 bp, Microbacterium sp BH-3-3-3
  source 1..50: mol_type = genomic DNA
atgtgcctgatctactcaacagtcccgactgttgtgtatttgaagcatac

SEQ ID NO: 51150 - DNA, 40 bp, Microbacterium sp BH-3-3-3
  source 1..40: mol_type = genomic DNA
gcccgcgaaggtggcggagccgatggcctcgatggcgttg

SEQ ID NO: 51151 - protein, 584 aa, Pseudomonas fulva
MPTAYAYIRYSSKAQGEAGRDSVDRQMASIQAITKQQGIKLPPENIYSDTGISAHDGSNKRKGKLKELIDMISDMHIKEGDYIFVESIDRLSRQRLLQAKELVNGILEKGVILITTIDGQRYEKPNETNRIDDLQQDILLSVIAKRAYEESKTKSVRRKSAWNRAKKLAEEEKVIFNAHNPPYGIRYNTELNCFEIEEEEAQEIRDFFESLKYVGVSLSIKKLNAYSKRKWSSRNIKHLIDTKYVLGAYMAQRRDENKKKVFERYIENYYPQIVSYELFNEAIAAMKNRAQRKNYGNQSVGSLNIFRHSIKCDCCDASMLFEKQTNPKGVVYPYFQCYTRKELKNGCDQPRFRFDLAFGLFLELIYQSTTHEDFDVHPWQNEIEDTGIQYEWITRESGMKYRLPTQEDIDEEERTENFKELLIKLLSNRETQTKDNKKIVELNNLLLEQKSYRDNLMKSFAGFTSGVIPKEFLEVVSKTEANINDIEQNLAELKTQINIKKTTINIYSENDIIDLYKTEDGRLKINQFFVANDITFKFNFDKTTRTLFAKIFQNGFEIDRIAKQFSLHNPLKEFGINNLNEYFN

SEQ ID NO: 51152 - DNA, 50 bp, Pseudomonas fulva
  source 1..50: mol_type = genomic DNA
gtgtgagattcacccctaccattcgagactggcaggtggtattctcacac

SEQ ID NO: 51153 - DNA, 40 bp, Pseudomonas fulva
  source 1..40: mol_type = genomic DNA
agtgctgcgtgaacccctggaatctggcgagatcgtaatc

SEQ ID NO: 51154 - DNA, 50 bp, Pseudomonas fulva
  source 1..50: mol_type = genomic DNA
gtgtgagattcacccctaccattcaggactggcaggtggtattctcacac

SEQ ID NO: 51155 - DNA, 40 bp, Pseudomonas fulva
  source 1..40: mol_type = genomic DNA
agtgctccgtgtgcccctgagagcgggtgggagcggaagc

SEQ ID NO: 51156 - protein, 555 aa, Brevibacillus laterosporus
MAVPKRVAGLYRVSTKKQVDKDDIPLQRRVCREFVDKQEGWTMVKEYAEKGVSGYKVAAKDRDELQRILTDAKNGLFDVLLVFLSDRLGRQGIKTLGYVQELIEMGIEIWSTEKGRITLDDLPSLIMATLEFGTAKEESRKISVRVSASHEQMAKDGAYRGGTPPFGYKHEKTGFYNKKGKELLKLVQCQEESLIIKDIFNMVFELGYGANRIARYLNEKKVPTRKSSNWSTGTLNTILKNPIYKGYMAYGKRSAKTGSSLAKSRDKWILPSKPEKSLIIINEEIWDRVQDIRTKRSPEHVKREGVELVNPTKSPLMFVGLIRCGHCGSAVTTTYNYKSWTLADGTIQKKCFPKYRCSGKALRATNCDGQTIYSQNKIEGYVLKHIEKYLNGLKSRDLTSVIEKRKKINKDENTTKLNKLQKLLEEVYQELSVLNAEVPKALMGKSNFKPELLSNLIVQKEEEIVSLSNEILEVEKVIKCNRDQTKNIEMIQSYIPKWSDIFESASLEKKKMMVFALIERITVYRDKIRIKFKPQLDEILKGEKEVYNNMLGTPS

SEQ ID NO: 51157 - DNA, 50 bp, Brevibacillus laterosporus
  source 1..50: mol_type = genomic DNA
gaggtgtataacaacatgttggggactcccagcacatacgattacactac

SEQ ID NO: 51158 - DNA, 40 bp, Brevibacillus laterosporus
  source 1..40: mol_type = genomic DNA
ttcgctgccagcgaagcgctctcccagctgagctaatgcc

SEQ ID NO: 51159 - DNA, 50 bp, Brevibacillus laterosporus
  source 1..50: mol_type = genomic DNA
gaggtgtataacaacatgttggggaatcccagcacatacgattacactac

SEQ ID NO: 51160 - DNA, 40 bp, Brevibacillus laterosporus
  source 1..40: mol_type = genomic DNA
ttagcgggcacccaggcctaaccccagcagagctaatgcc

SEQ ID NO: 51161 - protein, 492 aa, Flavonifractor plautii
MTLGDDGYTGTNFDRPGFREMMDLVERGRVTAIIVKDHSRLGRNRLLVGALMERFTEDYGVRYIAVTDNIDSAKGLDDMTAVRELFNEFYPRDTSKKIRAVFNSKGNSGQRLCTQVPYGYKGDKYKWEVDEEAAQVVREIFSLCMAGLGPMQISKRLKAAGVLTPTAYKLEKGLSVTHKSTADPCGWDHRAVVKILERMEYLGCTVNFKTRKKSYKSKKMLYLPPEEWKVFPDTHPAIIDRETWERVQELRKHKRRPTKAGKRGLFSGLAYCADCMSKLYFATHKGSTEDQDHYVCSNYKSNTGSCTIHYIREKVLTALVLAHLQATIAYVQADEDGFIRLVMDKDAQEQRRELARKKAELTKAEKRVTELDSLFQRVYEDHVTGKLTEERYNRLSGSYEAEQRELEARVAELRRELEKGQEEAVNVSHFVELVRKYTEVRELTPTIVNEFIKMVIVHAPSKVNGKRFQPVQIVYNLVGEITIPGTMDSKTA

SEQ ID NO: 51162 - DNA, 50 bp, Flavonifractor plautii
  source 1..50: mol_type = genomic DNA
ttacttccttatggggcctcggcttctgcctgtgtcctataaagaagtgg

SEQ ID NO: 51163 - DNA, 40 bp, Flavonifractor plautii
  source 1..40: mol_type = genomic DNA
ataaaccagccccccggcgtcggccggggggctttttgtc

SEQ ID NO: 51164 - DNA, 50 bp, Flavonifractor plautii
  source 1..50: mol_type = genomic DNA
ttacttccttatggggcctcggctcttgcctgtgtcctataaagaagtgg

SEQ ID NO: 51165 - DNA, 40 bp, Flavonifractor plautii
  source 1..40: mol_type = genomic DNA
agagagcagaccccaggtgctggccccgggggttttggtc

SEQ ID NO: 51166 - protein, 554 aa, Ruthenibacterium lactatiformans
MNQPNYNTALYMRLSRDDEGYGDSISIETQRTILRKFAQDNQLRIYDEYIDDGWSGTNFERPNFKRMMADIESGKVNCVVTKDLSRFGREHIMMDYYLEFVFPEKRVRYIAVAENEDTEKGLSDFVPFKNLFNEWFAKDTSRKVKNSLAAKFEAGERVSAYAPLGYKKHPDVKNKLVIDEETSWIIRRIYTLAFYGAGAAKITRTLTQEKIPTPGWLNYQRDGTFANIYRDAPEEKRYAWTIAQVKSILKDETYIGNTIHYRETNISYKNKKRIRKPQSEWMRVEGTQEAIISKEDFERVQQQIASRRRKQKNATTQIFAGLVRCADCGWSMKFATNKQNKIPYSYFSCTCYSQYGTGRCSKHYIRYDTLYAYVLARLQHWTEQVQLNRGQLICELQKSLGGERAVETRRMQNELARVQKRCEEVNRLFARLYEDWASGRLTEYNFTMLSSKYQAEQQELRQKILDAKTKLDAQRELDNSAEKWVDLIRKYAGPTELTAELLNALIEKILVHEAVKLPDGSRQQKVEIFYRFIGNLDANSIQTSTVSQTVSLTT

SEQ ID NO: 51167 - DNA, 50 bp, Ruthenibacterium lactatiformans
  source 1..50: mol_type = genomic DNA
cggtgtccctaactacgtgataccgggcagtcacatatctaaagacacag

SEQ ID NO: 51168 - DNA, 40 bp, Ruthenibacterium lactatiformans; identical to SEQ ID NO: 34688
  source 1..40: mol_type = genomic DNA

SEQ ID NO: 51169 - DNA, 50 bp, Ruthenibacterium lactatiformans; identical to SEQ ID NO: 51167
  source 1..50: mol_type = genomic DNA

SEQ ID NO: 51170 - DNA, 40 bp, Ruthenibacterium lactatiformans
  source 1..40: mol_type = genomic DNA
ggggaggcaatggtaggcagggcagcccaggctgaacctg

SEQ ID NO: 51171 - protein, 527 aa, Flavonifractor plautii
MKITKFPIDLSMLTEEEIDQFRQDPSTLFEGDTDVCLYLRFSSERQREQSIEGQLRDCRTFCKLNSYRITAIYVDRATTARKDVEKRVHFQEMIRDSEKKPWEYVVVWKLDRFARNRTDSALFKFRLRKNGVKVISATENISEKPEGIILEAVLEGMAEFYSADLSQKITRGMRESALKCHSIGGHVPLGYKIEDHKLVINPATAHIVQEAFELYANGETVADICRIFNTKGYRTAKGVEFNRNSFKSMFRNKRYIGVYTYKDIEVEGGVPAIIDKELFETVGHRLSKNAEAPARGKAKVDYLLAGKLFCGHCGGSMNGESGTSKTGAIHNYYTCYTRKRKHACDKKPLKKDWIEYIVAQDAMELLTDDTIQELADMAISQTEQDLRENTRIPELTDRMKETESGITNITKAIEKGIASDALMNRLVELEKEKKNLLRLLAEEEKYVCKIERSQIVYWLTEFKGGRIEDERYRRIIIDLMINSVTVWDEPDGFRITTAYNLTSCKSKTFRIAPSGEKGFGFEGSECT

SEQ ID NO: 51172 - DNA, 50 bp, Flavonifractor plautii
  source 1..50: mol_type = genomic DNA
gatttgaggggtcagagtgcaccattgagcgcatatccgaaccctacatt

SEQ ID NO: 51173 - DNA, 40 bp, Flavonifractor plautii
  source 1..40: mol_type = genomic DNA
actcccgccgcccgcaccatcggagtatcctccgggatac

SEQ ID NO: 51174 - DNA, 50 bp, Flavonifractor plautii
  source 1..50: mol_type = genomic DNA
gatttgaggggtcagagtgcaccaccgagcgcatatccgaaccctacatt

SEQ ID NO: 51175 - DNA, 40 bp, Flavonifractor plautii
  source 1..40: mol_type = genomic DNA
tctcacgccccccgaaccaccgcgctgtcctccgggctcc

SEQ ID NO: 51176 - protein, 432 aa, Subdoligranulum variabile
MRGVIYARYSPGPRQTEQSIEGQVADCQQYAEERMLRDAEKGRFDCVLVWKIDRFGRDRQDIAMGKMTLKRAGVKLMYARESVPEGPEGIILESVLEGLAEYYSADLRQKVIRGMRETAKKGQYCGQSLPIGYKVDAERHIQIRDIVQLFADRGVMGRRGKPVSNAVVYRMLRNEKYLGEFYIQDVKLNVEPIIDQATFLEAARHFKTSRNNAAGRAKVNYLLSCKMFCGYCGSMISAEAGTGKLGKVYRYYKCGDKKRGKACELKPFPKDHLEDAIILATVNDMLTDEMIEKLTVRILEVQEQENADDPVVGLRRRLDSNKKRQRNLLDAIEEGGARGLVSRLAALEEEEEQLVLEIQRAEIKRPRLTHEVVEAWLRSFRVGDVTDDDFRARLVDTFIARVELRNDEALIFYNIREKGPHSRVRVRPEWWS

SEQ ID NO: 51177 - DNA, 50 bp, Subdoligranulum variabile
  source 1..50: mol_type = genomic DNA
gtgttcgagtacggcccgaatggtggagcccgcgcgacggtactcgaacc

SEQ ID NO: 51178 - DNA, 40 bp, Subdoligranulum variabile
  source 1..40: mol_type = genomic DNA
cggattatattgttctggtggagctgatgggagtcgaacc

SEQ ID NO: 51179 - DNA, 50 bp, Subdoligranulum variabile
  source 1..50: mol_type = genomic DNA
gtgttcgagtacggcccgaatggtttagcccgcgcgacggtactcgaacc

SEQ ID NO: 51180 - DNA, 40 bp, Subdoligranulum variabile
  source 1..40: mol_type = genomic DNA
agaattttaatgttttgctttagctgctaggactctaacc

SEQ ID NO: 51181 - protein, 485 aa, Mycolicibacterium fortuitum
MRVLGAVRLSKLTEESTSPDRQRERIHWWAQGHQPATVVAISEDLDTSGALDPFKRASLGKWLTDTPPEPWDVLVAWKLDRISRSSMDTETLLRWCLERGKRIVCVDDNIDTDTQMGQVWVKLASIFAEVERNSIKERVTQARKKLRSEARWGGETVHYGLKPQKLPDGGWRLVHDTEAVEVIRRIVTDVMRGDSVQSIADRLTAEGVSSPRDRQRELQGKPTKGAAWSTTTLHRLLESKTLLGYTVHQGDADPEVMKSDPILSASEYRSLQAVLDLRKRPKTTNRTGNTSPLLGVAVCLGCKRPMHQKSQVSKGKRYRYYYCPERPRHGDQISAERLEQELEDVFLEELGDTEVYEPVALPASDHSDELDAARMRLEVITEALRKATSLAVMESLAEQLSDLDARIAELEALPVQPARTEHVPTGQKYRELWESLDSDTDARRRLLLDSGIRYEVLLEGRTRNQGGAFKSRLYVPHDIRERMMR

SEQ ID NO: 51182 - DNA, 50 bp, Mycolicibacterium fortuitum
  source 1..50: mol_type = genomic DNA
ataagttgcgatggacaccccaacgggctactgtgctcaaccatgactaa

SEQ ID NO: 51183 - DNA, 40 bp, Mycolicibacterium fortuitum
  source 1..40: mol_type = genomic DNA
cccgatcgacaaccccaacgggccgctcataacgcacgcc

SEQ ID NO: 51184 - DNA, 50 bp, Mycolicibacterium fortuitum
  source 1..50: mol_type = genomic DNA
ataagttgcgatggacaccccaacccgctactgtgctcaaccatgactaa

SEQ ID NO: 51185 - DNA, 40 bp, Mycolicibacterium fortuitum
  source 1..40: mol_type = genomic DNA
cccgggccgcgaccccaacccgcagcccctcacgcaggcc

SEQ ID NO: 51186 - protein, 556 aa, Caulobacter sp K31
MTRVAIYARYSDDKQSPHSIEDQIRICRLHADKVDWRVVETYSDAGISGATVILRPGVQALLRDALSGKFDLVLAEALDRLSRDQEDIAGLFKRLRFAGVPIVTLSEGEVSELHVGLKGTMNALFLKDLGAKTHRGIRGRVEAGKVGCGNAYGYKVVREIDAAGKVTTGEREIIPHEAEVVRRIFRDYVAGKSPRQIAIDLNRDGVAAPQGGHWTDVSIRGNRALSSGVLNNEFYVGQMVWNRRRRMKNPDTGRTAHRMNPEAEWVRVAAPQLRIIDDALWNASRARQATLIQVFEDAKAGGLDNLQAASANRRPKTLLSGLLVCGVCGGTVAKRGNNRFGCVSHIMGRGCTNGRTINRDTLEVRVLAGLRDKLMAPDVMAEAMRAYITETNRLNHHRRANREADLLRLEKARKAIAGIVTAIEDGHYSRPLMERLKTLEADVDAIEQTLNQAPLDVPDVHPNVAELYRRKVERLTEALNDPDDRTEAATALRGLIDKIVLTPGVKRGEISAQLFGDLETVLAWAHDREGKKHEAVSGFPWEVEGALSVSVGARTC

SEQ ID NO: 51187 - DNA, 50 bp, Caulobacter sp K31
  source 1..50: mol_type = genomic DNA
tttgtcggtttcggtaggtgcacggacgtgttcgttcctgaaccgacatc

SEQ ID NO: 51188 - DNA, 40 bp, Caulobacter sp K31
  source 1..40: mol_type = genomic DNA
ccaacgcccgtcatcctcggacttgttccgaggacccctg

SEQ ID NO: 51189 - DNA, 50 bp, Caulobacter sp K31
  source 1..50: mol_type = genomic DNA
tttgtcggtttcggtaggtgcacgagcgtgttcgttcctgaaccgacatc

SEQ ID NO: 51190 - DNA, 40 bp, Caulobacter sp K31
  source 1..40: mol_type = genomic DNA
ccagcacccgcccccctccagcttgttcagaggagctcag

SEQ ID NO: 51191 - protein, 545 aa, Enterocloster clostridioformis
MDTILAGSFRAAIYCRLSKDDDLDGTSASIENQRDMLEKFCQKQGWEVTAVYQDDGFTGLNMERPDLKRMLKAIERKQINLVITKDLSRLGRNYLQTGQLIEDFFPRNGVRYIAMNDGIDTMRDNNDIAPFKNILNEMYSKDISKKVHSSYVLKAQKGQFTGCIAPFGYKKDPEDKNHLLIDGETAPVVRLIFGYALDGHGPNYIRRRLEEEKHPCPTWWNRKRGHRNIRTKWEKKDPENGRYVWDFSVIKEILMNPVYTGAIASQKTEYRFKIGTIRDKKPEDWIVVEGTHEPLVDKKDFAIVQEKLKSRQRPGKSGEINLFAGLIKCGECGKALTIRTTHEKFPKRIFSCKTYNAYGKQHCTQHRVEFDTLYSLVLNKIRECAAAALTDSEAVAGRLTDTCQTEQKDQREAMERTLAKDEERIEVLEKMVLRLYEDMVAGRITEENFNLLLEKTQKEQAELKAKVEEGRKRLADEIRLAVDARQWVESIQEYRDINELDTSTLNRLIKEIVVHETIDRDKTRHISIEIHFNLKPIPEVEQVTG

SEQ ID NO: 51192 - DNA, 50 bp, Enterocloster clostridioformis; identical to SEQ ID NO: 11862
  source 1..50: mol_type = genomic DNA

SEQ ID NO: 51193 - DNA, 40 bp, Enterocloster clostridioformis
  source 1..40: mol_type = genomic DNA
caaaagccagggcatgaaacagcttatggctggcggcggc

SEQ ID NO: 51194 - DNA, 50 bp, Enterocloster clostridioformis
  source 1..50: mol_type = genomic DNA
tgttcctactaattggggataacataggtcatggctaattagaggtaatc

SEQ ID NO: 51195 - DNA, 40 bp, Enterocloster clostridioformis
  source 1..40: mol_type = genomic DNA
cagaagccaggggctgagatagcacagggcaggtgggggc

SEQ ID NO: 51196 - protein, 581 aa, Serratia marcescens
MTKEAHMTKRKIYSYVRWSSDRQSKGTSLERQTAKAKEFAHSHNLELVELLDAGLSAYRGKNTTQGALGGFIQAVESGAIPNDSYLFVENLDRLSRQDILTANKLFSHLLELGLTVVTGMDGRIYTRQSVTANPTDLMLSILLFSRANEESATKQKRVYGNIAALVERHKAGLPTTIKTAGSHVWWVDASGDKHTAVQPHPTLWKAARKAVELFLDGYSAHAVCDYLNEHYDAPPVRVTKSTNNPDNLGKWSYPLLRRMKTSRTLIGERTINAGDITYTLENYYPALCSPTEFALLQDLNENNKLTQGPKKTRITLLSGLGVLKCGHCGGAMTFMIGTKGKIRYMCANGKDRIGNCKAWSIGLDILERTLVPALVRGYMDYTLGGNAKGDDIKESIQSAQEALQAIESQIENITNAITLGGNLAPLVERMGALSKVKDSQLLEVERLNRLALLSESESGAIDKITDFILQIRPNVLTDLNHPLRLQLREAVRAVIESCTIHKREDRGLAIVYTIKGSPFRTVHAFVAANRGHYKETVLNIGSDDQPLPDVGDSQKFDDAITKIVDQMGLPPIDGGLMWARR

SEQ ID NO: 51197 - DNA, 50 bp, Serratia marcescens
  source 1..50: mol_type = genomic DNA
attgttgtttaagttacatcaacgaaacctagtgtgatttagaaaactaa

SEQ ID NO: 51198 - DNA, 40 bp, Serratia marcescens; identical to SEQ ID NO: 28798
  source 1..40: mol_type = genomic DNA

SEQ ID NO: 51199 - DNA, 50 bp, Serratia marcescens; identical to SEQ ID NO: 51197
  source 1..50: mol_type = genomic DNA

SEQ ID NO: 51200 - DNA, 40 bp, Serratia marcescens
  source 1..40: mol_type = genomic DNA
caacatatggtagctgggcaagatggaagagtggagagtc

SEQ ID NO: 51201 - protein, 588 aa, Serratia marcescens
MTRHKLYSYVRWSSDRQAKGTSLERQTNKAKEFATLHNLELVELLDAGLSAYRGKNTTQGALGGFIQAVESGAIPNDSYLFVENLDRLSRQDILTANKLFSHLLELGLTVVTGMDGKIYTKESVTGNPTDLMLSILLFSRANEESATKQKRVYGNIKALVERHKAGLPTTIKTAGSHVWWTDASGDKHTAVKPHPEYWEPARKAVELFLEGYSAHAVCDYLNEHYTAPPVRVTKATNTQENGGKWSYPLLRRMKTHRALIGERTITTDNTVYTLENYYPALCSPTEFALLQDLNENNKLTQGPTKTRITLLSGLGVLKCGHCGGAMTFMIGANSKIRYMCSNGKDKIGSCRSWSVSLDIVERTLVPALVRGYMEYATGGGAKGEDIKASIEATQEALQELDSQIDNITTAITLGGNLAPLVERMGVLSKEKDSKLVELDRLARLSLLSESEGSAIEKITDFILQIRPAVLADVNHPLRLQLREAVRAVIESCTLTKRADRGLEIEYVIKGDPHRIRYTFKATTFGNYTEVTADLDEHGKPLAYPDTEEGLRLLQTRQHMEAELFKKVDQIQEEMKLPPIDGGQLWARR

SEQ ID NO: 51202 - DNA, 50 bp, Serratia marcescens
  source 1..50: mol_type = genomic DNA
attgttgtctaagttacactaacgaaacctaatgtgatttaggtaactga

SEQ ID NO: 51203 - DNA, 40 bp, Serratia marcescens; identical to SEQ ID NO: 28798
  source 1..40: mol_type = genomic DNA

SEQ ID NO: 51204 - DNA, 50 bp, Serratia marcescens; identical to SEQ ID NO: 51202
  source 1..50: mol_type = genomic DNA

SEQ ID NO: 51205 - DNA, 40 bp, Serratia marcescens; identical to SEQ ID NO: 51200
  source 1..40: mol_type = genomic DNA

SEQ ID NO: 51206 - protein, 555 aa, Candidatus Microthrix parvicella
  SITE 331: note = misc_feature - Xaa can be any naturally occurring amino acid
MTATTTNQTDPAARTTRAVLYLRVSTAKQAKTDLDPEGLSLPAQRESCLRKAEELGAEVVDEYVDRGESAKTVDRPQFRKMVSRVQADRDIDYVILDKINRFARNRRDDANMLFELRAAGATVISVKENIDDTPAGMLMHGILATLAEYESRNNGTEALKGMTRKAQVGGTPGRAPIGYLNVRLPVPGQPRGMADVEVDPERAPHVRWAFEQYATGEWTTQSLADALDARGLRSVSVGKRPSKPLLKSRVAHMLGNRYYVGTVTFRGVQYKGRHEPIVDKALFERVQTVLRVKATTGEKTSKHHHYLKGTVFCGECHSRLVFSRNRGNGGXTEWQQNVFPTELAAELRGAVLARLQVMHQGASEQLGVQTKRLQDLDGERSTLLKAHLAGAVPLDLLKSEQDRIAREMSQAQVEIAAASMESAEVERTLNAALKLAEDCQETYLDAKPVRRRELNQAFFERIEVVPDEGVELTLNSPFRELRELRGLRDGDEEATGRLDGVLGRQGSAGNEEAPAEWAGAEDEVVGWEPTDGWGSNTQRGRRYCRTGGWNIRDLV

SEQ ID NO: 51207 - DNA, 50 bp, Candidatus Microthrix parvicella
  source 1..50: mol_type = genomic DNA
tggttggaacattcgtgatttggtgcccctcatcgaccagctctctaacc

SEQ ID NO: 51208 - DNA, 40 bp, Candidatus Microthrix parvicella
  source 1..40: mol_type = genomic DNA
atccccgcagtgcttgagtgcgctcggcaggactcgaacc

SEQ ID NO: 51209 - DNA, 50 bp, Candidatus Microthrix parvicella
  source 1..50: mol_type = genomic DNA
tggttggaacattcgtgatttggtagccctcatcgaccagctctctaacc

SEQ ID NO: 51210 - DNA, 40 bp, Candidatus Microthrix parvicella
  source 1..40: mol_type = genomic DNA
agcctctcagtgcttaagcaggagaggcaggatttgaacc

SEQ ID NO: 51211 - protein, 585 aa, Candidatus Microthrix parvicella
MTATTTNQTDPAARTTRAVLYLRVSTAKQAKTDLDPEGLSLPAQRESCLRKAEELGAEVVDEYVDRGESAKTVDRPQFRKMVSRVQADRDIDYVILDKINRFARNRRDDANMLFELRAAGATVISVKENIDDTPAGMLMHGILATLAEYESRNNGTEALKGMTRKAQVGGTPGRAPIGYLNVRLPVPGQPRGMADVEVDPERAPHVRWAFEQYATGEWTTQSLADALDARGLRSVSVGKRPSKPLLKSRVAHMLGNRYYVGTVTFRGVQYKGRHEPIVDKALFERVQTVLRVKATTGEKTSKHHHYLKGTVFCGECHSRLVFSRNRGNGGSYDYFKCMGRQNGVACTVGYVRADWLESQVDTEWQQNVFPTELAAELRGAVLARLQVMHQGASEQLGVQTKRLQDLDGERSTLLKAHLAGAVPLDLLKSEQDRIAREMSQAQVEIAAASMESAEVERTLNAALKLAEDCQETYLDAKPVRRRELNQAFFERIEVVPDEGVELTLNSPFRELRELRGLRDGDEEATGRLDGVLGRQGSAGNEEAPAEWAGAEDEVVGWEPTDGWGSNTQRGRRYCRTGGWNIRDLV

SEQ ID NO: 51212 - DNA, 50 bp, Candidatus Microthrix parvicella; identical to SEQ ID NO: 51207
  source 1..50: mol_type = genomic DNA

SEQ ID NO: 51213 - DNA, 40 bp, Candidatus Microthrix parvicella; identical to SEQ ID NO: 51208
  source 1..40: mol_type = genomic DNA

SEQ ID NO: 51214 - DNA, 50 bp, Candidatus Microthrix parvicella; identical to SEQ ID NO: 51209
  source 1..50: mol_type = genomic DNA

SEQ ID NO: 51215 - DNA, 40 bp, Candidatus Microthrix parvicella; identical to SEQ ID NO: 51210
  source 1..40: mol_type = genomic DNA

SEQ ID NO: 51216 - protein, 555 aa, Crateriforma conspicua
MTKRNTRTKPAVGYIRMSTDKQEESPAQQKAEVLKLADKHNFHIVRWYQDDAISGAKTLKRKGFCQMIEDAKERGDFKAILCWDQDRFGRFDSLEAGEWISPLRRAGVELVCVVQGRINWDDFAGRMIYQITQEGKHRYLVDLSRNALRGMIHYAKDGNVMGMPTPYGYDRVYFDDNGKEMCRIERGQRFRKPRAWTAKFVPEKTRGEVETLRWLFETFASGDRSARSLAVELNERKVPSPSGGEWEFTHIKKILRHPVYIGTLAYGRRSVGLYHGVGADGDLIESRDPRGDFDGYAPIMIPNNHEAIIDEATFETVQAKLKARSKVSGGRFRKYLLSGVLRCGHCGSIMTGGSQGDGRYQYYKCKRSRVSGTCKNYAVRTETIEATLIKHFRDVWLSPKGQRALRKAIEAVSKKRDTDRPSRIAELEQRLASLDAQITKGKQNLLLVDAEDVPDLKRILADWKDDRAAIAKELAGQSQPTNTDADLDADAIVEELQHLEQYLESTESDQARAAMRRIYKTVTLYWKHGEGRYRHLERAEIETQHPFALTGTTSI

SEQ ID NO: 51217 - DNA, 50 bp, Crateriforma conspicua
  source 1..50: mol_type = genomic DNA
cttcgccctaactgggaccacgtcgatccgtgttcccagtgggacggaag

SEQ ID NO: 51218 - DNA, 40 bp, Crateriforma conspicua
  source 1..40: mol_type = genomic DNA
ggacggccacgagcatgtcgatccggccaaagaagccaac

SEQ ID NO: 51219 - DNA, 50 bp, Crateriforma conspicua
  source 1..50: mol_type = genomic DNA
cttcgccctaactgggaccacgtctctccgtgttcccagtgggacggaag

SEQ ID NO: 51220 - DNA, 40 bp, Crateriforma conspicua
  source 1..40: mol_type = genomic DNA
ggactcccaggagcaggtatctccctcccatgtagccaac

SEQ ID NO: 51221 - protein, 625 aa, Blautia producta; identical to SEQ ID NO: 46546

SEQ ID NO: 51222 - DNA, 50 bp, Blautia producta; identical to SEQ ID NO: 18962
  source 1..50: mol_type = genomic DNA

SEQ ID NO: 51223 - DNA, 40 bp, Blautia producta
  source 1..40: mol_type = genomic DNA
tattttaggagggcgtgcaggcggtatgccggaaatggta

SEQ ID NO: 51224 - DNA, 50 bp, Blautia producta; identical to SEQ ID NO: 46549
  source 1..50: mol_type = genomic DNA

SEQ ID NO: 51225 - DNA, 40 bp, Blautia producta
  source 1..40: mol_type = genomic DNA
tattttgggagggccattattcagtattccataattggta

SEQ ID NO: 51226 - protein, 553 aa, Sphingomonas paucimobilis; identical to SEQ ID NO: 38741

SEQ ID NO: 51227 - DNA, 50 bp, Sphingomonas paucimobilis; identical to SEQ ID NO: 38742
  source 1..50: mol_type = genomic DNA

SEQ ID NO: 51228 - DNA, 40 bp, Sphingomonas paucimobilis
  source 1..40: mol_type = genomic DNA
gttccggggacgtgatggtgccgcttacaggactcgaacc

SEQ ID NO: 51229 - DNA, 50 bp, Sphingomonas paucimobilis; identical to SEQ ID NO: 38742
  source 1..50: mol_type = genomic DNA

SEQ ID NO: 51230 - DNA, 40 bp, Sphingomonas paucimobilis
  source 1..40: mol_type = genomic DNA
cttcgcgggacgggacggggcctcttaaaggaaccgaacc

SEQ ID NO: 51231 - protein, 552 aa, Sphingomonas sanguinis
MTNALATSQALAPQTAQRAALYLRVSTPRQAEHDLSIPDQRRQLEGYCLSKGWEVAAEFVEPGVSGTDDRRPAFQDMIDAASEKPPAFDVVVVHSFSRFFRDQFQFEFYVRKLAKNGVQLVSITQVLGDDPASEMMRRIMTLFDEYQSKETAKHTLRAMNENARQGFWNGARPPIGYRVVEAEKRGAKIKKKLEVDPIHAETVRRIFRLALEGADGRGPIGVMAIACWLNENNIRTRYGGRWGKGMVHQVLTRTTYIGQHRFNTYDVKKGRRKPEAEHAIMEVPPIVTVAEFEAVQRSLKARSPKMMPPRAVGGTTLLTGICFCACCGGAMTLRSGTSGSGREYRYYTCATKATKGKTGCPGVSLPMDQLNEAVLEHLEKRLLDPARLEVLMDQLIARREDWVTERRQHVAEMERRATEADTKLARLYEAIENGLVDMGDPSLKARITELTTIRDQARGDADRAVAHIERISPEITVESLHAFASVAKRKLRHDDGSYARNYVRAVAQRVEVFSKTDVRIRGTRTELLRTLTAASGVEAAVLGTRGFGPKWC

SEQ ID NO: 51232 - DNA, 50 bp, Sphingomonas sanguinis
  source 1..50: mol_type = genomic DNA
ctcgcggttttggaccgaaatggtgccccaaggcggacgaaagcgatgaa

SEQ ID NO: 51233 - DNA, 40 bp, Sphingomonas sanguinis; identical to SEQ ID NO: 51228
  source 1..40: mol_type = genomic DNA

SEQ ID NO: 51234 - DNA, 50 bp, Sphingomonas sanguinis; identical to SEQ ID NO: 51232
  source 1..50: mol_type = genomic DNA

SEQ ID NO: 51235 - DNA, 40 bp, Sphingomonas sanguinis; identical to SEQ ID NO: 51230
  source 1..40: mol_type = genomic DNA

SEQ ID NO: 51236 - protein, 548 aa, Mycobacterium intracellulare
MSLRFAFYGRVSTEDAQDPEASRSWQKRRAIDLISPHGGVLAADYFDIGQSRSLPWKRRPEASRLLADVTSRGRGFDAVVIGEPARAFYGPQFALTFPVLTHYGVGLWVPEVGGAVDPGSEAHDLVMTLFGGMSKGERARIQMRVRTAMSALAQDTTRYLGGRPPYGYQLVDAGPHPNPAKASLGQRLHRLEPDPETAPTVERIYRMYADGAGLRFIAQQLTDDGVPSPSQYDPARNRHRDPRGWSHSAIRAILDNPAYRGIRVWGKQEKYEVLLNPDDVAAGYETRMRWRDRADWIAPDRRTHEELIPDELAQAVRLRMQARRGPGRVCSRESTVPYALRGLLFCAACGRRMQGAARPGKQTTRILYRCEFGKSRSVPVDLSDHPRTVYLREDAVTARLDEWIATLADPEDLARGQDVDPAAGPGYAALQRQLSEANAKVAALITAVESGVAVEDLTAALRQRTAERDELRARVERVERPRAMCAAEISELVKELGGLSVILGAATGAERAEVYASLGLRLDYDPHLRRVTATADLSRVAGCVRGGL

SEQ ID NO: 51237 - DNA, 50 bp, Mycobacterium intracellulare; identical to SEQ ID NO: 442
  source 1..50: mol_type = genomic DNA

SEQ ID NO: 51238 - DNA, 40 bp, Mycobacterium intracellulare
  source 1..40: mol_type = genomic DNA
ggctcagtcgtgtgtccgagggggacttgaacccccacgc

SEQ ID NO: 51239 - DNA, 50 bp, Mycobacterium intracellulare
  source 1..50: mol_type = genomic DNA
agtcgtgtcgccggatgtgtccgattggggacttgtccgtctacgacacg

SEQ ID NO: 51240 - DNA, 40 bp, Mycobacterium intracellulare
  source 1..40: mol_type = genomic DNA
gtctctgccgtgtgtcctatttggacttgaacgtgaatgc

SEQ ID NO: 51241 - protein, 492 aa, Aeromonas dhakensis
MNAYLYQRISSTKQTAGVGLDRQLENALSYCLSHSLNVIDIQQDVASAFHAKHLDGHLGAFLQAIKDKLIEVPSALVVESLDRLGRDHTLSALSRFIDIIRAGVEIHEVSTGIVYTATETHLLHLALAIMERAHNESMMKSKRSHDAIQRKLAQAVHGKIIRKNTPVWIDVVDESLQLNEHAVTVKLIFDLYLSGMSFRAIARELDERAIQYPVKQAAKKMKVQKWNSARVSTMLSSPSVYGTFTPQTGDPIDDYFPPVVDIATFEKVRSIREARQVKATKITGLLSIVSSCCLCGECNHSYICHYRNWTNAEGLVERINLRCNGRMSGMPCKGKSVPMEVVERFILEVLPDVDISKLNRNKMRTLDNLKAKRAQLQTEMENLIDLVASGSAVAKAKFKQTEERATLLDEKIEKASQRILPDEKDAVTDLALNTSNLELRRKVNSALQLMGLRVVLHTEHANTVLCEVFLKGTLVASKKLAWGRKKRIDSKS

SEQ ID NO: 51242 - DNA, 50 bp, Aeromonas dhakensis
  source 1..50: mol_type = genomic DNA
ttgtgcagttgcattgcctgcacggagcatagtacattggtattgcgcac

SEQ ID NO: 51243 - DNA, 40 bp, Aeromonas dhakensis
  source 1..40: mol_type = genomic DNA
ctgcggcggggtgccgaccgacgtgcgcatcaccacccgc

SEQ ID NO: 51244 - DNA, 50 bp, Aeromonas dhakensis
  source 1..50: mol_type = genomic DNA
ttgtgcagttgcattgcctgcacggggcatagtacattggtattgcgcac

SEQ ID NO: 51245 - DNA, 40 bp, Aeromonas dhakensis
  source 1..40: mol_type = genomic DNA
gtgcggccgggtgcggcccgggtcccgcgtcacctcccgc

SEQ ID NO: 51246 - protein, 494 aa, Aeromonas hydrophila; identical to SEQ ID NO: 19196

SEQ ID NO: 51247 - DNA, 50 bp, Aeromonas hydrophila; identical to SEQ ID NO: 50912
  source 1..50: mol_type = genomic DNA

SEQ ID NO: 51248 - DNA, 40 bp, Aeromonas hydrophila; identical to SEQ ID NO: 51243
  source 1..40: mol_type = genomic DNA

SEQ ID NO: 51249 - DNA, 50 bp, Aeromonas hydrophila
  source 1..50: mol_type = genomic DNA
ccgtgtagtatcgttgtacgctgcgggctaagcacggcagtatgccacaa

SEQ ID NO: 51250 - DNA, 40 bp, Aeromonas hydrophila; identical to SEQ ID NO: 51245
  source 1..40: mol_type = genomic DNA

SEQ ID NO: 51251 - protein, 494 aa, Aeromonas hydrophila
MLYHIYSRISSTKQTQGVGLDRQEQLAVDYAKRNNFEVANISSDVASAYHSKHMEGKLGAFMESIATKEIVVPCGLIVESLDRLGREHELTALSRFIDIVQSGVEIHEVSTGIIYNQKDTHLLHVALSIMTRAYNESLMKAKRSNDAIQRKLGEAQNGKIIRTNVPAWIDVQGDKLVLNEHQTTVKSIFDMYLSGMSLRPIARTLNTGNVPYMAPKIAKKGPNNGSYNWTSSRILTVLASSAVYGVYTPKTGEPIENYYPACVDEATWLKAKEIRESRKVHAAKVNDLLSVLSSCCVCSLCGLSYIANLRSWETKEGKQTSVGMRCNSRQMGSTCKGKLVPNEHLEKYILPLVPNLDITKLNRTKMKTLDNLKARHQQLTEQQSTLLDLVVMGSAAAKEKFIQLEEKIEILKEKIEKAQARIVVDATEDVSLLALDTQNLEIRRKVNTALQLMELKVHVECTQTGTAKIKMQLKNVTVHEGTLKWSRKKRIDSK

SEQ ID NO: 51252 - DNA, 50 bp, Aeromonas hydrophila
  source 1..50: mol_type = genomic DNA
ttgcgtagtagggcagtgcgtagcgagctaagcacagcagtatgccacaa

SEQ ID NO: 51253 - DNA, 40 bp, Aeromonas hydrophila; identical to SEQ ID NO: 51243
  source 1..40: mol_type = genomic DNA

SEQ ID NO: 51254 - DNA, 50 bp, Aeromonas hydrophila
  source 1..50: mol_type = genomic DNA
ttgcgtagtagggcagtgcgtagcgggctaagcacagcagtatgccacaa

SEQ ID NO: 51255 - DNA, 40 bp, Aeromonas hydrophila; identical to SEQ ID NO: 51245
  source 1..40: mol_type = genomic DNA

SEQ ID NO: 51256 - protein, 478 aa, Streptococcus equi
MTKIALYLRLSVDEAETDESNSITNQRHLLNHYLDQTPEFKNWERLEFVDDGFSGTSLNRPSFQRLMAAVKVGTIRHILVKDLSRFMRDYLELGNYLENIFPFLGVRFIALNDHYDSLTSEQNGLDIDVPFRNLLNDFYAKDVSEKVKSAMNSMKRSGKNMSWLPPFGYLKDPEDRFKIIIDETVAPIVRRIFALYLDGNSYQTIARLLNEEQVITPAERKMQISQARYAKSLRLTTEQKRNVWSSNTVGQILKNEAYKGTYLFNTRTYVRGKHVFRPKSEWERIENNHEAIISSELFEQVVQLKGSKATKRKQHQIPKTSSVLTGLIRCEHCDHSLIGHYNHQGYQYFSCRYCKGQGEKMKSCRVDRIEQAIKGKLGDEAVKPHQKVSKTLVLRKIERLKTEKLACFQDYKDNLLTREDYIAKKKEMDKSVQALEEQLKEASYVQLPTDKRLSKEIVVAHVDKVVVDCLGFFTVIYK

SEQ ID NO: 51257 - DNA, 50 bp, Streptococcus equi; identical to SEQ ID NO: 35397
  source 1..50: mol_type = genomic DNA

SEQ ID NO: 51258 - DNA, 40 bp, Streptococcus equi
  source 1..40: mol_type = genomic DNA
aacctgggcaattccgggtggtgctatggagcttggggag

SEQ ID NO: 51259 - DNA, 50 bp, Streptococcus equi
  source 1..50: mol_type = genomic DNA
agtgtcagttacttgacataagagttggattgtgtcataataatgacagg

SEQ ID NO: 51260 - DNA, 40 bp, Streptococcus equi
  source 1..40: mol_type = genomic DNA
aaccagggcaaccccatgtttttccacggagctgtgggag

SEQ ID NO: 51261 - protein, 612 aa, Endozoicomonas acroporae
MNNNMAYVYIRYSSKKQEEGDSYRRQLESAEEYCKEKGLTLSKEIFFDAGKSAYSSYKTRGDFNKMLDMIKDEDIPFGSWILFENIDRMTREGTRTAFKLLSEITERCNVAIFRGATGGLLEYKLDANDEIINFINLAIDSSRGHKESQEKSVRVSNGWQAKKKSIRDKLETIDPKIDKERIILTQRLPLHLEAHITGKHFQEGVKKKYDVGYFVVKDGYVDAIKKIFEYALDERSDQYIASRMNENNELNTLLGIEVNGALVKKTWNSTEINRIIKEKIVLGHYQPKKHIEVKKGHINNKDYIFKGKMFTEDDLDKSFDIPEGELIKNYYPQVIDEDLYNEVQRIRLRRTTKKEGKTGSKNLNILRTLVKCESCGGSLQHTPKGKKKKHHTEKFYLRCRKAYENRGCSNKVLFDYKLLEKNLLKYCDHINLDLIFDETSDHLKKLKTKRNGLEIEIQNLNKRMTLLDAEMDLALDNDDNELVRGLSRKISQSEDKLELIRTQLEEVLQEISFVAKSSKKSNAELHDLIEKVSSGDEKEIRRKLNNQFKEIINKIVCFYDNETEGRYAVILFRDGIAQTMRIDIEIDDEYTEQLVSEFTNQRNGNEVPSYDD

SEQ ID NO: 51262 - DNA, 50 bp, Endozoicomonas acroporae
  source 1..50: mol_type = genomic DNA
gcgggtacatgtgaatcgcaaatagctattgttgactcacatgaacccgt

SEQ ID NO: 51263 - DNA, 40 bp, Endozoicomonas acroporae
  source 1..40: mol_type = genomic DNA
gtccggatcttccacaaacgctatttcagtggtcccccca

SEQ ID NO: 51264 - DNA, 50 bp, Endozoicomonas acroporae; identical to SEQ ID NO: 51262
  source 1..50: mol_type = genomic DNA

SEQ ID NO: 51265 - DNA, 40 bp, Endozoicomonas acroporae
  source 1..40: mol_type = genomic DNA
ctgcagatctgcctcacaagctctttcagtggttccccct

SEQ ID NO: 51266 - protein, 463 aa, Mycobacterium simiae
MRAAVYLRQSQDRSGEALGIDRQREDVRRLVEARGWTVVAEFVDNDVSALSRKPRPQFSAMMTRVDAGEFDVIVARHMDRLLRRLSELESTLERCQRAGVAIVTASDGVDTSTDGGRLVARILSSVAQGEVERKGSRQRSAAAQAAKQGRWVGGRRPFGYEKDGITICEPEAAMIKQAYVDVLAGETVSEIARRWNASGVTPAQSEKRWYRGTVKDVLTNPRHAGLRRYRTPEERAKIRQNPELGIVGKAEWPAIVDETTWRAAVRILTDPARLTGRAGAKGLLTGVALCGVCGQTVHRGGAVGRYPMYRCISGRHVSRRAEPVDEYVMAVVVERLQQPDAASLWAPELPDADELMAEADKLRRERDGIDDDRAEGLIDRVRWRTMNERIACRLGEIEAKLASAGSSSPLSIVASGHVEETWAALSIAQRRNIIAALVVPVIHPPGPGTRTFRPETVEIRWKA

SEQ ID NO: 51267 - DNA, 50 bp, Mycobacterium simiae
  source 1..50: mol_type = genomic DNA
atatgcgactttgttgggcttgttgtcgcgtggaatcgaaactagcagaa

SEQ ID NO: 51268 - DNA, 40 bp, Mycobacterium simiae
  source 1..40: mol_type = genomic DNA
gctcgatcgcacattgcgcgtcgcgtggagcctggccgac

SEQ ID NO: 51269 - DNA, 50 bp, Mycobacterium simiae
  source 1..50: mol_type = genomic DNA
atatgcgactttgttgggcttgttagcgcgtggaatcgaaactagcagaa

SEQ ID NO: 51270 - DNA, 40 bp, Mycobacterium simiae
  source 1..40: mol_type = genomic DNA
ggaagttctcaccttgcgcagcgggaggagcctggcctcc

SEQ ID NO: 51271 - protein, 569 aa, Faecalitalea cylindroides
MRQSNNRKSRDVTAFLYERLSRDDNLEGESYSIGNQKKLLTKVAKEKGYTNLVHFLDDGISGVTMDRPGFNDMMEQLAAGKAAAVFVKDLSRLGRNYIEVGRLTEEFFPEHDIRLVAVSDNIDTAEGENELAPIRNLFNEWYARDISKKRRISNKIKGNAGEPMGQPPYGYIKDPDNPKRWIVDEEAAQVVRRIYSMTLEGYGTEQIAASLEQDGILTPRAYWLKKGIKRPGKGKEQPPTKWNSSSVTKILSLQEYCGDILNFKTYSKSYKNKKRLENDRENWVIFKDVHEPIIERAIFEQVQQKRGKIRKRRTHEGERNMFSGLLVCADCGHNLHFHFNQGNPDIKYFNCSNYKGNRGSCTSTHYVRVDFLEQVVLGEIRRLTKFASQFEDEFVKAVIGHSQQAEATDRKLKEKELKALQARDEELDGLFERIYEDNVSGKLSDDRFARMSRRYEEEQKELAEKIKALRAEIDKQSSQSMTTDMFISLVRKYTRARKLTPRMLNELIEKIEVFNAEKIDGVWEQRLRIHYNCVGAIEIPELIPLPAPEVSVNTRKGVVVNYAPSTIAG

SEQ ID NO: 51272 - DNA, 50 bp, Faecalitalea cylindroides
  source 1..50: mol_type = genomic DNA
caaatgctataagaacactcgtcatggtacgaatggcgatacagaacttt

SEQ ID NO: 51273 - DNA, 40 bp, Faecalitalea cylindroides
  source 1..40: mol_type = genomic DNA
agtcctttatataaagcactggtgccgacggagggatttg

SEQ ID NO: 51274 - DNA, 50 bp, Faecalitalea cylindroides
  source 1..50: mol_type = genomic DNA
caaatgctataagaacactcgtcattgtacgaatggcgatacagaacttt

SEQ ID NO: 51275 - DNA, 40 bp, Faecalitalea cylindroides
  source 1..40: mol_type = genomic DNA
aatccttaatatatagctcttctgaggatggatgtatttg

SEQ ID NO: 51276 - protein, 478 aa, Mycolicibacterium elephantis
MQVKAVIYTRISKDREGAGLGVERQRADCAALADRLGWQVVGTFSDNDLSAYSGRHRPGYAAMCEALEAGEAQAIIAWHTDRLHRRPVELESFIGLCERRSIQVRTVRAGTLDLSTPSGQMVARMLGAAARHEIDHAIERQKRAKKQAALDGRYRGSRRAFGYERDGLTLCDAEADAIRTAAERVLSGTSLSQVARDWNAAGLRTAFGGKAFTSREVRRILLRPRNAGYSLHEGKRIPNAQWPPIITTDTFAALEALLRDPVRSKHLAFERKWMGSGVYLCGKCGAKISTASQKGTGKSWRPTYVCSASKHLGRVADTVDEYVTEAVLERLSRPDAPILLGGNKVDVADLTSRRDGYRARLDELAAMFAAGDIDAGQLKSGTTELRRKLDRVDAELAAARASSVLADLVLSGDDLRDTWAAIPPGGKGKVIDALMTVTIEPTRRGRRPGGSYFDPESVTIRFKGVGEHRLDDGQLIGA

SEQ ID NO: 51277 - DNA, 50 bp, Mycolicibacterium elephantis
  source 1..50: mol_type = genomic DNA
aacagtgagctcggacgctatgacagatcgtagcttcactgctaccgttt

SEQ ID NO: 51278 - DNA, 40 bp, Mycolicibacterium elephantis
  source 1..40: mol_type = genomic DNA
cacggccagcgccagcgcgagatcgtagaccgaccccatc

SEQ ID NO: 51279 - DNA, 50 bp, Mycolicibacterium elephantis
  source 1..50: mol_type = genomic DNA
aacagtgagctcggacgctatgactaatcgtagcttcactgctaccgttt

SEQ ID NO: 51280 - DNA, 40 bp, Mycolicibacterium elephantis
  source 1..40: mol_type = genomic DNA
ccccaccagcgacagtgcgtaatcgttgactgatcccaat

SEQ ID NO: 51281 - protein, 492 aa, Microbacterium sp LKL04
MSPRPVARLNRRRAVLYLRQSTYREESISLELQEAAGRDYCARQGYDVIAVEADPGISGRTWQRPAVQRVMGMIDDGSADVVVLWRWSRLSRSRKDWALAADRADLAGGSIESATEPNDATAAGRFARGVMTELAAFESERIGEQWKETHDRRRRLGLPSDGADRFGYEKRDGWYHPHPVQAPLLAEMYRRYLRGEGFTRIVKWLNESGHTTRRGGTWSRVTLTHLLDAGFGAGKIIQRPTTKDRRDWRISEATFHPGAQTPVITPAEWDEYVALRLDAPKPATVVEPKYALTGLIVCGDCGAPMHVGNQGLKDYKCSRAAQVRDVSGMYMTRALVEQRVREWVEEIAADVDGEMERRAKQRERRVVQLDNAGTVDRKIADLTDRMGRITVRWSSGDLPDAAYTSSIALLDADLAALRERRRRAAPIPRIEINPQRVAADLAGDWEALTVIERRNLLRALIHQVRIVKPTRPGTGVWRERVQIIPSWAAPIG

SEQ ID NO: 51282 - DNA, 50 bp, Microbacterium sp LKL04
  source 1..50: mol_type = genomic DNA
cctatcggttgacgcacacgcatgtgcacggtgtatcgcgaaccgatatg

SEQ ID NO: 51283 - DNA, 40 bp, Microbacterium sp LKL04
  source 1..40: mol_type = genomic DNA
gatatcggggatgacgacgtgcagacgcgagccgtcgggc

SEQ ID NO: 51284 - DNA, 50 bp, Microbacterium sp LKL04; identical to SEQ ID NO: 51282
  source 1..50: mol_type = genomic DNA

SEQ ID NO: 51285 - DNA, 40 bp, Microbacterium sp LKL04
  source 1..40: mol_type = genomic DNA
gatgtctgggatggcgaggtgcagagaggagcaggctggc

SEQ ID NO: 51286 - protein, 539 aa, Pseudomonas coronafaciens
MAKIGARVYSYLRFSDPRQGSGGSADRQLLYAQRWAANKGLELDESLSMRDEGLSAYHQRHVTQGALGVFLRAIEDGRIASGSVLVVEGLDRLSRAEPIQAQAQLAQIINAGITVVTASDGKEYNRGGLKAQPMDLVYSLLVMIRAHEESDTKSKRVKASILRLCQAWQSGTYRGLIRNGKDPQWLRWTGSAWVMIPERVLAVRRALALYQEGMGAARATKILHAEGLDYSASGISKQQIYRLIKLQALRGAKCLSVDGEDFILEDYYPRLLSESEWADLQHLAGQRLRRRGHGEIPGIITGIGLTYCGYCGTALVGQNMMTRQRADGTIADGHRRLHCVSYGVNGGCTAGGSCSVVPVERALLTFCSDQLNLQRLLKVGDEGQGIRQRLAIARSAVEKLSVQLGRITDALLADDSGTAPTAFIRRARELEAEQAEAHKKVQQLEYELATVSGSGKPAQAERWVELADLVRAGDYSAREKVRQLVMDTFERIVVFMRGMSAEDRSGKFIDVQLLSRTGQQRLLQINRKTGAWVASEDWE

SEQ ID NO: 51287 - DNA, 50 bp, Pseudomonas coronafaciens
  source 1..50: mol_type = genomic DNA
tgtatattttggaagtcgttaggacaccctaacgatatcattcctacacg

SEQ ID NO: 51288 - DNA, 40 bp, Pseudomonas coronafaciens
  source 1..40: mol_type = genomic DNA
atcaacgagcgccttggggcaacccagagaaacgaatcca

SEQ ID NO: 51289 - DNA, 50 bp, Pseudomonas coronafaciens
  source 1..50: mol_type = genomic DNA
tgtatattttggaagtcgttaggagaccctaacgatatcattcctacacg

SEQ ID NO: 51290 - DNA, 40 bp, Pseudomonas coronafaciens
  source 1..40: mol_type = genomic DNA
ttcaacaagagacttgggggaaccaagcaaaccatatcca

SEQ ID NO: 51291 - protein, 539 aa, Flavobacterium gilvum
MGVENFKRFQKEKLIEKVDVKDIWGYTRVSSKMQLVNNSLEEQRSEIVQFANKNGYALKNILGGTYESASGDFTRKEFTKLIDEVKNAKQKPFGIAIKFISRFSRTGGNAIAIVNELVDKLGVHLIETSSGLCTNDEYSKLDIYSKLLDARRENMDRLEKTIPGMKALLRAGNWLGKAPRGYTMRGKKVADYTLLRETQSITINEEGELLKKAWKWKLMGERDYVIRQKLELLNLKILKQGLSSMWRNPFYCGVLVNSLIEAPVKGNWEGLVSQEDFLIVDSILSKNKRNAVKEYTKNKINEFRPLTGFLRCECGCLLTSYEVRIKNKHYYKCQKCTNVSFNASTTLRSKAEGLNNSFENLLSNYTLNTRFIEPFKLQLHKLFDTMNTEGKSEMKSLLAKKKDLEMKIENLDKRYFDNPNFGDEKYNRYVLQFESELKANEDQMDMNEKKLSNHKKHIEKVVEKVQNISDCWGRGDVEDKIRIQNLVFPEGLSIRAENREYLTKKVNGIFELISVFIGVEEGIKNEKTHQNVDGFLSVA

SEQ ID NO: 51292 - DNA, 50 bp, Flavobacterium gilvum
  source 1..50: mol_type = genomic DNA
tgttgatgggtttctctcagtagcgagtaatcgtgaaaaatctaacgaat

SEQ ID NO: 51293 - DNA, 40 bp, Flavobacterium gilvum
  source 1..40: mol_type = genomic DNA
tctgaagctttctagtagcgggaacaggactcgaacctgt

SEQ ID NO: 51294 - DNA, 50 bp, Flavobacterium gilvum
  source 1..50: mol_type = genomic DNA
tgttgatgggtttctctcagtagcacgtaatcgtgaaaaatctaacgaat

SEQ ID NO: 51295 - DNA, 40 bp, Flavobacterium gilvum
  source 1..40: mol_type = genomic DNA
tcagaagccttctagtgggactaacacacctcgaactttt

SEQ ID NO: 51296 - protein, 468 aa, Mycobacteroides abscessus
MKAAIYTRISQDKKLKDDEDEDRYERQGVTRQLEDCVALAARLGWEVVQHYDDNDLSAFNGKRRPGFEALLKAMEAGEFSALIVWHADRLYRSMKDLERVIDLADARRLKIAQVQGGDLDLSTSAGKMLARILGSVSRQESEHKGERQRRANEQKAAAGTWYTANRCFGYTDKGVPLEPEATAVRTAVADVLAGKSIRKVGMEWNEQGLKTTLGTTWNAPRVRRLLVNPRYAALRTHRGVVVGPGQWEALIDEDTHRGLVAFLSDPSRIKCTSFERKYIGSGVYRCGKCEGGLMKAAQPGGRKNRAYVCRDHAHVLRAGEPVDAYVEALVLEYLARPDAKLVLDDGRNVDVAELQNQRAGVQARLDELASLFADGAIDGSQLRRGTTELRSRLAVVDSQLAELARINPVADLLGAGDRLAEKWAALSKDLQGKVVSELMTVTILPAPRGRRAFDPDYIQIDWKTGKSA

SEQ ID NO: 51297 - DNA, 50 bp, Mycobacteroides abscessus
  source 1..50: mol_type = genomic DNA
aggtacctaacctatgaggtcttgccaaagaccctataggtgagatacct

SEQ ID NO: 51298 - DNA, 40 bp, Mycobacteroides abscessus; identical to SEQ ID NO: 6503
  source 1..40: mol_type = genomic DNA

SEQ ID NO: 51299 - DNA, 50 bp, Mycobacteroides abscessus
  source 1..50: mol_type = genomic DNA
aggtacctaacctatgaggtcttggtaaagaccctataggtgagatacct

SEQ ID NO: 51300 - DNA, 40 bp, Mycobacteroides abscessus
  source 1..40: mol_type = genomic DNA
cagccaattgctgcgacaggtatggagtgtggttgctcct

SEQ ID NO: 51301 - protein, 468 aa, Mycobacteroides abscessus
MKAAIYTRISQDKKLKDDEDEDRYERQGVTRQLEDCVALAARLGWEVVQHYDDNDLSAFNGKRRPGFEALLKAMEAGEFSALIVWHADRLYRSMKDLERVIDLADARRLKIAQVQGGDLDLSTSAGKMLARILGSVSRQESEHKGERQRRANEQKAAAGTWYTANRCFGYTDKGVPLEPEATAVRTAVVDVLAGKSIRKVGMEWNEQGLKTTLGTTWNAPRVRRLLVNPRYAALRTHRGVVVGPGQWEALIDEDTHRGLVAFLSDPSRIKCTSFERKYIGSGVYRCGKCEGGLMKAAQPGGRKNRAYVCRDHAHVLRAGEPVDAYVEALVLEYLARPDAKLVLDDGRNVDVAELQNQRAGVQARLDELASLFADGAIDGSQLRRGTTELRSRLAVVDSQLAELARINPVADLLGAGDRLAEKWAALSKDLQGKVVSELMTVTILPAPRGRRAFDPDYIQIDWKTGKSA

SEQ ID NO: 51302 - DNA, 50 bp, Mycobacteroides abscessus; identical to SEQ ID NO: 51297
  source 1..50: mol_type = genomic DNA

SEQ ID NO: 51303 - DNA, 40 bp, Mycobacteroides abscessus; identical to SEQ ID NO: 6503
  source 1..40: mol_type = genomic DNA

SEQ ID NO: 51304 - DNA, 50 bp, Mycobacteroides abscessus; identical to SEQ ID NO: 51299
  source 1..50: mol_type = genomic DNA

SEQ ID NO: 51305 - DNA, 40 bp, Mycobacteroides abscessus; identical to SEQ ID NO: 51300
  source 1..40: mol_type = genomic DNA

SEQ ID NO: 51306 - protein, 455 aa, Mycobacteroides abscessus
MAIYVRISADQTGEGLGIARQLEECLALAARLGWDVVAQFDDNDVSAYSGRKRRGFEAMLTAMAAGEFDALLCWHTDRLYRSMKDLERLIEIADARGVKIATVQAGELDLSTSAGRMMARILGSVARAESEHKAERHMLANAQKAAAGKWQTANRAFGYTRDGVPLEPEASAIKAAVADVLGGKSLRKIAVEWNAAGLRTTTKAKPWTALTVRRVLESPRYAALKVYRGQVVGAGTWEPLIDVDTHRGLVAFLSNPQRVRHTSFERKYIGSGIYRCGRCGGGPMAHAYPGGKSSARVYQCKAYQHVTRRGEPLDQYVEMLVLERLRTADVRVLLPAGGETVDVGELHAKRAALQARLDELAALFAEGAIDGSQLRRGTNELRTQLSGVDAALAELSRRSPVAELVSDRAKLDERWAALSPDLQGKVVDELMQVTVLPAPKGSKGFRPEYVQIDWR

SEQ ID NO: 51307 - DNA, 50 bp, Mycobacteroides abscessus
  source 1..50: mol_type = genomic DNA
cggcgcagaaaccttgtttgcactggagggggtgtgtggtcgtttcgccg

SEQ ID NO: 51308 - DNA, 40 bp, Mycobacteroides abscessus
  source 1..40: mol_type = genomic DNA
aggtgcagccacgctccttggcggtcaacacaattcgctg

SEQ ID NO: 51309 - DNA, 50 bp, Mycobacteroides abscessus
  source 1..50: mol_type = genomic DNA
cggcgcagaaaccttgtttgcactacagggggtgtgtggtcgtttcgccg

SEQ ID NO: 51310 - DNA, 40 bp, Mycobacteroides abscessus
  source 1..40: mol_type = genomic DNA
aggagcaaccacactccatacctgtcgcagcaattggctg

SEQ ID NO: 51311 - protein, 457 aa, Mycobacteroides abscessus
MRVAIYARISADQTGEGLGVARQLEECLALAVRLGWDVVAQFDDNDLSAYTGKKRPGFEAMLTAMAAGEFDALLCWHTDRLYRSMKDLERLIDIADARGVKIATVQGGELDLSTSAGRMMARILGSVARAESEHKGERHRAANAQKAAAGKWQTANRAFGYTREGVPLEPEATAIKAAVADVLGGKSLRRIATEWNAAGLRTTTKAKPWTALTVRRVLESPRYAALKVYRGQVVGAGTWEPLIDVDTHRGLVAFLSNPERVRHTSFERKYIGSGVYRCGRCGGGPMMHAYPGGKWSARVYQCKAHQHVTRRGEPLDQYVEMLVLERLRTADVRVLLPAGGETVDVGQLHAKRAGLQARLDELAALFAEGAIDGSQLRRGTNELRAQLSGVDAALSELSRRSPVAELVSDRAKLDERWAALSPDLQGKVVAELMTVTVLPAPKGSKGFRPEFIQIDWR

SEQ ID NO: 51312 - DNA, 50 bp, Mycobacteroides abscessus
  source 1..50: mol_type = genomic DNA
cggcgtagaaaccttgtttgcactggagagggtgtgcggtcgtttcgccg

SEQ ID NO: 51313 - DNA, 40 bp, Mycobacteroides abscessus; identical to SEQ ID NO: 51308
  source 1..40: mol_type = genomic DNA

SEQ ID NO: 51314 - DNA, 50 bp, Mycobacteroides abscessus
  source 1..50: mol_type = genomic DNA
cggcgtagaaaccttgtttgcactacagagggtgtgcggtcgtttcgccg

SEQ ID NO: 51315 - DNA, 40 bp, Mycobacteroides abscessus; identical to SEQ ID NO: 51310
  source 1..40: mol_type = genomic DNA

SEQ ID NO: 51316 - protein, 461 aa, Mycobacteroides abscessus
MSVKVAIYTRISADQTGEGLGVARQLEDCVALAARLGWEVVAHYDDNDLSAFSGKRRPGFEAMVEAMASGEFGALIVWHTDRLYRSMKDLERLIDLADARRVKIATVQGGDLDLSTSAGKMVARILGSVARQESEHSSERRRRANEQKAAAGTWYTANRCFGYTDKGVPLEPEATAVRTAVADVLAGKSIRKVGMEWDEQGLKTTLGTTWNAPRVRRLLVNPRYAALRTHRGVVVGPGKWEALIDEDTHRGLVAFLSDPSRIKCTSFERKYIGSGVYRCGKCEGGLMKAAQPGGRKNRAYVCRDHAHVLRAGEPVDAYVEALVLEYLARPDAKLVLDDGRDVDVAELQGQRAGVQARLDELASLFADGAIDGSQLRRGTTELRSRLAVLDSELAELARINPVADLLGAGSQLSEKWTALSKDMQGKVVSELMTVTILPAPRGRRAFDPDYIQIDWKTGKGA

SEQ ID NO: 51317 - DNA, 50 bp, Mycobacteroides abscessus
  source 1..50: mol_type = genomic DNA
cagtaccccacctaaaaggtcttgccaaagaccgcatagttgagatacct

SEQ ID NO: 51318 - DNA, 40 bp, Mycobacteroides abscessus; identical to SEQ ID NO: 6503
  source 1..40: mol_type = genomic DNA

SEQ ID NO: 51319 - DNA, 50 bp, Mycobacteroides abscessus
  source 1..50: mol_type = genomic DNA
cagtaccccacctaaaaggtcttggtaaagaccgcatagttgagatacct

SEQ ID NO: 51320 - DNA, 40 bp, Mycobacteroides abscessus; identical to SEQ ID NO: 51300
  source 1..40: mol_type = genomic DNA

SEQ ID NO: 51321 - protein, 461 aa, Mycobacteroides abscessus
MSVKAVIYTRISEDQTGEQEGVTRQLEDCVKLADQLGWEVVAHYDDNDLSAFNGKLRPGFEALLKAMAAGEFTALLVWHPDRLYRSPKDLERIIEIADARRVKIATVRAGDMDLSTPAGRMVARILGSVARQESEHKGDRQRRANEQRAAEGKWYTANRCFGYTHDGVPLEPEATAVRTAVADVLAGKSIRKVGIEWNEQGLKTTLGTSWNSPRVRRLLVNPRYAALRTYRGVVVGPGAWEPLIDADTHRGLVAFLSDPSRITCTSFERKYIGSGVYRCGKCEGGLMKSAQPGGRKNRAYVCRDHAHVLRAGEPVDAYVEALVLEYLSRPDAKLVLDDGRDVDVAELQAQRAGLQARLDELASLFADGAIDGSQLRRGTTELRSRLAVLDSQLADLARVNPVADLLGAGDRLSEKWAALSKDLQGKVVNELMTVTILPAPRGRRAFDPDYIRIDWKTGSAA

SEQ ID NO: 51322 - DNA, 50 bp, Mycobacteroides abscessus
  source 1..50: mol_type = genomic DNA
aggtacccaacctaaaaggtcttgcccaagaccctataggtgagatacct

SEQ ID NO: 51323 - DNA, 40 bp, Mycobacteroides abscessus; identical to SEQ ID NO: 6503
  source 1..40: mol_type = genomic DNA

SEQ ID NO: 51324 - DNA, 50 bp, Mycobacteroides abscessus
  source 1..50: mol_type = genomic DNA
aggtacccaacctaaaaggtcttggtcaagaccctataggtgagatacct

SEQ ID NO: 51325 - DNA, 40 bp, Mycobacteroides abscessus; identical to SEQ ID NO: 51300
  source 1..40: mol_type = genomic DNA

SEQ ID NO: 51326 - protein, 461 aa, Mycobacteroides abscessus
MSVKAVIYTRISEDQTGEQEGVTRQLEDCVKLADQLGWEVVAHYDDNDLSAFNGKLRPGFEALLKSMAAGEFTALLVWHPDRLYRSPKDLERIIEIADARRVKIATVRAGDMDLSTPAGRMVARILGSVARQESEHKGDRQRRANEQRAAEGKWYTANRCFGYTHDGVPLEPEASAVRTAVADVLAGKSIRKVGIEWNEQGLKTTLGTSWNSPRVRRLLVNPRYAALRTYRGVVVGPGAWEPLIDADTHRGLVAFLSDPSRIKCTSFERKYIGSGVYRCGKCEGGLMKAAQPGGRKNRAYVCRDHAHVLRAGEPVDAYVEALVLEYLSRPDAKLVLDDGRDVDVAELQAQRAAVQARLDELASLFADGAIDGSQLRRGTTELRSRLTVLDSQLADLARTNPVADLLGAGDRLSEKWAALSKDMQGKIVSELMTVTILPAPRGRRAFDPDYIQIDWRTGKAA

SEQ ID NO: 51327 - DNA, 50 bp, Mycobacteroides abscessus
  source 1..50: mol_type = genomic DNA
aggtacctaacctaaaaggtcttgcccaagaccccctagttgagatacct

SEQ ID NO: 51328 - DNA, 40 bp, Mycobacteroides abscessus; identical to SEQ ID NO: 6503
  source 1..40: mol_type = genomic DNA

SEQ ID NO: 51329 - DNA, 50 bp, Mycobacteroides abscessus
  source 1..50: mol_type = genomic DNA
aggtacctaacctaaaaggtcttggtcaagaccccctagttgagatacct

SEQ ID NO: 51330 - DNA, 40 bp, Mycobacteroides abscessus; identical to SEQ ID NO: 51300
  source 1..40: mol_type = genomic DNA

SEQ ID NO: 51331 - protein, 461 aa, Mycobacteroides abscessus
MSVKAVIYTRISEDQTGEQEGVTRQLEDCVKLADQLGWEVVAHYDDNDLSAFNGKLRPGFEALLKAMAAGEFTALLVWHPDRLYRSPKDLERIIEIADARRVKIATVRAGDMDLSTPAGRMVARILGSVARQESEHKGDRQRRANEQRAAEGKWYTANRCFGYTHDGVPLEPEATAVRTAVADVLAGKSIRKVGIEWNEQGLKTTLGTSWNSPRVRRLLVNPRYAALRTYRGVVVGPGAWEPLIDADTHRGLVAFLSDPSRIKCTSFERKYIGSGVYRCGKCEGGLMKSAQPGGRKNRAYVCRDHAHVLRAGEPVDAYVEALVLEYLARPDAKLVLDDGRDVDVAELQAQRAGLQARLDELASLFADGAIDGSQLRRGTTELRSRLAVLDSQLADLARVNPVADLLGAGDRLSEKWAALSKDLQGKVVNELMTVTILPAPRGRRAFDPDYIRIDWKTGSAA

SEQ ID NO: 51332 - DNA, 50 bp, Mycobacteroides abscessus; identical to SEQ ID NO: 51322
  source 1..50: mol_type = genomic DNA

SEQ ID NO: 51333 - DNA, 40 bp, Mycobacteroides abscessus; identical to SEQ ID NO: 6503
  source 1..40: mol_type = genomic DNA

SEQ ID NO: 51334 - DNA, 50 bp, Mycobacteroides abscessus; identical to SEQ ID NO: 51324
  source 1..50: mol_type = genomic DNA

SEQ ID NO: 51335 - DNA, 40 bp, Mycobacteroides abscessus; identical to SEQ ID NO: 51300
  source 1..40: mol_type = genomic DNA

SEQ ID NO: 51336 - protein, 461 aa, Mycobacteroides abscessus
MSVKAVIYTRISEDQTGEQEGVTRQLEDCVKLADQLGWEVVAHYDDNDLSAFNGKLRPGFEALLKSMAAGEFSALLVWHPDRLYRSPKDLERIIEIADARRVKIATVRAGDMDLSTPAGRMVARILGSVARQESEHKGDRQRRANEQRAAEGKWYTANRCFGYTHDGVPLEPEASAVRTAVADVLAGKSIRKVGMEWNEQGLKTTLGTSWNSPRVRRLLVNPRYAALRTYRGVVVGPGAWEPLIDADTHRGLVAFLSDPSRIKCTSFERKYIGSGVYRCGKCEGGLMKAAQPGGRKNRAYVCRDHAHVLRAGEPVDAYVEALVLEYLSRPDAKLVLDDGRDVDVAELQAQRAAVQARLDELASLFADGAIDGSQLRRGTTELRSRLTVLDSQLADLARTNPVADLLGAGDRLSEKWAALSKDMQGKIVSELMTVTILPAPRGRRAFDPDYIQIDWRTGKAA

SEQ ID NO: 51337 - DNA, 50 bp, Mycobacteroides abscessus
  source 1..50: mol_type = genomic DNA
aggtacctaacctaaaaggtcttgcctaagaccctctagttgagatacct

SEQ ID NO: 51338 - DNA, 40 bp, Mycobacteroides abscessus; identical to SEQ ID NO: 6503
  source 1..40: mol_type = genomic DNA

SEQ ID NO: 51339 - DNA, 50 bp, Mycobacteroides abscessus
  source 1..50: mol_type = genomic DNA
aggtacctaacctaaaaggtcttggttaagaccctctagttgagatacct

SEQ ID NO: 51340 - DNA, 40 bp, Mycobacteroides abscessus; identical to SEQ ID NO: 51300
  source 1..40: mol_type = genomic DNA

SEQ ID NO: 51341 - protein, 461 aa, Mycobacteroides abscessus
MSVRAVIYTRISEDQTGEQEGVTRQLEDCVKLADQLGWEVVAHFDDNDLSAFNGKLRPGFEALLKAMAAGEFTALLVWHPDRLYRSPKDLERIIEIADARRVKIATVRAGDMDLSTPAGRMVARILGSVARQESEHKGDRQRRANEQRAAEGKWYTANRCFGYTHDGVPLEPEATAVRTAVADVLAGKSIRKVGIEWNEQGLKTTLGTSWNSPRVRRLLVNPRYAALRTYRGVVVGPGAWEPLIDADTHRGLVAFLSDPTRIKCTSFERKYIGSGVYRCGKCEGGLMKAAQPGGRKNRAYVCRDHAHVLRAGEPVDAYVEALVLEYLSRPDAKLVLDDGRDVDVAELQTQRAGLQARLDELASLFADGAIDGSQLRRGTTELRSRLTVLDSQLADLARTNPVANLLGAGDQLAEKWAELSKDMQGKIVNELMTVTILPSPRGRRAFDPDYIRIDWKTGNAA

SEQ ID NO: 51342 - DNA, 50 bp, Mycobacteroides abscessus
  source 1..50: mol_type = genomic DNA
aggtaccccatctaaaaggtcttgcccaagaccccctagttgagatacct

SEQ ID NO: 51343 - DNA, 40 bp, Mycobacteroides abscessus; identical to SEQ ID NO: 6503
  source 1..40: mol_type = genomic DNA

SEQ ID NO: 51344 - DNA, 50 bp, Mycobacteroides abscessus
  source 1..50: mol_type = genomic DNA
aggtaccccatctaaaaggtcttggtcaagaccccctagttgagatacct

SEQ ID NO: 51345 - DNA, 40 bp, Mycobacteroides abscessus; identical to SEQ ID NO: 51300
  source 1..40: mol_type = genomic DNA

SEQ ID NO: 51346 - protein, 581 aa, Escherichia coli; identical to SEQ ID NO: 1621

SEQ ID NO: 51347 - DNA, 50 bp, Escherichia coli; identical to SEQ ID NO: 42327
  source 1..50: mol_type = genomic DNA

SEQ ID NO: 51348 - DNA, 40 bp, Escherichia coli
  source 1..40: mol_type = genomic DNA
tcaacaaggtttttcggacagccaagggaaacaaagccga

SEQ ID NO: 51349 - DNA, 50 bp, Escherichia coli; identical to SEQ ID NO: 42327
  source 1..50: mol_type = genomic DNA

SEQ ID NO: 51350 - DNA, 40 bp, Escherichia coli
  source 1..40: mol_type = genomic DNA
tcaacaaagtttgccaaacagtcatctgaaacaaagctga

SEQ ID NO: 51351 - protein, 510 aa, Dehalococcoides mccartyi
MDKKTDDKQLRCCIYARVSSDDQAGRNFSVPAQVEACRYYAKGKDWTVITEYHDGFESARPGKVRPTFEKMMDAARNKEFDVIIVHKLDRFARDDYEHVVSERELEKLGIRLESVSEPLDVSSPAGYLSRRIMQVISSWYIKNLAVEAKKGMKQKVAQGGWPWLAPLGYVNRKDKNNAWVDVDPKLGPMITEAFKEMATGKYTIDEWTARAFNLGYRNRTGGNISRSKWHDLFHHRFYLGKTGWGRSGEEQDGNHPALTDPTTFAQVQEILAKHDHYKKRVQRHDYLLRGLVYSLDADSPCLVTAQPSKGMSYYRSKARVGGSQVYYNCKDVDAEAGELVESMAIAEDYRPRLETALKEWFAEMGKGGEDSELGRAKHRLETLVTKRKNINRMASEELISWDEFKELRNEIEVEEAALKSRIEFITRHQTLFAADFEVALDIVCNLGWLYKEGGFNERRLLVETLFERLNVRQGKIESYELNPPFAVFYDRDENTDRGNKLVRFESLVAG

SEQ ID NO: 51352 - DNA, 50 bp, Dehalococcoides mccartyi
  source 1..50: mol_type = genomic DNA
agttcgatttgagtctttagtggctggccactcaggactcaaatcgaact

SEQ ID NO: 51353 - DNA, 40 bp, Dehalococcoides mccartyi
  source 1..40: mol_type = genomic DNA
cgggaacgctttatttggctggcgagccaggattcgaacc

SEQ ID NO: 51354 - DNA, 50 bp, Dehalococcoides mccartyi
  source 1..50: mol_type = genomic DNA
agttcgatttgagtctttagtggccggccactcaggactcaaatcgaact

SEQ ID NO: 51355 - DNA, 40 bp, Dehalococcoides mccartyi
  source 1..40: mol_type = genomic DNA
aggtaacttgttagtaagccggagagccaggattcaaacc

SEQ ID NO: 51356 - protein, 499 aa, Acutalibacter muris
MFDAIYTRQSVDRADSISIESQKEFCQYETRGGEYRHYSDRGFSGKNTDRPDFQRMMNDIKSGEIKRVIVYKLDRISRSILDFTAMMEEFHKYGVEFVSTTEKFDTSSPMGRAMLNICIVFAQLERETIQKRVADAYASRSKHGFFMGGPVPYGYSIEPCAIDGVKTSRYVVSPEEAEVVKVIYQMYAQPQVSFGDIMRYLGDNKIRTRRDKGWNRTRIAEIVKNPIYLRADLDIYEFYKGQGTIIVNDPSDFIGTNGCYLYETQETKRKTLSLEGQTLVLAPHEGIIPSDIWLAARKKCLNNRNVGIPTKVKNSWLLGKAKCGKCGHALSIRYSKKNGVRYFMCGYRLNARGCEGFGALRAPELESFVLNAIRERLKAFETLTSSTKARVNPKLDELRIKEHQLSKDIDTLLEKVVHADGALMALINQRASNLDAELKEIQKEIREITASTPSTDIKTLTGYFSKWEELSIDDKRSVVDLLIAQVNATKDTVEIVWKI

SEQ ID NO: 51357 - DNA, 50 bp, Acutalibacter muris
  source 1..50: mol_type = genomic DNA
gagtacttcatagtgattgtaaaggttttccgttagtcaacaacttcttc

SEQ ID NO: 51358 - DNA, 40 bp, Acutalibacter muris
  source 1..40: mol_type = genomic DNA
tcgtcggttctcttaaaggcttttccattcgtaagcagtt

SEQ ID NO: 51359 - DNA, 50 bp, Acutalibacter muris; identical to SEQ ID NO: 51357
  source 1..50: mol_type = genomic DNA

SEQ ID NO: 51360 - DNA, 40 bp, Acutalibacter muris
  source 1..40: mol_type = genomic DNA
tcatcccttctcaaaatgagttttccatttgtaaactgtt

SEQ ID NO: 51361 - protein, 584 aa, Pectobacterium carotovorum
MPLLYSYIRWSSDRQATGTTLDRQMASAASAKEFALLNGLELVEIIDPGVSAFRGKNTKSGKLGDFIDAVKERIIPDDSWLYVENLDRLTRQDVTTAQKLFIELLDLGLTLLTGMDKRVYTLESVNQNPTDLMISILMFSRANEESKTKQARTVGNVETLVERHKQGLPVNIKSCGKHPFWIDDTGSQYEAVRQHPEYWKVAREAIDQFLQGHGIYKVKRYLDEKYPNGLNGKEWDYQVLKRLRENRALIGERTIKIGNREHKLIGYYPSLCTDEVEFLKLQELKEQNGYKSKKDKPSDSINLLSGLTLMRCSKCGGTMTGFLNRGKPRYICLNGRHLQKGCVGWSVTSPLVDQCVITTLLIGYINTNRKEGQDTTELTKLIERKSNDINAINSSIANITLAIEKGANIDQLIDRLKVLSSDRETIIKDVDKLKTRKTVIETKGSFELTIMEFMELIQWAVFVDITNESRNKIRTVINDIIEYVIIDKTDGCITIKVKCLGSDDVFVYGGDKRKPFWKFDVEQHLDESTELLTSDIGIDEKLLEATNLYGKMVDVYKTYYETVKDMMAVVGYPEIDGAAFWPNR

SEQ ID NO: 51362 - DNA, 50 bp, Pectobacterium carotovorum
  source 1..50: mol_type = genomic DNA
ctatcaataattttgactttcgggcaccctaatgataaaaatccaatctt

SEQ ID NO: 51363 - DNA, 40 bp, Pectobacterium carotovorum
  source 1..40: mol_type = genomic DNA
gtcgacgaggtttttcgggcaaccgagggaaacaaagccg

SEQ ID NO: 51364 - DNA, 50 bp, Pectobacterium carotovorum
  source 1..50: mol_type = genomic DNA
ctatcaataattttgactttcgggggccctaatgataaaaatccaatctt

SEQ ID NO: 51365 - DNA, 40 bp, Pectobacterium carotovorum; identical to SEQ ID NO: 19580
  source 1..40: mol_type = genomic DNA

SEQ ID NO: 51366 - protein, 512 aa, Burkholderia multivorans
MLLDDTLTLRDEGLSAYHQRHVTRGALGVFLRAVEDGRVPPGSVLVVEGLDRLSRAEPIQAQAQLAQIINAGITVITASDGREYNRERLRAQPMDLVYSLLVMIRAHEESATKSNRVKAAIRRQCQGWIAGTWRQPVRVGKDPQWVREVDGRFELIPERAAAIRLVVEMYRQGHGAVRVVRELAERGLTITNTGRTPSSHIYKLLANRMLIGEKTVELDGEEYRLEGYYPAVISPAEFAELRYLAEQRFRRKGKGEIPGIVTGLGITYCGYCGTAVTAQNIMGRRRDDAGRPQHGHRRLSCFSYRNALGCPVSGSVSVVPIERALMHYCSDQINLSRLLEGDSGATALAAELARARQRAADVEAQIQRATDALLTETDAPPAAVLRRIRELEAQLESARHEISSLEHRLSAESTTTPAAAQAWAELVKGVEELDYDARMKARQLVADTFSRIVVYHRGFKPREDSSTIGLLLIAKRGTTRMLHVDRKTGNWQAAEDLDLSAVPSREVPLPSA

SEQ ID NO: 51367 - DNA, 50 bp, Burkholderia multivorans
  source 1..50: mol_type = genomic DNA
ggtatacttccgatatctctcgggcacccgagggatactatacctatact

SEQ ID NO: 51368 - DNA, 40 bp, Burkholderia multivorans
  source 1..40: mol_type = genomic DNA
gtcgacgagcgctttcgggcagccgagggaaacgaagccg

SEQ ID NO: 51369 - DNA, 50 bp, Burkholderia multivorans
  source 1..50: mol_type = genomic DNA
ggtatacttccgatatctctcgggggcccgagggatactatacctatact

SEQ ID NO: 51370 - DNA, 40 bp, Burkholderia multivorans; identical to SEQ ID NO: 19580
  source 1..40: mol_type = genomic DNA

SEQ ID NO: 51371 - protein, 426 aa, Enterocloster clostridioformis
MDVHFIAVNDGVDSHVGDNEFTPFRNIINEWYAKDTSKKIRAVKRSKGMAGEHIGSHAPYGYMKNPDNKKEWLIDEEAAEVVREIFRLCVNGYGPTRIANILTERKILCPTYYALEHGEKPRTVLPPDKYLWSTTVVSHILERMDYLGHTVNFKTHVKSYKNRKKIDNSPEQWKIFENTHEAIIDKETFEIVQKIRSGKRRPTKMGDMPMFSGLLYCADCGSKMTFHRQMAQSAEKHNFVCSNYRHNSKSCTMHYIRNVVVEQIVLENLKEVIRYVSDYEDEFVQMVMDTDMRQRNKELLQKKKRLTEIHSRIQELDKIFQRIYEDNISGKLSDERFMKLSRGYEEEQHTLQVEQTSLEKELQKEEKQSVDVKQFLSVVRKYTNLTELTPEIVHEFIDKIIVHAPDKSSGKRLQEIEIIYNHIGVF

SEQ ID NO: 51372 - DNA, 50 bp, Enterocloster clostridioformis
  source 1..50: mol_type = genomic DNA
atctataaccatatcggagtattcgctattaaagtgattttttccccgca

SEQ ID NO: 51373 - DNA, 40 bp, Enterocloster clostridioformis
  source 1..40: mol_type = genomic DNA
ggccgcaggatttgttttcgtaagcgtcaaataagaacgt

SEQ ID NO: 51374 - DNA, 50 bp, Enterocloster clostridioformis
  source 1..50: mol_type = genomic DNA
atctataaccatatcggagtattcaatattaaagtgattttttccccgca

SEQ ID NO: 51375 - DNA, 40 bp, Enterocloster clostridioformis
  source 1..40: mol_type = genomic DNA
ggcctcaggatttttttaaaaatgcttcagaaaaaaatgt

SEQ ID NO: 51376 - protein, 538 aa, Brevundimonas diminuta
MSPPRIRCAIYTRKSTEEGLDQAFNSLDAQREACEAYIRSQAAEGWVLVPTAYDDGGFSGGNMDRPALQRLLAQMDAGLIDTIVVYKIDRLTRTLSDFARIVERLDRRGASFVSVTQAFNTTTSMGRLTLNVLLSFAQFEREVTGERIRDKIAASKKKGMWMGGVPPLGYDLPTDPMSRALVVNEAEAEQVRTLYRLYLELGSVAALAQQLQGEGWLTRVRVSRKGNRSGGVPYSRGALFHLLKNRIYLGEIVHGDAAMPGRHPAIVDTGLFEAVQQRLKANAVTHRDRPLRSADLALKGLVHDADGHRMSPSFGYGRGGKVYRYYVSAPLQQGGKLDRRDGALRRVRAEALHEVVEAALVSRHSHGSELPLAARLAPVTRIDLLAEEVRITFRADRLLPAARRGLEPVTGDAAALALALPVRCQARGGRVEQVGPDGRPLVHRHRRDPVLIKGLRRAHQLASGLGWNASDGALRQVDVAAPASAYDRKLVRLAFLAPDLQRAILEGRQAPGLTLSRLLDEPISPDWDRQRRMFGATA

SEQ ID NO: 51377 - DNA, 50 bp, Brevundimonas diminuta
  source 1..50: mol_type = genomic DNA
gacaagctatgcggggtgtgtggcggtggaccaagtcatccgataaatat

SEQ ID NO: 51378 - DNA, 40 bp, Brevundimonas diminuta
  source 1..40: mol_type = genomic DNA
cttgtcaggaaataatggcggagagggggggattcgaacc

SEQ ID NO: 51379 - DNA, 50 bp, Brevundimonas diminuta
  source 1..50: mol_type = genomic DNA
gacaagctatgcggggtgtgtggcagtggaccaagtcatccgataaatat

SEQ ID NO: 51380 - DNA, 40 bp, Brevundimonas diminuta
  source 1..40: mol_type = genomic DNA
gttgacagggaacaatggcagatagggaaggatgcaaaca

SEQ ID NO: 51381 - protein, 474 aa, Priestia flexa
MKCIVYVRVSTDEQAKHGFSIAAQIEKLEAYCISQGWELVDKYIDEGYSAKDLQRPAFEKMMDTLKQGNIDVLLVYRLDRLTRSVMDLYKILKILDDNNCMFKSATEVYDTTNAMGRLFITLVAAIAQWERENLGERVRLGMEKKTKLGMWKGGMAPYGYKIVEKKLVVNDKEKAVVQEIFKQTTTFGFYTLAKHLTNKGFSTRKGGEWHVDSVRDIANNPVYAGYLTFNQNSKDYKKPPREQTLYEGSHEPIISKEEFWALQDLLDKRRNGGGKKHTSNYYFSTLLKCARCGHSLSGHKSAGKKTYRCSGKKAGKNCTSHIILEDNLTKTIFSMFDKLVGNIYNSTDSSNYSDEKINELTNELKNLEKLLDKQKKMYENDIIDIDELIKKSNQLREREKEINKELKSINQSSKTANEETKYIISNIDTVWEYSTDHERKQLMNSIFTQIVIDTKEEYKRGTGNPREIIIVSAK

SEQ ID NO: 51382 - DNA, 50 bp, Priestia flexa
  source 1..50: mol_type = genomic DNA
tatatgtcttttatgggcggcggtactacaccataaataatatacatata

SEQ ID NO: 51383 - DNA, 40 bp, Priestia flexa
  source 1..40: mol_type = genomic DNA
catctgggttggtggcggtacgctaattccctgggcattg

SEQ ID NO: 51384 - DNA, 50 bp, Priestia flexa
  source 1..50: mol_type = genomic DNA
tatatgtcttttatgggcggcggtcatacaccataaataatatacatata

SEQ ID NO: 51385 - DNA, 40 bp, Priestia flexa
  source 1..40: mol_type = genomic DNA
catatgtgcttatgtcagtcacttaattccctgggccttg

SEQ ID NO: 51386 - protein, 510 aa, Yersinia pseudotuberculosis
MVDKTEKIHKVRVAQYLRMSTNLQEFSIDNQAQFIKKYANEHNMEILYTYDDAGKSGVSTTGRHDFNKLVNDVLTKEINIDAVLVYDVSRFGRFKDPQEGIYYKYLLKMNNVDVIYCAENLPENSETETFILSSLMYAAGAFSKNLSIKVFAGHVNLVKRGYYQGGKAGYGLKRKLLDNNNKHKMILAQGERKSLQTDRIVLVPGTKKEVELVKKIFNMFIFEGLNEYLIASRLNREGYRFSDKTEWTRGRIHSVLINSRYTGKYTYNRTSQKLKTKKIKNPENEWIEYNSFFKPIISEEKFKLAKEIIDNRSVKMSNEKILDCLRKILSKHGKISGFIIDEEDSSPSSSVIANRFGGLLNAYKLIDYTPERDYQYLEINSYLRKKHCDIVKKIKNEILSSEVKILENKLITVNKALNFSIVLSRCKKIGSNRHRWIVRLDRSLNPEISIIARMNSLNTEPIDYYILPSIDFFENELKLKDNNNLLFEMYRFDDIKPFFNMLSTDDKDVI

SEQ ID NO: 51387 - DNA, 50 bp, Yersinia pseudotuberculosis
  source 1..50: mol_type = genomic DNA
aggatctatcacaccatacgcccatgatgcagcagtacctataaacatct

SEQ ID NO: 51388 - DNA, 40 bp, Yersinia pseudotuberculosis
  source 1..40: mol_type = genomic DNA
ctcgactcccacaccccgatgatgcagcagtatcttcggt

SEQ ID NO: 51389 - DNA, 50 bp, Yersinia pseudotuberculosis
  source 1..50: mol_type = genomic DNA
aggatctatcacaccatacgcccatcatgcagcagtacctataaacatct

SEQ ID NO: 51390 - DNA, 40 bp, Yersinia pseudotuberculosis
  source 1..40: mol_type = genomic DNA
ctccactcccacacacccatcctctagcaacattttcagt

SEQ ID NO: 51391 - protein, 583 aa, Streptococcus dysgalactiae
MNTKVKLIKASNTGARNRNALHLDLKRVAAYCRVSTDSKDQLESYKSQVDYYTNLIKNNKNWTLAGIYADEATTGTTATKRADFMRLISDCQNGDIDMIITKSISRFARNTLDTLKYVRLLKENNVGVVFEEENIDTLTMDGELLLTILSSVAQQEVENTSAHVKKGLKMKMEKGELIGFQGCLGYDYDPTTKSISINEEEAKIVRYIFKRYLEGNGGSVIGRELEEQGYLTPRGKTKWSDTTVLGIIKNEKYIGDILMGKTFTVDPITKRRLANFGESDKYHIENHHKPIISKEDFEKAQEIRLRRAQNRNTIANKDRKREKLSRQYAFSSMLECGFCGEILSRRTWHTSSIYKKINWQCVKSTKKGKKYCPHSKGIQEAAIEKAFVESYRQLCHADSTVIDDFLKIVEEEINDNTLVKDLKKIENQLNRIISQERKLVDLHLEDSIDEEVYAKKYKKLTKQKEELHDEKKTLELTIKDENSIKERLKQFKRVLENREIIEEFNRTVFESIVDKVVVGRIDKDETVHPYDLTFYFKTGVKDSQDSNNFKDKRKNAKDNDSDKLCSYKDDEDKKLCSQAKDNA

SEQ ID NO: 51392 - DNA, 50 bp, Streptococcus dysgalactiae
  source 1..50: mol_type = genomic DNA
ttatgttcccaagcaaaagacaacgcatgtagagtgcatagcgttgatac

SEQ ID NO: 51393 - DNA, 40 bp, Streptococcus dysgalactiae
  source 1..40: mol_type = genomic DNA
atttgtttccacagacgcatcacgtggagtgcgtagtgtt

SEQ ID NO: 51394 - DNA, 50 bp, Streptococcus dysgalactiae
  source 1..50: mol_type = genomic DNA
ttatgttcccaagcaaaagacaactcatgtagagtgcatagcgttgatac

SEQ ID NO: 51395 - DNA, 40 bp, Streptococcus dysgalactiae
  source 1..40: mol_type = genomic DNA
ttttggtttctcagaagcatcaggtgcagttactagtgtt

SEQ ID NO: 51396 - protein, 559 aa, Streptococcus pyogenes
MSKEKIKVYLYTRVSTSIQIEGYSLEAQKSRMKAFAIYNDYEIVGEYEDAGKSGRSIEGRIQFNRMMEDIKSGKDGVSFVLVFKLARFARNAADVLSTLQIMQDYGVNLICVDDGIDSSKDAGKLMISVLSAVAEIERENIRIQTMEGRIQKAREGKWNGGFAPYGYKLEDGKLFINEEEAIAIRTIFDQYVNTTIGANGISKYLENHGIRKIPRQNGKNPLFDAGLIRKILKNPVYNGKIAFGRRTLEKVHGTRNEYKQVEQDEYLISEGIHEAIVSDEVWQAAQVKLKSQAKKYEHVNKGKDTRTHLLSGIVKCPICGVGMFGNKCIKKKKDGTKYKDFYYYGCKHRQMIRGHKCTFSKQIREELLDDAVAEVIVKIVSNPKFASMMQEKINMKVDTSEIETEIDHYQKELRKCHSTKFKLIEEIDNLDVEDKHYKRRKQDLDDRLYRMYDKIDELESSLIDAKAKKQTIEAEKLTGDNIYKVLIYFDKLYKVMNDVERRQLITALISEIQIYEEKQPNGQWLKSITFKLPIIDDDLNISLDNDEQVECVSLLEKRS

SEQ ID NO: 51397 - DNA, 50 bp, Streptococcus pyogenes; identical to SEQ ID NO: 47432
  source 1..50: mol_type = genomic DNA

SEQ ID NO: 51398 - DNA, 40 bp, Streptococcus pyogenes; identical to SEQ ID NO: 21023
  source 1..40: mol_type = genomic DNA

SEQ ID NO: 51399 - DNA, 50 bp, Streptococcus pyogenes
  source 1..50: mol_type = genomic DNA
ccttttgactcccgcagacccatcaggtggagacggtagcacttttgtcc

SEQ ID NO: 51400 - DNA, 40 bp, Streptococcus pyogenes; identical to SEQ ID NO: 19695
  source 1..40: mol_type = genomic DNA

SEQ ID NO: 51401 - protein, 559 aa, Streptococcus pyogenes; identical to SEQ ID NO: 20396

SEQ ID NO: 51402 - DNA, 50 bp, Streptococcus pyogenes; identical to SEQ ID NO: 47432
  source 1..50: mol_type = genomic DNA

SEQ ID NO: 51403 - DNA, 40 bp, Streptococcus pyogenes; identical to SEQ ID NO: 21023
  source 1..40: mol_type = genomic DNA

SEQ ID NO: 51404 - DNA, 50 bp, Streptococcus pyogenes; identical to SEQ ID NO: 51399
  source 1..50: mol_type = genomic DNA

SEQ ID NO: 51405 - DNA, 40 bp, Streptococcus pyogenes; identical to SEQ ID NO: 19695
  source 1..40: mol_type = genomic DNA

SEQ ID NO: 51406 - protein, 587 aa, Streptococcus pyogenes; identical to SEQ ID NO: 10016

SEQ ID NO: 51407 - DNA, 50 bp, Streptococcus pyogenes; identical to SEQ ID NO: 1787
  source 1..50: mol_type = genomic DNA

SEQ ID NO: 51408 - DNA, 40 bp, Streptococcus pyogenes; identical to SEQ ID NO: 21023
  source 1..40: mol_type = genomic DNA

SEQ ID NO: 51409 - DNA, 50 bp, Streptococcus pyogenes
  source 1..50: mol_type = genomic DNA
gtgttcctatcctatggacaacacaggtggagtgcatagcgttgatacaa

SEQ ID NO: 51410 - DNA, 40 bp, Streptococcus pyogenes; identical to SEQ ID NO: 19695
  source 1..40: mol_type = genomic DNA

SEQ ID NO: 51411 - protein, 594 aa, Streptococcus pyogenes
MKKEVKVIKGDTTLKRTASGCVERSIKRVAAYCRVSTDTEDQINSYNSQVEHYTEFIQKNNEWTLAGIYADEAITGTQVDRRIDFQRLINDCMNGDIDMIITKSISRFARNTLDTLKYVRKLKEFNVAVFFEEENINTLTMDGELLLTILSSVAQQEVENISANVKKGLRMKMERGEMVGFQGCLGYDYDPETKSISINEKEAEIVRYIFRRYIEGVGGMVISRELEEQGYLSPRGNKRWTETTVLGIIKNEKYKGDLMMGKTYTVDPISKRRLDNFGEQDKFYIENHHEPIISEEDFEKAQGIRLRRSKNRNTVANNGGKREKYSRKYAFSSMLECGFCGHNLSRRNWHSSSEYTKVIWQCVNATKNGKKYCPHSKGIEEEAIEKAFMESYRQVCHNNVEITNEFLKTVEEELKDNSLAKDLKKITNQLDKILKKEKDLVELRLNESISMDIYQDKYNEIAISKEKLLAEKRTLEVTLTDEKALKKRLEGFKKLLESNKYLEEFDRAVFESIVDKIIIGGTNDEGEIDPAMITIIYKTGKKDSQDGRLFKSRRKNAKEVNEKADSKLYPQSSDEVNNLCSYPMDNTRGVCKFT

SEQ ID NO: 51412 - DNA, 50 bp, Streptococcus pyogenes
  source 1..50: mol_type = genomic DNA
ccttttgactcccgcagacccatcatgtggagtgcatagcgttgatacaa

SEQ ID NO: 51413 - DNA, 40 bp, Streptococcus pyogenes; identical to SEQ ID NO: 21023
  source 1..40: mol_type = genomic DNA

SEQ ID NO: 51414 - DNA, 50 bp, Streptococcus pyogenes
  source 1..50: mol_type = genomic DNA
ccttttgactcccgcagacccatcaggtggagtgcatagcgttgatacaa

SEQ ID NO: 51415 - DNA, 40 bp, Streptococcus pyogenes; identical to SEQ ID NO: 19695
  source 1..40: mol_type = genomic DNA

SEQ ID NO: 51416 - protein, 559 aa, Streptococcus pyogenes; identical to SEQ ID NO: 20396

SEQ ID NO: 51417 - DNA, 50 bp, Streptococcus pyogenes
  source 1..50: mol_type = genomic DNA
ccttttgactcccgcagacccatcatatagagacttgtgtgttgctacaa

SEQ ID NO: 51418 - DNA, 40 bp, Streptococcus pyogenes; identical to SEQ ID NO: 21023
  source 1..40: mol_type = genomic DNA

SEQ ID NO: 51419 - DNA, 50 bp, Streptococcus pyogenes
  source 1..50: mol_type = genomic DNA
ccttttgactcccgcagacccatcagatagagacttgtgtgttgctacaa

SEQ ID NO: 51420 - DNA, 40 bp, Streptococcus pyogenes; identical to SEQ ID NO: 19695
  source 1..40: mol_type = genomic DNA

SEQ ID NO: 51421 - protein, 559 aa, Streptococcus pyogenes; identical to SEQ ID NO: 20396

SEQ ID NO: 51422 - DNA, 50 bp, Streptococcus pyogenes; identical to SEQ ID NO: 51412
  source 1..50: mol_type = genomic DNA

SEQ ID NO: 51423 - DNA, 40 bp, Streptococcus pyogenes; identical to SEQ ID NO: 21023
  source 1..40: mol_type = genomic DNA

SEQ ID NO: 51424 - DNA, 50 bp, Streptococcus pyogenes; identical to SEQ ID NO: 51414
  source 1..50: mol_type = genomic DNA

SEQ ID NO: 51425 - DNA, 40 bp, Streptococcus pyogenes; identical to SEQ ID NO: 19695
  source 1..40: mol_type = genomic DNA

SEQ ID NO: 51426 - protein, 450 aa, Streptococcus pyogenes
MLLTILSSVAQQEVENISANVKKGLRMKMERGEMVGFQGCLGYDYDPETKSISINEKEAEIVRYIFRRYIEGVGGMVISRELEEQGYLSPRGNKRWTETTVLGIIKNEKYKGDLMMGKTYTVDPISKRRLDNFGEQDKFYIENHHEPIISEEDFEKAQGIRLRRSKNRNTVANNGGKREKYSRKYAFSSMLECGFCGHNLSRRNWHSSSEYTKVIWQCVNATKNGKKYCPHSKGIEEEAIEKAFMESYRQVCHNNVEITNEFLKTVEEELKDNSLAKDLKKITNQLDKILKKEKDLVELRLNESISMDIYQDKYNEIAISKEKLLAEKRTLEVTLTDEKALKKRLEGFKKLLESNKYLEEFDRAVFESIVDKIIIGGTNDEGEIDPAMITIIYKTGKKDSQDGRLFKSRRKNAKEVNEKADSKLYPQSSDEVNNLCSYPMDNTRGVCKFT

SEQ ID NO: 51427 - DNA, 50 bp, Streptococcus pyogenes; identical to SEQ ID NO: 51412
  source 1..50: mol_type = genomic DNA

SEQ ID NO: 51428 - DNA, 40 bp, Streptococcus pyogenes
  source 1..40: mol_type = genomic DNA
ttgtttccgcagacgcatcacgtcgagtgcgtagtgttgc

SEQ ID NO: 51429 - DNA, 50 bp, Streptococcus pyogenes; identical to SEQ ID NO: 51414
  source 1..50: mol_type = genomic DNA

SEQ ID NO: 51430 - DNA, 40 bp, Streptococcus pyogenes; identical to SEQ ID NO: 19695
  source 1..40: mol_type = genomic DNA

SEQ ID NO: 51431 - protein, 614 aa, Streptococcus pyogenes
MFCKCGIIELHRKIQKGGGAVKKDVKVIKGDTTLKRTASGCVQRSIKRVAAYCRVSTDTEDQINSYNSQVEHYTEFIQKNKEWTLAGIYADEAITGTQVDRRIDFQRLINDCMNGDIDMIITKSISRFARNTLDTLKYVRKLKEFNVAVFFEEENINTLTMDGELLLTILSSVAQQEVENISANVKKGLRMKMERGEMVGFQGCLGYDYDPETKSISINEKEAEIVRYIFRRYIEGVGGMVISRELEEQGYLSPRGNKRWTETTVLGIIKNEKYKGDLMMGKTYTVDPISKRRLDNFGEQDKFYIENHHEPIISEEDFEKAQGIRLRRSKNRNTVANNGGKREKYSRKYAFSSMLECGFCGHNLSRRNWHSSSEYTKVIWQCVNATKNGKKYCPHSKGIEEEAIEKAFMESYRQVCHNNVEITNEFLKTVEEELKDNSLAKDLKKITNQLDKILKKEKDLVELRLNESISMDIYQDKYNEIAISKEKLLAEKRTLEVTLTDEKALKKRLEGFKKLLESNKYLEEFDRSVFESIVDKIIIGGTNDEGEIDPAMITIIYKTGKKDSQDGRLFKSRRKNAKEVNEETDNKLYPHSSDEVNNLYSYPIDNTRGVCKFT

SEQ ID NO: 51432 - DNA, 50 bp, Streptococcus pyogenes; identical to SEQ ID NO: 51412
  source 1..50: mol_type = genomic DNA

SEQ ID NO: 51433 - DNA, 40 bp, Streptococcus pyogenes; identical to SEQ ID NO: 21023
  source 1..40: mol_type = genomic DNA

SEQ ID NO: 51434 - DNA, 50 bp, Streptococcus pyogenes; identical to SEQ ID NO: 51414
  source 1..50: mol_type = genomic DNA

SEQ ID NO: 51435 - DNA, 40 bp, Streptococcus pyogenes; identical to SEQ ID NO: 19695
  source 1..40: mol_type = genomic DNA

SEQ ID NO: 51436 - protein, 594 aa, Streptococcus pyogenes; identical to SEQ ID NO: 51411

SEQ ID NO: 51437 - DNA, 50 bp, Streptococcus pyogenes; identical to SEQ ID NO: 51412
  source 1..50: mol_type = genomic DNA

SEQ ID NO: 51438 - DNA, 40 bp, Streptococcus pyogenes; identical to SEQ ID NO: 51428
  source 1..40: mol_type = genomic DNA

SEQ ID NO: 51439 - DNA, 50 bp, Streptococcus pyogenes; identical to SEQ ID NO: 51414
  source 1..50: mol_type = genomic DNA

SEQ ID NO: 51440 - DNA, 40 bp, Streptococcus pyogenes; identical to SEQ ID NO: 19695
  source 1..40: mol_type = genomic DNA

SEQ ID NO: 51441 - protein, 559 aa, Streptococcus pyogenes; identical to SEQ ID NO: 20396

SEQ ID NO: 51442 - DNA, 50 bp, Streptococcus pyogenes
  source 1..50: mol_type = genomic DNA
ccttttgactcccgcagacccatcatgtagagtgcatagcgttgatacaa

SEQ ID NO: 51443 - DNA, 40 bp, Streptococcus pyogenes; identical to SEQ ID NO: 21023
  source 1..40: mol_type = genomic DNA

SEQ ID NO: 51444 - DNA, 50 bp, Streptococcus pyogenes
  source 1..50: mol_type = genomic DNA
ccttttgactcccgcagacccatcaggtagagtgcatagcgttgatacaa

SEQ ID NO: 51445 - DNA, 40 bp, Streptococcus pyogenes; identical to SEQ ID NO: 19695
  source 1..40: mol_type = genomic DNA

SEQ ID NO: 51446 - protein, 559 aa, Streptococcus pyogenes
MSKEKIKVYLYTRVSTSIQIEGYSLEAQKSRMKAFAIYNDYEIVGEYEDAGKSGKSIEGRKQFNRMMEDIKSGKDGVSFVLVFKLSRFARNAADVLSTLQIMQDYGVNLICVEDGIDSSKDAGKLMISVLSAVAEIERENIRIQTMEGRIQKAREGKWNGGFAPYGYKLEDGKLFINEEEAVAIRTIFDQYVNTTIGANGLSKYLENHGIRKIPRQNGKNPLFDAGLIRKILKNPVYNGKIAFGRRTLEKVHGTRNEYKQVEQDEYLISEGIHEAIVSDEVWQAAQVKLKSQAKKYEHVNKGKDTRTHLLSGIVKCPICGAGMFGNKCTKKKKDGTKYKDFYYYGCKHRQMIRGHKCTFRKQIREELLDDAVAEVIVKIVSNPKFASMMQEKINMKVDTSEIEKEIDNYQKELRKSHSTKFKIIEEIDNLDVEDKHYKRRKQDLDDRLYRMYDKIDELESSLIDAKAKKQTIEAEKLTGDNIYKVLIYFDKLYKVMNDVERRQLITALISEIQVYEEKQPNGQWLKSITFKLPIIDDDLNISLDNNEQVECVSLLEKWS

SEQ ID NO: 51447 - DNA, 50 bp, Streptococcus pyogenes; identical to SEQ ID NO: 47432
  source 1..50: mol_type = genomic DNA

SEQ ID NO: 51448 - DNA, 40 bp, Streptococcus pyogenes; identical to SEQ ID NO: 21023
  source 1..40: mol_type = genomic DNA

SEQ ID NO: 51449 - DNA, 50 bp, Streptococcus pyogenes; identical to SEQ ID NO: 51399
  source 1..50: mol_type = genomic DNA

SEQ ID NO: 51450 - DNA, 40 bp, Streptococcus pyogenes; identical to SEQ ID NO: 19695
  source 1..40: mol_type = genomic DNA

SEQ ID NO: 51451 - protein, 559 aa, Streptococcus pyogenes
MSKEKIKVYLYTRVSTSIQIDGYSLEAQKSRMKAFALYNDYEIVGEYEDAGKSGKSIEGRIQFTRMMEDIKSGKDGVSFVLVFKLSRFARNAADVLSTLQTMQDFGVNLICVEDGIDSSKDAGKLMISVLSAVAEIERENIRVQTMEGRIQKAREGKWNGGFAPYGYQLVDGKLFINEEEAVAIRTIFDQYVNTNIGANGLSKYLENHGIRKIPRQNGKNPLFDAGLIRKILKNPVYNGKIAFGRRTLEKVHGTRNEYKQVEQDEYLIAEGIHEAIISDELWQAAQVKLKSQAKKYEHVNKGKDVRTHLLSGIVKCPICGVGMFGNKCIKKKKDGTKYKDFYYYGCKHRQMIRGHKCTFSKQIREELLDDAVAEIIIKIVSNPKFASIMQEKINMKVDTSEIEKEIDNYQKELRKSHSTKFKLIEEIDNLDVDDKHYKRRKQDLDDRLYRMYDKIEELESFLIDAKAKKQTIEAEKLTGDNIYKVLIYFDKLYNVMNDVERRQLITSLISEIQIYKEKQPNGQWLKSITFKLPIIDEDLNISLDNDEHVECVSLLEKRS

SEQ ID NO: 51452 - DNA, 50 bp, Streptococcus pyogenes
  source 1..50: mol_type = genomic DNA
ccttttgactcccgcagacccatcacgtagagacggtagcattattgtcc

SEQ ID NO: 51453 - DNA, 40 bp, Streptococcus pyogenes; identical to SEQ ID NO: 51428
  source 1..40: mol_type = genomic DNA

SEQ ID NO: 51454 - DNA, 50 bp, Streptococcus pyogenes
  source 1..50: mol_type = genomic DNA
ccttttgactcccgcagacccatcaggtagagacggtagcattattgtcc

SEQ ID NO: 51455 - DNA, 40 bp, Streptococcus pyogenes; identical to SEQ ID NO: 19695
  source 1..40: mol_type = genomic DNA

SEQ ID NO: 51456 - protein, 559 aa, Streptococcus pyogenes
MSKEKIKVYLYTRVSTSIQIDGYSLEAQKSRMKAFALYNDYEIVGEYEDAGKSGKSIEGRVQFTRMMEDIKSGKDGVSFVLVFKLSRFARNAADVLSTLQIMQDFGVNLICVEDGIDSSKDAGKLMISVLSAVAEIERENIRVQTMEGRIQKAREGKWNGGFAPYGYQLIDGKLLINEEEAIAIRTIFDQYVNTSIGANGISKYLENHGIRKIPRQNGKNPLFDAGLIRKILKNPVYNGKIAFGRRTLEKVHGTRNEYKQVEQDEYLISEGIHEAIVSDEVWQAAQVKLKSQAKKYEHVNKGKDTRTHLLSGIVKCPICGVGMFGNKCIKKKKDGTKYKDFYYYGCKHRQMIRGHKCTFSKQIREELLDDAVAEVIIKLVSNPKFASMMQEKINMKVDTSEIEKEIDNYQKELRKSHSTKFKLIEEIDNLDVEDKHYKRRKQDLDDRLYRMYDKIEELESLLIDAKAKKQTIEAEKLTGDNIYKVLIYFDKLYKVMNDVERRQLISALISEIQIYEEKQPNGQWLKSITFKLPIIDENINIGLDNDEHVECVSLLEKRS

SEQ ID NO: 51457 - DNA, 50 bp, Streptococcus pyogenes; identical to SEQ ID NO: 47432
  source 1..50: mol_type = genomic DNA

SEQ ID NO: 51458 - DNA, 40 bp, Streptococcus pyogenes; identical to SEQ ID NO: 21023
  source 1..40: mol_type = genomic DNA

SEQ ID NO: 51459 - DNA, 50 bp, Streptococcus pyogenes; identical to SEQ ID NO: 51399
  source 1..50: mol_type = genomic DNA

SEQ ID NO: 51460 - DNA, 40 bp, Streptococcus pyogenes; identical to SEQ ID NO: 19695
  source 1..40: mol_type = genomic DNA

SEQ ID NO: 51461 - protein, 594 aa, Streptococcus pyogenes
MKKEVKVIKGDTTLKRTASGCVERSIKRVAAYCRVSTDTEDQINSYNSQVEHYTEFIQKNNEWTLAGIYADEAITGTQVDRRIDFQRLINDCMNGDIDMIITKSISRFARNTLDTLKYVRKLKEFNVAVFFEEENINTLTMDGELLLTILSSVAQQEVENISANVKKGLRMKMERGEMVGFQGCLGYDYDPETKSISINEKEAEIVRYIFRRYIEGVGGMVISRELEEQGYLSPRGNKKWTETTVLGIIKNEKYKGDLMMGKTYTVDPISKRRLDNYGEQDKFYIENHHEPIISEEDFEKAQGIRLRRSKNRNTVANNGGKREKYSRKYAFSSMLECGFCGHNLSRRNWHSSSEYTKVIWQCVNATKNGKKYCPHSKGIEEEAIEKAFMESYRQVCHNNVEITNEFLKTVEEELKDNSLAKDLKKITNQLDKVLKKEKDLVELRLNESISMDIYQDKYNEIAISKEKLLAEKRTLEVTLTDEKALKKRLEGFKKLLESNKYLEEFDRAVFESIVDKIIIGGTNDEGEIDPAMITIIYKTGKKDSQDGRLFKSRRKNAKEVDEGTDNKLYPQSSDEVNNLCSYPMDNTRGVCKFT

SEQ ID NO: 51462 - DNA, 50 bp, Streptococcus pyogenes; identical to SEQ ID NO: 51412
  source 1..50: mol_type = genomic DNA

SEQ ID NO: 51463 - DNA, 40 bp, Streptococcus pyogenes; identical to SEQ ID NO: 51428
  source 1..40: mol_type = genomic DNA

SEQ ID NO: 51464 - DNA, 50 bp, Streptococcus pyogenes; identical to SEQ ID NO: 51414
  source 1..50: mol_type = genomic DNA

SEQ ID NO: 51465 - DNA, 40 bp, Streptococcus pyogenes; identical to SEQ ID NO: 19695
  source 1..40: mol_type = genomic DNA

SEQ ID NO: 51466 - protein, 594 aa, Streptococcus pyogenes
MKKDVKVIKGDTTLKRTASGCVERSIKRVAAYCRVSTDTEDQINSYNSQVEHYTEFIQKNKEWTLAGIYADEAITGTQVDRRIDFQRLINDCMNGDIDMIITKSISRFARNTLDTLKYVRKLKEFNVAVFFEEENINTLTMDGELLLTILSSVAQQEVENISANVKKGLRMKMERGEMVGFQGCLGYDYDSETKSISINEKEAEIVRYIFRRYIEGVGGMVISRELEEQGYLSPRGNKRWTETTVLGIIKNEKYKGDLMMGKTYTVDPISKRRLDNFGEQDKFYIENHHEPIISEEDFEKAQGIRLRRSKNRNTVANNGGKREKYSRKYAFSSMLECGFCGHNLSRRNWHSSSEYTKVIWQCVNATKNGKKYCPHSKGIEEEAIEKAFMESYRQVCHNNVEITNEFLKTVEEELKDNSLAKDLKKITNQLDKILKKEKDLVELRLNESISMDIYQDKYNEIAISKEKLLAEKRTLEVTLTDEKALKKRLEGFKKLLESNKYLEEFDRAVFESIVDKIIIGGTNDEGEIDPAMITIIYKTGKKDSQDGRLFKSRRKNAKEVNEETGGKLYPQSSDEVNNLYSYPIDNTRGVCKFT

SEQ ID NO: 51467 - DNA, 50 bp, Streptococcus pyogenes; identical to SEQ ID NO: 51412
  source 1..50: mol_type = genomic DNA

SEQ ID NO: 51468 - DNA, 40 bp, Streptococcus pyogenes; identical to SEQ ID NO: 21023
  source 1..40: mol_type = genomic DNA

SEQ ID NO: 51469 - DNA, 50 bp, Streptococcus pyogenes; identical to SEQ ID NO: 51414
  source 1..50: mol_type = genomic DNA

SEQ ID NO: 51470 - DNA, 40 bp, Streptococcus pyogenes; identical to SEQ ID NO: 19695
  source 1..40: mol_type = genomic DNA

SEQ ID NO: 51471 - protein, 614 aa, Streptococcus pyogenes
MFCKCGIIELHRKIQKGGSAVKKDVKVIKGDTTLKRTASGCVQRSIKRVAAYCRVSTDTEDQINSYNSQVEHYTEFIQKNKEWTLAGIYADEAITGTQVDRRIDFQRLINDCMNGDIDMIITKSISRFARNTLDTLKYVRKLKEFNVAVFFEEENINTLTMDGELLLTILSSVAQQEVENISANVKKGLRMKMERGEMVGFQGCLGYDYDPETKSISINEKEAEIVRYIFRRYIEGVGGMVISRELEEQGYLSPRGNKRWTETTVLGIIKNEKYKGDLMMGKTYTVDPISKRRLDNFGEQDKFYIENHHEPIISEEDFEKAQGIRLRRSKNRNTVANNGGKREKYSRKYAFSSMLECGFCGHNLSRRNWHSSSEYTKVIWQCVNATKNGKKYCPHSKGIEEEAIEKAFMESYRQVCHNNVEITNEFLKTVEEELKDNSLAKDLKKITNQLDKILKKEKDLVELRLNESISMDIYQDKYNEIAISKEKLLAEKRTLEVTLTDEKALKKRLEGFKKLLESNKYLEEFDRAVFESIVDKIIIGGTNDEGEIDPAMITIIYKTGKKDSQDGRLFKSRRKNAKEVNEETDNKLYPHSSDEVNNLYSYPIDNTRGVCKFT

SEQ ID NO: 51472 - DNA, 50 bp, Streptococcus pyogenes; identical to SEQ ID NO: 51412
  source 1..50: mol_type = genomic DNA

SEQ ID NO: 51473 - DNA, 40 bp, Streptococcus pyogenes; identical to SEQ ID NO: 21023
  source 1..40: mol_type = genomic DNA

SEQ ID NO: 51474 - DNA, 50 bp, Streptococcus pyogenes; identical to SEQ ID NO: 51414
  source 1..50: mol_type = genomic DNA

SEQ ID NO: 51475 - DNA, 40 bp, Streptococcus pyogenes; identical to SEQ ID NO: 19695
  source 1..40: mol_type = genomic DNA

SEQ ID NO: 51476 - protein, 590 aa, Streptococcus pyogenes
MNTKVKLIKASNTGARNRNALDLDLKRVAAYCRVSTDSKDQLESYKSQVDYYTNLIKNNKNWTLAGIYADEATTGTTATKRADFMRLISDCQNGDIDMIITKSISRFARNTLDTLKYVRLLKENNVGVVFEEENIDTLTMDGELLLTILSSVAQQEVENTSAHVKKGLKMKMEKGELIGFQGCLGYDYDPITKSISINEEEAKIVRYIFKRYLEGNGGSVIGRELEEQGYLTPRGKTKWSDTTVLGIIKNEKYIGDILMGKTFTVDPITKRRLANFGESDKYHIENHHEPIISKEDFEKAQEIRLRRAQNRNTIANKDRKREKLSRQYAFSSMLECGFCGEILSRRTWHTSSIYKKINWQCVRSTKKGKKYCPHSKGIQEAAIEKAFVESYRQLCHADSTVIDDFLKIVEEEINDNTLVKVLKKIESQLNRIISQERKLVDLHLEDSIDEEVYAKKYKKLTKQKEELLDEKKTLELTIKDENSIKERLKQFKKVLENREIIEEFNRTVFESIVDKVVVGRIDKDGTVHPYDLTFYFKTGVKDSQDSNNFKDKRKNAKDNDSEKLCSYKNDEDKKLCSQSKDNARGVCKFT

SEQ ID NO: 51477 - DNA, 50 bp, Streptococcus pyogenes
  source 1..50: mol_type = genomic DNA
ccttttgactcccgcagacccatcatgtggagactatagcgttgatacaa

SEQ ID NO: 51478 - DNA, 40 bp, Streptococcus pyogenes; identical to SEQ ID NO: 21023
  source 1..40: mol_type = genomic DNA

SEQ ID NO: 51479 - DNA, 50 bp, Streptococcus pyogenes
  source 1..50: mol_type = genomic DNA
ccttttgactcccgcagacccatcaggtggagactatagcgttgatacaa

SEQ ID NO: 51480 - DNA, 40 bp, Streptococcus pyogenes; identical to SEQ ID NO: 19695
  source 1..40: mol_type = genomic DNA

SEQ ID NO: 51481 - protein, 590 aa, Streptococcus pyogenes
MNTKVKLIKASNTGARNRNALHLDLKRVAAYCRVSTDSKDQLESYKSQVDYYTNLIKNNKNWTLAGIYADEATTGTTATKRADFMRLISDCQNGDIDMIITKSISRFARNTLDTLKYVRLLKENNVGVVFEEENIDTLTMDGELLLTILSSVAQQEVENTSAHVKKGLKMKMEKGELIGFQGCLGYDYDPITKSISINEEEAKIVRYIFKRYLEGNGGSVIGRELEEQGYLTPRGKTKWSDTTVLGIIKNEKYIGDILMGKTFTVDPITKRRLANFGESDKYHIENHHEPIISKEDFEKAQEIRLRRAQNRNTIANKDRKREKLSRQYAFSSMLECGFCGEILSRRTWHTSSIYKKINWQCVKSTKKGKKYCPHSKGIQEAAIEKAFVESYRQLCHADSTVIDDFLKIVEEEINDNTLVKDLKKLENQLNRIISQERKLVDLHLEDSIDEEVYAKKYKKLTKQKEELLDEKKTLELTIKDEDSIKERLKQFKKVLENKEIIEEFNRTVFESIVDKVVVGRIDKDGTVHPYDLTFYFKTGVKDSQDSNNFKDKRKNAKDNDINKLCSYKNDEDKKLCSQSKDNARGVCKFT

SEQ ID NO: 51482 - DNA, 50 bp, Streptococcus pyogenes
  source 1..50: mol_type = genomic DNA
ccttttgactcccgcagacccatcatgtggaagctatagcgttgatacaa

SEQ ID NO: 51483 - DNA, 40 bp, Streptococcus pyogenes; identical to SEQ ID NO: 21023
  source 1..40: mol_type = genomic DNA

SEQ ID NO: 51484 - DNA, 50 bp, Streptococcus pyogenes
  source 1..50: mol_type = genomic DNA
ccttttgactcccgcagacccatcaggtggaagctatagcgttgatacaa

SEQ ID NO: 51485 - DNA, 40 bp, Streptococcus pyogenes; identical to SEQ ID NO: 19695
  source 1..40: mol_type = genomic DNA

SEQ ID NO: 51486 - protein, 590 aa, Streptococcus pyogenes
MNTKVKLIKASNTGARNRNALHLDLKRVAAYCRVSTDSKDQLESYKSQVDYYTNLIKNNKNWTLAGIYADEATTGTTATKRADFMRLISDCQNGDIDMIITKSISRFARNTLDTLKYVRLLKENNVGVVFEEENIDTLTMDGELLLTILSSVAQQEVENTSAHVKKGLKMKMEKGELIGFQGCLGYDYDPITKSISINEEEAKIVRYIFKRYLEGNGGSVIGRELEEQGYLTPRGKTKWSDTTVLGIIKNEKYIGDILMGKTFTVDPITKRRLANFGESDKYHIENHHEPIISKEDFEKAQEIRLRRAQNRNTIANKDRKREKLSRQYAFSSMLECGFCGEILSRRTWHTSSIYKKINWQCVRSTKKGKKYCPHSKGIQEAAIEKAFVESYRQLCHADSTVIDDFLKIVEEEINDNTLVKDLKKIENQLNRIISQERKLVDLHLEDSIDEEVYAKKYKKLTKQKEELLDEKKTLELTIKDENSIKERLKQFKKILENREIIEEFNRTVFESIVDKVVVGRIDKDGTVHPYDLTFYFKTGVKDSQDSNNFKDKRKNAKDNDSEKLCSYKNDEDKKLCSQAKDNARGVCKFT

SEQ ID NO: 51487 - DNA, 50 bp, Streptococcus pyogenes; identical to SEQ ID NO: 51477
  source 1..50: mol_type = genomic DNA

SEQ ID NO: 51488 - DNA, 40 bp, Streptococcus pyogenes; identical to SEQ ID NO: 21023
  source 1..40: mol_type = genomic DNA

SEQ ID NO: 51489 - DNA, 50 bp, Streptococcus pyogenes; identical to SEQ ID NO: 51479
  source 1..50: mol_type = genomic DNA

SEQ ID NO: 51490 - DNA, 40 bp, Streptococcus pyogenes; identical to SEQ ID NO: 19695
  source 1..40: mol_type = genomic DNA

SEQ ID NO: 51491 - protein, 590 aa, Streptococcus pyogenes
MNTKVKVIKASNTGARNRNSIHLDLKRVAAYCRVSTDSKDQLESYKSQVDYYTNLIKNNKSWTLAGIYADEATTGTTATKRADFIRLISDCQNGDIDMIITKSISRFARNTLDTLKYVRLLKENNVGVVFEEENIDTLTMDGELLLTILSSVAQQEVENTSAHVKKGLKMKMEKGELIGFQGCLGYDYDPTTKSISINEEEAKIVRYIFKRYLEGNGGSVIGRELEEQGYLTPRGKTKWSDTTVLGIIKNEKYIGDILMGKTFTVDPITKRRLANFGESDKYHIENHHEPIISREDFEKAQEIRLRRAQNRNTIANKDRKREKLSRQYAFSSMLECGFCGEILSRRTWHTSSIYKKINWQCVKSTKKGKKYCPHSKGIQEAAIEKAFVESYRQLCHADSTVIDDFLKIVEEEINDNTLVKDLKKLENQLNRIISQERKLVDLHLEDSIDEEVYAKKYKKLTKQKEELLDEKKTLELTIKDENSIKERLKQFKKVLENKEIIEEFNRTVFESIVDKVVVGRIDKDGTVHPYDLTFYFKTGDKDSQDSNNFKDKRKNAKDNDINKLCSYKDDEDKKLCSQSKDNTRGVCKFT

SEQ ID NO: 51492 - DNA, 50 bp, Streptococcus pyogenes; identical to SEQ ID NO: 51477
  source 1..50: mol_type = genomic DNA

SEQ ID NO: 51493 - DNA, 40 bp, Streptococcus pyogenes; identical to SEQ ID NO: 51428
  source 1..40: mol_type = genomic DNA

SEQ ID NO: 51494 - DNA, 50 bp, Streptococcus pyogenes; identical to SEQ ID NO: 51479
  source 1..50: mol_type = genomic DNA

SEQ ID NO: 51495 - DNA, 40 bp, Streptococcus pyogenes; identical to SEQ ID NO: 19695
  source 1..40: mol_type = genomic DNA

SEQ ID NO: 51496 - protein, 559 aa, Streptococcus pyogenes
MSKEKIKVYLYTRVSTSIQIEGYSLEAQKSRMKAFAIYNDYEIVGEYEDAGKSGKSIEGRKQFNRMMEDIKSGKDGVSFVLVFKLSRFARNAADVLSTLQIMQDYGVNLICVEDGIDSSKDAGKLMISVLSAVAEIERENIRIQTMEGRIQKAREGKWNGGFAPYGYKLEDGKLFINEEEAVAIRTIFDQYVNTTIGANGLSKYLENHGIRKIPRQNGKNPLFDAGLIRKILKNPVYNGKIAFGRRTLEKVHGTRNEYKQVEQDEYLISEGIHEAIVSDEVWQAAQVKLKSQAKKYEHVNKGKDTRTHLLSGIVKCPICGAGMFGNKCTKKKKDGTKYKDFYYYGCKHRQMIRGHKCTFRKQIREELLDDAVAEVIVKIVSNPKFASMMQEKINMKVDTSEIEKEIDNYQKELRKSHSTKFKIIEEIDNLDVEDKHYKRRKQDLDDRLYRMYDKIDELEPSLIDAKAKKQTIEAEKLTGDNIYKVLIYFDKLYKVMNDVERRQLITALISEIQVYEEKQPNGQWLKSITFKLPIIDDDLNISLDNNEQVECVSLLEKRS

SEQ ID NO: 51497 - DNA, 50 bp, Streptococcus pyogenes; identical to SEQ ID NO: 47432
  source 1..50: mol_type = genomic DNA

SEQ ID NO: 51498 - DNA, 40 bp, Streptococcus pyogenes; identical to SEQ ID NO: 21023
  source 1..40: mol_type = genomic DNA

SEQ ID NO: 51499 - DNA, 50 bp, Streptococcus pyogenes; identical to SEQ ID NO: 51399
  source 1..50: mol_type = genomic DNA

SEQ ID NO: 51500 - DNA, 40 bp, Streptococcus pyogenes; identical to SEQ ID NO: 19695
  source 1..40: mol_type = genomic DNA

SEQ ID NO: 51501 - protein, 559 aa, Streptococcus pyogenes
MSKEKIKVYLYTRVSTSIQIDGYSLEAQKSRMKAFALYNDYEIVGEYEDAGKSGKSIEGRIQFTRMMEDIKSGKDGVSFVLVFKLSRFARNAADVLSTLQIMQDFGVNLICVEDGIDSSKDAGKLMISVLSAVAEIERENIRVQTMEGRIQKAREGKWNGGFAPYGYKLEDGKLFINEEEAVAIRTIFDQYVNTSIGANGISKYLENHGIRKIPRQNGKNPLFDAGLIRKILKNPVYNGKIAFGRRTLEKVHGTRNEYKQVEQDEYLISEGIHEAIVSDEVWQAAQVKLKSQAKKYEHVNKGKDTRTHLLSGIVKCPICGVGMFGNKCIKKKKDGTKYKDFYYYGCKHRQMIRGHKCNFSKQIREELLDDAVAEVIIKLVSNPKFASMMQGKINMKVDTSAIENEIDNYQKELRKSHSTKFKLIEEIDNLDVDDKHYKRRKQDLDDRLYRMYDKIEELESLLIDAKAKKQTIEAEKLTGDNIYKVLIYFDKLYKVMNDVERRQLISALISEIQIYEEKQPNGQWLKSITFKLPIIDEDLNISLDNDEQVECVSLLEKRS

SEQ ID NO: 51502 - DNA, 50 bp, Streptococcus pyogenes
  source 1..50: mol_type = genomic DNA
ccttttgactcccgcagacccatcacgtggagacggtagcattattgtcc

SEQ ID NO: 51503 - DNA, 40 bp, Streptococcus pyogenes; identical to SEQ ID NO: 21023
  source 1..40: mol_type = genomic DNA

SEQ ID NO: 51504 - DNA, 50 bp, Streptococcus pyogenes
  source 1..50: mol_type = genomic DNA
ccttttgactcccgcagacccatcaggtggagacggtagcattattgtcc

SEQ ID NO: 51505 - DNA, 40 bp, Streptococcus pyogenes; identical to SEQ ID NO: 19695
  source 1..40: mol_type = genomic DNA

SEQ ID NO: 51506 - protein, 559 aa, Streptococcus pyogenes
MSKEKIKVYLYTRVSTSIQIEGYSLEAQKSRMKSFAIYNDYEIVGEYEDAGKSGKSIEGRKQFNRMMEDIKSGKDGVSFVLVFKLSRFARNAADVLSTLQTMQDYGVNLICVEDGIDSSKDAGKLMISVLSAVAEIERENIRIQTMEGRIQKAREGKWNGGFAPYGYKLEDGKLFINEEEAVAIRTIFDQYVNTTIGANGLSKYLENHGIRKIPRQNGKNPLFDAGLIRKILKNPVYNGKIAFGRRTLEKVHGTRNEYKQVEQDEYLISEGIHEAIVSDEVWQAAQVKLKSQAKKYEHVNKGKDTRTHLLSGIVKCPICGVGMFGNKCTKKKKDGTKYKDFYYYGCKHRQMIRGHKCTFRKQIREELLDDAVAEVIVKIVSNPKFASMMQEKINMKVDTSEIEKEIDNYQKELRKSHSTKFKLIEEIDNLDVEDKHYKRRKQDLDGRLYRMYDKIDELESSLIDAKAKKQTIEAEKLTGDNIYKILIYFDKLYKVMNDVERRQLITALISEIQVYEEKQPNGQWLKSITFKLPIIDDDLNISLDNNEQVECVSLLEKRS

SEQ ID NO: 51507 - DNA, 50 bp, Streptococcus pyogenes; identical to SEQ ID NO: 47432
  source 1..50: mol_type = genomic DNA

SEQ ID NO: 51508 - DNA, 40 bp, Streptococcus pyogenes; identical to SEQ ID NO: 21023
  source 1..40: mol_type = genomic DNA

SEQ ID NO: 51509 - DNA, 50 bp, Streptococcus pyogenes; identical to SEQ ID NO: 51399
  source 1..50: mol_type = genomic DNA

SEQ ID NO: 51510 - DNA, 40 bp, Streptococcus pyogenes; identical to SEQ ID NO: 19695
  source 1..40: mol_type = genomic DNA

SEQ ID NO: 51511 - protein, 590 aa, Streptococcus pyogenes
MNTKVKLIKASNTGARNRNALHLDLKRVAAYCRVSTDSKDQLESYKSQVDYYTNLIKNNKNWTLAGIYADEATTGTTASKRADFMRLISDCQNGDIDMIITKSISRFARNTLDTLKYVRLLKENNVGVVFEEENIDTLTMDGELLLTILSSVAQQEVENTSAHVKKGLKMKMEKGELIGFQGCLGYDYDPITKSISINEEEAKIVRYIFKRYLEGNGGSVIGRELEEQGYLTPRGKTKWSDTTVLGVIKNEKYIGDILMGKTFTVDPITKRRLANFGESDKYHIENHHEPIISKEDFEKAQEIRLRRAQNRNTIANKDRKREKLSRQYAFSSMLVCGFCGEILSRRTWHTSSIYKKINWQCVKSTKKGKKYCPHSKGIQEAAIEKAFVESYRQLCHADSTVIDDFLKIVEEEINDDTLVKDLKKLENQLNRIISQERKLVDLHLEDSIDEEVYAKKYKKLTKQKEELLDEKKTLELTIKDENSIKERLKQFKKVLENKEIIEEFNRTVFESIVDKVVVGRIDKDGTVHPYDLTFYFKTGVKDSQDSNNFKDKRKNAKDNDINKLCSYKNDEDKKLCSQSKDNARGVCKFT

SEQ ID NO: 51512 - DNA, 50 bp, Streptococcus pyogenes; identical to SEQ ID NO: 51477
  source 1..50: mol_type = genomic DNA

SEQ ID NO: 51513 - DNA, 40 bp, Streptococcus pyogenes; identical to SEQ ID NO: 51428
  source 1..40: mol_type = genomic DNA

SEQ ID NO: 51514 - DNA, 50 bp, Streptococcus pyogenes; identical to SEQ ID NO: 51479
  source 1..50: mol_type = genomic DNA

SEQ ID NO: 51515 - DNA, 40 bp, Streptococcus pyogenes; identical to SEQ ID NO: 19695
  source 1..40: mol_type = genomic DNA

SEQ ID NO: 51516 - protein, 594 aa, Streptococcus pyogenes
MKKEVKVIKGDTTLKRTASGCVERSIKRVAAYCRVSTDTEDQINSYNSQVEHYTEFIQKNNEWTLAGIYADEAITGTQVDRRIDFQRLINDCMNGDIDMIITKSISRFARNTLDTLKYVRKLKEFNVAVFFEEENINTLTMDGELLLTILSSVAQQEVENISANVKKGLRMKMERGEMVGFQGCLGYDYDPETKSISINEKEAEIVRYIFRRYIEGVGGMVISRELEEQGYLSPRGNKRWTETTVLGIIKNEKYKGDLMMGKTYTVDPISKRRLDNFGEQDKFYIENHHEPIISEEDFEKAQGIRLRRSKNRNTVANNGGKREKYSRKYAFSSMLECGFCGYNLSRRNWHSSSEYTKVIWQCVNATKNGKKYCPHSKGIEEEAIEKAFMESYRQVCHNNVEITNEFLKTVEEELKDNSLSKDLKKISNQLDKILKKEKDLVELRLNESISMDIYQDKYNEIAISKEKLLAEKRTLEVTLTDEKALKKRLEGFKKLLESNKYLEEFDRAVFESIVDKIIIGGTNDEGEIDPAMITIIYKTGKKDSQDGRLFKSKRKNAKEVNEKADSKLYPQSSDEVNNLCSYPMDNTRGVCKFT

SEQ ID NO: 51517 - DNA, 50 bp, Streptococcus pyogenes; identical to SEQ ID NO: 51442
  source 1..50: mol_type = genomic DNA

SEQ ID NO: 51518 - DNA, 40 bp, Streptococcus pyogenes; identical to SEQ ID NO: 21023
  source 1..40: mol_type = genomic DNA

SEQ ID NO: 51519 - DNA, 50 bp, Streptococcus pyogenes; identical to SEQ ID NO: 51444
  source 1..50: mol_type = genomic DNA

SEQ ID NO: 51520 - DNA, 40 bp, Streptococcus pyogenes; identical to SEQ ID NO: 19695
  source 1..40: mol_type = genomic DNA

SEQ ID NO: 51521 - protein, 590 aa, Streptococcus pyogenes
MNTKVKLIKASNTGARNRNALDLDLKRVAAYCRVSTDSKDQLESYKSQVDYYTNLIKNNKNWTLAGIYADEATTGTTATKRADFMRLISDCQNGDIDMIITKSISRFARNTLDTLKYVRLLKENNVGVVFEEENIDTLTMDGELLLTILSSVAQQEVENTSAHVKKGLKMKMEKGELIGFQGCLGYDYDPITKSISINEEEAKIVRYIFKRYLEGNGGSVIGRELEEQGYLTPRGKTKWSDTTVLGIIKNEKYIGDILMGKTFTVDPITKRRLANFGEFDKYHIENHHEPIISKEDFEKAQEIRLRRAQNRNTIANKDRKREKLSRQYAFSSMLECGFCGEILSRRTWHTSSIYKKINWQCVKSTKKGKKYCPHSKGIQEAAIEKAFVESYRQLCHADSTVIDDFLKIVEEEINDNTLVKDLKKIENQLNRIISQERKLVDLHLEDSIDEEVYAKKYKKLTKQKEELLDEKKTLELTIKDENSIKERLKQFKKVLENREIIEEFNRTVFESIVDKVVVGRIVKDGTVHPYDLTFYFKTGIKDSQDSNNFKDKRKNAKDNDSDKLWSYKNDEDKKLCSQAQDNARGVCKFT

SEQ ID NO: 51522 - DNA, 50 bp, Streptococcus pyogenes; identical to SEQ ID NO: 51482
  source 1..50: mol_type = genomic DNA

SEQ ID NO: 51523 - DNA, 40 bp, Streptococcus pyogenes; identical to SEQ ID NO: 21023
  source 1..40: mol_type = genomic DNA

SEQ ID NO: 51524 - DNA, 50 bp, Streptococcus pyogenes; identical to SEQ ID NO: 51484
  source 1..50: mol_type = genomic DNA

SEQ ID NO: 51525 - DNA, 40 bp, Streptococcus pyogenes; identical to SEQ ID NO: 19695
  source 1..40: mol_type = genomic DNA

SEQ ID NO: 51526 - protein, 594 aa, Streptococcus pyogenes
MKKEVKVIKGDTTLKRTASGCVERSIKRVAAYCRVSTDTEDQINSYNSQVEHYTEFIQKNNEWTLAGIYADEAITGTQVDRRIDFQRLINDCMNGDIDMIITKSISRFARNTLDTLKYVRKLKEFNVAVFFEEENINTLTMDGELLLTILSSVAQQEVENISANVKKGLRMKMERGEMVGFQGCLGYDYDPETKSISINEKEAEIVRYIFRRYIEGVGGMVISRELEEQGYLSPRGNKRWTETTVLGIIKNEKYKGDLMMGKTYTVDPISKRRLDNFGEQDKFYIENHHEPIISEEDFEKAQGIRLRRSKNRNTVANNGGKREKYSRKYAFSSMLECGFCGYNLSRRNWHSSSEYTKVIWQCVNATKNGKKYCPHSKGIEEEAIEKAFMESYRQVCHNNVEITNEFLKTVEEELKDNSLSKDLKKISNQLDKILKKEKDLVELRLNESISMDIYQDKYNEIAISKEKLLAEKRTLEVTLTDEKALKKRLEGFKKLLESNKYLEEFDRAVFESIVDKIIIGGTNDEGEIDPAMITIIYKTGKKDSQDGRLFKSRRKNAKEVNEKADSKLYPQSSDEVNNLYSYPIDNTRGVCKFT

SEQ ID NO: 51527 - DNA, 50 bp, Streptococcus pyogenes; identical to SEQ ID NO: 51442
  source 1..50: mol_type = genomic DNA

SEQ ID NO: 51528 - DNA, 40 bp, Streptococcus pyogenes; identical to SEQ ID NO: 51428
  source 1..40: mol_type = genomic DNA

SEQ ID NO: 51529 - DNA, 50 bp, Streptococcus pyogenes; identical to SEQ ID NO: 51444
  source 1..50: mol_type = genomic DNA

SEQ ID NO: 51530 - DNA, 40 bp, Streptococcus pyogenes; identical to SEQ ID NO: 19695
  source 1..40: mol_type = genomic DNA

SEQ ID NO: 51531 - protein, 590 aa, Streptococcus pyogenes
MNTKVKLIKASNTGARNRNALHLDLKRVAAYCRVSTDSKDQLESYKSQVDYYTNLIKNNKNWTLAGIYADEATTGTTATKRADFMRLISDCQNGDIDMIITKSISRFARNTLDTLKYVRLLKENNVGVVFEEENIDTLTMDGELLLTILSSVAQQEVENTSAHVKKGLKMKMEKGELIGFQGCLGYDYDPITKSISINEEESKIVRYIFKRYLEGNGGSVIGRELEEQGYLTPRGKTKWSDTTVLGIIKNEKYIGDILMGKTFTVDPITKRRLANFGESDKYHIENHHEPIISREDFEKAQEIRLRRAQNRNTIANKDRKREKLSRQYAFSSMLECGFCGEILSRRTWHTSSIYKKINWQCVRSTKKGKKYCPHSKGIQEAAIEKAFVESYRQLCHADSTVIDDFLKIVEEEINDNTLVKDLKKIENQLNRIISQERKLVDLHLEDNIDEEVYAKKYKKLTKQKEELLDEKKTLELTIKDEDSIKERLKQFKKVLENKEIIEEFNGTVFESIVDKVVVGRIDKDGTVHPYDLTFYFKTGVKDSQDSNNFKDKRKNAKDNDINKLCSYKNDEDKKLCSQSKDNARGVCKFT

SEQ ID NO: 51532 - DNA, 50 bp, Streptococcus pyogenes; identical to SEQ ID NO: 51477
  source 1..50: mol_type = genomic DNA

SEQ ID NO: 51533 - DNA, 40 bp, Streptococcus pyogenes; identical to SEQ ID NO: 21023
  source 1..40: mol_type = genomic DNA

SEQ ID NO: 51534 - DNA, 50 bp, Streptococcus pyogenes; identical to SEQ ID NO: 51479
  source 1..50: mol_type = genomic DNA

SEQ ID NO: 51535 - DNA, 40 bp, Streptococcus pyogenes; identical to SEQ ID NO: 19695
  source 1..40: mol_type = genomic DNA

SEQ ID NO: 51536 - protein, 559 aa, Streptococcus pyogenes
MSKEKIKVYLYTRVSTSIQIDGYSLEAQKSRMKAFALYNDYEIVGEYEDAGKSGKSIEGRIQFTRMMEDIKSGKDGVSFVLVFKLSRFARNAADVLSTLQTMQDFGVNLICVEDGIDSSKDAGKLMISVLSAVAEIERENIRVQTMEGRIQKAREGKWNGGFAPYGYQLVDGKLFINEEEAVAIRTIFDQYVNTNIGANGLSKYLENHGIRKIPRQNGKNPLFDAGLIRKILKNPVYNGKIAFGRRTLEKVHGTRNEYKQVEQDEYLIAEGIHEAIISDELWQAAQVKLKSQAKKYEHVNKGKDVRTHLLSGIVKCPICGVGMFGNKCIKKKKDGTKYKDFYYYGCKHRQMIRGHKCTFSKQIREELLDDAVAEIIIKIVSNPQFASIMQEKINMKVDTSEIEKEIDNYQKELRKSHSTKFKLIEEIDNLDVDDKHYKRRKQDLDDRLYRMYDKIEELESFLIDAKAKKQTIEAEKLTGDNIYKVLIYFDKLYNVMNDVERRQLITSLISEIQIYKEKQPNGQWLKSITFKLPIIDEDLNISLDNDEHVECVSLLEKRS

SEQ ID NO: 51537 - DNA, 50 bp, Streptococcus pyogenes; identical to SEQ ID NO: 51502
  source 1..50: mol_type = genomic DNA

SEQ ID NO: 51538 - DNA, 40 bp, Streptococcus pyogenes; identical to SEQ ID NO: 51428
  source 1..40: mol_type = genomic DNA

SEQ ID NO: 51539 - DNA, 50 bp, Streptococcus pyogenes; identical to SEQ ID NO: 51504
  source 1..50: mol_type = genomic DNA

SEQ ID NO: 51540 - DNA, 40 bp, Streptococcus pyogenes; identical to SEQ ID NO: 19695
  source 1..40: mol_type = genomic DNA

SEQ ID NO: 51541 - protein, 594 aa, Streptococcus pyogenes
MKKEVKVIKGDTTLKRTASGCVERSIKRVAAYCRVSTDTEDQINSYNSQVEHYTEFIQKNNEWTLAGIYADEAITGTQVDRRIDFQRLINDCMNGDIDMIITKSISRFARNTLDTLKYVRKLKEFNVAVFFEEENINTLTMDGELLLTILSSVAQQEVENISANVKKGLRMKMERGEMVGFQGCLGYDYDPETKSISINEKEAEIVRYIFRRYIEGVGGMVISRELEEQGYLSPRGNKRWTETTVLGIIKNEKYKGDLMMGKTYTVDPISKRRLDNFGEQDKFYIENHHEPIISEEDFEKAQGIRLRRSKNRNTVANNGGKREKYSRKYAFSSMLECGFCGHNLSRRNWHSSSEYTKVIWQCVNATKNGKKYCPHSKGIEEEAIEKAFMESYRQVCHNNVEITNEFLKTVEEELKDNSLAKDLKKITNQLDKILKKEKDLVELRLNESISMDIYQDKYNEIAISKEKLLAEKRTLEVTLTDEKALKKRLEGFKKLLESNKYLEEFDRAVFESIVDKIIIGGTNDEGEIDPAMITIIYKTGKKYSQDGRLFKSRRKNAKEVNEKADSKLYPQSSDEVNNLCSYPMDNTRGVCKFT

SEQ ID NO: 51542 - DNA, 50 bp, Streptococcus pyogenes; identical to SEQ ID NO: 51412
  source 1..50: mol_type = genomic DNA

SEQ ID NO: 51543 - DNA, 40 bp, Streptococcus pyogenes; identical to SEQ ID NO: 21023
  source 1..40: mol_type = genomic DNA

SEQ ID NO: 51544 - DNA, 50 bp, Streptococcus pyogenes; identical to SEQ ID NO: 51414
  source 1..50: mol_type = genomic DNA

SEQ ID NO: 51545 - DNA, 40 bp, Streptococcus pyogenes; identical to SEQ ID NO: 19695
  source 1..40: mol_type = genomic DNA

SEQ ID NO: 51546 - protein, 590 aa, Streptococcus pyogenes
MNTKVKLIKASNTGARNRNALHLDLKRVAAYCRVSTDSKDQLESYKSQVDYYTNLIKNNKNWTLAGIYADEATTGTTTTKRADFMRLISDCQNGDIDMIITKSISRFARNTLDTLKYVRLLKENNVGVVFEEENIDTLTMDGELLLTILSSVAQQEVENTSAHVKKGLKMKMEKGELIGFQGCLGYDYDPITKSISINEEEAKIVRYIFKRYLEGNGGSVIGRELEEKGYLTPRGKTKWSDTTVLGVIKNEKYIGDILMGKTFTVDPITKRRLANFGESDKYHIENHHEPIISREDFEKAQEIRLRRAQNRNTIANKDRKREKLSRQYAFSSMLECGFCGEILSRRTWHTSSIYKKINWQCVRSTKKGKKYCPHSKGIQEAAIEKAFVESYRQLCHADSTIIDDFLKIVEEEINDETLVKDLKKIENQLNRVISQERKLVDLHLEDSIDEEVYAKKYKKLTKQKEELLDEKKTLELTIKDENSIKERLKQFKKVLENKEIIEEFNRTVFESIVDKVVVGRIDKDGTVHPYDLTFYFKTGVQDSQDSNNFKDKRKNAKDNDINKLCSYKNDEDNKLCSQSKDNARGVCKFT

SEQ ID NO: 51547 - DNA, 50 bp, Streptococcus pyogenes; identical to SEQ ID NO: 51477
  source 1..50: mol_type = genomic DNA

SEQ ID NO: 51548 - DNA, 40 bp, Streptococcus pyogenes; identical to SEQ ID NO: 21023
  source 1..40: mol_type = genomic DNA

SEQ ID NO: 51549 - DNA, 50 bp, Streptococcus pyogenes; identical to SEQ ID NO: 51479
  source 1..50: mol_type = genomic DNA

SEQ ID NO: 51550 - DNA, 40 bp, Streptococcus pyogenes; identical to SEQ ID NO: 19695
  source 1..40: mol_type = genomic DNA

SEQ ID NO: 51551 - protein, 490 aa, Fusobacterium necrophorum
MKRAVGYARYSSDNQREESIDAQIRAIQSFCNENDYKLIEVYVDEALSASSAKERENFLRMIQDSKNKNFEIAIVHKFDRFARNRYDHAIYEKKLNDNGVKLLSVLEPLNDSPESVILKSVLTGMNEYYILNLSREVKKGLKENALKCIHTGGTPPLGYDVGEDRKYVINELEADSVRIIYKMYLEGAGYRKITEYLNKIGRVNKRKKPFKMTSIRDILLNEKYIGTFVFGKKDAHGHLTGNEIKIENGLPAIVDKEIFWRVQKKIKTRATGSRSKAITPYYLTGYCTCAECGSAYTGGYRSRSRNGELVYGYVCTGRKSKGTNCVNRNIRKELLENLVFKAIQTKILTDEAIKQLAEEIKVQAKEIKTKKKKVVEKHEKEIEKLKIKVDKILNLLLDGALPEDVYKEKSKELNDRILFLKLEIEKAKKEEEVDYKKIVNFLQKIQKDFHKEEIKKSVIETFVHSVKIGYTEIEITLKKINSKTDLIGGS

SEQ ID NO: 51552 - DNA, 50 bp, Fusobacterium necrophorum
  source 1..50: mol_type = genomic DNA
aaaacggatttaattggtggaagtggggaagaacctgtattatccgttaa

SEQ ID NO: 51553 - DNA, 40 bp, Fusobacterium necrophorum
  source 1..40: mol_type = genomic DNA
aaagcactatggtggaagtggcgggaatcgaacccgcgtc

SEQ ID NO: 51554 - DNA, 50 bp, Fusobacterium necrophorum
  source 1..50: mol_type = genomic DNA
aaaacggatttaattggtggaagtgcggaagaacctgtattatccgttaa

SEQ ID NO: 51555 - DNA, 40 bp, Fusobacterium necrophorum
  source 1..40: mol_type = genomic DNA
acagcaagctggtggaagtgccaggactcaaacccaagac

SEQ ID NO: 51556 - protein, 501 aa, Dorea longicatena; identical to SEQ ID NO: 49611

SEQ ID NO: 51557 - DNA, 50 bp, Dorea longicatena
  source 1..50: mol_type = genomic DNA
gatgaaacagtatgtcaaccctgtggagctgaccgaaacggaattttatt

SEQ ID NO: 51558 - DNA, 40 bp, Dorea longicatena
  source 1..40: mol_type = genomic DNA
gcattgcaccacagacaaaggagctgaccgccgaacttct

SEQ ID NO: 51559 - DNA, 50 bp, Dorea longicatena
  source 1..50: mol_type = genomic DNA
gatgaaacagtatgtcaaccctgtgcagctgaccgaaacggaattttatt

SEQ ID NO: 51560 - DNA, 40 bp, Dorea longicatena
  source 1..40: mol_type = genomic DNA
gccttgcaccccagatccagcagctaacccccaagcttat

SEQ ID NO: 51561 - protein, 546 aa, Mesorhizobium ciceri
MIRAAIYARFSTELQNEKSTEDQIALCRAYAARNGLNVVAVYEDKARSGASLLGRDGLLTLMKAAGQKTFDTIVVEALDRLSRDMADLSGLHKRLSFLGIEIQAVHDGIADAVLIGIRGLVGQMQREDGAKKVRRGMAGVVRDGRHAGGRAYGYRPILGRPGELEVVEREAEVVRRIFDAYSAGRTPRDLAGDLNRDGIAPPRGTRWNGSTINGNAQRGVGLLFNELYVGRIIWNKVRMVKNPDTGKRVSRPNPKDQWQMKEVPHLRIVDDDVWQKAQALKVARVNASSSFKRRPAHLLSGLLRCGICASGMSVHDRDKTGKTRVRCSAVRESGSCSNRRIIYLPEIERAVLDSMREQLRAPDLIEAYIRKYNQERRELAARANSMRSALEGKRDRVKGELQRTIDLVIRGVIAEEDAKQRIAELKTQLSLIEGQFDRLDEPPSTVALHPATLQRYVKTVDDLSTALADHATAPDDRGPLIRNFRQLVHSVTLHPKPAREGFEIEVKGKLAALIGGAAFPSARHASLGGRFGAAVGNDSGCEVVAG

SEQ ID NO: 51562 - DNA, 50 bp, Mesorhizobium ciceri
  source 1..50: mol_type = genomic DNA
tagtgggtgtgaagtggtagcgggaggccgctacatcccgacacccacta

SEQ ID NO: 51563 - DNA, 40 bp, Mesorhizobium ciceri
  source 1..40: mol_type = genomic DNA
tgggatcgatggtagcgggagagggacttgaacccccgac

SEQ ID NO: 51564 - DNA, 50 bp, Mesorhizobium ciceri
  source 1..50: mol_type = genomic DNA
tagtgggtgtgaagtggtagcgggacgccgctacatcccgacacccacta

SEQ ID NO: 51565 - DNA, 40 bp, Mesorhizobium ciceri
  source 1..40: mol_type = genomic DNA
tgggatagatggggctgggacatggacttaaacccaggag

SEQ ID NO: 51566 - protein, 462 aa, Eubacterium ramulus
MSFFTPNPQLFGLRVVKYIRCSHDDQVLHGDTLEAQDLILEDFIKVNRMILVDTFIDEALTARKKFNKRKEFVRLLDGVKAHSFDLIIFTKLDRWFRNIGDYHKIQEILEANGVQWKAVTENYDTTTTNGRLHINIRLSVAQDECDRDSDRIKDVFAYKLKNKTYVSGSLPRGLKLDAEKHVIIDPEWNCFALDMFDRFEATCSKRDTQLFLQDKYNIRVCYDTVARYLKNPLFKGQYRDDPDFCPATISPERFERIQKLAIRNVRIRHTQQFYIFSGLLICSSCNHIMTGTVTYRKMADGTEKAYKSYRCNFKAQSKLCDRGKTYREEYVEEYMLNHIRPALSDYVAKYEVTAASAVQKNPVEEMSKIERKIKKLYDLFMDDLIDKDAYRSEYDKFKKQIEELQKCPAAPVRNLDSVRKLLNDDWEAVYNTFSNQEKNVFWKSFVESVLVHEDGSMDIHFL

SEQ ID NO: 51567 - DNA, 50 bp, Eubacterium ramulus
  source 1..50: mol_type = genomic DNA
tgtcgtactaactctgcattgcctgtcggtactgctttgttagtacaatc

SEQ ID NO: 51568 - DNA, 40 bp, Eubacterium ramulus
  source 1..40: mol_type = genomic DNA
cttagaatcaagattgcctgtcggctcatccgcaaatata

SEQ ID NO: 51569 - DNA, 50 bp, Eubacterium ramulus
  source 1..50: mol_type = genomic DNA
tgtcgtactaactctgcattgccttacggtactgctttgttagtacaatc

SEQ ID NO: 51570 - DNA, 40 bp, Eubacterium ramulus
  source 1..40: mol_type = genomic DNA
attagaatcagggctgccttactgctcagccccagagatg

SEQ ID NO: 51571 - protein, 458 aa, Staphylococcus epidermidis
MNYERSYLRSCQVSTLEQKEHGYSIEEQERKLKSFCEINDWSVSDVFIDAGFSGAKRDRPELQRMMNDIKRFDLVLVYKLDRLTRNVRDLLDLLEVFEQNNVAFRSATEVYDTSTAMGRLFVTLVGAMAEWERETIRERVMMGKRAAIKQGMILTPPPFYYDRVDNTYIPNDYKKVVLWAYNEVMKGNSSKAIARKLNDSDIPPPNGKRWEDRTITRALRNPITRGHYTWGDVFIENSHEPIITEEMYQQIKERLEERINTKIVSHVSVFRGKFICPRCGGTLTMNTATRKRKKGYVTYKTYYCNTCKTKKQSFGFSENEALRVFRDYLSKLDLDKYEVKTKQKDDVVTIDIDKIMEQRKRYHKLYAKGLMQEEELFELIKETDETIAEYEKQKELVPRKSLDIDKIKKFKNALLESWKIFSLEDKADFIKMAIKSIDIDYVKLKNRHSIKINDIEFY

SEQ ID NO: 51572 - DNA, 50 bp, Staphylococcus epidermidis
  source 1..50: mol_type = genomic DNA
gtacggaagtatagacactcgattaatatttaatgtgtatacttccgtaa

SEQ ID NO: 51573 - DNA, 40 bp, Staphylococcus epidermidis; identical to SEQ ID NO: 26018
  source 1..40: mol_type = genomic DNA

SEQ ID NO: 51574 - DNA, 50 bp, Staphylococcus epidermidis
  source 1..50: mol_type = genomic DNA
gtacggaagtatagacactcgatttttatttaatgtgtatacttccgtaa

SEQ ID NO: 51575 - DNA, 40 bp, Staphylococcus epidermidis
  source 1..40: mol_type = genomic DNA
gtacggtggtgcaagaatttttctagcatatatacctagg

SEQ ID NO: 51576 - protein, 458 aa, Staphylococcus epidermidis
MNYERSYLRSCQVSTLEQKEHGYSIEEQERKLKSFCEINDWSVSDVFIDAGFSGAKRERPELQRMMNDIKRFDLVLVYKLDRLTRNVRDLLDLLEIFEQNNVAFRSATEVYDTSTAMGRLFVTLVGAMAEWERETIRERVMMGKRAAIKQGMILTPPPFYYDRVDNTYIPNDYKKVVLWAYDEVMKGVSSKAIARKLNDSDIPPPNGKRWEDRTITRALRSPITRGHYTWGDVFIENSHESIITEEMYQQIKERLEERINTKIVSHISVFRGKFICPSCNGTLTMNTATRKRKKGYVTYKTYYCNTCKTKKQSFGFSENEALRVFRDYLSKLDLDKYEVKTKQNDDVVTIDIDKIMEQRKRYHKLYAKGLMQEEELFELIKETDETIAEYEKQKELVPRKTLDIDKIKGFKNVLLESWKIFSLEDKADFIKMAIKSIDIEYIKLKNRHSIEIKDIEFY

SEQ ID NO: 51577 - DNA, 50 bp, Staphylococcus epidermidis
  source 1..50: mol_type = genomic DNA
gtacggaagtatagacactcgattaatatttaatgtgtatacttccgtat

SEQ ID NO: 51578 - DNA, 40 bp, Staphylococcus epidermidis; identical to SEQ ID NO: 26018
  source 1..40: mol_type = genomic DNA

SEQ ID NO: 51579 - DNA, 50 bp, Staphylococcus epidermidis
  source 1..50: mol_type = genomic DNA
gtacggaagtatagacactcgatttttatttaatgtgtatacttccgtat

SEQ ID NO: 51580 - DNA, 40 bp, Staphylococcus epidermidis; identical to SEQ ID NO: 51575
  source 1..40: mol_type = genomic DNA

SEQ ID NO: 51581 - protein, 458 aa, Staphylococcus epidermidis
MNYERSYLRSCQVSTLEQKEHGYSIEEQERKLKSFCEINDWSVSDVFIDAGFSGAKRERPELQRMMNDIKRFDLVLVYKLDRLTRNVRDLLDLLEVFEQNNVAFRSATEVYDTSTAMGRLFVTLVGAMAEWERETIRERVMMGKRAAIKQGMILTPPPFYYDRVDNTYIPNDYKKVVLWAYDEVMKGNSSKAIARKLNDSDIPPPNGKRWEDRTITRALRNPITRGHYTWGDVFIENSHEPIITEEMYQQIKERLEERINTKIVSHVSVFRGKFICPRCGGTLTLNTVTRKRKKGYVTYKTYYCNTCKAKKESFGFSENEALRVFRDYLSKLDLEKYEVKKKQKDDVVTIDIDKVMEQRKRYHKLYAKGLMQEEELFELIKETDETIAEYEKQKELVPRKSLDIDKIKKFKNALLESWKIFSLEDKADFIKMAIKSIDIEYVKIKNRHSIKISDIEFY

SEQ ID NO: 51582 - DNA, 50 bp, Staphylococcus epidermidis; identical to SEQ ID NO: 51577
  source 1..50: mol_type = genomic DNA

SEQ ID NO: 51583 - DNA, 40 bp, Staphylococcus epidermidis; identical to SEQ ID NO: 26018
  source 1..40: mol_type = genomic DNA

SEQ ID NO: 51584 - DNA, 50 bp, Staphylococcus epidermidis; identical to SEQ ID NO: 51579
  source 1..50: mol_type = genomic DNA

SEQ ID NO: 51585 - DNA, 40 bp, Staphylococcus epidermidis; identical to SEQ ID NO: 51575
  source 1..40: mol_type = genomic DNA

SEQ ID NO: 51586 - protein, 458 aa, Staphylococcus epidermidis
MNYERSYLRSCQVSTLEQKEHGYSIEEQERKLKSFCEINDWSVSDVFIDAGFSGAKRDRPELQRMMNDIKRFDLVLVYKLDRLTRNVRDLLDLLEVFEQNNVAFRSATEVYDTSTAMGRLFVTLVGAMAEWERETIRERVMMGKRAAIKQGMILTPPPFYYDRVDNTYIPNDYKKVVLWAYDEVMKGNSSKAIARKLNDSDIPPPNGKRWEDRTITRALRNPITRGHYTWGDVFIENSHEPIITEEMYQQIKERLEERINTKIVSHVSVFRGKFICPRCGGTLTMNTATRKRKKGYVTYKTYYCNTCKTKKQSFGFSENEALRVFRDYLSKLDLDKYEVKTKQKDDVVTIDIDKIMEQRKRYHKLYAKGLMQEEELFELIKETDETIAKYEKQKELVPRKSLDIDKIKKFKNALLESWKIFSLEDKADFIKMAIKSIDIDYVKLKNRHSIKINDIEFY

SEQ ID NO: 51587 - DNA, 50 bp, Staphylococcus epidermidis; identical to SEQ ID NO: 51577
  source 1..50: mol_type = genomic DNA

SEQ ID NO: 51588 - DNA, 40 bp, Staphylococcus epidermidis; identical to SEQ ID NO: 26018
  source 1..40: mol_type = genomic DNA

SEQ ID NO: 51589 - DNA, 50 bp, Staphylococcus epidermidis; identical to SEQ ID NO: 51579
  source 1..50: mol_type = genomic DNA

SEQ ID NO: 51590 - DNA, 40 bp, Staphylococcus epidermidis; identical to SEQ ID NO: 51575
  source 1..40: mol_type = genomic DNA

SEQ ID NO: 51591 - protein, 458 aa, Staphylococcus epidermidis
MNYERSYLRSCQVSTLEQKEHGYSIEEQERKLKSFCEINDWSVSDVFIDAGFSGAKRDRPELQRMMNDIKRFDLVLVYKLDRLTRNVRDLLDLLEVFEQNNVAFRSATEVYDTSTAMGRLFVTLVGAMAEWERETIRERVMMGKRAAIKQGMILTPPPFYYDRVDNTYIPNDYKKVVLWAYDEVMKGNSSKAIARKLNDSDIPPPNGKRWEDRTITRALRNPITRGHYTWGDVFIENSHEPIITEEMYQQIKERLEERINTKIVSHVSVFRGKFICPRCGGTLTMNTATRKRKKGYVTYKTYYCNTCKTKKQSFGFSENEALRVFRDYLSKLDLDKYEVKTKQKDDVVTIDIDKIMEQRKRYHKLYAKGLMQEEELFELIKETDETIAEYEKQKELVPRKSLDIDKIKKFKNALLESWKIFSLEDKADFIKMAIKSIDIDYVKLKNRHSIKINDIEFY

SEQ ID NO: 51592 - DNA, 50 bp, Staphylococcus epidermidis; identical to SEQ ID NO: 51572
  source 1..50: mol_type = genomic DNA

SEQ ID NO: 51593 - DNA, 40 bp, Staphylococcus epidermidis; identical to SEQ ID NO: 26018
  source 1..40: mol_type = genomic DNA

SEQ ID NO: 51594 - DNA, 50 bp, Staphylococcus epidermidis; identical to SEQ ID NO: 51574
  source 1..50: mol_type = genomic DNA

SEQ ID NO: 51595 - DNA, 40 bp, Staphylococcus epidermidis; identical to SEQ ID NO: 51575
  source 1..40: mol_type = genomic DNA

SEQ ID NO: 51596 - protein, 458 aa, Staphylococcus epidermidis
MNYERSHLRSCQVSTLEQKEHGYSIEEQERKLKSFCEINDWSVSDVFIDAGFSGAKRDRPELQRMMKDIKRFDLVLVYKLDRLTRNVRDLLDLLEIFEQNNVAFRSATEVYDTSTAMGRLFVTLVGAMAEWERETIRERVMMGKRAAIKQGMILTPPPFYYDRVDNTYIPNDYKKVVLWAYDEVLKGNSSKAIARKLNDSDIPPPNGKRWEDRTITRALRSPITRGHYTWGDVFIENSHEPIITEEMYQQIKERLEERINTKIVSHVSVFRGKFICPRCGGTLTLNTTTRKRKKGYVTYKTYYCNTCKGKKKSFGFAENEALRVFHDYLSKLDLEKYEVKTKQKDDVVTIDIDKIMKQRKRYHKLYAKGLMQEEELFELIKETDEIIAEYEKQKELVPRKTLDIDKIKKFKSVLLESWKIFSLEDKADFIKMAIKSINIEYVKLKNRHSIKINDIEFY

SEQ ID NO: 51597 - DNA, 50 bp, Staphylococcus epidermidis; identical to SEQ ID NO: 51572
  source 1..50: mol_type = genomic DNA

SEQ ID NO: 51598 - DNA, 40 bp, Staphylococcus epidermidis; identical to SEQ ID NO: 26018
  source 1..40: mol_type = genomic DNA

SEQ ID NO: 51599 - DNA, 50 bp, Staphylococcus epidermidis; identical to SEQ ID NO: 51574
  source 1..50: mol_type = genomic DNA

SEQ ID NO: 51600 - DNA, 40 bp, Staphylococcus epidermidis; identical to SEQ ID NO: 51575
  source 1..40: mol_type = genomic DNA

SEQ ID NO: 51601 - protein, 458 aa, Staphylococcus epidermidis
MNYERSYLRSCQVSTLEQKEHGYSIEEQERKLKSFCEINDWSISDVFIDAGFSGAKRDRPELQRMMNDIKRFDLVLVYKLDRLTRNVRDLLDLLEIFEQNNVAFRSATEVYDTSTAMGRLFVTLVGAMAEWERETIRERVMMGKRAAIKQGMILTPPPFYYDRVDNTYIPNDYKKVVLWAYDEVMKGNSSKAIARKLNDSDIPPPNGKRWEDRTITRALRSPITRGHYTWGDVFIENSHEPIITEEMYQQIKERLEERINTKIVSHVSVFRGKFICPRCGGTLTLNTVTRKRKKGYVTYKTYYCNTCKAKKESFGFSENEALRVFRDYLSELDLDKYEIKTKQKDDVVTIDIDKIMEQRKRYHKLYAKGLMQEEELFELIKETDETIAEYEKQKELVPRKSLDIDKIKKFKNALLESWEIFLLEDKADFIKMAIKSIDIDYVKLKNRHSIEIKDIEFY

SEQ ID NO: 51602 - DNA, 50 bp, Staphylococcus epidermidis
  source 1..50: mol_type = genomic DNA
gtacggaagtatagacacctgattaatatttaatgtgtatacttccgtat

SEQ ID NO: 51603 - DNA, 40 bp, Staphylococcus epidermidis; identical to SEQ ID NO: 26018
  source 1..40: mol_type = genomic DNA

SEQ ID NO: 51604 - DNA, 50 bp, Staphylococcus epidermidis
  source 1..50: mol_type = genomic DNA
gtacggaagtatagacacctgatttttatttaatgtgtatacttccgtat

SEQ ID NO: 51605 - DNA, 40 bp, Staphylococcus epidermidis; identical to SEQ ID NO: 51575
  source 1..40: mol_type = genomic DNA

SEQ ID NO: 51606 - protein, 458 aa, Staphylococcus epidermidis
MNYERSYLRSCQVSTLEQKEHGYSIEEQERKLKSFCEINDWSVSDVFIDAGFSGAKRDRPELQRMMNDIKRFDLVLVYKLDRLTRNVRDLLDLLEVFEQNNVAFRSATEVYDTSTAMGRLFVTLVGAMAEWERETIRERVMMGKRAAIKQGMILTPPPFYYDRVDNTYIPNDYKKVVLWAYDEVMKGNSSKAIARKLNDSDIPPPNGKRWEDRTITRALRSPITRGHYTWGDVFIENSHEPIITEEMYQQIKERLEERINTKIVSHVSVFRGKFICPRCGGTLTLNTVTRKRKKGYVTYKTYYCNICKAKKESFGFSENEALRVFRDYLSKLDLEKYEVKTKQKDDVVTIDIDKIMEQRKRYHKLYAKGLMQEEELFELIKETDETIAEYEKQKELVPRKSLDIDKIKKFKNALLESWKIFSLEDKADFIKMAIKSIDIDYVKLKNRHSIKINDIEFY

SEQ ID NO: 51607 - DNA, 50 bp, Staphylococcus epidermidis; identical to SEQ ID NO: 51572
  source 1..50: mol_type = genomic DNA

SEQ ID NO: 51608 - DNA, 40 bp, Staphylococcus epidermidis; identical to SEQ ID NO: 26018
  source 1..40: mol_type = genomic DNA

SEQ ID NO: 51609 - DNA, 50 bp, Staphylococcus epidermidis; identical to SEQ ID NO: 51574
  source 1..50: mol_type = genomic DNA

SEQ ID NO: 51610 - DNA, 40 bp, Staphylococcus epidermidis; identical to SEQ ID NO: 51575
  source 1..40: mol_type = genomic DNA

SEQ ID NO: 51611 - protein, 458 aa, Staphylococcus epidermidis; identical to SEQ ID NO: 51591

SEQ ID NO: 51612 - DNA, 50 bp, Staphylococcus epidermidis
  source 1..50: mol_type = genomic DNA
gtagggaagtatagacactcgattaatatttaatgtgtatacttccgtaa

SEQ ID NO: 51613 - DNA, 40 bp, Staphylococcus epidermidis; identical to SEQ ID NO: 26018
  source 1..40: mol_type = genomic DNA

SEQ ID NO: 51614 - DNA, 50 bp, Staphylococcus epidermidis
  source 1..50: mol_type = genomic DNA
gtagggaagtatagacactcgatttttatttaatgtgtatacttccgtaa

SEQ ID NO: 51615 - DNA, 40 bp, Staphylococcus epidermidis; identical to SEQ ID NO: 51575
  source 1..40: mol_type = genomic DNA

SEQ ID NO: 51616 - protein, 458 aa, Staphylococcus epidermidis
MNYERSYLRSCQVSTLEQKEHGYSIEEQERKLKSFCEINDWSVSDVFIDAGFSGAKRDRPELQRMMNDIKRFDLVLVYKLDRLTRNVRDLLDLLEVFEQNNVAFRSATEVYDTSTAMGRLFVTLVGAMAEWERETIRERVMMGKRAAIKQGMILTPPPFYYDRVDNTYIPNDYKKVVLWAYDEVMKGNSSKAIARKLNDSDIPPPNGKRWEDRTITRALRSPITRGHYTWGDVFIENSHEPIITEEMYQQIKERLEERINTKIVSHVSVFRGKFICPRCGGTLTLNTVTRKRKKGYVTYKTYYCNTCKAKKESFGFSENEALRVFRDYLSELDLDKYKVKTKQNDDVVTIDIDKIMEQRKRYHKLYAKGLMQEEELFELIKETDETIAEYEKQKELVPRKSLDIDKIKKFKNALLESWKIFSLEDKADFIKMAIKSIDIDYVKLKNRHSIKINDIEFY

SEQ ID NO: 51617 - DNA, 50 bp, Staphylococcus epidermidis; identical to SEQ ID NO: 51572
  source 1..50: mol_type = genomic DNA

SEQ ID NO: 51618 - DNA, 40 bp, Staphylococcus epidermidis; identical to SEQ ID NO: 26018
  source 1..40: mol_type = genomic DNA

SEQ ID NO: 51619 - DNA, 50 bp, Staphylococcus epidermidis; identical to SEQ ID NO: 51574
  source 1..50: mol_type = genomic DNA

SEQ ID NO: 51620 - DNA, 40 bp, Staphylococcus epidermidis; identical to SEQ ID NO: 51575
  source 1..40: mol_type = genomic DNA

SEQ ID NO: 51621 - protein, 458 aa, Staphylococcus epidermidis
MNYERSYLRSCQVSTLEQKEHGYSIEEQERKLKSFCEINDWSVSDVFIDAGFSGAKRDRPELQRMMNDIKRFDLVLVYKLDRLTRNVRDLLDLLEVFEQNNVAFRSATEVYDTSTAMGRLFVTLVGAMAEWERETIRERVMMGKRAAIKQGMILTPPPFYYDRVDNTYIPNDYKKVVLWAYDEVLKGNSSKAIARKLNDSDIPPPNGKRWEDRTITRALRNPITRGHYTWGDVFIENSHEPIITEEMYQQIKERLEERINTKIVSHVSVFRGKFICPRCGGTLTMNTATRKRKKGYVTYKTYYCNTCKTKKQSFGFSENEALRVFRDYLSKLDLDKYEVKTKQKDDVVTIDIDKIMEQRKRYHKLYAKGLMQEEELFELIKETDETIAEYEKQKELVPRKSLDIDKIKKFKNALLESWKIFSLEDKADFIKMAIKSIDIDYVKLKNRHSIKINDIEFY

SEQ ID NO: 51622 - DNA, 50 bp, Staphylococcus epidermidis; identical to SEQ ID NO: 51572
  source 1..50: mol_type = genomic DNA

SEQ ID NO: 51623 - DNA, 40 bp, Staphylococcus epidermidis; identical to SEQ ID NO: 26018
  source 1..40: mol_type = genomic DNA

SEQ ID NO: 51624 - DNA, 50 bp, Staphylococcus epidermidis; identical to SEQ ID NO: 51574
  source 1..50: mol_type = genomic DNA

SEQ ID NO: 51625 - DNA, 40 bp, Staphylococcus epidermidis; identical to SEQ ID NO: 51575
  source 1..40: mol_type = genomic DNA

SEQ ID NO: 51626 - protein, 458 aa, Staphylococcus epidermidis
MNYERSYLRSCQVSTLEQKEHGYSIEEQERKLKSFCEINDWSVSDVFIDAGFSGAKRDRPELQRMMNDIKRFDLVLVYKLDRLTRNVRDLLDLLEVFEQNNVAFRSATEVYDTSTAMGRLFVTLVGAMAEWERETIRERVMMGKRAAIKQGMILTPPPFYYDRVDNTYIPNDYKKVVLWAYDEVLKGVSSKGIARKLNDSDIPPPNGKRWEDRTITRALRSPITRGHYTWGDVFIENSHEPIITEEMYQQIKERLEERINTKIVSHISVFRGKFICPRCNGTLTMNTATRKRKKGYVTYKTYYCNNCKTKKQSFGFSENEALRVFRDYLSKLDLDKYEVKTKQKDDVVTIDIDKIMEQRKRYHKLYAKGLMQEEELFELIKETDETIAEYEKQKELVPRKSLDIDKIKKFKNALLESWKIFSLEDKADFIKMAIKSIDIDYVKLKNRHSIEIKDIEFY

SEQ ID NO: 51627 - DNA, 50 bp, Staphylococcus epidermidis; identical to SEQ ID NO: 51572
  source 1..50: mol_type = genomic DNA

SEQ ID NO: 51628 - DNA, 40 bp, Staphylococcus epidermidis; identical to SEQ ID NO: 26018
  source 1..40: mol_type = genomic DNA

SEQ ID NO: 51629 - DNA, 50 bp, Staphylococcus epidermidis; identical to SEQ ID NO: 51574
  source 1..50: mol_type = genomic DNA

SEQ ID NO: 51630 - DNA, 40 bp, Staphylococcus epidermidis; identical to SEQ ID NO: 51575
  source 1..40: mol_type = genomic DNA

SEQ ID NO: 51631 - protein, 458 aa, Staphylococcus epidermidis
MNYERSYLRSCQVSTLEQKEHGYSIEEQERKLKSFCEINDWSISDVFIDAGFSGAKRERPELQRMMSDIKRFDLVLVYKLDRLTRNVRDLLDLLEVFEQNNVAFRSATEVYDTSTAMGRLFVTLVGAMAEWERETIRERVMMGKRAAIKQGMILTPPPFYYDRVDNTYIPNDYKKVVLWAYDEVMKGNSSKAIARKLNDSDIPPPNGKRWEDRTITRALRNPITRGHYTWGDVFIENSHEPIITEEMYQQIKERLEERINTKIVSHVSVFRGKFICPRCGGTLTLNTVTRKRKKGYVTYKTYYCNICKAKKESFGFSENEALRVFRDYLSKLDLEKYEVKTKQKDDVVTIDIDKVMEQRKRYHKLYAKGLMQEEELFELIKETDETIAEYEKQKELVPRKSLDIDKIKKFKNALLESWEIFSLEDKADFIKMAIKSIDIDYVKLKNRHSIKINDIEFY

SEQ ID NO: 51632 - DNA, 50 bp, Staphylococcus epidermidis; identical to SEQ ID NO: 51572
  source 1..50: mol_type = genomic DNA

SEQ ID NO: 51633 - DNA, 40 bp, Staphylococcus epidermidis; identical to SEQ ID NO: 26018
  source 1..40: mol_type = genomic DNA

SEQ ID NO: 51634 - DNA, 50 bp, Staphylococcus epidermidis; identical to SEQ ID NO: 51574
  source 1..50: mol_type = genomic DNA

SEQ ID NO: 51635 - DNA, 40 bp, Staphylococcus epidermidis; identical to SEQ ID NO: 51575
  source 1..40: mol_type = genomic DNA

SEQ ID NO: 51636 - protein, 458 aa, Staphylococcus epidermidis
MNYERSYLRSCQVSTLEQKEHGYSIEEQERKLKSFCEINDWSISDVFIDAGFSGAKRERPELQRMMSDIKRFDLVLVYKLDRLTRNVRDLLDLLEVFEQNNVAFRSATEVYDTSTAMGRLFVTLVGAMAEWERETIRERVMMGKRAAIKQGMILTPPPFYYDRVDNTYIPNDYKKVVLWAYDEVMKGNSSKAIARKLNDSDIPPPNGKRWEDRTITRALRNPITRGHYTWGDVFIENSHEPIITEEMYQQIKERLEERINTKIVSHVSVFRGKFICPRCGGTLTLNTVTRKRKKGYVTYKTYYCNICKAKKESFGFSENEALRVFRDYLSKLDLEKYEVKTKQKDDVVTIDIDKVMEQRKRYHKLYAKGLMQEEELFELIKETDETIAEYEKQKELVPRKSLDIDKIKKFKNALLESWEIFSLEDKADFIKMAIKSIDIKYVKLKNRHSIKISDIEFY

SEQ ID NO: 51637 - DNA, 50 bp, Staphylococcus epidermidis; identical to SEQ ID NO: 51572
  source 1..50: mol_type = genomic DNA

SEQ ID NO: 51638 - DNA, 40 bp, Staphylococcus epidermidis; identical to SEQ ID NO: 26018
  source 1..40: mol_type = genomic DNA

SEQ ID NO: 51639 - DNA, 50 bp, Staphylococcus epidermidis; identical to SEQ ID NO: 51574
  source 1..50: mol_type = genomic DNA

SEQ ID NO: 51640 - DNA, 40 bp, Staphylococcus epidermidis; identical to SEQ ID NO: 51575
  source 1..40: mol_type = genomic DNA

SEQ ID NO: 51641 - protein, 458 aa, Staphylococcus epidermidis
MNYERSYLRSCQVSTLEQKEHGYSIEEQERKLKSFCEINDWSVSDVFIDAGFSGAKRDRPELQRMMNDIKRFDLVLVYKLDRLTRNVRDLLDLLEVFEQNNVAFRSATEVYDTSTAMGRLFVTLVGAMAEWERETIRERVMMGKRAAIKQGMILTPPPFYYDRVDNTYIPNDYKKVVLWAYDEVLKGVSSKGIARKLNDSDIPPPNGKRWEDRTITRALRSPITRGHYTWGDVFIENSHEPIITEEMYQQIKERLEERINTKIVSHVSVFRGKFICPRCGGTLTLNTVTRKRKKGYVTYKTYYCNTCKAKKESFGFSENEALRVFRDYLSELDLDKYKVKTKQNDDVVTIDIDKIMEQRKRYHKLYAKGLMQEEELFELIKETDETIAEYEKQKELVPRKSLDIDKIKKFKNALLESWKIFSLEDKADFIKMAIKSIDIDYVKLKNRHSIEIKDIEFY

SEQ ID NO: 51642 - DNA, 50 bp, Staphylococcus epidermidis; identical to SEQ ID NO: 51572
  source 1..50: mol_type = genomic DNA

SEQ ID NO: 51643 - DNA, 40 bp, Staphylococcus epidermidis; identical to SEQ ID NO: 26018
  source 1..40: mol_type = genomic DNA

SEQ ID NO: 51644 - DNA, 50 bp, Staphylococcus epidermidis; identical to SEQ ID NO: 51574
  source 1..50: mol_type = genomic DNA

SEQ ID NO: 51645 - DNA, 40 bp, Staphylococcus epidermidis; identical to SEQ ID NO: 51575
  source 1..40: mol_type = genomic DNA

SEQ ID NO: 51646 - protein, 458 aa, Staphylococcus epidermidis
MNYERRYLRSCQVSTLEQKEHGYSIEEQERKLKSFCEINDWSVSDVFIDAGFSGAKRDRPELQRMMNDIKRFDLVLVYKLDRLTRNVRDLLDLLEVFEQNNVAFRSATEVYDTSTAMGRLFVTLVGAMAEWERETIRERVMMGKRAAIKQGMILTPPPFYYDRVDNTYIPNNYKKVVLWAYDEVLKGVSSKGIARKLNDSDIPPPNGKRWEDRTITRALRSPITRGHYTWGDVFIENSHEPIITEEMYQQIKERLEERINTKIVSHVSVFRGKFICPRCGGTLTLNTVTRKRKKGYVTYKTYYCNTCKAKKESFGFSENEALRVFRDYLSELDLDKYKVKTKQNDDVVTIDIDKIMEQRKRYHKLYAKGLMQEEELFELIKETDETIAEYEKQKELVPRKSLDIDKIKKFKNALLESWKIFSLEDKADFIKMAIKSIDIEYVKLKNRHSIKINDIEFY

SEQ ID NO: 51647 - DNA, 50 bp, Staphylococcus epidermidis; identical to SEQ ID NO: 51602
  source 1..50: mol_type = genomic DNA

SEQ ID NO: 51648 - DNA, 40 bp, Staphylococcus epidermidis; identical to SEQ ID NO: 26018
  source 1..40: mol_type = genomic DNA

SEQ ID NO: 51649 - DNA, 50 bp, Staphylococcus epidermidis; identical to SEQ ID NO: 51604
  source 1..50: mol_type = genomic DNA

SEQ ID NO: 51650 - DNA, 40 bp, Staphylococcus epidermidis; identical to SEQ ID NO: 51575
  source 1..40: mol_type = genomic DNA

SEQ ID NO: 51651 - protein, 458 aa, Staphylococcus epidermidis
MNYERSYLRSCQVSTLEQKEHGYSIEEQERKLKSFCEINDWSVSDVFIDAGFSGAKRDRPELQRMMNDIKRFDLVLVYKLDRLTRNVRDLLDLLEVFEQNNVAFRSATEVYDTSTAMGRLFVTLVGAMAEWERETIRERVMMGKRAAIKQGMILTPPPFYYDRVDNTYIPNDYKKVVLWAYDEVMKGNSSKAIARKLNDSDIPPPNGKRWEDRTITRALRNPITRGHYTWGDVFIENSHEPIITEEMYQQIKERLEERINTKIVSHVSVFRGKFICPRCGGTLTLNTVTRKRKKGYVTYKTYYCNTCKAKKESFGFSENEALRVFRDYLSKLDLEKYEVKTKQKDDVVTIDIDKVMEQRKRYHKLYAKGLMQEEELFELIKETDETIAEYEKQKELVPRKSLDIDKIKKFKNALLESWEIFSLEDKADFIKMAIKSIDIKYVKLKNRHSIKISDIEFY

SEQ ID NO: 51652 - DNA, 50 bp, Staphylococcus epidermidis; identical to SEQ ID NO: 51577
  source 1..50: mol_type = genomic DNA

SEQ ID NO: 51653 - DNA, 40 bp, Staphylococcus epidermidis; identical to SEQ ID NO: 26018
  source 1..40: mol_type = genomic DNA

SEQ ID NO: 51654 - DNA, 50 bp, Staphylococcus epidermidis; identical to SEQ ID NO: 51579
  source 1..50: mol_type = genomic DNA

SEQ ID NO: 51655 - DNA, 40 bp, Staphylococcus epidermidis; identical to SEQ ID NO: 51575
  source 1..40: mol_type = genomic DNA

SEQ ID NO: 51656 - protein, 458 aa, Staphylococcus epidermidis
MNYERSYLRSCQVSTLEQKEHGYSIEEQERKLKSFCEINDWSVSDVFIDAGFSGAKRERPELKRMMNDIKRFDLVLVYKLDRLTRNVRDLLDLLEVFEQNNVAFRSATEVYDTSTAMGRLFVTLVGAMAEWERETIRERVMMGKRAAIKQGMILTPPPFYYDRVDNTYIPNDYKKVVLWAYDEVMKGNSSKAIARKLNDSDIPPPNGKRWEDRTITRALRSPITRGHYTWGDVFIENSHEPIITEEMYQQIKERLEERINTKIVSHVSVFRGKFICPRCGGTLTLNTVTRKRKKGYVTYKTYYCNTCKAKKQSFGFSENEALRVFRDYLSKLDLDKYEVKTNQKDDVVTIDIDKIMEQRKRYHKLYAKGLMQEEELFELIKETDETIAEYEKQKELVPSKTLDVDKIKKFKNALLESWEIFSLEDKADFIKMAIKSIDIEYVKLKNRHSIKINDIEFY

SEQ ID NO: 51657 - DNA, 50 bp, Staphylococcus epidermidis; identical to SEQ ID NO: 51572
  source 1..50: mol_type = genomic DNA

SEQ ID NO: 51658 - DNA, 40 bp, Staphylococcus epidermidis; identical to SEQ ID NO: 26018
  source 1..40: mol_type = genomic DNA

SEQ ID NO: 51659 - DNA, 50 bp, Staphylococcus epidermidis; identical to SEQ ID NO: 51574
  source 1..50: mol_type = genomic DNA

SEQ ID NO: 51660 - DNA, 40 bp, Staphylococcus epidermidis; identical to SEQ ID NO: 51575
  source 1..40: mol_type = genomic DNA

SEQ ID NO: 51661 - protein, 458 aa, Staphylococcus epidermidis
MNYERRYLRSCQVSTLEQKEHGYSIEEQERKLKSFCEINDWSVSDVFIDAGFSGAKRDRPELQRMMNDIKRFDLVLVYKLDRLTRNVRDLLDLLEIFEQNNVAFRSATEVYDTSTAMGRLFVTLVGAMAEWERETIRERVMMGKRAAIKQGMILTPPPFYYDRVDNTYIPNDYKKVVLWAYDEVMKGNSSKAIARKLNDSDIPPPNGKRWEDRTITRALRNPITRGHYTWGDVFIENSHEPIITEEMYQQIKERLEERINTKIVSHVSVFRGKFICPRCGGTLTMNTATRKRKKGYVTYKTYYCNTCKTRKQSFGFSENEALRVFRDYLSKLDLDKYEVKTKQKDDVVTIDIDKIMEQRKRYHKLYAKGLMQEEELFELIKETDETIAEYEKQKELVPRKILDIDKIKSFKNVLLESWNIFSLEDKADFIKMAIKSIDIEYVELKNRHSIEIKEIEFY

SEQ ID NO: 51662 - DNA, 50 bp, Staphylococcus epidermidis; identical to SEQ ID NO: 46422
  source 1..50: mol_type = genomic DNA

SEQ ID NO: 51663 - DNA, 40 bp, Staphylococcus epidermidis; identical to SEQ ID NO: 26018
  source 1..40: mol_type = genomic DNA

SEQ ID NO: 51664 - DNA, 50 bp, Staphylococcus epidermidis
  source 1..50: mol_type = genomic DNA
gtacggaagtatagacacttgatttttatttaatgtgtatacttccgtat

SEQ ID NO: 51665 - DNA, 40 bp, Staphylococcus epidermidis; identical to SEQ ID NO: 51575
  source 1..40: mol_type = genomic DNA

SEQ ID NO: 51666 - protein, 458 aa, Staphylococcus epidermidis
MNYERSYLRSCQVSTLEQKEHGYSIEEQERKLKSFCEINDWSVSDVFIDAGFSGAKRERPELKRMMNDIKRFDLVLVYKLDRLTRNVRDLLDLLEIFEQNNVAFRSATEVYDTSTAMGRLFVTLVGAMAEWERETIRERVMMGKRAAIKQGMILTPPPFYYDRVDNTYIPNDYKKVVLWAYDEVMKGNSSKAIARKLNDSDIPPPNGKRWEDRTITRALRSPITRGHYTWGDVFIENSHEPIITEEMYQQIKERLEERINTKIVSHVSVFRGKFICPRCGGTLTLNTVTRKRKKGYVTYKTYYCNTCKAKKESFGFSENEALRVFRDYLSKLDLEKYEVKTKQKDDVVTIDIDKIMEQRKRYHKLYAKGLMQEEELFELIKETDETIAEYEKQKELVPRKTLDIGKIKKFKNVLLESWNIFSLEDKADFIKMAIKSIDIEYVKLKNRHSIEINDIEFY

SEQ ID NO: 51667 - DNA, 50 bp, Staphylococcus epidermidis
  source 1..50: mol_type = genomic DNA
gtacggaagtataaccactcgattaatgtatagtgtgtgtacttccatat

SEQ ID NO: 51668 - DNA, 40 bp, Staphylococcus epidermidis; identical to SEQ ID NO: 26018
  source 1..40: mol_type = genomic DNA

SEQ ID NO: 51669 - DNA, 50 bp, Staphylococcus epidermidis
  source 1..50: mol_type = genomic DNA
gtacggaagtataaccactcgatttttgtatagtgtgtgtacttccatat

SEQ ID NO: 51670 - DNA, 40 bp, Staphylococcus epidermidis; identical to SEQ ID NO: 51575
  source 1..40: mol_type = genomic DNA

SEQ ID NO: 51671 - protein, 474 aa, Staphylococcus epidermidis
MGTLVPLLFFYFFREVMNYERRYLRSCQVSTLEQKEHGYSIEEQERKLKSFCEINDWSVSDVFIDAGFSGAKRDRPELQRMMNDIKRFDLVLVYKLDRLTRNVRDLLDLLEIFEQNNVAFRSATEVYDTSTAMGRLFVTLVGAMAEWERETIRERVMMGKRAAIKQGMILTPPPFYYDRVDNTYIPNDYKKVVLWAYDEVMKGNSSKAIARKLNDSDIPPPNGKRWEDRTITRALRNPITRGHYTWGDVFIENSHEPIITEEMYQQIKERLEERINTKIVSHVSVFRGKFICPRCGGTLTLNTVTRKRKKGYVTYKTYYCNTCKAKKESFGFSENEALRVFRDYLSELDLDKYKVKTKQNDDVVTIDIDKIMEQRKRYHKLYAKGLMQEEELFELIKETDETIAEYEKQKELVPRKSLDIDKIKKFKNALLESWEIFSLEDKADFIKMAIKSIDIEYVKLKNRHSIEIKEIEFY

SEQ ID NO: 51672 - DNA, 50 bp, Staphylococcus epidermidis; identical to SEQ ID NO: 51577
  source 1..50: mol_type = genomic DNA

SEQ ID NO: 51673 - DNA, 40 bp, Staphylococcus epidermidis; identical to SEQ ID NO: 26018
  source 1..40: mol_type = genomic DNA

SEQ ID NO: 51674 - DNA, 50 bp, Staphylococcus epidermidis; identical to SEQ ID NO: 51579
  source 1..50: mol_type = genomic DNA

SEQ ID NO: 51675 - DNA, 40 bp, Staphylococcus epidermidis; identical to SEQ ID NO: 51575
  source 1..40: mol_type = genomic DNA

SEQ ID NO: 51676 - protein, 458 aa, Staphylococcus epidermidis
MNYERSYLRSCQVSTLEQKEHGYSIEEQERKLKSFCEINDWSISDVFIDAGFSGAKSDRPELQRMMNDIKRFDLVLVYKLDRLTRNVRDLLDLLEVFEQNNVAFRSATEVYDTSTAMGRLFVTLVGAMAEWERETIRERVMMGKRAAIKQGMILTPPPFYYDRVDNTYVPNDYKKVVLWAYDEVLKGVSSKAIARKLNDSDIPPPNGKRWEDRTITRALRSPITRGHYTWGDVFIENSHEPIITEEMYQQIKERLEERINTKIVSHVSVFRGKFICPRCGGTLTLNTVTRKRKKGYVTYKTYYCNTCKAKKESFGFSENEALRVFRDYLSELDLDKYKVKTKQNDDVVTIDIDKIMEQRKRYHKLYAKGLMQEEELFELIKETDETIAEYEKQKELVPRKSLDIDKIKKFKNALLESWEIFSLEDKADFIKMAIKSIDIEYVKLKNRHSIKINDIEFY

SEQ ID NO: 51677 - DNA, 50 bp, Staphylococcus epidermidis; identical to SEQ ID NO: 51577
  source 1..50: mol_type = genomic DNA

SEQ ID NO: 51678 - DNA, 40 bp, Staphylococcus epidermidis; identical to SEQ ID NO: 26018
  source 1..40: mol_type = genomic DNA

SEQ ID NO: 51679 - DNA, 50 bp, Staphylococcus epidermidis; identical to SEQ ID NO: 51579
  source 1..50: mol_type = genomic DNA

SEQ ID NO: 51680 - DNA, 40 bp, Staphylococcus epidermidis; identical to SEQ ID NO: 51575
  source 1..40: mol_type = genomic DNA

SEQ ID NO: 51681 - protein, 461 aa, Staphylococcus epidermidis
MDVAIYCRVSTLEQKEHGYSIEEQERKLKSFCEINDWNVADVFVDAGFSGAKRDRPELQRMMNDIKRFDLILVYKLDRLTRNVRDLLDLLEIFEQNNVAFRSATEVYDTSTAMGRLFVTLVGAMAEWERETIRERTQMGKLAALKKGIMLTTPPFYYDRVDNKFVPNKYKKVVLFAYEEALKGKSAKSIARKLNNSDIPPPNNRKWEDRSITRALRSSFTRGHFEWGGVYLENNHEPIITEEMYEKVKDRLEERTNTKKIKHISIFRSKLVCPTCHNKLTMNTHKVTLKDRVYYNKHYYCNNCKETPNLKPVYIRAEEVERVFYEYLQHQDLTQYEVIEDTEEKEVAIDINKVMQQRKRYHKLYANGLMNEDELAELIEETDAAIEEYKKQNENKEVKQYSDEDITEYKSLLLEMWEISSDEEKAEFIQMAIKNIFIEYVLGKDDNKKKRRSLKIKDIEFY

SEQ ID NO: 51682 - DNA, 50 bp, Staphylococcus epidermidis; identical to SEQ ID NO: 37872
  source 1..50: mol_type = genomic DNA

SEQ ID NO: 51683 - DNA, 40 bp, Staphylococcus epidermidis; identical to SEQ ID NO: 26018
  source 1..40: mol_type = genomic DNA

SEQ ID NO: 51684 - DNA, 50 bp, Staphylococcus epidermidis
  source 1..50: mol_type = genomic DNA
ttatggaagtatgcacaattaacctttgtatagtgtgtgtacttccatat

SEQ ID NO: 51685 - DNA, 40 bp, Staphylococcus epidermidis; identical to SEQ ID NO: 51575
  source 1..40: mol_type = genomic DNA

SEQ ID NO: 51686 - protein, 495 aa, Chryseobacterium indologenes
MKTAYLYVRVSTDEQKRKGYSLPEQEDRLLKYCKYNNIEVKGIYREDYSAKNFNRPEWKELFSEIKKKSSEDKNILFIKWDRFSRNVEYAYEMIGKLRKYKTTAMAIDQPIDFSVPESTVMLAVYLAVPEAENTRRAQNTSNGIRRAKLMGRYPNKAPIGFINVTLIDGKKAIVPKEPEAEIIKWAFSQAVQNHHKISEISKIANEKGLICSRSYFFRILRNPIYCGIISVKLNSNERQMIKGLHEPLISEALFDQVQSVINTKRKMTAKRDDLKEMFFLRGFLTCPVCGRKLTGSFSKGKQNRYPYYHCDNRCKIRIGAVLLNDSYQNKLQELILADNTMELFKNILENQNIKTQKANYLYAQQLVDRKIKEEKLTLSRGRKLFIAGILKIDDYNELKQESQINTKNLKKEERDITLNLRVIDKMNQMENKTFREIFQKFVEFDTSDKKHLVNLIPPIDIDYKTGDLSLEFKPAFSKILSKKSNRKNNRKNEFH

SEQ ID NO: 51687 - DNA, 50 bp, Chryseobacterium indologenes
  source 1..50: mol_type = genomic DNA
taataaatagttgtctccttaagtgacctcagcggtgcattttccgaaca

SEQ ID NO: 51688 - DNA, 40 bp, Chryseobacterium indologenes
  source 1..40: mol_type = genomic DNA
cttaaaaaaggagctttgtgaccgcagaaggattcgaacc

SEQ ID NO: 51689 - DNA, 50 bp, Chryseobacterium indologenes
  source 1..50: mol_type = genomic DNA
taataaatagttgtctccttaagtaccctcagcggtgcattttccgaaca

SEQ ID NO: 51690 - DNA, 40 bp, Chryseobacterium indologenes
  source 1..40: mol_type = genomic DNA
cttatgagaggtgctttgtacacacagaagcattcaatct

SEQ ID NO: 51691 - protein, 589 aa, Methylobacterium radiotolerans
MENEFSPGGKPAPATAYSYLRLSSKRQANTEDSKTYRDGFRRQIALRDEYLARNPHLTLDTRLVLHDIGVSGYTGANVARGGGGKLAAFLAEVEAGRIARGSHLLVESLDRMSRQQVGRAQAVLLSLVNSGIVVVSLTDGQVYRESRDASQFIMSIMSLTRAHEESVVKATRLRQTWERKRQVALERPISGRCPAWLKVVDGTFVADDDRVEVVREILGHLADGIGRDRIARILNARGEKPWGHGTQWHGGTVQKLTDNRALIGEFQPHKLVYEERKGVMVAKRVPVGDPIPGYFPRVVDDELWTRARAVAVKRRLGKAPNAGGRQGTYVTNLFGEVAACRSCGKRMTYRDRGPRSFAVLRCSGERAGTCTNSYRFPYQDNENAILSWLIKVDFSGKAPGEAARLDEEMRRTIAKRDEMQSRGEAIVRDVGVSSRFAKAPLAEIEAELNVLEVRISELGAQALALKASGGAEERRMAVAHLIELHQDKAPVEQIFAARWRIRQIIRETVAEMWCHPEGYIDILTIDGEIHLFRDGYWWCAEEELWVPWAGAAFGGGYWATKKELARRRVWLEEAYRIREAKLGSKEESA

SEQ ID NO: 51692 - DNA, 50 bp, Methylobacterium radiotolerans
  source 1..50: mol_type = genomic DNA
tgccagtcaactcgcatgattgagacgacaatcttgcgtgttgaccggct

SEQ ID NO: 51693 - DNA, 40 bp, Methylobacterium radiotolerans
  source 1..40: mol_type = genomic DNA
gtggaggcccgagatcgacaccacgtggtagatgcccgcg

SEQ ID NO: 51694 - DNA, 50 bp, Methylobacterium radiotolerans; identical to SEQ ID NO: 51692
  source 1..50: mol_type = genomic DNA

SEQ ID NO: 51695 - DNA, 40 bp, Methylobacterium radiotolerans
  source 1..40: mol_type = genomic DNA
gtgcaggcacaagctcaacaccacatggaagctgccaggg

SEQ ID NO: 51696 - protein, 594 aa, Methylobacterium radiotolerans
MPAFGLGIRALQSLGDTMWTDAGGEARREPAVAYSYLRLSSKRQANAADGKKYRDGFRRQIAHRDRYLAENPHLTLDTRLVLHDIGVSGFTGANAAPGGQGKLAAFLAEVRQGRIAKGSYLLVESLDRMSRQQVSRAQAILLDLVNSGIVVVSLADGQVYREDAHPTQFIISIMSLTRAHEESVVKAGRLRDTWEQKRRVAGERKLSGRCPAWLKLVDGEFVPHKDRVRVIKEILRHLADGLGRDRIAMILNQRGEKPWGHGHQWHGGTVQKLTDNRALIGEYHPHKLDYEERNGVMVARRVPAGDPIPDYYPRVVDDELWARARRVAEKRRLGKARNEGGRLGTVVSNIFGPVAVCGVCKRRMNHRDRGPRSFAVLRCSGERAGTCTNGYRYPYQDTEDVILSWLVKVDITGGAPGEIARLSADLDTQVAMRDELRRRGERIVRRFADDDEFSTEPLADIRREMGAIKQSIASLASKIRLLKEAGGRDEREMAVAMLHRLKRENAPAAQVFAVRSRIRQLIRDTVVGMWCFPDGGIDVITVDGGYHCFRDGFMWHDDDGIWIPSAMALAHGGQTATKAEMARRQAWLREFYEK

SEQ ID NO: 51697 - DNA, 50 bp, Methylobacterium radiotolerans
  source 1..50: mol_type = genomic DNA
ggccggcaaactggaaggattgatacgacaatcttgcgagtatgccggct

SEQ ID NO: 51698 - DNA, 40 bp, Methylobacterium radiotolerans; identical to SEQ ID NO: 51693
  source 1..40: mol_type = genomic DNA

SEQ ID NO: 51699 - DNA, 50 bp, Methylobacterium radiotolerans; identical to SEQ ID NO: 51697
  source 1..50: mol_type = genomic DNA

SEQ ID NO: 51700 - DNA, 40 bp, Methylobacterium radiotolerans; identical to SEQ ID NO: 51695
  source 1..40: mol_type = genomic DNA

SEQ ID NO: 51701 - protein, 540 aa, Enterocloster lavalensis
MSRQTTQTLITALYPRLSHEDELQGESNSISNQKRILENYAKQNGFGNLKWYTDDGYSGANFQRPGFQSMLADIEAGLVGTVIVKDMSRLGRNYLQVGMYTEMIFPQKNVRFIAINDGVDSAQGDNDFAPLRNIFNEWLVRDTSKKIRAVKRSKGMSGKPVTSKPVYGYLMDEDENFIIDEEAAPVVKQIYSLCLAGNGPTKIARMLTEQQTPTPGTLEYRRTGSTRRYHPGYECKWATNTVAHILENREYTGCLVNFKTEKVSYKVKQSKENPEEKQVIFENHHEPIIDHDTWERVQELRKQRKRPNRYDEVGLFSGILFCADCGSVMYQQRYQTDKRRQDCYICGSYKKRTRDCTAHFIRTDLLTEGVTENLRKVTSYAAKHEARFMKLLTEQTEDGSKRRNAAKKKELEAAEKRIAELSAIFKRLYEDSVTGRISDERFTELSADYEAEQKELKEKAAVLQGELSRTLEATANAEKFMKVVRKYTSFEELTPTLLREFVEKIVIHESEALDGKRRGKLRRQEIEIYYSFVGKVELPD

SEQ ID NO: 51702 - DNA, 50 bp, Enterocloster lavalensis; identical to SEQ ID NO: 38182
  source 1..50: mol_type = genomic DNA

SEQ ID NO: 51703 - DNA, 40 bp, Enterocloster lavalensis
  source 1..40: mol_type = genomic DNA
atgcaataacccgcaggctaaaacctgcgggttatcattt

SEQ ID NO: 51704 - DNA, 50 bp, Enterocloster lavalensis; identical to SEQ ID NO: 38184
  source 1..50: mol_type = genomic DNA

SEQ ID NO: 51705 - DNA, 40 bp, Enterocloster lavalensis
  source 1..40: mol_type = genomic DNA
atgcaatcacctcccaccttaaccctgaggattataattt

SEQ ID NO: 51706 - protein, 556 aa, Pseudomonas salomonii
MTKAYAYIRYSRAIQATGDSENRQLTALELFETATGTKIVEVVYDKGKSAFRGDNARSGNFKEMLDRMQSGAIRRGDYLVVESIDRITRQRVLDGVELLQGILKKGINIYTTVDKKTYSYNDPSRDFENLLMISLIAKRANEESETKSGRLLSAWKARKAKAENGEVIIKKGKSIPYGLRVEEGQFVIHKEEQEEIKQLFELLLKFGINTAITKINETSLKKWNNGTLNKIIKHKTVIGCMATHRIEYTADGKAKKILTGFIENYYPNLIEPGLFYKAVDVMANRKQKNWTGRRTEQDFNIFKHCIFCAECGGKLYYDHRGSRYKGKIYPFFKCDNARVQKHICTADNIRFEYVLGSLLDSIKMINRVATEFKRDFKGISTQARYINPKINSLLKADGENNNLILEEKQKQLISRRTKLDNMNTQMVEADYNVPTKFIQEISKTEKEIEALNKEILLIHSAFADEGTIDVQDTKTVTDLFMTDEGRAKLNYFFKTNDIIFLVSHTKATRETRFSMRRKNELIDEKICNNFIKFPLKEILESYGLSDLQTMFNLTVN

SEQ ID NO: 51707 - DNA, 50 bp, Pseudomonas salomonii
  source 1..50: mol_type = genomic DNA
cacggacaaagggtttacctaatcatggtcaggtgatatgatttaccgag

SEQ ID NO: 51708 - DNA, 40 bp, Pseudomonas salomonii
  source 1..40: mol_type = genomic DNA
cccacgacgcaaccggatcatcagcggtctgtcgctgggg

SEQ ID NO: 51709 - DNA, 50 bp, Pseudomonas salomonii
  source 1..50: mol_type = genomic DNA
cacggacaaagggtttacctaatccaggtcaggtgatatgatttaccgag

SEQ ID NO: 51710 - DNA, 40 bp, Pseudomonas salomonii; identical to SEQ ID NO: 4075
  source 1..40: mol_type = genomic DNA

SEQ ID NO: 51711 - protein, 618 aa, Veillonellaceae bacterium; identical to SEQ ID NO: 11111

SEQ ID NO: 51712 - DNA, 50 bp, Veillonellaceae bacterium; identical to SEQ ID NO: 11112
  source 1..50: mol_type = genomic DNA

SEQ ID NO: 51713 - DNA, 40 bp, Veillonellaceae bacterium
  source 1..40: mol_type = genomic DNA
ctattcttacggatcctcagatgtgggccgtagtgatcat

SEQ ID NO: 51714 - DNA, 50 bp, Veillonellaceae bacterium; identical to SEQ ID NO: 11469
  source 1..50: mol_type = genomic DNA

SEQ ID NO: 51715 - DNA, 40 bp, Veillonellaceae bacterium
  source 1..40: mol_type = genomic DNA
ctaaacttgcggatggcctattgtgggaccttgtgatcat

SEQ ID NO: 51716 - protein, 619 aa, Enterococcus faecium; identical to SEQ ID NO: 14616

SEQ ID NO: 51717 - DNA, 50 bp, Enterococcus faecium; identical to SEQ ID NO: 11112
  source 1..50: mol_type = genomic DNA

SEQ ID NO: 51718 - DNA, 40 bp, Enterococcus faecium
  source 1..40: mol_type = genomic DNA
gcgcctattcttgccaagagaagaaggaagccaacgcggt

SEQ ID NO: 51719 - DNA, 50 bp, Enterococcus faecium; identical to SEQ ID NO: 37649
  source 1..50: mol_type = genomic DNA

SEQ ID NO: 51720 - DNA, 40 bp, Enterococcus faecium
  source 1..40: mol_type = genomic DNA
ttccctttttatgccaagagcagatggaagccaatgaagt

SEQ ID NO: 51721 - protein, 452 aa, Listeria welshimeri; identical to SEQ ID NO: 27006

SEQ ID NO: 51722 - DNA, 50 bp, Listeria welshimeri; identical to SEQ ID NO: 39117
  source 1..50: mol_type = genomic DNA

SEQ ID NO: 51723 - DNA, 40 bp, Listeria welshimeri; identical to SEQ ID NO: 33788
  source 1..40: mol_type = genomic DNA

SEQ ID NO: 51724 - DNA, 50 bp, Listeria welshimeri
  source 1..50: mol_type = genomic DNA
tttagtacctcgttatctctcgcttaaagaagaagaaacgagaaactaaa

SEQ ID NO: 51725 - DNA, 40 bp, Listeria welshimeri
  source 1..40: mol_type = genomic DNA
ttttggttcgagatatgattatccactaaaaggaaccatg

SEQ ID NO: 51726 - protein, 452 aa, Listeria welshimeri
MKAAIYIRVSTQEQIENYSIQAQTEKLTALCRSKDWDVYDIFIDGGYSGSNMNRPALNEMLSKLHEIDAVVVYRLDRLSRSQRDTITLIEEYFLKNNVEFVSLSETLDTSSPFGRAMIGILSVFAQLERETIRDRMVMGKIKRIEAGLPLTTAKGRTFGYDVIDTKLYINEEEAKQLRLIYDIFEEEQSITFLQKRLKKLGLKVRTYNRYNNWLTNDLYCGYVSYADKVHVRGIHEPIISEEQFYRVQEIFSRMGKNPNMNKESASLLNNLVVCSKCGLGFVHRRKDTVSRGKKYHYRYYSCKTYKHTHELEKCGNKIWRADKLEELIIDRVNNYSFASRNIDKEDELDSLNEKLKIEHAKKKRLFDLYINGSYEVSELDSMMNDIDAQINYYEAQIEANEELKKNKKIQENLADLATVDFNSLEFREKQLYLKSLINKIYIDGEQVTIEWL

SEQ ID NO: 51727 - DNA, 50 bp, Listeria welshimeri; identical to SEQ ID NO: 39127
  source 1..50: mol_type = genomic DNA

SEQ ID NO: 51728 - DNA, 40 bp, Listeria welshimeri; identical to SEQ ID NO: 33788
  source 1..40: mol_type = genomic DNA

SEQ ID NO: 51729 - DNA, 50 bp, Listeria welshimeri
  source 1..50: mol_type = genomic DNA
tttagtatctcgttatctctcgtttaagggagaagaaacgggataccaaa

SEQ ID NO: 51730 - DNA, 40 bp, Listeria welshimeri; identical to SEQ ID NO: 51725
  source 1..40: mol_type = genomic DNA

SEQ ID NO: 51731 - protein, 499 aa, Mycobacteroides abscessus
MKEERAVLYARISFDRTGEEIGVARQLRDLRELADTRGWEVIAEAVDNDISATKEVKRPGYEQVWTLVRSGKVDHVCVWQTSRFMRSRDDRARVISTFGAHNVDIVAVKGPSLDLRTAYGRGMADMMTSFDTMEGEVKSERVSAAIADLARRGKSWGICPYGWDRVGKGLNAKQIENQHEAGVVRELVDRLLSGESLNELHRDMNTRGEPSPGYAQWAKLSPEDRERRERKGRTQPPREWAKATIRALVARDANIGVRRYRKRDNGGTELQGAWPPIVERVKHDRVVALLNAPDRRCHTGPRPGARKHLLTNGVGYCGVCRGPLRVARRRGSLDQTLIYTCDQRGCTGRNQARVDELVTRVVLGRLAQPDAMDWLLGDGEQARRASDRCEELQLRLDEAADSQADGKITIRQLERITARLKPELEAAQQERDAAVRSLDMDTLRDLAGPEAESRWDGMPVSVRRAVLEALGIEVVILPRTKHGPGFEPESVQIAWKTAS

SEQ ID NO: 51732 - DNA, 50 bp, Mycobacteroides abscessus
  source 1..50: mol_type = genomic DNA
agttccggttagtgattaaccaggcagctatactaaccctaaagggtagt

SEQ ID NO: 51733 - DNA, 40 bp, Mycobacteroides abscessus
  source 1..40: mol_type = genomic DNA
acggtcggcgcattccaggcaactggtgatgccgggcagc

SEQ ID NO: 51734 - DNA, 50 bp, Mycobacteroides abscessus
  source 1..50: mol_type = genomic DNA
agttccggttagtgattaaccagggagctatactaaccctaaagggtagt

SEQ ID NO: 51735 - DNA, 40 bp, Mycobacteroides abscessus
  source 1..40: mol_type = genomic DNA
acagcaggggccttccagggagggggtgatgcctggcagg

SEQ ID NO: 51736 - protein, 490 aa, Priestia aryabhattai
MIGDNFIMNVGIYLRKSRGEDEVQDLAKHRDYLLKIAEDKGWKVKLYEEIASSQHYLERPALQHMLKDIEHREIDTILVYAPDRLSRKDVHFLTILDHLLQYGINKIYIKDTEYDLTSPHIRTQLSIMAVLAQAEYMLIAQRMSEGKMRSAEKGKWNGGTIKFGYTTNEENQLVINQNDYPLAREIVDRLLQGFSYHSIAKDFAERGIRTKRGKAWTTASLGDWFNSPTLRGHTSYKMKGKEIFTPNTHEAIVSEAEYQAIKKLQENRENNFKKKKNHVSHWLSGVLTCSNCEWSKKVQIDTKKGNKFYIRKCNSTIEDDFGNLIPCPSIGCKSDIVEDTIREYVQGYRDSLKEDLQHLLETDVTLLKAKKSENVKQLQKELDKLELRNEHLLEDLQDRIITREEFQTAKKKNTEKKENIQAKLRDAKLQLQEIDVSISYSQLQYAETLINRWDDLSHEDKNRLIKMLFQRIEYTRLDRSLEPELDIIPI

SEQ ID NO: 51737 - DNA, 50 bp, Priestia aryabhattai
  source 1..50: mol_type = genomic DNA
tactgtattctttaaggtattgtacagtcaaaacctaacagagtacagca

SEQ ID NO: 51738 - DNA, 40 bp, Priestia aryabhattai
  source 1..40: mol_type = genomic DNA
agctgcgatagcttttgtacaatcgatcacgcttcctccc

SEQ ID NO: 51739 - DNA, 50 bp, Priestia aryabhattai
  source 1..50: mol_type = genomic DNA
tactgtattctttaaggtattgtagagtcaaaacctaacagagtacagca

SEQ ID NO: 51740 - DNA, 40 bp, Priestia aryabhattai; identical to SEQ ID NO: 19830
  source 1..40: mol_type = genomic DNA

SEQ ID NO: 51741 - protein, 563 aa, Streptomyces sampsonii
MERDDLPTLRALGFEDEELRALGLWDVPTGEPFDLAEAYIRRSKRSDDLASLRAHVRDICRTALSEGKRIRHVWFEQKSASKAYVKREEFDNAVSAVKAGLSKTLYIWKTDRLSRRGMGHVGLLLDEFDKRGARIVSVTEGLDSSKGSRMVFAILSERARDEAKDIALRTKNGVDAHKAEGKWLGGVTPYGLECPKETGKLQHKAAEYPTARAIAVALLDGKTPAEIANDLNTRNVPTRKGKRWRAQTIIHLAHSPSWAGLIPNRERATDEFGQPLGKWHRGGEPLLNAKGHPIKCGKGVVSYAEWVRINELISGRSKPGSAIGDKTRGIRKAATIMTGTLRCPHCKGPMGNGGRNYRCQARINQGPSVCKGVASDRKRIDDAMGALWIGHVLRLSAESPTIHNIARRFLNYQDPEKEARKRAVSAALDSAVSRELRLNKEFFVGGMDETQYDALRKDLGAQIESLKTELAELSKGADLTPLMSTEALAALWESEGMEGKRALLSAALKSVTLLPAKCRGDRTPITERLVPEWRDTDGMPDDVRKGAQKTIERRRARKLAGAA

SEQ ID NO: 51742 - DNA, 50 bp, Streptomyces sampsonii
  source 1..50: mol_type = genomic DNA
ggtgttgcaccgttggttcatgggcacccgtgaaccaacggtccaacacc

SEQ ID NO: 51743 - DNA, 40 bp, Streptomyces sampsonii
  source 1..40: mol_type = genomic DNA
ggtgaagttcatccacgcccaccagacggcgaagaagacc

SEQ ID NO: 51744 - DNA, 50 bp, Streptomyces sampsonii
  source 1..50: mol_type = genomic DNA
ggtgttgcaccgttggttcatgggttcccgtgaaccaacggtccaacacc

SEQ ID NO: 51745 - DNA, 40 bp, Streptomyces sampsonii; identical to SEQ ID NO: 19845
  source 1..40: mol_type = genomic DNA

SEQ ID NO: 51746 - protein, 519 aa, Mediterraneibacter faecis
MNIAAYCRVSTDKADQLNSLEAQKEFFSEYTKRTGDTLIRLYADEGISGTKIKNRKEFLRMMSDAEHGLFDMVVVKDISRFARNTVDLLQNVRKLKSLGIETQFLTANMTSMGNSEFVLTIFGALAQEESANTSKRVKFGKKMNAEKGRVPNIVYGYDKTIGDYFNLAINKEESKVVQQIYKWYTEEGYGAAKIANMLNEKGYKTKRNCKWGQNATCRILTNEIYTGKIINGKQEVSDFLTGQRRDKDETEWMVVERPELRIIEDETFEKAQEILRGRHDAFNLSHERQSNKHLFSTLIKCKECGWSFRRTVRTYKNTYVRWVCSGRNGRGADSCPNKTVVDEEELIEVLQEYFTNVLKQKKKVITHVVNEFQRVYKAKDENVEYEKELNAELAKLQKTRQKYMDMYTDDLISREELNEKIGGSRQEMERIENELKMVSYHLTKGEQLENILNNTFKEIEDITDVHQMTNQQLKRLIQKIEVDKDGNVDIYLRLLGDLGLDESVLIEENETVLNCNDQT

SEQ ID NO: 51747 - DNA, 50 bp, Mediterraneibacter faecis
  source 1..50: mol_type = genomic DNA
ccgttctaaattgtaacgaccaaacatatagttgtaacaaaatagagagt

SEQ ID NO: 51748 - DNA, 40 bp, Mediterraneibacter faecis; identical to SEQ ID NO: 20103
  source 1..40: mol_type = genomic DNA

SEQ ID NO: 51749 - DNA, 50 bp, Mediterraneibacter faecis
  source 1..50: mol_type = genomic DNA
ccgttctaaattgtaacgaccaaatttatagttgtaacaaaatagagagt

SEQ ID NO: 51750 - DNA, 40 bp, Mediterraneibacter faecis
  source 1..40: mol_type = genomic DNA
gacccctaagaggacggtgtttaacaattttgcagaaagt

SEQ ID NO: 51751 - protein, 519 aa, Mediterraneibacter faecis
MNIAAYCRVSTDKADQLNSLEAQKEFFSEYTKRTGDTLIRLYADEGISGTKIKNRKEFLRMMSDAEHGLFDMVVVKDISRFARNTVDLLQNVRKLKSLGIETQFLTANMTSMGNSEFVLTIFGALAQEESANTSKRVKFGKKMNAEKGRVPNIVYGYDKTIGDYFNLAINKEESKVVQQIYKWYTEEGYGAAKIANMLNEKGYKTKRNCKWSQNATCRILTNEIYTGKIINGKQEVSDFLTGQRRDKDETEWMVVERPELRIIEDETFEKAQEILRGRHDAFNLSHERQSNKHLFSTLIKCKECGWSFRRTVRTYKNTYVRWVCSGRNGRGADSCPNKTVVDEEELIEVLQEYFTNVLKQKKKVITHVVNEFQRVYKAKDENVEYEKELNAELAKLQKTRQKYMDMYTDDLISREELNEKIGGSRQEMERIENELKMVSYHLTKGEQLENILNNTFKEIEDITDVHQMTNQQLKRLIQKIEVDKDGNVDIYLRLLGDLGLDESVLIEENETVLNCNDQT

SEQ ID NO: 51752 - DNA, 50 bp, Mediterraneibacter faecis
  source 1..50: mol_type = genomic DNA
ccgttctaaattgtaacgaccaaacatatggtagtaataaaacagaacga

SEQ ID NO: 51753 - DNA, 40 bp, Mediterraneibacter faecis; identical to SEQ ID NO: 20103
  source 1..40: mol_type = genomic DNA

SEQ ID NO: 51754 - DNA, 50 bp, Mediterraneibacter faecis
  source 1..50: mol_type = genomic DNA
ccgttctaaattgtaacgaccaaatttatggtagtaataaaacagaacga

SEQ ID NO: 51755 - DNA, 40 bp, Mediterraneibacter faecis; identical to SEQ ID NO: 51750
  source 1..40: mol_type = genomic DNA

SEQ ID NO: 51756 - protein, 554 aa, Blautia wexlerae; identical to SEQ ID NO: 9936

SEQ ID NO: 51757 - DNA, 50 bp, Blautia wexlerae; identical to SEQ ID NO: 9937
  source 1..50: mol_type = genomic DNA

SEQ ID NO: 51758 - DNA, 40 bp, Blautia wexlerae
  source 1..40: mol_type = genomic DNA
gattagtaagagcactgtacataaagactgcactgaccgt

SEQ ID NO: 51759 - DNA, 50 bp, Blautia wexlerae
  source 1..50: mol_type = genomic DNA
ccgttctaattagtgacaaccaaaaatatggaagtaacaatatagaacgg

SEQ ID NO: 51760 - DNA, 40 bp, Blautia wexlerae
  source 1..40: mol_type = genomic DNA
gatttttaaaagaatggtcaattaagacttcactgacagt

SEQ ID NO: 51761 - protein, 554 aa, Blautia wexlerae; identical to SEQ ID NO: 9936

SEQ ID NO: 51762 - DNA, 50 bp, Blautia wexlerae; identical to SEQ ID NO: 9937
  source 1..50: mol_type = genomic DNA

SEQ ID NO: 51763 - DNA, 40 bp, Blautia wexlerae
  source 1..40: mol_type = genomic DNA
gattagtaagagcacggtacataaggactgcactgaccgt

SEQ ID NO: 51764 - DNA, 50 bp, Blautia wexlerae; identical to SEQ ID NO: 51759
  source 1..50: mol_type = genomic DNA

SEQ ID NO: 51765 - DNA, 40 bp, Blautia wexlerae; identical to SEQ ID NO: 51760
  source 1..40: mol_type = genomic DNA

SEQ ID NO: 51766 - protein, 545 aa, Ruthenibacterium lactatiformans
MYGCLRKENDMDEFAARPVADILARYSTDNQNPVTIDVQVEKCREWCERNGYQVGKIFSDEAVSGMKETRVGYEACMMHLGMGGAQLVVVYDQSRMFREFTEWFQFRKDVDMLGARVASVTQPMVGGDLKDPAVFINEAATAMLNHAQVLITRQKTIDALKHNAREGKSSGGKPPLGYDLDKDKKYVVNEHEAGAVRLVFQLFARGFSYGEIVDELNSRGYLTKRGQPFGKNSIFDLLKNEKYIGRLVYGATKAQADGRWNSHAKSKEDAIVVENGVPAIIEQELWEQVQSRIRTRKGAGGRYSAKREYLLTGRVFCGDCGASMVVMGSKASGYQYYECNNKRRTHTCKMKNVRTEWLEQTVAASIKQMLNEPANIEMLVDVARDQERQITTEYDTRRAELASRYTRVCRQLENGVNALLEGVVSAELKEKVRRLEEEKAKIEAETAELNQYKGYVGLDDATIRRCVENVAKVDIDTPEGLKLILAVVSRVNIRTDTIEIKTLISTDGTDPDPTKSRPQHLELFPSESASGEKYHTTPENGSGHH

SEQ ID NO: 51767 - DNA, 50 bp, Ruthenibacterium lactatiformans
  source 1..50: mol_type = genomic DNA
agtaccatacaacacctgaaaacgggtcgggtcaccatatgtatagtact

SEQ ID NO: 51768 - DNA, 40 bp, Ruthenibacterium lactatiformans
  source 1..40: mol_type = genomic DNA
taacccgggttcgattcccggtcgggtcaccattaccagc

SEQ ID NO: 51769 - DNA, 50 bp, Ruthenibacterium lactatiformans
  source 1..50: mol_type = genomic DNA
agtaccatacaacacctgaaaacgaatcgggtcaccatatgtatagtact

SEQ ID NO: 51770 - DNA, 40 bp, Ruthenibacterium lactatiformans
  source 1..40: mol_type = genomic DNA
ttgccctggtttaattcccaatcaggaaaccattccctgc

SEQ ID NO: 51771 - protein, 532 aa, Pseudomonas proteolytica
MTITNPLPRAFSDVFQSDETINVYSYIRFSSKAQKLGFGEIRQLEQLNRFFDQYPQARQVERYEDLGVSAFKGKNLKSGQLAKFVERIKSKEILPNALLLVESFDRISRMGGYDALELIISIIQADCAIYTLFDNRLYSKRKKDSSVDISLIQNILERANDESRAKSERITDAKARNLEKGQNGGIITKRCPFWISFVDGKFVLNENATAVKKATELCFDVGFQLIAQELNKENHPKRYSASSVSKFLHSHALYGSFLSLKLDENENRTVFNKEIKNYYPPLISEAEFHRISAKLKERLDPRLAGRKAEEFKNILRGLVFCKCGSTFRYHAQKSQYVDLVCSASMIGKCEFAKLGKGVRHRYALVEQLFLIFHAQIPFHKIIIKSDDVKALEKEHKEVLGQIILKEKALANNFSILEKSSESAQKYIMSRIDEVSLELDKLKSEEHKLSVKINSLHIASKSDLKVIEIYRLLVTEKGRIRINNFLHSQKVRLIITPVKKKYFSLEIFHGENYIDTIDVEKENYTARINAHLK

SEQ ID NO: 51772 - DNA, 50 bp, Pseudomonas proteolytica
  source 1..50: mol_type = genomic DNA
attctacgaatgacacctctcattgcaatgatgtgtctttttcgtagaaa

SEQ ID NO: 51773 - DNA, 40 bp, Pseudomonas proteolytica
  source 1..40: mol_type = genomic DNA
ttccagcatgccgatcaccgcgttcatgggcgtgcggatc

SEQ ID NO: 51774 - DNA, 50 bp, Pseudomonas proteolytica
  source 1..50: mol_type = genomic DNA
attctacgaatgacacctctcattgtaatgatgtgtctttttcgtagaaa

SEQ ID NO: 51775 - DNA, 40 bp, Pseudomonas proteolytica; identical to SEQ ID NO: 4090
  source 1..40: mol_type = genomic DNA

SEQ ID NO: 51776 - protein, 503 aa, Aeromonas veronii
MKPRAWLYARFSSTQQQDGDSINRQVNAAQQWCSTNGVELQQTSFRDLAVSGWKSIKRPMFEQLIKAMAEGKIPRGSYVLFESTDRLSRRGWWHTQQLIRTITCVHDCKLVILDKGQVYTKENVNDVGQNIILMVSADMAEKESQRKSDLVSAAYKSKRQDGDVSRWPFWIDKTDKGFVPNENAETIRLIIELRLKGVGALGIAAELNRRGIKSARGGSWGHTSIRVVLSNSALFGTKDFYSMKTITQFDEHGEEIRVADNQLVQSMPDVFPPICDFTTWQQVQINGEKPGRKGQLSPFHNIIFCKCGAALGLQIGSAGERYRKCSRSKVGSCDQKMIRNFDETLVECLGRITYVSREIQKDEVPELQARLVKLEGVKDALMAAGALDALVDVYKDIAKVKDAIAAAQKVAVVPTTELKEVFTGSIDEQRIALKRLVEKVVVSRVENTASLKVHLTNGHFKVFGVNIGVKRESGKNTIFAKSDTEKMANWVSAEKDELHPWET

SEQ ID NO: 51777 - DNA, 50 bp, Aeromonas veronii
  source 1..50: mol_type = genomic DNA
tacgtgttgaattgacactcaaacttgttcaagtgtaaaatacccacgag

SEQ ID NO: 51778 - DNA, 40 bp, Aeromonas veronii; identical to SEQ ID NO: 21993
  source 1..40: mol_type = genomic DNA

SEQ ID NO: 51779 - DNA, 50 bp, Aeromonas veronii
  source 1..50: mol_type = genomic DNA
tacgtgttgaattgacactcaaactcgttcaagtgtaaaatacccacgag

SEQ ID NO: 51780 - DNA, 40 bp, Aeromonas veronii
  source 1..40: mol_type = genomic DNA
aaatgtgttccacttttactcgttcttaggacagaccgat

SEQ ID NO: 51781 - protein, 494 aa, Aeromonas veronii
MKAWLYARFSSSQQADGDSINRQVKAAQQWCGTNGVELQETSFRDLGVSGWKSIKRPMFEQLIKAMSEGKIPRGSYVLFESTDRLSRRGWRHTQELIRTITCVYDCKLVILDKGQVYTKENVNDVVQNILLMVAADMAEKESQRKSDLVSAAYKSKRQGGDVSRWPFWIDKTERGFVLNENAETIRLIIALRLKGVGALGIASELNRRGIKSSRGGNWGHTSIRVVLSNSALYGTKDFYSMKTIKQYDDNGEEIRVTDNQLVSSMPDVFPSLCDFTTWQQIQIKGEKPGRKGQSSPFHNMLFCKCGAGLSVQLGSAGERYRKCSRAKVGACDQVAIRNFDETLIDCLGRITYESSDTQKDELPELQARLAKLEGVKDALMAAGAMDALVDVYKDIAKAKDAVANAQKIAVVPTTQLKEVFSGTVDEQRVALKRVINRVVVNRMKNTASIKIHLTNGHLKVFGVNVGVKKQSGVNAVVSVTDTESFLSEIKVINT

SEQ ID NO: 51782 - DNA, 50 bp, Aeromonas veronii
  source 1..50: mol_type = genomic DNA
ggcgtgtttaattgacactgtaacttgttcatgtgtacaatctgcaagtc

SEQ ID NO: 51783 - DNA, 40 bp, Aeromonas veronii; identical to SEQ ID NO: 21993
  source 1..40: mol_type = genomic DNA

SEQ ID NO: 51784 - DNA, 50 bp, Aeromonas veronii
  source 1..50: mol_type = genomic DNA
ggcgtgtttaattgacactgtaactcgttcatgtgtacaatctgcaagtc

SEQ ID NO: 51785 - DNA, 40 bp, Aeromonas veronii; identical to SEQ ID NO: 51780
  source 1..40: mol_type = genomic DNA

SEQ ID NO: 51786 - protein, 463 aa, Staphylococcus epidermidis
MKVAIYTRVSTAEQNLNGFSIHEQRKKLISFCEINEWKEYEVFTDGGFSGGSTKRPALQDLFSRLTQFDLVLVYKLDRLTRNVRDLLEMLERFEKYNVSFKSATEVFDTTTAIGKLFITIVGAMAEWERETIRERSLFGSRAAVESGKYIREQPFVYDNIEGKLVPNENTKYIEYIVKKFKEGNSANEIARLLNSKKKPSKIKNWNRQTIIRLIKNPVLRGHTKFGDIFMENTHEPVLSDDDYHKVINAIENKTHKSKSKHNAIFRGVLKCPQCNGNLHLYAGTIRPKNGRSYNVRRYTCDKCHRDKYSRNISFNESEIENKFIEELEKMDLTRFEIHKPKKVEINIESDKKRIKEQRTKLLRAYTMGYVEEEEFKIIMDETQRQLEDIKREENKETVQEIDEKQIKSIGNFIIEGWKTLTIKEKEKLILSSVDKIDIEFIPREKNNNSNTNTVNIKKVHFIF

SEQ ID NO: 51787 - DNA, 50 bp, Staphylococcus epidermidis
  source 1..50: mol_type = genomic DNA
aatgtgggttatgtaactatagccgtggtgcttgttacataacgcacata

SEQ ID NO: 51788 - DNA, 40 bp, Staphylococcus epidermidis; identical to SEQ ID NO: 5678
  source 1..40: mol_type = genomic DNA

SEQ ID NO: 51789 - DNA, 50 bp, Staphylococcus epidermidis
  source 1..50: mol_type = genomic DNA
aatgtgggttatgtaactatagccacggtgcttgttacataacgcacata

SEQ ID NO: 51790 - DNA, 40 bp, Staphylococcus epidermidis
  source 1..40: mol_type = genomic DNA
catacatggaaaaaaatatactggaccgcttccttccacc

SEQ ID NO: 51791 - protein, 463 aa, Staphylococcus epidermidis; identical to SEQ ID NO: 51786

SEQ ID NO: 51792 - DNA, 50 bp, Staphylococcus epidermidis
  source 1..50: mol_type = genomic DNA
aatgtgggttatgtaactatagccgtggttcttgttacataacgaacata

SEQ ID NO: 51793 - DNA, 40 bp, Staphylococcus epidermidis; identical to SEQ ID NO: 5678
  source 1..40: mol_type = genomic DNA

SEQ ID NO: 51794 - DNA, 50 bp, Staphylococcus epidermidis
  source 1..50: mol_type = genomic DNA
aatgtgggttatgtaactatagccacggttcttgttacataacgaacata

SEQ ID NO: 51795 - DNA, 40 bp, Staphylococcus epidermidis; identical to SEQ ID NO: 51790
  source 1..40: mol_type = genomic DNA

SEQ ID NO: 51796 - protein, 463 aa, Staphylococcus epidermidis
MKVAIYTRVSTAEQNLNGFSIHEQRKKLISFCEINEWKEYEVFTDGGFSGSSTKRPALQDLFSRLTQFDLVLVYKLDRLTRNVRDLLEMLERFEKYNVSFKSATEVFDTTTAIGKLFITIVGAMAEWERETIRERSLFGSRAAVESGKYIREQPFVYDNIEGKLVPNENTKYIEYIVKKFKEGNSANEIARLLNSKKKPSKIKNWNRQTIIRLIKNPVLRGHTKFGDIFMENTHEPVLSDDDYHKVINAIENKTHKSKSKHNAIFRGVLKCPQCNGNLHLYAGTIRPKNGRSYNVRRYTCDKCHRDKYSRNISFNESEIENKFIEELEKMDLTRFEIHKPKKVEINIESDKKRIKEQRTKLLRAYTMGYVEEEEFKIIMDETQRQLEDIKREENKETVQEIHEKQIKSIGNFIIEGWKTLTIKEKEKLILSSVDKIDIEFIPREKNNNSNTNTVNIKKVHFIF

SEQ ID NO: 51797 - DNA, 50 bp, Staphylococcus epidermidis
  source 1..50: mol_type = genomic DNA
aatgtgtgttatgtaactatagccgtggtgcttgttacataacacacata

SEQ ID NO: 51798 - DNA, 40 bp, Staphylococcus epidermidis; identical to SEQ ID NO: 5678
  source 1..40: mol_type = genomic DNA

SEQ ID NO: 51799 - DNA, 50 bp, Staphylococcus epidermidis
  source 1..50: mol_type = genomic DNA
aatgtgtgttatgtaactatagccacggtgcttgttacataacacacata

SEQ ID NO: 51800 - DNA, 40 bp, Staphylococcus epidermidis; identical to SEQ ID NO: 51790
  source 1..40: mol_type = genomic DNA

SEQ ID NO: 51801 - protein, 463 aa, Staphylococcus epidermidis
MKVAIYTRVSTAEQNLNGFSIHEQRKKLISFCEINEWKEYEVFTDGGFSGGSTKRPALQDLFNRLTQFDLVLVYKLDRLTRNVRDLLEMLERFEKYNVSFKSATEVFDTTTAIGKLFITIVGAMAEWERETIRERSLFGSRAAVESGKYIREQPFVYDNIEGKLVPNENTKYIEYIVKKFKEGNSANEIARLLNSKKKPSKIKNWNRQTIIRLIKNPVLRGHTKFGDIFMENTHEPVLSDDDYHKVINAIENKTHKSKSKHNAIFRGVLKCPQCNGNLHLYAGTIRPKNGRSYNVRRYTCDKCHRDKYSRNISFNESEIENKFIEELEKMDLTRFEIHKPKKVEINIESDKKRIKEQRTKLLRAYTMGYVEEEEFKIIMDETQRQLEDIKREENKETVQEIDEKQIKSIGNFIIEGWKTLTIEEKEKLILSSVDKIDIEFIPREKNNNSNTNTVNIKKVHFIF

SEQ ID NO: 51802 - DNA, 50 bp, Staphylococcus epidermidis
  source 1..50: mol_type = genomic DNA
aatgtgtgttatgtaactatagccgtggtgcttgttacataacgcacata

SEQ ID NO: 51803 - DNA, 40 bp, Staphylococcus epidermidis; identical to SEQ ID NO: 5678
  source 1..40: mol_type = genomic DNA

SEQ ID NO: 51804 - DNA, 50 bp, Staphylococcus epidermidis
  source 1..50: mol_type = genomic DNA
aatgtgtgttatgtaactatagccacggtgcttgttacataacgcacata

SEQ ID NO: 51805 - DNA, 40 bp, Staphylococcus epidermidis; identical to SEQ ID NO: 51790
  source 1..40: mol_type = genomic DNA

SEQ ID NO: 51806 - protein, 463 aa, Staphylococcus epidermidis
MKVAIYTRVSTAEQNLNGFSIHEQRKKLISFCEINEWKEYEVFTDGGFSGGSTKRPALQDLLNRLTQFDLILVYKLDRLTRNVRDLLEMLERFEKCNVSFKSATEVFDTTTAIGKLFITIVGAMAEWERETIRERSLFGSRAAVESGKYIREQPFVYDNIEGKLVPNENTKYIEYIVKKFKEGNSANEIARLLNSKKKPSKIKNWNRQTIIRLIKNPVLRGHTKFGDIFMENTHEPVLSDDDYHKVINAIENKTHKSKSKHNAIFRGVLKCPQCNGNLHLYAGTIHPKNGKSYNVRRYTCDKCHRDKYSRNISFNESEIENKFIEELEKMDLTRFEIHKPKKVEINIEGDKKRIKEQRTKLLRAYTMGYVEEEEFKIIMEETQRQLEDIKREENTETVQEIDEKQIKSIGNFIIEGWKTLTIEEKERLILSSIDKIDIEFIPREKNNNSNTNTVNIRKVHFIF

SEQ ID NO: 51807 - DNA, 50 bp, Staphylococcus epidermidis; identical to SEQ ID NO: 51802
  source 1..50: mol_type = genomic DNA

SEQ ID NO: 51808 - DNA, 40 bp, Staphylococcus epidermidis; identical to SEQ ID NO: 5678
  source 1..40: mol_type = genomic DNA

SEQ ID NO: 51809 - DNA, 50 bp, Staphylococcus epidermidis; identical to SEQ ID NO: 51804
  source 1..50: mol_type = genomic DNA

SEQ ID NO: 51810 - DNA, 40 bp, Staphylococcus epidermidis; identical to SEQ ID NO: 51790
  source 1..40: mol_type = genomic DNA

SEQ ID NO: 51811 - protein, 463 aa, Staphylococcus epidermidis
MKVAIYTRVSTAEQNLNGFSIHEQRKKLISFCEINEWKEYEVFTDGGFSGGSTKRPALQDLFSRLTQFDLVLVYKLDRLTRNVRDLLEMLERFEKYNVSFKSATEVFDTTTAIGKLFITIVGAMAEWERETIRERSLFGSRAAVESGKYIREQPFVYDNIEGKLVPNENTKYIEYIVKKFKEGNSANEIARLLNSKKKPSKIKNWNRQTIIRLIKNPVLRGHTKFGDIFMENTHEPVLSDDDYHKVINAIENKTHKSKSKHNAIFRGVLKCPQCNGNLHLYAGTIRPKNGRSYNVRRYTCDKCHRDKYSRNISFNESEIENKFIEELEKMDLTRFEIHKPKKVEINIESDKKRIKEQRTKLLRAYTMGYVEEEEFKIIMDETQRQLEDIKREENKETVQEIDEKQIKSIGNFIIEGWKTLTIKEKEKLILSSVDKIDIEFIPRKKNNNSNTNTVNIKKVHFIF

SEQ ID NO: 51812 - DNA, 50 bp, Staphylococcus epidermidis; identical to SEQ ID NO: 51802
  source 1..50: mol_type = genomic DNA

SEQ ID NO: 51813 - DNA, 40 bp, Staphylococcus epidermidis; identical to SEQ ID NO: 5678
  source 1..40: mol_type = genomic DNA

SEQ ID NO: 51814 - DNA, 50 bp, Staphylococcus epidermidis; identical to SEQ ID NO: 51804
  source 1..50: mol_type = genomic DNA

SEQ ID NO: 51815 - DNA, 40 bp, Staphylococcus epidermidis; identical to SEQ ID NO: 51790
  source 1..40: mol_type = genomic DNA

SEQ ID NO: 51816 - protein, 463 aa, Staphylococcus epidermidis
MKVAIYTRVSTAEQNLNGFSIHEQRKKLISFCEINEWKEYEVFTDGGFSGGSTKRPALQDLFSRLTQFDLVLVYKLDRLTRNVRDLLEMLERFEKYNVSFKSATEVFDTTTAIGKLFITIVGAMAEWERETIRERSLFGSRAAVESGKYIREQPFVYDNIEGKLVPNENTKYIEYIVKKFKEGNSANEIARLLNSKKKPSKIKNWNRQTIIRLIKNPVLRGHTKFGDIFMENTHEPVLSDDDYHKVINAIENKTHKSKSKHNAIFRGVLKCPQCNGNLHLYAGTIRPKNGRSYNVRRYTCDKCHRDKYSRNISFNESEIENKFIEELEKMDLTRFEIHKPKKVEINIESDKKRIKEQRTKLLRAYTMGYVEEEEFKIIMDETQRQLEDIKREENKETVQEIDEKQIKSIGNFIIEGWKTLTIEEKEKLILSSVDKIDIEFIPREKNNNSNTNTVNIKKVHFIF

SEQ ID NO: 51817 - DNA, 50 bp, Staphylococcus epidermidis; identical to SEQ ID NO: 51802
  source 1..50: mol_type = genomic DNA

SEQ ID NO: 51818 - DNA, 40 bp, Staphylococcus epidermidis; identical to SEQ ID NO: 5678
  source 1..40: mol_type = genomic DNA

SEQ ID NO: 51819 - DNA, 50 bp, Staphylococcus epidermidis; identical to SEQ ID NO: 51804
  source 1..50: mol_type = genomic DNA

SEQ ID NO: 51820 - DNA, 40 bp, Staphylococcus epidermidis; identical to SEQ ID NO: 51790
  source 1..40: mol_type = genomic DNA

SEQ ID NO: 51821 - protein, 463 aa, Staphylococcus epidermidis
MKVAIYTRVSSQEQALHGHSIHEQKRKLISYCEINDWEQYEVFTDGGFSGGSTKRPALQQLFNRLDQFDLVLVYKLDRLTRNVRDLLEMLERFEKHDVSFKSATEVFDTTTAIGKLFITIVGAMAEWERETIRERSLFGSRAAVESGKYIRIEPFMYDNVDGKLVPNEHVKYIDYIVDKFKKGVSASEIARLLNGKKKPPKIKNWNRQSIIRIMKNPVLRGHTKHGDMFIENTHEPVISEDDYYRVVDVIENRTHRSKTKHPAIFRGVIQCPQCGSKLHLYAGTIKPKNGKPYGVRRYICDKCHRDKSVRNISFNETEIENKFVDELNKLDLSRFEVHKPQQQTNDIENDEKKIKEQRTKLLRAYTMGYVEEEEFKTIMDETQRLLDDIKREDEPEVIKEISEQQIRSISNFIVKGWNNLTVEEKEKLILSTVENINIQFIPRRLNENGNTNTVNIEKIHFIF

SEQ ID NO: 51822 - DNA, 50 bp, Staphylococcus epidermidis
  source 1..50: mol_type = genomic DNA
aatgtgtgttatgtcactattgccgtacctcttgttacacaacacttata

SEQ ID NO: 51823 - DNA, 40 bp, Staphylococcus epidermidis; identical to SEQ ID NO: 5678
  source 1..40: mol_type = genomic DNA

SEQ ID NO: 51824 - DNA, 50 bp, Staphylococcus epidermidis
  source 1..50: mol_type = genomic DNA
aatgtgtgttatgtcactattgccacacctcttgttacacaacacttata

SEQ ID NO: 51825 - DNA, 40 bp, Staphylococcus epidermidis; identical to SEQ ID NO: 51790
  source 1..40: mol_type = genomic DNA

SEQ ID NO: 51826 - protein, 521 aa, Escherichia coli
MKVPVWCYARISTLKQIDGFGIQRQINTINQFLQCVELDHRLPFTLDVDNVTQMVAEGKSAFRDKNWNEKTKLGQYRKMVMDGVISDSVLIVENIDRLTRLDPYMAIEIISGLVNRGTTILEIETGMTYSRYIPESITVLVMQCNRANGESKRKSIMMQKSHANRYGKVSKVRPRWFDVVEIDGIKQYRPNETAKAIQRMYNDYINGIGAAHIVRTYGNTDNGKAWTLVTVLRALSDKRVADDARYPPIIDKKLYDSVQALKAATNKKGNTHQKNMLNIFSGMSRCPVCNQSIIVKRNSHGNLFTVCLGKRTNKTCEARSISYFALERPLLTAIRGLDFSEVYKHEDKNVLTLRDQWIQNERDIAAFRERLSKASRYEKFVILDELETMNREQEELTIRLKSVDVPKDIQLTFDDDKLDLDTNYRIELNNRIKKLIQHINIVREDVSKSSYTIYCTIKYWTDVISHLVIIDVNIKRTGTGGTNTLTTTLRSVSSLNMDGTVSGNPDSDAWEYWKSFLDNLK

SEQ ID NO: 51827 - DNA, 50 bp, Escherichia coli; identical to SEQ ID NO: 50272
  source 1..50: mol_type = genomic DNA

SEQ ID NO: 51828 - DNA, 40 bp, Escherichia coli; identical to SEQ ID NO: 34068
  source 1..40: mol_type = genomic DNA

SEQ ID NO: 51829 - DNA, 40 bp, Escherichia coli
  source 1..40: mol_type = genomic DNA
cggtcccatcagcagcaatgtacagtcagtcgtaccaccg

SEQ ID NO: 51830 - DNA, 50 bp, Escherichia coli
  source 1..50: mol_type = genomic DNA
ctgtgtgcatgcatgtgtgtctgcgtgcatctatgtacctgtgtgcacct

SEQ ID NO: 51831 - protein, 492 aa, Streptomyces parvus
MKARAAEEAVRVVGVTADVSVSGDVDMFDRPALGEWLAPDKRELWDELWVTNQDRLSRSEPHFMSFVFKMLEWNKEIHVLDDPSFTEQMKTPEGRAILHVKSLGPHKELERIKQRIQDSHDRRRFSNRWPGGIPPFGYRIVYRYIDGKRCAYIELDEEMVVWLHRMRRWIIGNEAFSGIATRLLDSAVLTARDRARVARGKQTKSRAKLRKDDAESREQWSNGSVKALLTNEALLGCKKYQGKVLRDDAGDPVRIADPVFTAEEWESLQAAVRARSVTTARRVNRTSPAYGVATCSGCGSNGNHKVSRGHANGLEYRYYVCGNWPNSKRCKGISCRAEVLEEMMEILFLQLYGHERVTKRVWVPGSDSTRELEQVEAKIRRLMRQDEEGDWEDDRAEYRQRVNRLRERQRELKILPVVKSGWVEVDQGMTYAELWATLDLEGRRKRLLESNFRMMIGKGTAWPEKVPMQRPLVIQGEVVTPVPEPAPAALPE

SEQ ID NO: 51832 - DNA, 50 bp, Streptomyces parvus
  source 1..50: mol_type = genomic DNA
gtttgtgaagtcactggggtcctggagcggatcccagtgctttgacaaac

SEQ ID NO: 51833 - DNA, 40 bp, Streptomyces parvus
  source 1..40: mol_type = genomic DNA
cgtcctcgaaggggtcctggagcggatcacctacgccaac

SEQ ID NO: 51834 - DNA, 40 bp, Streptomyces parvus
  source 1..40: mol_type = genomic DNA
cgtcctcgaaggggtcctggggcggatcacctacgccaac

SEQ ID NO: 51835 - DNA, 50 bp, Streptomyces parvus
  source 1..50: mol_type = genomic DNA
ctgtgtgaaggtattggggttctggggctggtcccaggggggtgaggctc

SEQ ID NO: 51836 - protein, 536 aa, Cobetia amphilecti; identical to SEQ ID NO: 49916

SEQ ID NO: 51837 - DNA, 50 bp, Cobetia amphilecti
  source 1..50: mol_type = genomic DNA
gacacataacgctagcagattgtggacgtgaagacctacaatgtaggctg

SEQ ID NO: 51838 - DNA, 40 bp, Cobetia amphilecti
  source 1..40: mol_type = genomic DNA
cagcgaatagcaggttgtggccgccggccgcggcgatctc

SEQ ID NO: 51839 - DNA, 40 bp, Cobetia amphilecti
  source 1..40: mol_type = genomic DNA
cagcgaatagcaggttgtgttcgccggccgcggcgatctc

SEQ ID NO: 51840 - DNA, 50 bp, Cobetia amphilecti
  source 1..50: mol_type = genomic DNA
cactactaatggattcagattgtgttcgagaagactctcattttaggtta

SEQ ID NO: 51841 - protein, 604 aa, Bacteroides clarus
MTKIIGYARVSTTKQDLSRQKLKIKEFCENNNYELIEIIEDFGISGVVADRRGYLELQSRTYKDADMIVISELSRLSRQEDVTETVHNIQQIINKGLSVILLDSPSKIYEANKLLDITEILILTIKAWAAAQERLDIKKKNQDGKQALFQAYPYAVVDQKIPYGYKAVPNPNGKRPKYILEEVPEEVENIKRLFALVNSGKTLGAVARYFNERNITFRGYYSTVAILSNYIHSDIYRGIRRRTQRLGREEPYTIEVRIKPIISEEDFMKAQELIKNNYKNTPTGKVNHNPLKGIIKCRCGRAMTVKDKKPAAGISKLTYRCSCVDRKSHPDFCKYNIDEVSYDLTNEILYSLFKSMHTAEYINFFRNQTDNRVTELQEEIAGIEKRLSTLYLDKENLSNESKENANKFLLTTNPTLLNIIQEKQNQLDDKIKSIDKEIVKYKKSQSKKAADIERIKDNNGKEKLQNLTIEEQGELYHKYLERVNYIPVTTMQGYYIVQFLNGIKFYIAITKVRSIAMASLLLDNWSIDEKGIITANYDTLKSSDMKNFNIEMIRKTKTMTLQEYLKTDLAKERALHLDLSYRERYLKELHKAGLDGRLRPLKKE

SEQ ID NO: 51842 - DNA, 50 bp, Bacteroides clarus
  source 1..50: mol_type = genomic DNA
ttgggtttttccgttttattatactcgcttaactaaacagacttgcccaa

SEQ ID NO: 51843 - DNA, 40 bp, Bacteroides clarus; identical to SEQ ID NO: 23088
  source 1..40: mol_type = genomic DNA

SEQ ID NO: 51844 - DNA, 40 bp, Bacteroides clarus
  source 1..40: mol_type = genomic DNA
cggaatttgaaaagcatacattgccagcgctatcatccat

SEQ ID NO: 51845 - DNA, 50 bp, Bacteroides clarus
  source 1..50: mol_type = genomic DNA
ttgggttctttgctgtttttataaatgctaagataaacagctttgcataa

SEQ ID NO: 51846 - protein, 541 aa, Klebsiella pneumoniae
MPKAISYIRFSTKIQSVGDSTKRQGKYINDWLKRNPDYYLDESLRFQDLGISGFSGANAKSGAFGEFLAAVESGYIEAGSVLLVESLDRVSRQDIDTAGEQLRKILRSGVEVVTLVDNEWYTKESLKDSLSMIKAMLVMERAHEESAMKSTRLRSVWAAKRERAVNGEIMSKRCAAWLRVSEDRSHFEFIPENVKAVQRVFQLRLEGKSHAKIAKQMNEEGFYTLNQFNPVKGGWSQSSITELLSNQAVIGVKVPSKSMVVKGVSEIPDYYPAIISEQQFHAVQQLKQGAGRKPSSDLPLLTNLFKGVLRCSECGFIIIVSGVTAKRSGNYRCSMRYEGRCNAKGFSRLQTDRALVQGLLYNTNRLSLNRDNGSAIGALQSELEQLQKQRERLIKLAMLADDTESMAKDLKVLNGQIKDAEKSVSEVHQREQSSQLETISHLDLTVKKDRIEAQIIIKRIIKEIRLNTAGKKCDVFLHNGLKLLNFPLDRVVDGAQWLEILPLIDGDEFDFEGFTTKPRHLAFEEAPEWVKEMEEQPNQPL

SEQ ID NO: 51847 - DNA, 50 bp, Klebsiella pneumoniae
  source 1..50: mol_type = genomic DNA
gtgtatcaatagaaaggtatcttcaggattacacctttcttatgatacac

SEQ ID NO: 51848 - DNA, 40 bp, Klebsiella pneumoniae; identical to SEQ ID NO: 8148
  source 1..40: mol_type = genomic DNA

SEQ ID NO: 51849 - DNA, 40 bp, Klebsiella pneumoniae
  source 1..40: mol_type = genomic DNA
atggaccgggcggctgtcgaagatcacgcggttgacgtta

SEQ ID NO: 51850 - DNA, 50 bp, Klebsiella pneumoniae
  source 1..50: mol_type = genomic DNA
atgcataaaagataaggtatcttaaacatcaccacaatgttattatacac

SEQ ID NO: 51851 - protein, 573 aa, Blautia faecis
MAYNAQNKTGARVAIYVRVSTLHQIDRDSLPMQKQDLLAYAKLMLNTDDCVIFEDAGYSGKNTDRPKFQEMMSQMRAGAFTHLLVWKIDRISRNLLDFATMYNELKALGVTFVSKNEQFDTSTAMGEAMLKIILVFAELERNMTSERVTATMISRANNGLWNGGRIPYGYDYDYETHEFSVNEEESKVVILMHDMYEQERSLVRVVRELNERGYRSRAGNLWSPVSLLIILRNVFYCGDYRYNMLKEGDRQKVKDESEWVTVENHHVAIIPKDQKERIMATLDSNSKLCKQRNIYKSSKHTHVFGGLIYCGSCGKPLGSTPGNLTRDGWHYSKYTCPTRRKSVTLCTGKSTSDPIIGEFVFNYILNMLNAQNDFDKISSPEELEKLLLIGDTFEYIDHIESNGLNDLFNVLSSGTVNGAVFGKGASLPTKKATVEPEVARLRNEKQKTERALDRLRSLYLYADEAMSEAEYMIQKNKLEETLEDINDQIGMMNTDSWQQSVSDEEFIQRASEFIIAQKLSGRKYVNYKRLAMSVDSEVLKNFVVSIIDSITIQDGLVSNIVFKNGLCHTFIFR

SEQ ID NO: 51852 - DNA, 50 bp, Blautia faecis
  source 1..50: mol_type = genomic DNA
agttacaaaattagcatagcgtctcctatgtgtctggttcgctttaatat

SEQ ID NO: 51853 - DNA, 40 bp, Blautia faecis
  source 1..40: mol_type = genomic DNA
taatatcagcatcgcatccccaaatgaaaagaaccggtac

SEQ ID NO: 51854 - DNA, 40 bp, Blautia faecis
  source 1..40: mol_type = genomic DNA
taatatcagcatcgcatccataaatgaaaagaaccggtac

SEQ ID NO: 51855 - DNA, 50 bp, Blautia faecis
  source 1..50: mol_type = genomic DNA
tgttacaaaactttcacaatttgtattctgtgactggggacctatactat

SEQ ID NO: 51856 - protein, 577 aa, Methylobacterium radiotolerans
MGLPPRYAVSYARFSHKRQQTGTSIERQEETLSAYLKDNPDLVVMGDFSDKGVSGFRGKHAEKGALSRLLELLEGDRWPHPRVLVIENVDRLGREPLLDALDRFQRLIRAGVMVVVCDMNRLELDRESLNREPWRLDMVIHAMRRAHDESKRKSELVAAAWKFRIRKAVQSGAAVKGYVGPPWVSVDPVTKAYGIITAQDRAAADTVRQIFDWRATGLSVHGICKRLNAAGTPFFRANTAPGQVRQGFHQPYISELLKNRQVLGEHAFKAGEVIQSYFPAVVTPELFHRVQQSDTARDHTRGRKGAELSNLFTGMAKCSHCGGSMQMGRNRAGPNATKFLFCSQSKRRFQCASGGKFVNYRHLEKAVLDHLPSIPWIDIVRAETPDDPRPAMDHAIAEVEIAMAETKAIRDRAQDLVLRGHEEPFLATVVEKTAELKAMTARHETLVADRQAADQEWSNRPGLLSTAIECRDAMESLDPVERFNARTRLAEALRQIIGDFACDAPGKTVRLKIGLTFSMVFVMQFRKPPVVVAEIVGADGRAMRVPMPTRGEAGHRWLANQVVERSQMMSEAELALA

SEQ ID NO: 51857 - DNA, 50 bp, Methylobacterium radiotolerans
  source 1..50: mol_type = genomic DNA
ggggtggcaattgccttgacgagttgcctgtttgctgtatttgacaccct

SEQ ID NO: 51858 - DNA, 40 bp, Methylobacterium radiotolerans
  source 1..40: mol_type = genomic DNA
gggtaggtgacccggtggttggcccgggcgatcatcaccg

SEQ ID NO: 51859 - DNA, 40 bp, Methylobacterium radiotolerans
  source 1..40: mol_type = genomic DNA
gggtaggtgacccggtggtaagcccgggcgatcatcaccg

SEQ ID NO: 51860 - DNA, 50 bp, Methylobacterium radiotolerans
  source 1..50: mol_type = genomic DNA
gctttggcaatctgcataactaggaaccagtttgctgactctgacaactt

SEQ ID NO: 51861 - protein, 480 aa, Acutalibacter muris
MASKPNQELETRFRVLYIRVSTEAQAEEGYSIGAQQERLEAYCRAMGWKNYQLYIDPGFSGSNLNRPKMQQLIADVQAGKVCAVVVYKLDRLSRSQKDTLYLIEDIFIPNDVAFVSLNENIDTGTPYGRAMIGILSAFAQLERENIYQRTRMGMLERVKQGYWMGGGGVPYGYDYDRNQGILVPNPQQAEQVRKMYDLYLKGYSAQKIANMLGLHYDKIVTQILTRKSNTGVICYKGEEYPGLHEPIISEEIYNLTQIKMRERSEKSRVPTKGTHLLAGLVYCGECGARMRYVKWGKNGYKLYCYSKDNSKPHMKRADSCDSEPCWADQIEDLVIQDLFNISANLERSTKDDTAPPVNPLQELESQIAQTEAKVKRLYNLYAIDGNDMLLDTIEENKRQLALLREQLIMEEETRTRAKHIDLVRERVVSIRSAWGMLSMQERQTVLRDCIDRIIIHKNKVEIFYTFLKDKGKAGTAKYVA

SEQ ID NO: 51862 - DNA, 50 bp, Acutalibacter muris
  source 1..50: mol_type = genomic DNA
gtttttccccagggtactctcatgccgatgacgttcccttggggaaaaag

SEQ ID NO: 51863 - DNA, 40 bp, Acutalibacter muris
  source 1..40: mol_type = genomic DNA
gttttccacttatggggtgcccatgataatcggcgaggta

SEQ ID NO: 51864 - DNA, 40 bp, Acutalibacter muris
  source 1..40: mol_type = genomic DNA
gttttccacttatggggtgttcatgataatcggcgaggta

SEQ ID NO: 51865 - DNA, 50 bp, Acutalibacter muris
  source 1..50: mol_type = genomic DNA
gtttttctctggccaaatctcaggtttatcaggttagaaatggggaaaat

SEQ ID NO: 51866 - protein, 507 aa, Escherichia coli
MKRVISYIRFSSERQAKGDSLRRQSKMVNDWLKAHPEYYLDQDLSFRDLGVSGFTGKHLKGGLGDFLTAIEKGLVKAGDTLLIESLDRLSRQNVDRASELLRNILRSGVDVVTLSDGEHYTRESLKDPLALIKSILIMQRSHEESLRKSERIQAAWNRKKELISEGIKISKRCPAWLKLNDDRKSFSVIPEKVETVKRCFQLRLEGKSIWEIVRTLNAEGHQTLNQYKAGKFGQTSVQDLLKNRSVIGYFTPKGCEEISGYYPAIIDETTFYKVQQLSYARYGRKPASDKPMAVNLFKGVIRCSECGHALIITGFSDTRNGIYRCPLRNENRCSAKGLSRKQTDGTLLALLSRLDRFDSDMTNTIDTLKLHREHISSNIEKLVQLSLEIEDLSAITSKLKQLKGELSQVDADIEKETQRLKSIDVGCLSDCDLTTKAGRIEAQLIIKSAVKEVVLNTAKRRCKVTFHNGKAITLPITENPSDNVTEAIQSLSEVTERSLIDVDEVII

SEQ ID NO: 51867 - DNA, 50 bp, Escherichia coli
  source 1..50: mol_type = genomic DNA
tagtgtatttagaccttgctaatctttattagacacgtttaaatacacca

SEQ ID NO: 51868 - DNA, 40 bp, Escherichia coli; identical to SEQ ID NO: 5188
  source 1..40: mol_type = genomic DNA

SEQ ID NO: 51869 - DNA, 40 bp, Escherichia coli; identical to SEQ ID NO: 5189
  source 1..40: mol_type = genomic DNA

SEQ ID NO: 51870 - DNA, 50 bp, Escherichia coli
  source 1..50: mol_type = genomic DNA
taatgtagtttttagatgctaatcagtacttgatacatatcagttcaaca

SEQ ID NO: 51871 - protein, 465 aa, Staphylococcus schleiferi
MNVAIYCRVSSQEQANEGYSIHEQERKLKSFCEVNNWKSYKVFVDAGVSGGTINRPAFNNLLANLEKFDLVLVYKLDRLTRSVRDLLSLLETFEEHDVSFRSATEVFDTTSAIGKLFITIVGAMAEWERSTIRERSLFGSHAAVREGNYIRVAPFCYDNVDGKLVPNEHKKVIEYIVEKLLDGVTATEIARRLNNANNYPPTIKNWSKTTVIRLVNNPVMRGHTKHGDLFIENTHEPIITEHDYKRISERLSSRVNYKKQTHTSVFRGVLECPQCGHKLHYFKSKLKNKSKTYYSEGYRCDYCRTDKTARNIAVTFSEIEREFIEYMSNIRLSDNYGIEVEPKNEVVKIDINKIMRKRSRFQEAYGDGLMTKEEFKQKMFETQKLIDEYEEMENEKDVDDHITKEQVQAIQNLFRHIWDSPNVTREDKEEFVRQSIKKIDFDFIPKSKVKKNPNTLKINNIDLHF

SEQ ID NO: 51872 - DNA, 50 bp, Staphylococcus schleiferi
  source 1..50: mol_type = genomic DNA
catgtatggtttagcacattgtaggtggatattgttacaaaccatacata

SEQ ID NO: 51873 - DNA, 40 bp, Staphylococcus schleiferi
  source 1..40: mol_type = genomic DNA
taaataaggaacgagtaaagtcgcgccagtaccgcccatc

SEQ ID NO: 51874 - DNA, 40 bp, Staphylococcus schleiferi
  source 1..40: mol_type = genomic DNA
taaataaggaacgagtaaaatcgcgccagtaccgcccatc

SEQ ID NO: 51875 - DNA, 50 bp, Staphylococcus schleiferi
  source 1..50: mol_type = genomic DNA
aatggatggagggataaattgtagatggatattggatggatggatggata

SEQ ID NO: 51876 - protein, 465 aa, Staphylococcus schleiferi
MNVAIYCRVSSQEQANEGYSIHEQERKLKSFCEVNSWKSYKVFVDAGVSGGTINRPAFNNLLANLDKFDLVLVYKLDRLTRSVRDLLSLLETFEEHGVSFRSATEVFDTTSAIGKLFITIVGAMAEWERSTIRERSLFGSHAAVREGNYIRVAPFCYDNIDGKLVPNEHKKVIEYIVEKLLEGVTATEIARRLNNANNYPPTIKNWSKTTVIRLVNNPVMRGHTKHGDLFIENTHEPIITEHDYKRISERLSSRVNYKKQTHTSVFRGVLECPQCGHKLHYFKSKLKNKSKTYYSEGYRCDYCRTDKTARNIAITFSEIEREFIEYMSNIRLSDNYGIEVEPKNEVVKIDINKIMRKRSRFQEAYGDGLMSKEEFKQKMFETQKLIDEYEGMENEKDVDDHITKEQVQAIQNLFRHIWDSPSVSREDKEEFVRQSIKKIDFDFIPKSKVNKTPNTLKINNIDLHF

SEQ ID NO: 51877 - DNA, 50 bp, Staphylococcus schleiferi; identical to SEQ ID NO: 51872
  source 1..50: mol_type = genomic DNA

SEQ ID NO: 51878 - DNA, 40 bp, Staphylococcus schleiferi; identical to SEQ ID NO: 51873
  source 1..40: mol_type = genomic DNA

SEQ ID NO: 51879 - DNA, 40 bp, Staphylococcus schleiferi; identical to SEQ ID NO: 51874
  source 1..40: mol_type = genomic DNA

SEQ ID NO: 51880 - DNA, 50 bp, Staphylococcus schleiferi; identical to SEQ ID NO: 51875
  source 1..50: mol_type = genomic DNA

SEQ ID NO: 51881 - protein, 526 aa, Clostridium acetobutylicum
MKVAIYSRKSKFTGKGESIGNQIELCKNYCKDNLKNITEFLVYEDEGFSGKDINRPKFKNMLKDAQSKKFKVLICYRLDRVSRNISDFYSFINELNKYNINFISIREQFDTSTPMGRAMMYIASVFAQLERETIAERIKDNMIELAKMGRWLGGQTPLGFKSKRILHSDNKAKKRSIYVLTPISDELEKVNLIYNRYIETSSVNSTLKYLLSNNLTGKNGGEFSAMSINDILRNPAYVMSDDSVFSYLKEKGINTYGIPNKNGILIYNKKKEQSKINDTIKWIAAVSNHKGIIESYRWLYVQRSLDKNSKKTTPRQGTSKKSLLSGILKCGICGSPMRVSYGRPRKDGSGRIYYYTCTMKANSGKARCNNPNVRGDKLEAIILTNLKKLDKKILLMELRTYAKTITPPLPKKELLQKRKQMNALLNNLSKVSNTNSSEFILSKINKLGEEITKLENKLNNLKNSKQCDFNSEILISSLDDFKTTFKLLDTINAKRCMLEAIIEKIEWNGFTKTAYINLWGSKNTAI

SEQ ID NO: 51882 - DNA, 50 bp, Clostridium acetobutylicum
  source 1..50: mol_type = genomic DNA
taccgcaatataataaattatggtcatgcttggtttaatatattgctaca

SEQ ID NO: 51883 - DNA, 40 bp, Clostridium acetobutylicum
  source 1..40: mol_type = genomic DNA
tgattttcctggtcataaacatgcttggttatatgatgta

SEQ ID NO: 51884 - DNA, 40 bp, Clostridium acetobutylicum
  source 1..40: mol_type = genomic DNA
tgattttcctggtcataaacttgcttggttatatgatgta

SEQ ID NO: 51885 - DNA, 50 bp, Clostridium acetobutylicum
  source 1..50: mol_type = genomic DNA
tactgccattcattaacttatggccttgggtgggtttcttaatctctaga

SEQ ID NO: 51886 - protein, 461 aa, Mycobacteroides abscessus
MSVKAVIYTRISEDQTGEQEGVTRQLEDCVKLADQLGWEVVAHYDDNDLSAFNGKLRPGFEALLKSMAAGEFTALLVWHPDRLYRSPKDLERIIEIADARRVKIATVRAGDMDLSTPAGRMVARILGSVARQESEHKGDRQRRANEQRAAEGKWYTANRCFGYTHGGVPLEPEATAVRTAVADVLAGKSIRKVGMEWNEQGLKTTLGTSWNSPRVRRLLVNPRYAALRTYRGVVVGPGAWEPLIDADTHRGLVAFLSDPSRIKCTSFERKYIGSGVYRCGKCEGGLMKAAQPGGRKNRAYVCRDHAHVLRAGEPVDAYVEALVLEYLSRPDAKLVLDDGRDVDVAELQAQRAGLQARLDELASLFADGAIDGSQLRRGTNELRSRLTVLDSQLADLARTNPVADLLGAGDQLAEKWAAMSKDMQGKIVNELMTVTILPSPRGRRAFDPDYIRIDWKTGSAA

SEQ ID NO: 51887 - DNA, 50 bp, Mycobacteroides abscessus
  source 1..50: mol_type = genomic DNA
aggtacctaacctaaaaggtcttgcccaagacagcatagttgagatacct

SEQ ID NO: 51888 - DNA, 40 bp, Mycobacteroides abscessus
  source 1..40: mol_type = genomic DNA
cagcgcctcgtgctgcacgcccgcgatcgtggctgcaccc

SEQ ID NO: 51889 - DNA, 40 bp, Mycobacteroides abscessus
  source 1..40: mol_type = genomic DNA
cagcgcctcgtgctgcacgcacgcgatcgtggctgcaccc

SEQ ID NO: 51890 - DNA, 50 bp, Mycobacteroides abscessus
  source 1..50: mol_type = genomic DNA
aggtcccttgtttcaaaggtgtggcacaaggtaactggtaaaggatacct

SEQ ID NO: 51891 - protein, 637 aa, Microbacterium testaceum
MVARLQQVAPISDFVPPGSWRGGTGPTSVTVWGQTRSQPPGPTPATPAGPESFPQVVMQIPHHIHVAKHLDLRGEVSVNQGAKSARTMGRKEDYMNATTTLAPPIGTRLTAVSYLRVSTKEQAERDGDPEGYSLPAQREANRRKAESLGADIIEEFVDRGESARSADRPDLQRMLKFIAENPVNFVIVHKVDRLARSRADDVTINLAIQHANARLVSVSENIDETPSGMLLHGIMSSIAEFYSRNLANEVVKGMSQKAKTGGTPGRAPIGYRNRAAVNDEGREVRTVVLDDVRAPQICWAFEAYVSGEYTLTQLRTELTARGLTTPPTPKRASRPLTVSQLHHVLNNPYYLGIVTFQGTSYPGRHTPLVDQATWQKCQQMFASRSTGEKARIHNNYLKSSVFCGRCKSRLIIHHSQNAAGVIYPYFVCVGRHQKRTNCTMSAINIHDVERQVENLYKLVALTPDGAAMTKSRLKTAVEAGAAEAKRTQQMLLTQQAGLMDRSRKLLDAHLDGTIPGQLYPEEQERVNREMTVVSDRLGALKTEFEVLEQNLDDAIALAENCYEAYRRAPDALRRAYNQAFFRRILVTRDETVEGVLAEPFASIVTVSETANGASPEGEAPHADGSYNVICSKENDLV

SEQ ID NO: 51892 - DNA, 50 bp, Microbacterium testaceum
  source 1..50: mol_type = genomic DNA
ttgttctaaagagaacgatttggtggccccagcggaagccctttcgatta

SEQ ID NO: 51893 - DNA, 40 bp, Microbacterium testaceum
  source 1..40: mol_type = genomic DNA
gtcttcttggctatctggtggacctgaggggattcgaacc

SEQ ID NO: 51894 - DNA, 40 bp, Microbacterium testaceum
  source 1..40: mol_type = genomic DNA
gtcttcttggctatctggttaacctgaggggattcgaacc

SEQ ID NO: 51895 - DNA, 50 bp, Microbacterium testaceum
  source 1..50: mol_type = genomic DNA
ttttaataaactattctctttggttatgccagtggagaggttttccatta

SEQ ID NO: 51896 - protein, 498 aa, Streptomyces hygroscopicus
MSDGILLAREYRRLSDKKGGTSLEDQGEDNKAAADENDWDLGEPYIDDGLSASRYARKRRDDFDQLVADLESGPTGRESRFGADILMLWESSRGSRRVGEWVSFIELCETKRVRIWVTTHERLYDPANGRDRKALIDDAVDSEYESYKTHRRVSRTAPREARRGRPHGKAPYGLMPVYDVATGKLITWTADPDRAHVIQELFERLEEGHSFAAIERAFLLAGYLNKSGRPFTHGHLRRLAVTHAYAGLRYYKGTVYEGTWDGIVPRPRFWNVYRLVTDSSRITTSRTAAAHALTAGLWCGRCDTLLSFRMEKERKPVYRCKQCGIKIQRAPVDELIIGKPKDLGILLAYLARDDIYDVLRAPGSDDAAVREVRDDLARLRAERDELRNATGATLAEVRLLANSLQVKEAEVSALEARERELTVPASVLSIVQPGLDVWQSWRDAPIGARRATVRLIMSPRYLGRACILPSPRPGRNQVVAERLEWRHTNVPSPVPRWT

SEQ ID NO: 51897 - DNA, 50 bp, Streptomyces hygroscopicus
  source 1..50: mol_type = genomic DNA
cggatccctgttgggtgcttcacctggcagacataccgacaagggatcct

SEQ ID NO: 51898 - DNA, 40 bp, Streptomyces hygroscopicus
  source 1..40: mol_type = genomic DNA
cggcccccggtcggtcacctggcagatgcacggcgacccg

SEQ ID NO: 51899 - DNA, 40 bp, Streptomyces hygroscopicus
  source 1..40: mol_type = genomic DNA
cggcccccggtcggtcaccccgcagatgcacggcgacccg

SEQ ID NO: 51900 - DNA, 50 bp, Streptomyces hygroscopicus
  source 1..50: mol_type = genomic DNA
ctggtccccttcctgggcttcagccctcagagaccagctccagggatcct

SEQ ID NO: 51901 - protein, 512 aa, Vibrio parahaemolyticus
MKAYLYIRFSSKQQEQGDSVRRQEEAAQKWCKTHDVELSDMTFEDLGVSAFKEGGKRPALADLIEAIELGKIARDSYVLVENDDRLSRRGWYATQQMIRHMVLDLGVKLVVLSSNTIYDQTNIEDIAQNILLMFNADRAHKESLRKSEMIRAARQTRRDDETLTGKLPFWLTRVNDQILLDPIKADTVRMIVDLKKSGKSNQATARFLNDQNIKSATGGKWNASAIRMVCSNHAIYGAKAYFITDSSRKMTLDKVVEDKLPAIVTKADFDAVQTTQKHRGRRSTKTPFSLLLKCGKCGGGMVQRTSMYKEKKMIYRRCIASLEGRCDQNRLIREPDLILSTALKDMQYIDSVEQHVSKASGIQTQIDTLKQTQDKLIELGQVDALTNLYTRLAQLENQLVHAKVEDEANEQKPIDFNFKNVFDLEDAGEQNAMLKRVLESIEVHYLGVVDKKTSSKWRIKVNQRNKHHQSFVINQYHGFGNWEIVQVTDTEKFKKELDALTDDIDDCLDFDE

SEQ ID NO: 51902 - DNA, 50 bp, Vibrio parahaemolyticus
  source 1..50: mol_type = genomic DNA
acttagtagaatgaacatataacgaaagtattgtaccgaatctaataagt

SEQ ID NO: 51903 - DNA, 40 bp, Vibrio parahaemolyticus; identical to SEQ ID NO: 4428
  source 1..40: mol_type = genomic DNA

SEQ ID NO: 51904 - DNA, 40 bp, Vibrio parahaemolyticus; identical to SEQ ID NO: 4429
  source 1..40: mol_type = genomic DNA

SEQ ID NO: 51905 - DNA, 50 bp, Vibrio parahaemolyticus
  source 1..50: mol_type = genomic DNA
aattggcaggctgcacatatacctttattcttgtacttaaattgctaagt

SEQ ID NO: 51906 - protein, 655 aa, Vibrio antiquarius
MKPTIITYLRYSSKQQADGLSEFRQSEINRKFVEKFCEEHGVDLNEVISLKDLGVSAYRGLNLTLGSFSQTIKKFKSGEIKKRFNEDGDINTYLIVESLDRITRTGPFKSTQIFTELLEYTNIVVLADGEKKIYSKKSIDSTHGMMDLFMALISLQRSHTESLMKEYRSRKSWEKKREDLLNYFTLPEDEREGLERPKNATAMCPFWLTAKKDGRGYDFIPENKKVMDFLIEKLLDGNGMTRAVRLLNDEIDNGNLKPKLKKANRKTRHFRAAAYSGLFNSVISTVKGDYLLTESYYPTEDDVEQGKYPEKHLGKRVRKEVAVLKNYYPALMTESQAAYIRKMMDERRTSGTKPNKSIKNLAQGILRCPYCNSTYIKSKDRRNVYLRCNLAREGLCNAKVIKHDVFEHNLLQFCKGLNINKIISNQACDQVLDSSLKELEQKMIPLKVRKSELEDDIEQIVKNISSIKIPSLLEKVQDDYLAKENELKKVVQEIDLIETSIMKLQQQIAMSDGDNSLQELIDLTLDESADDEIRQRFNVELKKVVKSMTVLYRDTEDNPFGYHMISIQFLDGVHRLIPVHEKMTDKIHNILPYQDAVKVDSVDFSETVILPTDYLEGLESGKYPQLDGMAKYYQENPAKYLKLKYQIDHSQEIYE

SEQ ID NO: 51907 - DNA, 50 bp, Vibrio antiquarius; identical to SEQ ID NO: 39742
  source 1..50: mol_type = genomic DNA

SEQ ID NO: 51908 - DNA, 40 bp, Vibrio antiquarius
  source 1..40: mol_type = genomic DNA
aacggcaccaagcccaatggaaatggtactaatggccgct

SEQ ID NO: 51909 - DNA, 40 bp, Vibrio antiquarius
  source 1..40: mol_type = genomic DNA
aacggcaccaagcccaatggtaatggtactaatggccgct

SEQ ID NO: 51910 - DNA, 50 bp, Vibrio antiquarius
  source 1..50: mol_type = genomic DNA
gaaaggacacccttttcaacaatggtgctggggtaattggctgtccactt

SEQ ID NO: 51911 - protein, 462 aa, Rhodococcus hoagii
MQAVIYTRISRDREGAQLGVERQQADCEELAARLGWTVVGTFTDNDISAYSGRRRPGYEKLLQVLGDGSVRGLLVWHADRLHRSPVELEGFIDLCDRGGIEIQTVKAGTFDLSTASGKMVARMLGAAARHEVEHSIERQKRAKLQAAVDGKFRGGRRAFGFEADGMTLREIEAQAIRDATKRVLSGVSIAQMVREWNDAGLVTAFGGKLWTARTLKKVLVRPRNASLVTHEGEIIGSGQWPAIVDPDDYRALVALLGDPSRRLSYSYERKYLGSGVYVCGKCGAKMRTATQPGGRAGRAKTYKCSGGAHLGRVADRLDEYVTELVLGRLSQSDAAIVLEGREVDVVGLQTKRDGIQARLDELADLFAQGAIDGSQLRRGSESLRGNLSAVDEELAAARSSSALANLVLSGMDLREAWGELSVDVQGKIVDALMVVTILPAPRGRQPGGGYFDPKYIDIQWRA

SEQ ID NO: 51912 - DNA, 50 bp, Rhodococcus hoagii
  source 1..50: mol_type = genomic DNA
gtcctaagcgtccctttgatctggcgttgtgtcaagtgcaacactattaa

SEQ ID NO: 51913 - DNA, 40 bp, Rhodococcus hoagii
  source 1..40: mol_type = genomic DNA
ggaagcgtgtacgacctggcgttggcgtgcgcggtgctcg

SEQ ID NO: 51914 - DNA, 40 bp, Rhodococcus hoagii
  source 1..40: mol_type = genomic DNA
ggaagcgtgtacgacctggaattggcgtgcgcggtgctcg

SEQ ID NO: 51915 - DNA, 50 bp, Rhodococcus hoagii
  source 1..50: mol_type = genomic DNA
gcattaaacccatctatcatcttgaattgtctcaagacaaagacttttaa

SEQ ID NO: 51916 - protein, 599 aa, Ochrobactrum anthropi
MVKAYSYIRFSTPEQAKGDSLRRQTAAAEAWCAQRGIQLDDTLRDLGVSAFHGTNRTEGALKRFLTLVEEGRIERGSYLIVESLDRISRQSVDTAVYELLDLIRAGVVVVTLSDGQEYSNERLRTDWTPLIVSVAIMARAHEESLTKSKRVSAAWQRKKDLARAEKKPLTPRCPEWLELRDGKFHLRPARVAIVHRIFQYTIDGYGRREIVKRLNTEKVPTFRGGDGWHTSSVGKVVQSRAVLGEYQPHSGTHKLRNRKPVGEPIKDYYPPIIDEATFWRAQAATEGRQQRSAGRKGRHAHILQGLAVCGSCGSPMHLQNKGEPPKGGKYICCSSNIRGVGCDMSRRWRSDWLEDQLLRTFAVIESGSIQALDNAASTIEHDVNSLQSRLDDAKRRQKRLVALVEADDETAIARSLELAKEIKALAAELKAAKTTLSKSVADPDFVQKIIEAVNLSAQLDEADQAKARDLRIRLREIIKSTIDKIVCDPEIGAILHFPPRHAFTLNSQGFGVPMIAEAGSGPRFLLDKNPSQEAVDRFFGGAFPTDAEFMAPSETPDGMQPQNPAVLAYADALFACLRDHNPTPEQIEERYVQEHGTAM

SEQ ID NO: 51917 - DNA, 50 bp, Ochrobactrum anthropi
  source 1..50: mol_type = genomic DNA
gatgaattaatgtagcacaacatcagcagattgtgctacatttcctgcaa

SEQ ID NO: 51918 - DNA, 40 bp, Ochrobactrum anthropi
  source 1..40: mol_type = genomic DNA
tccaggcggccccacaagcagcaaattatggttgccagcg

SEQ ID NO: 51919 - DNA, 40 bp, Ochrobactrum anthropi
  source 1..40: mol_type = genomic DNA
tccaggcggccccacaagcaacaaattatggttgccagcg

SEQ ID NO: 51920 - DNA, 50 bp, Ochrobactrum anthropi
  source 1..50: mol_type = genomic DNA
caggaataacagaagcacaacatcaaaaggcagtgggctgtttcccggaa

SEQ ID NO: 51921 - protein, 474 aa, Mycobacteroides abscessus
MGRIRLSRLTDESTSKERQQEVIEQWSQMNGHTIVGWAEDMDVSRSVDPFDTPALGEWLTKPEKVEQWDIVATWKLDRLATGSIYLNKMMHWCFKHGKVIVSVTENFDLSTWVGRMIANVIAGVAEGELEAIKERTKASRKKLVESGRWPGGKAPYGYRPVKLDDGGWALEINPEQEAVILRAAAEIIDGAAFESVAKRLREEGVPTPRGGTWAPSVLKKMLMNKSLLGHSTYRGETVRDAHGNPVLISDPIFQLDEWNRLQAAAEARTVAPRRTRQTSPLLGIVKCWECEENLAYKYYKTRHCYYHCRHSGEHTQMMRSEDVEKWLEEEFLLKVGDELAQERVYVPAENHRQALDEATKAVDELTALLATVSSDTMRTRLLGQLGSLDAKISELEKMPSREAGWELREMDYTYRDAWERADTEGKRQLLLRSEITAQIKLTDRSANGAGGAGMFHTKLNIPEDILERLAASRD

SEQ ID NO: 51922 - DNA, 50 bp, Mycobacteroides abscessus
  source 1..50: mol_type = genomic DNA
gttctaccaagtcctaccaacgaagtgtcgatgctggtacattgtagaac

SEQ ID NO: 51923 - DNA, 40 bp, Mycobacteroides abscessus
  source 1..40: mol_type = genomic DNA
gttgtcgtagatcttggcggtgtcgatgctgcgatatccg

SEQ ID NO: 51924 - DNA, 40 bp, Mycobacteroides abscessus
  source 1..40: mol_type = genomic DNA
gttgtcgtagatcttggcgtggtcgatgctgcgatatccg

SEQ ID NO: 51925 - DNA, 50 bp, Mycobacteroides abscessus
  source 1..50: mol_type = genomic DNA
attccaccactgaacaccaaggaatgctctatgctggccaatgctgcaac

SEQ ID NO: 51926 - protein, 474 aa, Mycobacteroides abscessus; identical to SEQ ID NO: 51921

SEQ ID NO: 51927 - DNA, 50 bp, Mycobacteroides abscessus
  source 1..50: mol_type = genomic DNA
gttctaccaagtcctaccaatgaagtgtcgatgctggtagattgtagaac

SEQ ID NO: 51928 - DNA, 40 bp, Mycobacteroides abscessus; identical to SEQ ID NO: 51923
  source 1..40: mol_type = genomic DNA

SEQ ID NO: 51929 - DNA, 40 bp, Mycobacteroides abscessus; identical to SEQ ID NO: 51924
  source 1..40: mol_type = genomic DNA

SEQ ID NO: 51930 - DNA, 50 bp, Mycobacteroides abscessus; identical to SEQ ID NO: 51925
  source 1..50: mol_type = genomic DNA

SEQ ID NO: 51931 - protein, 540 aa, Roseburia hominis; identical to SEQ ID NO: 43656

SEQ ID NO: 51932 - DNA, 50 bp, Roseburia hominis; identical to SEQ ID NO: 4067
  source 1..50: mol_type = genomic DNA

SEQ ID NO: 51933 - DNA, 40 bp, Roseburia hominis
  source 1..40: mol_type = genomic DNA
ggtctcaaaatgggaatctggggagagtattccggatgtg

SEQ ID NO: 51934 - DNA, 40 bp, Roseburia hominis
  source 1..40: mol_type = genomic DNA
ggtctcaaaatgggaatctagggagagtattccggatgtg

SEQ ID NO: 51935 - DNA, 50 bp, Roseburia hominis; identical to SEQ ID NO: 20155
  source 1..50: mol_type = genomic DNA

SEQ ID NO: 51936 - protein, 540 aa, Eisenbergiella massiliensis; identical to SEQ ID NO: 4066

SEQ ID NO: 51937 - DNA, 50 bp, Eisenbergiella massiliensis; identical to SEQ ID NO: 4067
  source 1..50: mol_type = genomic DNA

SEQ ID NO: 51938 - DNA, 40 bp, Eisenbergiella massiliensis
  source 1..40: mol_type = genomic DNA
cgtttccaaatgggaatcggggcaggctgtgccggatatt

SEQ ID NO: 51939 - DNA, 40 bp, Eisenbergiella massiliensis
  source 1..40: mol_type = genomic DNA
cgtttccaaatgggaatcgaggcaggctgtgccggatatt

SEQ ID NO: 51940 - DNA, 50 bp, Eisenbergiella massiliensis; identical to SEQ ID NO: 20155
  source 1..50: mol_type = genomic DNA

SEQ ID NO: 51941 - protein, 548 aa, Streptomyces microflavus
MTPAQAPATFQGSHVDTDGEPWLGYIRVSTWKEEKISPELQETALRAWAARTGRRLLEPLIIDLDATGRNFKRRIMGGIQRVEAGEARGIAVWKFSRFGRNNLGIAVNLARLEHAGGQLASATEDIDVRTAVGRFNRRILFDLAVFESDRAGEQWKETHQWRRAHGVPATGGRRLGYTWHPRRIPHPTLIGQWATQREWYEVEESARTHIERLYARKIGTDLRAPEGYGSLSAWLNSLGYRTGNGNPWRADSVRRYMLSGFAAGLLRIHDLECRCDYTANGGQCIRWTHIDGAHEAIITPETWERYVAHVAERRRMAPRVRNPTYPLTGLIRCGGCREGAAATSARRAAGQILGYAYACGQSRSGLCDSPVWVQRAIVEDELLLWISREVAAEVDAAPPTGIPQQRDDGTERTQAERARLEGEHTRLTNALTNLAVDRATNPEKYPDGIFEAAREQILQQKRAVSEALEAHTMVAALPQRSTLIPLAVGLLDEWDTFHPPETNGILRSLLRRVVITRGAAGRKGVRGSAQTKIEFHPAWEPDPWEGLE

SEQ ID NO: 51942 - DNA, 50 bp, Streptomyces microflavus
  source 1..50: mol_type = genomic DNA
ccacttgttttacacgtcttgtctctggacgaggcatgtaaaacaggtgg

SEQ ID NO: 51943 - DNA, 40 bp, Streptomyces microflavus
  source 1..40: mol_type = genomic DNA
ccaccgcggggtgctctttctggacgaggccccggagttc

SEQ ID NO: 51944 - DNA, 40 bp, Streptomyces microflavus
  source 1..40: mol_type = genomic DNA
ccaccgcggggtgctctttgaggacgaggccccggagttc

SEQ ID NO: 51945 - DNA, 50 bp, Streptomyces microflavus
  source 1..50: mol_type = genomic DNA
ccagctgttcctgggctcatgtctgaggaccaggcaccagggactgctga

SEQ ID NO: 51946 - protein, 471 aa, Anaerobutyricum hallii
MSSKVAALYIRVSTEDQTELSPDAQKRLLLDYAQKNDMIVSGDFIFTESVSGRHAQKRPEFQKMIALAKQPSHPIDVILVWKFSRFARNQEESIVYKSMLKKDNVDVISVSEPLIEGPFGSLIERIIEWMDEYYSIRLSGEVLRGMKEKALQKGYQTSPCLGYTAVGHGKPYVINEAEYAIVSYIMDLYDNQNLDETAIARRCNDLGYRTKRGKLFERRSIDRILGNPFYCGTVVWNGVEFEGNHEVRLSRERYEKRQKLITSRKRPVKARNVSACKHWLSGLLKCSVCGATLSYTGNNKCPYFQCWKYAKGFHKTSVALSVKKAEEAVISYFDQILDGAEFTYVCKKKKTDHSLQIEQLQREISKLTMRESRIKEAYEAGVDTLEEYKNNKDRLVSDRLELTAALSQLLQEEQAEQPDAEEILKEIRSVTDVLKNPDVGYEAKGNLIRSVVEQIIYDKESGKMSFDIIIS

SEQ ID NO: 51947 - DNA, 50 bp, Anaerobutyricum hallii
  source 1..50: mol_type = genomic DNA
tattatagggtactgcactccggtggcccatagtgtaataccctataata

SEQ ID NO: 51948 - DNA, 40 bp, Anaerobutyricum hallii
  source 1..40: mol_type = genomic DNA
tatcatgagccagtacggtggcccggacggtgagatcggc

SEQ ID NO: 51949 - DNA, 40 bp, Anaerobutyricum hallii
  source 1..40: mol_type = genomic DNA
tatcatgagccagtacggtgacccggacggtgagatcggc

SEQ ID NO: 51950 - DNA, 50 bp, Anaerobutyricum hallii
  source 1..50: mol_type = genomic DNA
cattatatggccgagcaaacccgagacccagagtgtcacttcctgaaaga

SEQ ID NO: 51951 - protein, 471 aa, Blautia wexlerae
MSSKVACLYIRVSTEDQTELSPDAQKRLLLDYAQKNDMIVSGDFIFTESVSGRHAQKRPEFQKMIALAKQPSHPIDVILVWKFSRFARNQEESIVYKSMLKKDNVDVISVSEPLIGGPFGSLIERIIEWMDEYYSIRLSGEVLRGMKEKALQKGYQTSPCLGYTAVGHGKPFVINESEYAIVSYIMDLYDNQNLDETAIARRCNDLGYRTKRGNLFERRSVDRILGNPFYCGTVVWNGVEFEGSHEVRLSRERYEKRQKLITSRKRPVKARNVSACKHWLSGLLKCSVCGATLSYTGNNKCPYFQCWKYAKGFHKTSVALSVKKAEEAVISYFDQILDGAEFTYVCKKKKTDHSLQIEQLQREISKLTMRESRIKEAYEAGVDTLEEYKNNKDRLVSDRLELTAALSQLLQEEQAEQPDAEEILKEIRSVTDVLKNPDVGYEAKGNLIRSVVEQIIYDKESGKMSFDIIIS

SEQ ID NO: 51952 - DNA, 50 bp, Blautia wexlerae; identical to SEQ ID NO: 51947
  source 1..50: mol_type = genomic DNA

SEQ ID NO: 51953 - DNA, 40 bp, Blautia wexlerae
  source 1..40: mol_type = genomic DNA
tatcatgagccagtacggtggcccggacggtgagattggc

SEQ ID NO: 51954 - DNA, 40 bp, Blautia wexlerae
  source 1..40: mol_type = genomic DNA
tatcatgagccagtacggtgacccggacggtgagattggc

SEQ ID NO: 51955 - DNA, 50 bp, Blautia wexlerae; identical to SEQ ID NO: 51950
  source 1..50: mol_type = genomic DNA

SEQ ID NO: 51956 - protein, 490 aa, Nocardia terpenica
MTARERRSHGAILRAIIYARVSKDDSTRARSCDEQIVSCTDDCDDEGWPIGDVLKDNDRGASRHSRREREDFKKLPSILRAGDVLLVWEPSRITRDMREFGSFCDLMAERGVLLYYEGRLYDVNDDDDRNRVWQDILDGAKQVGKTRKRVLRAMAANLSENKPHGRVAPGYQLVRDPRSGKVVDRVPHPLQAPLLQEAARRLLDHESSRSVSRSIAPRWKEAGGGRFDLCDIRRILTSPTTYGFRVHYGEVVGTGKWEPVLNPELYRPIVGLLSRPATHRGVEPKYLLSHIAKCGVCLEERKHPGTIERKGRLKNEKQSTKRGADRYTCTVCHGVTRNLERVDDHVEEFLFSELERPDALAKLTARDEADRVSVDEELATIDRLTAERDQFVVDAAKTRMSAQAVAVYVEQIEAQITATQERLNARTASVDPLLLDLVGPDARRRWKALELEQRRDIIRRHLSVTIMRWNRKVSDICVEVRPANASVLAA

SEQ ID NO: 51957 - DNA, 50 bp, Nocardia terpenica
  source 1..50: mol_type = genomic DNA
ttacccggttatcttcacgtgtcctcgcttacatgtcaatacccggaccc

SEQ ID NO: 51958 - DNA, 40 bp, Nocardia terpenica
  source 1..40: mol_type = genomic DNA
cgtgccggtgcgtgtcacctcgctgacctccaccacgccg

SEQ ID NO: 51959 - DNA, 40 bp, Nocardia terpenica
  source 1..40: mol_type = genomic DNA
cgtgccggtgcgtgtcaccttgctgacctccaccacgccg

SEQ ID NO: 51960 - DNA, 50 bp, Nocardia terpenica
  source 1..50: mol_type = genomic DNA
cttcccggcccagttcaagtgtaattgcttccatgaagctatcctgaccc

SEQ ID NO: 51961 - protein, 553 aa, Flavonifractor plautii
MWQYDTINGKFIPGTLPAEGNITACYDRLSQEDELEGDSGSVVNQRDFLRKYCEEHHFPNVRHFSDDGYTGTNFDRPGFREMMDLVERGRVTAIIVKDHSRLGRNRLLVGALMERFTEDYGVRYIAVTDNIDSAKGLDDMTAVRELFNEFYPRDTSKKIRAVFTSKGNSGQRLCTQVPYGYKGDKYKWEVDEEAAQVVREIFSLCMAGLGPMQISKRLKAAGVLTPTAYKLEKGLSVTHKPTADPCGWDHRAVVKILERMEYLGCTVNFKTRKKSYKSKKMLYLPPEEWKVFPDTHPAIIDRETWERVQELRKHKRRPTKAGKRGLFSGLAYCADCMSKLYFATHKGSTEDQDHYVCSNYKSNTGSCTIHYIREKVLTALVLAHLQATIAYVQADEDGFIRLVMDKDAQEQRRELARKKAELTKAEKRVTELDSLFQRVYEDHATGKLTEERYNRLSGSYEAEQRELEARVAELRRELEKGQEEAVNVSHFVELVRKYTEVRELTPTIVNEFIKMVIVHAPSKVNGKRFQPVQIVYNLVGEITIPGTMDSKTA

SEQ ID NO: 51962 - DNA, 50 bp, Flavonifractor plautii
  source 1..50: mol_type = genomic DNA
ttacttccttatggggcctcggctcatgcctgtgtcctataaagaagtga

SEQ ID NO: 51963 - DNA, 40 bp, Flavonifractor plautii
  source 1..40: mol_type = genomic DNA
aaaaaaccgccccccggcgcaggccggggggcggttttcc

SEQ ID NO: 51964 - DNA, 40 bp, Flavonifractor plautii
  source 1..40: mol_type = genomic DNA
aaaaaaccgccccccggcggtggccggggggcggttttcc

SEQ ID NO: 51965 - DNA, 50 bp, Flavonifractor plautii
  source 1..50: mol_type = genomic DNA
ttacttcctcctttggcctctactgtatcctgtgtaccctttatcattgt

SEQ ID NO: 51966 - protein, 472 aa, Blautia obeum
MSDRIGALYIRVSTDDQAELSPDAQKRLLLDYAKKNAIIISNDFIFSESVSGRHVQKRPEFQRMIGIAKQPSHPIDVILVWKYSRFARNQEESIVYKSMLKKDHVEVISVSEPLIDGPFGSLIERIIEWMDEYYSIRLSGEVLRGMKEKALRNGYQSSPCLGYEAVGHGKPYQINEAEYAMVSYIMDLYDNQNMDETAIARKCNDLGYKTKRGNPFERRTIDRILQNPFYCGIVSWNGVEFEGAHEVRISKERFDRRQRLITSRKRPMKARNISTCKHWLSGLLKCSVCGATLSYTGNGKCPYFQCWKYAKGFHKTSVALSVKKAEEAVIEYFDQVLAGADFTYVRKEQPAADETAAIEQLQKELSKLSARESRIRDAYESGIDSLEEYKANKERLISNRLQLETELEKLRKEQAEKEVNKEDVLHEIKSVNDILKNPDVSYEEKGTLIRTIVDQIVYDKESGKMYFDIIVS

SEQ ID NO: 51967 - DNA, 50 bp, Blautia obeum
  source 1..50: mol_type = genomic DNA
tattatagggtattacagtccggtccaccagacttcaataccctataata

SEQ ID NO: 51968 - DNA, 40 bp, Blautia obeum
  source 1..40: mol_type = genomic DNA
tccgatctcgccatccgggccaccatactgactcatgatg

SEQ ID NO: 51969 - DNA, 40 bp, Blautia obeum
  source 1..40: mol_type = genomic DNA
tccgatctcgccatccgggagaccatactgactcatgatg

SEQ ID NO: 51970 - DNA, 50 bp, Blautia obeum
  source 1..50: mol_type = genomic DNA
tattatacgttttatcactacgttagagtacacttcttctacttataaaa

SEQ ID NO: 51971 - protein, 547 aa, Escherichia coli
MKLLVPYIRWSTKEQDSGDSLRRQTNLIDAFYAKHKDDYYLLPAHRYVDKGKSGFHQQHKAQGSDFRRMFENVMSGAIPEGSLIVVENFDRFSRADIDTAIDDVRQILRKGVSILTLGDGELYDKSALTDPVKLIKHIIIAERAHQESLVKQKRIAQVWNHKTQLARELKKPMGKQAPGWLELSEDGSHYIVDEDKASLVNIIYDKRLSGMSMFAICKWLNEQGYPTINQRKVRISKTKKPDGNWSALSVKHILTSRSVLGYLPAKISTEDRKTVLREEIESFYPQIVTDSKFYAVQQLLEETGKGKTSSGEHWLYVNILKGLIRCKCGLVMTPTGIRKPVYQGTYRCNGNKESRCSYGTVSRKLLDTQLCSRLFSKLSQLHDEATDTAKLDELQRRLNTVDSELEKLTETLIQLPNITQIQEALRVKQGEKDELIVQLSREKARVKSVSSLDLSGLDMESVEGRTEAQIIIKRLVKEIVVSGNEKLVDIYLHNGNMIRGFPLDGKDDHTLTLEEATDEMQSLDDMLIFGEPVTRIYPAGDMEEVDA

SEQ ID NO: 51972 - DNA, 50 bp, Escherichia coli; identical to SEQ ID NO: 3242
  source 1..50: mol_type = genomic DNA

SEQ ID NO: 51973 - DNA, 40 bp, Escherichia coli
  source 1..40: mol_type = genomic DNA
cttaatggcaaaagtactgacaatctacccttgcgcgaag

SEQ ID NO: 51974 - DNA, 40 bp, Escherichia coli
  source 1..40: mol_type = genomic DNA
cttaatggcaaaagtactgagaatctacccttgcgcgaag

SEQ ID NO: 51975 - DNA, 50 bp, Escherichia coli
  source 1..50: mol_type = genomic DNA
gtaggtgttcaataatttaaaaacagtattatgaatatttacacagtcct

SEQ ID NO: 51976 - protein, 547 aa, Escherichia coli
MKLLVTYIRWSTKEQDSGDSLRRQTNLIDAFYSKHKNDYYLLPAHRYVDKGKSGFHQQHKNQGSDFRRMFENVMSGVIPEGSLIVVENFDRFSRADIDTAIDDVRQILRKGVSILTLGDGELYDKSALTDPVKLIKHIIIAERAHQESLVKQKRIAQVWNHKTQLARELKKPMGKQAPGWLELSEDGSHYIVDEDKASLVNIIYDKRLSGMSMFAICKWLNEQGYPTINQRKVRISKTKKPDGNWSALSVKHILTSRSVLGYLPAKISSEDRKTVLREEIESFYPQIVTDSKFYAVQQLLEETGKGKTSSGEHWLYVNILKGLIRCKCGLVMTPTGIRKPVYQGTYRCNGNKESRCSYGTVSRKLLDTQLCSRLFSKLSQLHDEATDTAKLDELQRRLNTVDSELEKLTETLIQLPNITQIQEALRVKQEEKDELIVQLSREKARVKSVSSLDLSGLDMESVEGRTEAQIIIKRLVKEIVVSGNEKLVDIYLHNGNMIRGFPLDGKDDHTLTLEEATDEMQSLDDMLIFGEPVTRIYPAGDMEEVDA

SEQ ID NO: 51977 - DNA, 50 bp, Escherichia coli; identical to SEQ ID NO: 3242
  source 1..50: mol_type = genomic DNA

SEQ ID NO: 51978 - DNA, 40 bp, Escherichia coli; identical to SEQ ID NO: 51973
  source 1..40: mol_type = genomic DNA

SEQ ID NO: 51979 - DNA, 40 bp, Escherichia coli; identical to SEQ ID NO: 51974
  source 1..40: mol_type = genomic DNA

SEQ ID NO: 51980 - DNA, 50 bp, Escherichia coli; identical to SEQ ID NO: 51975
  source 1..50: mol_type = genomic DNA

SEQ ID NO: 51981 - protein, 634 aa, Vibrio vulnificus
MKLEHFSHTEPQIYSYSRFSNIRQEKGRSLARQKKFIDEVSAKFNLKINKDLVMTDRGLSAFHGHHKTKGALGVFLAAVEKQLIKPGSVLIVESLDRLSREQPYIAQATLASLVNADIVVVTAADEKIYSKETMAKDPLGTMILSVLEMVRAHKESLRKTEASIDFLHGQIATHEEGGVSDLAGPLPFWISRKQRPHPKIKTGFELNEHEEIIRLIVDMHFKQGMGLRPISVELLNRGIKPPSQLKHSPANSRKLKNDVWGVSTLSHIVSNQALCGRYVVNLNYQKDGKKHVEDYVLRSYYPAIMSEEEFDTFQAIKKRRYGSNKGDKSKRNGLVYLLTDYGNKSVCAKCGRSIGSQPQKQKHGIRRRLHCSKHKETANCCKSIIQDYIEDAFLISVARHIDYNLINTQVKPADIIRNSDRLEEIDLEMANVIDMRRTVKDEKIKLKLKFDYEALENEKEDLIKQKLEFKQFKIAPNDIKKFIRTVNDARDYKNNEARTFVKSILMQCIRKIEVHMEKKKLECYGYPNLFENAIVNVVDVEFYTDKKLSIFVSAETNTLLFSKISDEFADESLGSFTEEQLKAWNDVGFDNFQNLGERGTLVNENENSTENLWFASDLAEAFMNEIINQSEDES

SEQ ID NO: 51982 - DNA, 50 bp, Vibrio vulnificus
  source 1..50: mol_type = genomic DNA
gttgtgatgagtgttcgtccaccgtctgcatactgaacactgatactttt

SEQ ID NO: 51983 - DNA, 40 bp, Vibrio vulnificus; identical to SEQ ID NO: 28588
  source 1..40: mol_type = genomic DNA

SEQ ID NO: 51984 - DNA, 40 bp, Vibrio vulnificus
  source 1..40: mol_type = genomic DNA
gaaatagccaaatgaaccaatggtccaatggatatcctgc

SEQ ID NO: 51985 - DNA, 50 bp, Vibrio vulnificus
  source 1..50: mol_type = genomic DNA
tttgagatggcttgtcgtgcagcaatagcaaactgatataccatacctct

SEQ ID NO: 51986 - protein, 452 aa, Listeria seeligeri; identical to SEQ ID NO: 26031

SEQ ID NO: 51987 - DNA, 50 bp, Listeria seeligeri
  source 1..50: mol_type = genomic DNA
tttagtctctcgatttctctcgctggacggagaataaatgagatactaat

SEQ ID NO: 51988 - DNA, 40 bp, Listeria seeligeri; identical to SEQ ID NO: 21013
  source 1..40: mol_type = genomic DNA

SEQ ID NO: 51989 - DNA, 40 bp, Listeria seeligeri
  source 1..40: mol_type = genomic DNA
ttttggttcaagctacgatccacggaaagagggaaccaag

SEQ ID NO: 51990 - DNA, 50 bp, Listeria seeligeri
  source 1..50: mol_type = genomic DNA
tgtaggctctgttcttctctggctccatggggattaaatgacatcagaat

SEQ ID NO: 51991 - protein, 498 aa, Paenibacillus silvae
MIGILARVSTEEQARTGYSIDYQIREGIKKAGTSDIKKYIDDGYSGEFLERPGLTQLRKDVKEGLITKVICLDPDRLARKLMLQLIVTDELEKNGAELVFVSSEYAKTPEGQLFYSMRGAISEFEKAKINERMSSGRREKARKGKVVKNSFTYGYDYDKEKSEYVINEEEARVVQLIFELFTKPNQIAKGMNGIARYLTDNLIPTKRGAEVWHRNVVRQILMKEAYTGRMPQNKWDTEGMLGNKYRAPEDKVPMTLRPKEEWIYVDVPQIISHEKFEHAQKLIGESRRRHTKESLNQYLLSGLLRCTKCGNTMTGRKAKNWGKYVYEYTDKKNSVGAKEKGCGRKIACAKIDDLVWDTILNWLNNPDEIAAAVEETQVAYMDNEIERVEQDIEKTKAARKRVIKLFSSDLGIGEEEIREELRELSEREEALSKRLMELQSKQEDEQRFESSRNIMSETLEYYLDRNPDELTFDDKQTLIRMVAKEILVYEDEVKIIPF

SEQ ID NO: 51992 - DNA, 50 bp, Paenibacillus silvae
  source 1..50: mol_type = genomic DNA
agcgccactattgttattagaatagaaatcccaattgcgttaggggtgct

SEQ ID NO: 51993 - DNA, 40 bp, Paenibacillus silvae
  source 1..40: mol_type = genomic DNA
cgcgagatgtattgaaaacgaaatcctgatgcatctgcgt

SEQ ID NO: 51994 - DNA, 40 bp, Paenibacillus silvae
  source 1..40: mol_type = genomic DNA
cgcgagatgtattgaaaacacaatcctgatgcatctgcgt

SEQ ID NO: 51995 - DNA, 50 bp, Paenibacillus silvae
  source 1..50: mol_type = genomic DNA
agctctactgcagttagtagaatgactatagcaatttctgcaaaggtgat

SEQ ID NO: 51996 - protein, 554 aa, Rhizobium leguminosarum
MKPKAYSYIRMSTDVQLKGDSLRRQSEESRRYADENDLDLVEDFRLEDIGVSAFHGKNVAQGALGEFLVLCEQQIIQAGSYLIVESLDRISRQNPQVATSLFLQILGAGINIVTLTDRHVYRAGSSDFTDIIVSVVIMSRAYEESRTKSLRVGAAWENKRRNIHDKKLTQVAPIWLKLSADRTAFETVPERVAVLRWIFDEADQGKGSLQISRALNQQGVPTFAPSKGWYESYISKVLTNRAVLGEFQPHRYIDGKRVRYGEPIPNYFPAIVTRERFERIQVGRAVRRVRGAGRKGQNNINLFQGVATCGYCSARMMIVNKGAGPKGGVYLRCDRARRSADCGASGWPLDHFEGAFLWFVEELDIGAIVQGAASEEARKALEGQAATISADLETQKKIRERAFDLLGEPTSATAFVRGKIDDASMKIDELERKLASIKEATMIAAASQKRPLDEVRLMIKEIGGWQTADGDSRSRVADWIKRNVKELLLFTDGLDQSDQVAADAKLRQFSVALAGGEFRTVQISGNDPTVASYSVHANDDKWVLTQDGERSIHR

SEQ ID NO: 51997 - DNA, 50 bp, Rhizobium leguminosarum
  source 1..50: mol_type = genomic DNA
ggacaattaatccacctcatgatccagatgttgaggtggattaatttctg

SEQ ID NO: 51998 - DNA, 40 bp, Rhizobium leguminosarum
  source 1..40: mol_type = genomic DNA
tcccggtaaggtcggcatgcagatcgtcggcctgcctgac

SEQ ID NO: 51999 - DNA, 40 bp, Rhizobium leguminosarum
  source 1..40: mol_type = genomic DNA
tcccggtaaggtcggcatgttgatcgtcggcctgcctgac

SEQ ID NO: 52000 - DNA, 50 bp, Rhizobium leguminosarum
  source 1..50: mol_type = genomic DNA
taacacttatccgtccccttgatcttgttgctgaagtgatttaattactt

SEQ ID NO: 52001 - protein, 597 aa, Klebsiella quasipneumoniae; identical to SEQ ID NO: 50516

SEQ ID NO: 52002 - DNA, 50 bp, Klebsiella quasipneumoniae; identical to SEQ ID NO: 36002
  source 1..50: mol_type = genomic DNA

SEQ ID NO: 52003 - DNA, 40 bp, Klebsiella quasipneumoniae; identical to SEQ ID NO: 5518
  source 1..40: mol_type = genomic DNA

SEQ ID NO: 52004 - DNA, 40 bp, Klebsiella quasipneumoniae
  source 1..40: mol_type = genomic DNA
gtccacgaggtttttcgggatgcccagggagacgaagccg

SEQ ID NO: 52005 - DNA, 50 bp, Klebsiella quasipneumoniae
  source 1..50: mol_type = genomic DNA
aatatatcactgatgactttcctgatgactaataatattgagcatatttt

SEQ ID NO: 52006 - protein, 694 aa, Nitrosospira briensis
MSDHLSGSQHGSASRQSCASRTVACAVYTRKSSEEGLEQSFNSIDAQQEACEAYIQSQRHEGWKALDTTYDDGGFSGGNMERPGLQQLMRDIAARKIRVVVVYKVDRLTRSLADFAKMVELFDFHEVSFVSVTQQFNTTTSMGRLTLNVLLSFAQFEREVTGERIRDKIAASKAKGMWMGGSPPMGYIPRDRSLVIDEDAARLVTDIFNLYLILGCVSSLKLEVDRRGLMTPARISQRSGQSGNRPFSRGHLYRILSNPIYIGQIAHKDKTYPGQHAPIIDRTVWDAVQAKLTDNRQGNKLRGKAKSPSLLAGLVWDEHGNRLTPSHSKKGSRRYRYYVAECLIQNSRDQAAGALRIPAHELEQAVIHSLIEFLRKDTDILSLLDEWRITDAHQVHAILRRAHRLAKQLEAPESITASPKQANDGKVIPGNRTHSQELATFGHEQLSVFPESASRRSPSVRTVSMESVPLGNAALIQLLQALVQKIIVGVDHLQISVRSNVILYDEEENSDWSSLDRPSEVPVVCGDAGSDITHVYAGIDALGQHEGETHHPTQTRESRPSLLTGSSENDQDMHTLILPVKLKRTGLAMRLIVPGQGIHRAPDPRLVQLLIRAYDWFDRLRSGKAKSMLAIANEEEITSSYVTRVIYLAFLAPDIVKAILQGQQPDTLSPDSLMRCVPLPIDWSEQRKLLGFVS

SEQ ID NO: 52007 - DNA, 50 bp, Nitrosospira briensis
  source 1..50: mol_type = genomic DNA
tcaatattgctaagacttagtggcggtccactgagtcaattgtgaaccgt

SEQ ID NO: 52008 - DNA, 40 bp, Nitrosospira briensis
  source 1..40: mol_type = genomic DNA
gcaagcgatttcaattggcggagagagagggattcgaacc

SEQ ID NO: 52009 - DNA, 40 bp, Nitrosospira briensis
  source 1..40: mol_type = genomic DNA
gcaagcgatttcaattggctgagagagagggattcgaacc

SEQ ID NO: 52010 - DNA, 50 bp, Nitrosospira briensis
  source 1..50: mol_type = genomic DNA
cacatctagaggacacttactgggtgtcaactgtgttctaagtgcaccgt

SEQ ID NO: 52011 - protein, 550 aa, Streptococcus dysgalactiae; identical to SEQ ID NO: 45751

SEQ ID NO: 52012 - DNA, 50 bp, Streptococcus dysgalactiae
  source 1..50: mol_type = genomic DNA
ggtttggacaatgatgaacaagttgagagtgtcgtattgatgacaagagt

SEQ ID NO: 52013 - DNA, 40 bp, Streptococcus dysgalactiae
  source 1..40: mol_type = genomic DNA
tccacagacgcatcatgtggagtgcgtagtgttgctacaa

SEQ ID NO: 52014 - DNA, 40 bp, Streptococcus dysgalactiae
  source 1..40: mol_type = genomic DNA
tccacagacgcatcatgtgcagtgcgtagtgttgctacaa

SEQ ID NO: 52015 - DNA, 50 bp, Streptococcus dysgalactiae
  source 1..50: mol_type = genomic DNA
gctaaggaaataattgaacaagttcagaaagttgtatggatgaggagaat

SEQ ID NO: 52016 - protein, 564 aa, Serratia proteamaculans
MRAFLYCRVSSKHQTKQQGGTGITRQEATVIEYINGYNPDPKLGYQLSLDDHEMLDPDLGKSAYHGYNFTKGALGEFKLKVLSREIKEGALIIENVDRFSRLPEHEAIREFNDLILGGIDIHEVETGIVYSKKIPNTLSKLAHSIERAWGESERKSSIAKKVWKARRETVLATGKPLPARTPKWLKIVNSEYVIDKKYSDAVNTIFKLYTEGYGTAYIVKHLNNNDMKIDDLSWSTAALTKMYSDERLIGWKSGMKVYPELVDEEVFKRAKEIKNSKVFLNKQKINGAQRSIFNSIARCGKCGAAMCVSVNGHNKLYYWCWKKRGTKECDLSGFVYAYVELAILQHIKNIEWDKVYLEGERGNDRSEELRLELTELLSYKLEIEEILKSTERPPTAVLRTLINTEEQIEKLEGEISSMISSEYEVNFDFNIDDIINQNNIELRQKCNIQLKKNIKSIVFNKYDGYVIIDIEYFTDVLKHVLIVNNKTGDVTGDVVIRRNGESTTYESRSVKIIKDEGSVFSLDCNISEVVLNDYLFLMNIVDFVDSEVKDFLNLHLNAVLQQEG

SEQ ID NO: 52017 - DNA, 50 bp, Serratia proteamaculans
  source 1..50: mol_type = genomic DNA
tgggaggaaaacgttgcaattgacaggtcaatcatattataatactcctt

SEQ ID NO: 52018 - DNA, 40 bp, Serratia proteamaculans
  source 1..40: mol_type = genomic DNA
gggagtaggcgcgtaatacaggtcaatcatgttgcctcct

SEQ ID NO: 52019 - DNA, 40 bp, Serratia proteamaculans
  source 1..40: mol_type = genomic DNA
gggagtaggcgcgtaatacacgtcaatcatgttgcctcct

SEQ ID NO: 52020 - DNA, 50 bp, Serratia proteamaculans
  source 1..50: mol_type = genomic DNA
ttggaggaaatagttacaattaacacgacaagcaaatagttaatattctt

SEQ ID NO: 52021 - protein, 498 aa, Sellimonas intestinalis
MNNRIDAIYARQSVDKKDSISIESQIEFCKYELKGGNCKEYTDKGYSGKNTDRPKFQELVRDIKRGLIAKVIVYKLDRISRSILDFANMMELFQQYNVEFVSSTEKFDTSTPMGRAMLNICIVFAQLERETIQKQVADAYYSRSLKGFRMGGKAPYGFHTEPIKIDGINTKKLVANPEEAEQVKLMFEMYAEPGTSYGDIVRHFAEHGIKDFSRPALASLLCNPIYVKTDLDIYEFFKSQGTVIINDAADFTGTNGCYFYRGRGMKGDTKHNLQGHTLVMAPSEGLVSSELWLKCRKKILANASYQAGRKAVNTWLAGKIKCGRCQKALKAEGSYGRWYFRCSKRSDNKSCEGAGTLRIPDTEAVIYAAMVKKLKPFQTIKGRKNAIKSNPKLTALQIELAQVQHEIETLIDTLTGANPVLLSYVNSKIEELDGRKQELVKKIAELSVDTISPEQVKEISGYLDTWEEVDFDDKRRVVDLMISAIYATSESINIVWKI

SEQ ID NO: 52022 - DNA, 50 bp, Sellimonas intestinalis
  source 1..50: mol_type = genomic DNA
tcacactcaactggctaaagccaataatcagcaccacctgtctaacgggt

SEQ ID NO: 52023 - DNA, 40 bp, Sellimonas intestinalis
  source 1..40: mol_type = genomic DNA
gcctggtctagctcgtcgccaacaaaaaaggagtacgttt

SEQ ID NO: 52024 - DNA, 40 bp, Sellimonas intestinalis
  source 1..40: mol_type = genomic DNA
gcctggtctagctcgtcgctaacaaaaaaggagtacgttt

SEQ ID NO: 52025 - DNA, 50 bp, Sellimonas intestinalis
  source 1..50: mol_type = genomic DNA
tcctacccagccttcaaaagccaatactcagccctgctcctctaacgagc

SEQ ID NO: 52026 - protein, 511 aa, Burkholderia vietnamiensis
MKPTRPRAYSYLRFSTPEQLKGDSYRRQTTMALEYAARHGLALDQDLTFEDLGVSAYRGANAEAGRLGEFLEAVRVGLVPRGSYLLVEALDRLSRLSPRKAVRVLEDIVEEGITVVTLNDGREYTEGNLDDDPTSLLIAIVLFMRANEESATKSRRLKAAWEGKRQSIDDRPLTAVTPAWVSLNEATGKLELIPDRAAIVRRIFEMYVAGVGYASIAEAFNREGIACFGRAKHWHRTYVRKILTNDAVIGTFTPHRIVHEGGKKVRVPLERVPGYFPPVVSNEVFARAQAQLGGGSRPAPKHRGTGVSNLIAGLARCPLCGSTMTRVTKGSGPKGGKPKLICTKAKAGAGCQYHAVPLENVETAIVENASFIAGTVPSGREGLDADLDAAEVRIAATQDEIENLLQALAAAPSTAIAERVRDLELSLDALRTERDGLADQLVAANGPLLAKRVEDLRATLAADPMDRAKANAALRLLLSSVTVDYEHGKLMLEWKHGGETGVVYAMPRDVR

SEQ ID NO: 52027 - DNA, 50 bp, Burkholderia vietnamiensis
  source 1..50: mol_type = genomic DNA
tgtgggtcttgtgaagacaccatgagcatggtattttcaaaggacctcct

SEQ ID NO: 52028 - DNA, 40 bp, Burkholderia vietnamiensis
  source 1..40: mol_type = genomic DNA
gccgggcggaccgatcatcagcatgtggtggccgcccgcg

SEQ ID NO: 52029 - DNA, 40 bp, Burkholderia vietnamiensis
  source 1..40: mol_type = genomic DNA
gccgggcggaccgatcatccacatgtggtggccgcccgcg

SEQ ID NO: 52030 - DNA, 50 bp, Burkholderia vietnamiensis
  source 1..50: mol_type = genomic DNA
tgcagagctccccaagacaccaaccacagggtattcggcggggtcctccc

SEQ ID NO: 52031 - protein, 694 aa, Acidithiobacillus ferrivorans
MSADRLQKITTDHLRRDAFLYVRQSSLRQVMENTESTKRQYALRDRAIALGWPIERIHVIDSDLGLSGAHAQDRDGFQYLVSEVANGHAGIVLGLEVSRLARNNADWHRLIELSALSQTLILDEDGIYDPAHFNDRLLLGLKGAMSEAELHVLKARLQGGIRNKARRGELEVPLPIGLVYHPDGSVVLDPDAAIRAAIQLVFDTFRHTRSATSTVKRFRREGWLFPRRIRRGIGKGEVMWGTMEHCRVIQVLHNPRYAGAFVYGRTRGAYRAAGKQTSVNVPREDWQVLIRDAHAGYIDWEEFERNQVTLKQNAAGFGQPRGGLPREGKGLLQGRVVCGICGARMRVRYQEVAGRLEPYYMCTENAVRRAGKPCQSIRGRAIDDVISALLLDRVAPTAIEVALAVEEEISGRIAQAQAQRTLQMERARYDAELARRRYLHVDPSNRLVADTLEADWNERLRHLDLLQQEQDRQQQADQKLLSAQECAQIRQLAEDFPRIWNDNRVAPLDRKRMVALLIEDVTLTKAERVTLQVRFRGGQTTTLEVDKPKPIAQIRKTFPEVVAKIDALLETCGDQEVAAELNALGHQNWRGEPFTAKKITNLRNAYHLVSHHDRLRARGMLTAHEVAAQLKVSTTTVYYLGRAGIVQVHRYGNNDRRCLYAPPGDVVVVKGQGGRYRSMPPRLIPVQSTEQGAI

SEQ ID NO: 52032 - DNA, 50 bp, Acidithiobacillus ferrivorans
  source 1..50: mol_type = genomic DNA
aaggtgcaatctgatgcagactccttcttgtaagtcatcaactatctgtc

SEQ ID NO: 52033 - DNA, 40 bp, Acidithiobacillus ferrivorans
  source 1..40: mol_type = genomic DNA
ccccgactccacgatccctttttttgcggggtcatgaggc

SEQ ID NO: 52034 - DNA, 40 bp, Acidithiobacillus ferrivorans
  source 1..40: mol_type = genomic DNA
ccccgactccacgatccctggttttgcggggtcatgaggc

SEQ ID NO: 52035 - DNA, 50 bp, Acidithiobacillus ferrivorans
  source 1..50: mol_type = genomic DNA
atggtgcaggggtcagcaaactttggcatgtaggtcaaattctgtctgcc

SEQ ID NO: 52036 - protein, 525 aa, Paenibacillus dendritiformis
MKKLKRRSRAYVRVSTLKRSQRDSPKHQEGSIREEAKKLNEEIDLVYTDRATGTSIMEREDVQQIIKDAKNGEFDTLFFSSLSRFSRDTYDALALKRTLVNALGIRVISIEDFYDSGKEDNEMIFTVISSMNQKQSESISAGSKRGKRQSALAGNFTGSVAPFGYKKLTIDGRKTLEIVEHKADIVRLIFDLYVNQNMGEKQIVKYFNNVLKIPSPTGKLWGITTVNGILKNRNYTGYNVHNKMKYETVFDDINNLHDRRKKLVQKPEEEWEISEEPTHPAIISVEMFEKGLDLRLRRGGGKRGGGRILVNVFAGTIYCKECGYAMVTMGRTQRRKRTNDIVRYHYLICSSRRRKGGSGCENKKWIPYFAFQDEIIKGVTTRIRKMIDSASIAELIAANAEYKMNDSDKELKRIEKSIASNRKLLFEIRKRHMLEEITDDQYEFEREMYENEIADLEKVQARIMKTMTVERDTGKLMKDVQDALDELGRMENFDDVTKTRVILSRLISKITVDKDGNADVHTVLG

SEQ ID NO: 52037 - DNA, 50 bp, Paenibacillus dendritiformis
  source 1..50: mol_type = genomic DNA
gttgtgtcactaatatacatctccaatgtgatgtgtattaatcgcacaac

SEQ ID NO: 52038 - DNA, 40 bp, Paenibacillus dendritiformis
  source 1..40: mol_type = genomic DNA
cgtccgaaaccacatctccaacgtcatgcaaaaattaaat

SEQ ID NO: 52039 - DNA, 40 bp, Paenibacillus dendritiformis
  source 1..40: mol_type = genomic DNA
cgtccgaaaccacatctccttcgtcatgcaaaaattaaat

SEQ ID NO: 52040 - DNA, 50 bp, Paenibacillus dendritiformis
  source 1..50: mol_type = genomic DNA
gattttccttactaatacatgtcctttgtgatttttttttttcccagaac

SEQ ID NO: 52041 - protein, 523 aa, Klebsiella michiganensis
MRQVITYLRFSSKPQERGDSIRRQKGLFERWLKDNPDAKVVDEFSDEGASAYHGHHLKGDFGRMLQNIQDGKYLSGQTVLLVESETRLNRQKARNTENLVDLITGKGVDVICLESGKIYTSTNIDDLDTSIQLKIAAHIAHQQSKEKSIKVSAAWEHRAQLALEGKQQLTKNVPGWIDPDTRKLNEHSSTVVTIFDLLLSGESLHNIARYLQANNIKSFSRREKANGFSVHSVRTILRSESTVGTLAASKRNDRPAIPNYYEPAIDVATFNKAQEILSKNRVGRAPASDNPITINLFKGIIRCQCGASVHPTGVKATYQGVYRCNNVPDGRCNVPTIKRKPFDKWMLDNIVGFLERDDGNNTDKRKAEIEYQISLVTSKLKKATTLLLELDDVTELKEQVKELNIQRSNLQSELDELNQRETLSDKPLHHLSEIDLTTKAGRVEAQLILSKFVQSIELQREMIIITLRNGTVIGKSRDLSPVLSRDLMKQVVSSPSPTDIDMFSVITSDEEFRKSGKQVTKRS

SEQ ID NO: 52042 - DNA, 50 bp, Klebsiella michiganensis
  source 1..50: mol_type = genomic DNA
aaaccgaatagcctatattcaagggtcattgtatttgagctattcggcga

SEQ ID NO: 52043 - DNA, 40 bp, Klebsiella michiganensis
  source 1..40: mol_type = genomic DNA
gcggcgaggtaaatcaaaggtcattgcgctcatagtcgtt

SEQ ID NO: 52044 - DNA, 40 bp, Klebsiella michiganensis
  source 1..40: mol_type = genomic DNA
gcggcgaggtaaatcaaagctcattgcgctcatagtcgtt

SEQ ID NO: 52045 - DNA, 50 bp, Klebsiella michiganensis
  source 1..50: mol_type = genomic DNA
gaagggaattaactttatggaagactcattgtgtttcaggcattaggcta

SEQ ID NO: 52046 - protein, 506 aa, Pseudomonas aeruginosa
MKDVTEKIAVIYCRVSSLKQAVQGDGLTSQETRCREYAKYKGYDVVNVFKDDMSGGLIDRPGMKSMLGYLHKNRSLPHVVIIDDISRLARGLEAHLQLRSAISSVGASLESPSIEFGEDSDSILVENLLASVSQHQRQKNGEQTKNRMRSRLINGYWVFQAPVGYRYARSTGNGKILVRNEPCASIVQEALEGFASGRFQIQAEVKRFLESFPEFPRTNHGYVRNQQVTDILTNPVYAGYVEAPNWNVSLRQGHHEPLITFQTFKKIEERLNSKAKAPARKNINEDFPLRGSVLCGDCGSALTSCWSSGRHSRYPYYLCHKRGCESYGKSIKRDVLESEFEALLRAVQPTPGLFKIAQKMFEELWNHRLAMSEARVRNLKSEMAKIERQVGQFLDRITDTDMPSVIRTYEDRIRKLEEQRIVIGEQMARCGRPVRSFDQTLRTAFDFLGNPCKLWASERFEDKRTVLKLVFLDRLAYVRGSGFRTADLSLPFKTLSDFSKGNLKMA

SEQ ID NO: 52047 - DNA, 50 bp, Pseudomonas aeruginosa
  source 1..50: mol_type = genomic DNA
gatttctccaagggcaatttgaaaatggcgcacctcgacgaagaaacgtc

SEQ ID NO: 52048 - DNA, 40 bp, Pseudomonas aeruginosa
  source 1..40: mol_type = genomic DNA
cttggcgtggtgaagatgtatggcgcagcggacgggactc

SEQ ID NO: 52049 - DNA, 40 bp, Pseudomonas aeruginosa
  source 1..40: mol_type = genomic DNA
cttggcgtggtgaagatgtgcggcgcagcggacgggactc

SEQ ID NO: 52050 - DNA, 50 bp, Pseudomonas aeruginosa
  source 1..50: mol_type = genomic DNA
gttttcttcttggtcactttgcaagctggggacctctggccagcaatgcc

SEQ ID NO: 52051 - protein, 506 aa, Pseudomonas aeruginosa
MKDVTEKVAVIYCRVSSLKQAVQGDGLTSQETRCREYAKYKGYDVVNVFKDDMSGGLIDRPGMKSMLGYLHKNRSLPHVVIIDDISRLARGLEAHLQLRSAISSVGASLESPSIEFGEDSDSILVENLLASVSQHQRQKNGEQTKNRMRSRLINGYWVFQAPVGYRYARSTGNGKVLVRNEPCASIVQEALEGFASGRFQIQAEVKRFLESFPEFPRTNHGYVRNQQVTDILTNPVYAGYVEAPNWSVSLRQGHHEPLITFQTFKKIEERLNNKAKAPARKNINEDFPLRGSVLCGDCGSALTSCWSSGRHSRYPYYLCHKRGCESYGKSIKRDVLESEFEALLRAIQPTPGLFKIAQKMFEELWNHRLAMSEARVRNLKSEMAKIERQVGQFLDRITDTDMPSVIRTYEDRIRKLEEQRIVIGEQIARCGRPVRSFDQTLRTAFDFLGNPCKLWASERFEDKRTVLKLVFLDRLAYVRGSGFRTADLSLPFKTLSDFSKGNLKMA

SEQ ID NO: 52052 - DNA, 50 bp, Pseudomonas aeruginosa
  source 1..50: mol_type = genomic DNA
gatttctccaagggcaatttgaaaatggcgaacctcgacgaagaaacgtc

SEQ ID NO: 52053 - DNA, 40 bp, Pseudomonas aeruginosa
  source 1..40: mol_type = genomic DNA
ctcggcgtggtgaagatgtatggcgcagcggacgggactc

SEQ ID NO: 52054 - DNA, 40 bp, Pseudomonas aeruginosa
  source 1..40: mol_type = genomic DNA
ctcggcgtggtgaagatgtgcggcgcagcggacgggactc

SEQ ID NO: 52055 - DNA, 50 bp, Pseudomonas aeruginosa; identical to SEQ ID NO: 52050
  source 1..50: mol_type = genomic DNA

SEQ ID NO: 52056 - protein, 582 aa, Streptococcus pneumoniae
MTNNVEIIKANPLVTRRNDSNGSLLRRVAAYCRVSSDSDDQKNSYDSQVRHYREYISQHKDWNLVDIYADEGISGTQVGKRQDFQRLISDCLDGKIDYIITKAIARFARNTLDTLKYVRLLKDKQIGVFFEEENIDTLTMDGELLLTILSSVAQQEVENTSAHVKKGLKMKMQRGELIGFQGCLGYDYNQDTKSISINEKEAKIVRYIFERYIDGIGGRAIARELDELGYKTPRGLDHWQDTTVLGIIKNEKYKGDILMGKTFTVDPISKRRLINFGEEDKYYIKNNHDAIISPEIFTQAQEIRLRRSGNKKTIANTKGKRERYSRMYPFSSRLECGFCGTVLSRRSWHSSSEYKKIIWHCTTSIKRGKKYCTHSKGIEEKAIENAFLQSYQQLFYENNNLTEDFLEIIKEELTDDTLKVELTKIVSKLNSLYKKEEKLVSMNLDGKISDSVYEDKFNQIQIEKEKLLEEKVNLEVTLKSEVDIKSRLENFKEILTSQKTLTEFDKDIFESIVEKIIVGGINSDGEIDPAMLTIIFKTGDSSTKDAKSYKSKRKNAKIDNDKLCFNAVTDDEKKCTNKENNA

SEQ ID NO: 52057 - DNA, 50 bp, Streptococcus pneumoniae
  source 1..50: mol_type = genomic DNA
agtgtacaaataaagaaaacaacgcatgttgaggcggtaagtttgctagt

SEQ ID NO: 52058 - DNA, 40 bp, Streptococcus pneumoniae; identical to SEQ ID NO: 32783
  source 1..40: mol_type = genomic DNA

SEQ ID NO: 52059 - DNA, 40 bp, Streptococcus pneumoniae
  source 1..40: mol_type = genomic DNA
tctatttcctcaaacgcatgccgtcgagacggtagcactt

SEQ ID NO: 52060 - DNA, 50 bp, Streptococcus pneumoniae
  source 1..50: mol_type = genomic DNA
agtatacaaagtatgcaaacaactgctgttaaggcaagaaaaccactagg

SEQ ID NO: 52061 - protein, 584 aa, Streptococcus agalactiae
MKKNNVEIIKADSLVRRRGDNFERESKRVAAYCRVSSDSEDQKNSYESQVRHYKDYISQRSDWELAGIYADEGISGTQVGKRQDFQRLINDCVNGEIDYIVTKAIARFARNTLDTLKYVRMLKDMQIGVYFEEENIDTLTMDGELLLTILSSVAQQEVENTSAHVKKGLKMKMQRGELIGFQGCLGYDYDVETKQLSINKKEAKIVRYIFERYLEGIGGKVIARELDELGYKSPRGLDHWNDTTVLGIIKNEKYKGDILMGKTFTVDPISKRRLSNFGEEDKYYIKDNHEPIISKEDFEKAQEIRLRRAGNKKTAANVNGKRERYSKMYAFSSMLECGFCGSILSRRSWHCRSDYRKVVWHCVTSIKKGKKFCKHSKGLEELAIEGAFMEAYRKLYHSNENLMTDLLETIESELNDNSLNKELKRITNKLRTLLKKEENLVNLRLEGKISDTIYNEKYNEISSEKEFLAEEKVNIETTLKSEIDVKKRLTEFKHLLSSQKMLTEFDRAVFESIVEKIIVGGVNSDGEIDPAMLTIIFKTGETQNKDGKQFKSKRKNAKLETDKLCPQNSDEDKKMYSQGPDNTC

SEQ ID NO: 52062 - DNA, 50 bp, Streptococcus agalactiae
  source 1..50: mol_type = genomic DNA
attctcaaggaccagacaacacatgttgagagtgtcgtattgatgacaag

SEQ ID NO: 52063 - DNA, 40 bp, Streptococcus agalactiae
  source 1..40: mol_type = genomic DNA
attcccaatgacacatcatgtggagtgcgtagcgttgcta

SEQ ID NO: 52064 - DNA, 40 bp, Streptococcus agalactiae
  source 1..40: mol_type = genomic DNA
attcccaatgacacatcatctggagtgcgtagcgttgcta

SEQ ID NO: 52065 - DNA, 50 bp, Streptococcus agalactiae
  source 1..50: mol_type = genomic DNA
attattaataatttgacagaacatcttttgagtgtctgctctgtgtcaag

SEQ ID NO: 52066 - protein, 414 aa, Streptomyces violaceusniger
MLKDLRAGLIDGVVAYDLDRLARQPRDLERLIEIFDERPRLEFATVTNDVNLGTADGRTMARIMVAFANKSSHDTSRRIKRKHLELAQQGKANGGPAPYGWLKDDRNKVDPEAAKHIREAQKEVLAGVRIGTIRTRWQEQGLGNPRQGTKRMAHHHVEHILTNPRLVGYRTYHGEILHGDDGQPVMGEWDPINIVEEWEAVCAAIAERKQTKAGQMLARRYLLSGIARCGLCKNKIRGQVNHKWKPGSKGAQYKYQCSKVNGGCGKVGRVGEPVDKLIARLVLKEQREKATTTGVPVEARWPRERELEDLLQDIAQLIEAEKAKTITVSTLLQLLPAKEQERDALRLERARFYKERKQAEAKGNAGDLTEEEFFALPIERQREIVLHSLTAVVIHPAGRGKRKFDPDLIDPIWR

SEQ ID NO: 52067 - DNA, 50 bp, Streptomyces violaceusniger
  source 1..50: mol_type = genomic DNA
ttacgacatggaggcaagacagaccagggcaagtgaactgaatgatcgta

SEQ ID NO: 52068 - DNA, 40 bp, Streptomyces violaceusniger
  source 1..40: mol_type = genomic DNA
gacgggcggttcgacgctccacgggaagttgatccactga

SEQ ID NO: 52069 - DNA, 40 bp, Streptomyces violaceusniger
  source 1..40: mol_type = genomic DNA
gacgggcggttcgacgctcgtcgggaagttgatccactga

SEQ ID NO: 52070 - DNA, 50 bp, Streptomyces violaceusniger
  source 1..50: mol_type = genomic DNA
ttactacataatcttaagactgtcgtagttcagtgattcaaataatctta

SEQ ID NO: 52071 - protein, 533 aa, Brevibacillus borstelensis
MTRLAVYARVSSDDQAERGTIENQLEFARKYADLHQLEVTKWYKDDGVTGTIPLEARPAGKELLEDAKNGQFDLLLIYKLDRLGRSARIILNAVHELEIHGIKIRSMTEPFDTGDPSGRFLLTILAGVADLERETILERMWYGANRAARTGKWLGGIVPYGYRVDSEGFLEINEDPLPYSELSEAGVVRLIFHMMASQGHSCIKIADYLNALGIPPSYTKDGRLVKRGKRHEKTAGIWRPSRIRGIITNTTYKGIHLYGKRSTKKREVIEREVPAIVDVETWEKAQKVLKENQIEAFKNSKNRYLVRGLMKCQCCGLTYIGVHYPGRNRNLTGYYICSGKQSYKGPYQGKCPSKNIPKEWIEDLVWQDCLKFINQPGEALKEIAATMEVKQAEQHDLTSEIAAIKESIENKDIERQSILDLFRKNIISFNDLEQQIQKINMEKNMLEQRLREIQNTIKMETDYTERVNNAFELLLRLRDKLKEEPSFEVKREIVKTLVNRISVHTIVDEYTKRPRASVSVHYCFAKDVIHTDK

SEQ ID NO: 52072 - DNA, 50 bp, Brevibacillus borstelensis
  source 1..50: mol_type = genomic DNA
tgccaaagatgttattcacacggacaagggtgaagataacaccttgggca

SEQ ID NO: 52073 - DNA, 40 bp, Brevibacillus borstelensis
  source 1..40: mol_type = genomic DNA
gccgtagaagccgcacggacaaggatttaacgacgatatc

SEQ ID NO: 52074 - DNA, 40 bp, Brevibacillus borstelensis
  source 1..40: mol_type = genomic DNA
gccgtagaagccgcacggagaaggatttaacgacgatatc

SEQ ID NO: 52075 - DNA, 50 bp, Brevibacillus borstelensis
  source 1..50: mol_type = genomic DNA
ggccccagagcattttcacagggggaagggtgagctacatcccttgagga

SEQ ID NO: 52076 - protein, 576 aa, Anaerotruncus colihominis
MLIKNTGADTIETSNPVLADCPPTKGAETMLRQSDKITALYCRLSRDDELQGDSNSIVNQKAILSKYAKENHFSNTAFFVDDGYSGTNFNRPSWGELLERIENGEVATLIVKDMSQLGRDYLKVGFYTEVLFVEKGVRFIAINNGIDSASQQNSDFTPFLNIINEWYAKDTSKKIRAVMKSKGEAGEPLCTNPPYGYMKDPDNKKKWIVDGEAAEIVKRIFALCLDGYGPTQIARILKEDSVITPTIHFQQTGRATRNTPPNNPYNWTGDTIADILERPEYQGHTVNFKTYKQSYKSKKTCYNPEEKWLVFENTHEAIIDADTWARVQELRKNKRRPTRTGKTNMFSGIVRCADCGEKLYYCTSKNFEARQDHFVCSTSRLKGKEVCSTHFIRAVVLEQGVLAHMRMTIACVANHEEQFRKAMGAKQKAEAKKELAAKRRQATQAERRIEELDRLFKRIYEDNANGKLSDSRFQMLSDDYEQEQEELREKLLRLNEEITEQEEQSENIDRFISKVRKYLDLEELTPAVLNDMVKAVYVHAPDKSKGYREQQIDISYDLVGILPASLLNDLQNGETA

SEQ ID NO: 52077 - DNA, 50 bp, Anaerotruncus colihominis
  source 1..50: mol_type = genomic DNA
atactgtcttatgagtgccgccccgatggtagctactcataaaacagtat

SEQ ID NO: 52078 - DNA, 40 bp, Anaerotruncus colihominis
  source 1..40: mol_type = genomic DNA
gcgtaaaaaaggcgtccccgatgggggcgctttttttata

SEQ ID NO: 52079 - DNA, 40 bp, Anaerotruncus colihominis
  source 1..40: mol_type = genomic DNA
gcgtaaaaaaggcgtcccccatgggggcgctttttttata

SEQ ID NO: 52080 - DNA, 50 bp, Anaerotruncus colihominis
  source 1..50: mol_type = genomic DNA
atactgtccctagtgtgcctggcacatagtagatgctcaataaacatttt

SEQ ID NO: 52081 - protein, 525 aa, Mobiluncus curtisii; identical to SEQ ID NO: 6556

SEQ ID NO: 52082 - DNA, 50 bp, Mobiluncus curtisii
  source 1..50: mol_type = genomic DNA
cttatcaaatccgacgtctaagtggatattaagacgtcggatttgataac

SEQ ID NO: 52083 - DNA, 40 bp, Mobiluncus curtisii; identical to SEQ ID NO: 6558
  source 1..40: mol_type = genomic DNA

SEQ ID NO: 52084 - DNA, 40 bp, Mobiluncus curtisii
  source 1..40: mol_type = genomic DNA
gcccggcttttagtcaatggtgcgggcgacgggaatcgaa

SEQ ID NO: 52085 - DNA, 50 bp, Mobiluncus curtisii
  source 1..50: mol_type = genomic DNA
cttgtcaaaacccacgtctctgtggttataaatcctggacttttggccac

SEQ ID NO: 52086 - protein, 598 aa, Escherichia coli
MNKIIPYGYLRVSSLEQVRTGGGLDTQDEEVRRYITQNSEKFDIDRMVVMSDAGMSAYTGSNIKEGELGRFLADVNAGLIPTGSALICYSVDRLSRQNPWVGTHLISTLIGAGIEIHSVAENQILRSDDPVGAIMSTIYLMRANNESVIKSERAKKGYEKRLNESITNKKVLTRQMPRWLFDCDGKYAIDPNMQNVINFTFDSYIAGQSTGFIAKELNNRGLMYGNTSWRGSYVAKLIRDERLIGKHIRYSKQIKGVKRVVIETIPNFYPVVVDVEKFFLANNMLTSVAKNIRGRTRVTYGDDSILRNLFNGVIKCGVCGGDTSVVQNTRKKIVNGEATYIPYKTFLRCRTRYELKNCVQSDIRYEVIERAILNHLMGLDISALLSVPVDNKIESYRTELELCKAEEVELHTLIEQREREGKRVRPRTIKAYEDVSDRIDELNKLIESYVEDTFVPDFNVDLNSIADVSNVSERSLIKKGIATIADSICYKSISDFILVEIKYRNLSVKHVLVIDNKQSKVVVNFSIEYHENSHDYTCNGLILKYVKSPEEFHLMGVNIEDYAHMMNFVDFISDNEAKKIKEYLVSNLSRVLISNVPE

SEQ ID NO: 52087 - DNA, 50 bp, Escherichia coli
  source 1..50: mol_type = genomic DNA
tagtgtgtataacttccataatgcctgctatcgtatagctaaccacacta

SEQ ID NO: 52088 - DNA, 40 bp, Escherichia coli; identical to SEQ ID NO: 20258
  source 1..40: mol_type = genomic DNA

SEQ ID NO: 52089 - DNA, 40 bp, Escherichia coli; identical to SEQ ID NO: 20259
  source 1..40: mol_type = genomic DNA

SEQ ID NO: 52090 - DNA, 50 bp, Escherichia coli; identical to SEQ ID NO: 20260
  source 1..50: mol_type = genomic DNA

SEQ ID NO: 52091 - protein, 598 aa, Escherichia coli
MNKIIPYGYLRVSSLEQVRTGGGLDTQDEEVRRYITQNSEKFDIDRMVVMSDAGMSAYTGSNIKEGELGRFLADVNAGLIPTGSALICYSVDRLSRQNPWVGTHLISTLIGAGIEIHSVAENQILRSDDPVGAIMSTIYLMRANNESVIKSERAKKGYEKRLNESITNKKVLTRQMPRWLFDCDGKYAIDPNMQNVINFTFDSYIAGQSTGFIAKELNNRGLMYGNTSWRGSYVAKLIRDERLIGKHIRYSKQIKGVKRVVIETIPNFYPVVVDVEKFFLANNMLTSVAKNIRGRTRVTYGDDSILRNLFNGVIKCGVCGGDTSVVQNTRKKIVNGEATYIPYKTFLRCRTRYELKNCVQSDIRYEVIERAILNHLMGLDISALLSVPVDNKIESYRTELELCKAEEVELHTLIEQREREGKRVRPRTIKAYEDVSDRIDELNKLIESYVEDTFVPDFNVDLNSIADVSNVSERSLIKKGIATIADSICYKRISDFILVEIKYRNLSVKHVLVIDNKQSKVVVNFSIEYHENSHDYTCNGLILKYVKSPEEFHLMGVNIEDYAHMMNFVDFISDNEAKKIKEYLVSNLSRVLISNVPE

SEQ ID NO: 52092 - DNA, 50 bp, Escherichia coli; identical to SEQ ID NO: 52087
  source 1..50: mol_type = genomic DNA

SEQ ID NO: 52093 - DNA, 40 bp, Escherichia coli; identical to SEQ ID NO: 20258
  source 1..40: mol_type = genomic DNA

SEQ ID NO: 52094 - DNA, 40 bp, Escherichia coli; identical to SEQ ID NO: 20259
  source 1..40: mol_type = genomic DNA

SEQ ID NO: 52095 - DNA, 50 bp, Escherichia coli; identical to SEQ ID NO: 20260
  source 1..50: mol_type = genomic DNA

SEQ ID NO: 52096 - protein, 598 aa, Escherichia coli
MNKIIPYGYLRVSSLEQVRTGGGLDTQDEEVRRYITQNSEKFDIDRMVVMSDAGMSAYTGSNIKEGELGRFLADVNAGLIPTGSALICYSVDRLSRQNPWVGTHLISTLIGAGIEIHSVAENQILRSDDPVGAIMSTIYLMRANNESVIKSERAKKGYEKRLNESITNKKVLTRQMPRWLFDCDGKYAIDPNMQNVINFTFDSYIAGQSTGFIAKELNNRGLMYGNTSWRGSYVAKLIRDERLIGKHIRYSKQIKGVKRVVIETIPNFYPVVVDVEKFFLANNMLTSVAKNIRGRTRVTYSDDSILRNLFNGVIKCGVCGGDTSVVQNTRKKIVNGEATYIPYKTFLRCRTRYELKNCVQSDIRYEVIERAILNHLMGLDISALLSVPVDNKIESYRTELELCKAEEVELHTLIEQREREGKRVRPRTIKAYEDVSDRIDELNKLIESYVEDTFVPDFNVDLNSIADVSNVSERSLIKKGIATIADSICYKRISDFILVEIKYRNLSVKHVLVIDNKQSKVVVNFSIEYHENSHDYTCNGLILKYVKSPEEFHLMGVNIEDYAHMMNFVDFISDNEAKKIKEYLVSNLSRVLISNVPE

SEQ ID NO: 52097 - DNA, 50 bp, Escherichia coli; identical to SEQ ID NO: 52087
  source 1..50: mol_type = genomic DNA

SEQ ID NO: 52098 - DNA, 40 bp, Escherichia coli; identical to SEQ ID NO: 20258
  source 1..40: mol_type = genomic DNA

SEQ ID NO: 52099 - DNA, 40 bp, Escherichia coli; identical to SEQ ID NO: 20259
  source 1..40: mol_type = genomic DNA

SEQ ID NO: 52100 - DNA, 50 bp, Escherichia coli; identical to SEQ ID NO: 20260
  source 1..50: mol_type = genomic DNA

SEQ ID NO: 52101 - protein, 598 aa, Enterobacter roggenkampii
MNKIIPYGYLRVSSLEQVRTGGGLDTQDEEVRRYITQNSEKFDIDRMVVMSDAGMSAYTGSNIKEGELGRFLADVNAGLIPTGSALICYSVDRLSRQNPWVGTHLISTLIGAGIEIHSVAENQILRSDDPVGAIMSTIYLMRANNESVIKSERAKKGYEKRLNESITNKKVLTRQMPRWLFDCDGKYAIDPNMQNVINFTFDSYIAGQSTGFIAKELNNRGLMYGNTSWRGSYVAKLIRDERLIGKHIRYSKQIKGVKRVVIETIPNFYPVVVDVEKFFLANNMLTSVAKNIRGRTRVTYGDDSILRNLFNGVIKCGVCGGETSVVQNTRKKIVNGEATYIPYKTFLRCRTRYELKNCVQSDIRYEVIERAILNHLMGLDISALLSVPVDNKIESYRTELELCKAEEVELHTLIEQREREGKRVRPRTIKAYEDVSDRIDELNKLIELYVEDTFVPDFNVDLNSVADVSNVSERSLIKKGIATIADSICYKRISDFILVEIKYRNLSVKHVLVIDNKQSKVVVNFSIEYHENSHDYTCNGLILKYVKSPEEFHLMGVNIEDYAHMMNFVDFISDNEAKKIKEYLVSNLSRVLISNVPE

SEQ ID NO: 52102 - DNA, 50 bp, Enterobacter roggenkampii; identical to SEQ ID NO: 52087
  source 1..50: mol_type = genomic DNA

SEQ ID NO: 52103 - DNA, 40 bp, Enterobacter roggenkampii; identical to SEQ ID NO: 21883
  source 1..40: mol_type = genomic DNA

SEQ ID NO: 52104 - DNA, 40 bp, Enterobacter roggenkampii
  source 1..40: mol_type = genomic DNA
ttagtgtaaagcataacgtatccgatctacacctgtgcag

SEQ ID NO: 52105 - DNA, 50 bp, Enterobacter roggenkampii; identical to SEQ ID NO: 20260
  source 1..50: mol_type = genomic DNA

SEQ ID NO: 52106 - protein, 598 aa, Enterobacter roggenkampii
MNKIIPYGYLRVSSLEQVRTGGGLDTQDEEVRRYITQNSEKFDIDRMVVMSDAGMSAYTGSNIKEGELGRFLADVNAGLIPTGSALICYSVDRLSRQNPWVGTHLISTLIGAGIEIHSVAENQILRSDDPVGAIMSTIYLMRANNESVIKSERAKKGYEKRLNESITNKKVLTRQMPRWLFDCDGKYAIDPNMQNVINFTFDSYIAGQSTGFIAKELNNRGLMYGNTSWRGSYIAKLIRDERLIGKHIRYSKQIKGVKRVVIETIPNFYPVVVDVEKFFLANNMLTSVAKNIRGRTRVTYGDDSILRNLFNGVIKCGVCGGDTSVVQNTRKKIVNGEATYIPYKTFLRCRTRYELKNCVQSDIRYEVIERAILNHLMGLDISALLSVPVDNKIESYRTELELCKAEEVELHTLIEQREREGKRVRPRTIKAYEDVSDRIDELNKLIESYVEDTFVPDFNVDLNSIADVSNVSERSLIKKGIATIADSICYKRISDFILVEIKYRNLSVKHVLVIDNKQSKVVVNFSIEYHENSHDYTCNGLILKYVKSPEEFHLMGVNIEDYAHMMNFVDFISDNEAKKIKEYLVSNLSRVLISNVPE

SEQ ID NO: 52107 - DNA, 50 bp, Enterobacter roggenkampii; identical to SEQ ID NO: 52087
  source 1..50: mol_type = genomic DNA

SEQ ID NO: 52108 - DNA, 40 bp, Enterobacter roggenkampii; identical to SEQ ID NO: 21883
  source 1..40: mol_type = genomic DNA

SEQ ID NO: 52109 - DNA, 40 bp, Enterobacter roggenkampii; identical to SEQ ID NO: 52104
  source 1..40: mol_type = genomic DNA

SEQ ID NO: 52110 - DNA, 50 bp, Enterobacter roggenkampii; identical to SEQ ID NO: 20260
  source 1..50: mol_type = genomic DNA

SEQ ID NO: 52111 - protein, 598 aa, Escherichia coli
MNKIIPYGYLRVSSLEQVRTGGGLDTQDEEVRRYITQNSEKFDIDRMVVMSDAGMSAYTGSNIKEGELGRFLADVNAGLIPTGSALICYSVDRLSRQNPWVGTHLISTLIGAGIEIHSVAENQILRSDDPVGAIMSTIYLMRANNESVIKSERAKKGYEKRLNESITNKKVLTRQMPRWLFDCDGKYAIDPNMQNVINFTFDSYIAGQSTGFIAKELNNRGLMYGNTSWRGSYVAKLIRDERLIGKHIRYSKQIKGVKRVVIETIPNFYPVVVDVEKFFLANNMLTSVAKNIRGRTRVTYGDDSILRNLFNGVIKCGVCGGDTSVVQNTRKKIVNGEATYIPYKTFLRCRTRYELKNCVQSDIRYEVIERAILNHLMGLDISALLSVPVDNKIESYRTELELCKAEEVELHTLIEQREREGKRVRPRTIKAYEDVSDRIDELNKLIESYVEDTFVPDFNVDLNSIADVSNVSERSLIKKGIATIADSICYKRISDFILVEIKYRNLSVKHVLVIDNKQSKVVVNFSIEYHDNSHDYTCNGLILKYVKSPEEFHLMGVNIEDYAHMMNFVDFISDNEAKKIKEYLVSNLSRVLISNVPE

SEQ ID NO: 52112 - DNA, 50 bp, Escherichia coli; identical to SEQ ID NO: 52087
  source 1..50: mol_type = genomic DNA

SEQ ID NO: 52113 - DNA, 40 bp, Escherichia coli; identical to SEQ ID NO: 20258
  source 1..40: mol_type = genomic DNA

SEQ ID NO: 52114 - DNA, 40 bp, Escherichia coli; identical to SEQ ID NO: 20259
  source 1..40: mol_type = genomic DNA

SEQ ID NO: 52115 - DNA, 50 bp, Escherichia coli; identical to SEQ ID NO: 20260
  source 1..50: mol_type = genomic DNA

SEQ ID NO: 52116 - protein, 598 aa, Escherichia coli
MNKIIPYGYLRVSSLEQVRTGGGLDTQDEEVRRYITQNSEKFDIDRMVVMSDAGMSAYTGSNIKEGELGRFLADVNAGLIPTGSALICYSVDRLSRQNPWVGTHLISTLIGAGIEIHSVAENQILRSDDPVGAIMSTIYLMRANNESVIKSERAKKGYEKRLNESITNKKVLTRQMPRWLFDCDGKYAIDPNMQNVINFTFDSYIAGQSTGFIAKELNNRGLMYGNTSWRGSYVAKLIRDERLIGKHIRYSKQIKGVKRVVIETIPNFYPVVVDVEKFFLANNMLTSVAKNIRGRTRVTYGDDSILRNLFNGVIKCGVCGGDTSVVQNTRKKIVNGEATYIPYKTFLRCRTRYELKNCVQSDIRYEVIERAILNHLMGLDISALLSVPVDNKIESYRTELELCKAEEVELHTLIEQREREGKRVRPRTIKAYEDVSDRIDELNKLIESYVEDTFVPDFNVDLISIADVSNVSERSLIKKGIATIADSICYKRISDFILVEIKYRNLSVKHVLVIDNKQSKVVVNFSIEYHENSHDYTCNGLILKYVKSPEEFHLMGVNIEDYAHMMNFVDFISDNEAKKIKEYLVSNLSRVLISNVPE

SEQ ID NO: 52117 - DNA, 50 bp, Escherichia coli; identical to SEQ ID NO: 52087
  source 1..50: mol_type = genomic DNA

SEQ ID NO: 52118 - DNA, 40 bp, Escherichia coli; identical to SEQ ID NO: 20258
  source 1..40: mol_type = genomic DNA

SEQ ID NO: 52119 - DNA, 40 bp, Escherichia coli; identical to SEQ ID NO: 20259
  source 1..40: mol_type = genomic DNA

SEQ ID NO: 52120 - DNA, 50 bp, Escherichia coli; identical to SEQ ID NO: 20260
  source 1..50: mol_type = genomic DNA

SEQ ID NO: 52121 - protein, 525 aa, Pseudomonas aeruginosa
MPSAFSYVRFSSGKQAKGSSEHRQRAMLGQWLGQHPSFTLSDLRFEDLGRSGFSGEHLDHGLGQLLAAIDSGAIKSGDVILVEAVDRIGRLEPLEMLPLFSRIVKAGVSVITLEDGHVYDRSSVNETSLFLLVAKIQQAHEYSNRLSRRINASYTARREKAKAGLGIKRETPVWLTTDGQLVPHVAPHIAQAFQDYADGLGERRICRKLRESGLEEFSKTNATTVRRWLKNRTAIGYWNDIPDVYPHVVDPALFYRVQQRLDAPKVDRAKPSAHYLTGLVKCAVCGRNYNYKQRKHTDPAMLCTSRARLAGEGCTNSKTFPVIVLDQVRKLTSLPFLQHAMESASSQADPSSQRLAVIDGEIGELSRKIGEATKALLALGFTPEIQESLEQLKTAREALEEERATLLLPQAEKLTAAQLEAFSNGLLDDEPMKLNHVLQTAGYFMVVHPDGSIDVDGKRFVYEGANRKKKVYKLRLLGEDRQWEPPILSPEQAASLARSVAGAYLPPNSSEEIARYYEKVKHLVR

SEQ ID NO: 52122 - DNA, 50 bp, Pseudomonas aeruginosa
  source 1..50: mol_type = genomic DNA
catatccatcttgagtcttctttctcgcaagacgacacgaaatagacaca

SEQ ID NO: 52123 - DNA, 40 bp, Pseudomonas aeruginosa; identical to SEQ ID NO: 20278
  source 1..40: mol_type = genomic DNA

SEQ ID NO: 52124 - DNA, 40 bp, Pseudomonas aeruginosa; identical to SEQ ID NO: 20279
  source 1..40: mol_type = genomic DNA

SEQ ID NO: 52125 - DNA, 50 bp, Pseudomonas aeruginosa; identical to SEQ ID NO: 20280
  source 1..50: mol_type = genomic DNA

SEQ ID NO: 52126 - protein, 611 aa, Enterobacter bugandensis
MRTVKAYIYSRVSSLQQVDAFGLDRQISTVLDFLENAKLPAELGYQLDPSNYEVLESDKGLSGYKGHNFTKGSLGQFKRRVEAGEITEGCLLIESVDRFSRKQGYDAIDEFTFLIKRNIDIVEVETGQIYSYKLDHKLSALSTSIERAHQESKRKARISKKSWNRRKEESLATGVALNNNTPDWLSLSQDKKTYEIDAQKVQTITSIFEWYRDGYGVTEIVNRLNSEGIRYNGRGWNTVTVYNKLRDRRLNGYLIGKYKTIPKKDSESTTDTEKRILENIKIKKEANDNAQRIYPVVIDDELFTKIQSMMDRNVSSKKQRSTTTKQRNLFNGLTKCHECGSPMIVQSMSNGGQYLRCYRQRTKDEKCNSKMLRYFESEKVLLGHIKNLNLDEIYSDRKHAQSLDVLKRQLSDVNEKIVLLNDKVKSASDEDELFAIMEFKRKRILEKDELNQKISSLENESEIVRLNYNYDIDKLTDQENTALRRKANEHIAKVISSIKCRRIDSSYIGAYYLYDITYHRDILKHILITDNSGKLISEITISEKDNERTYLVREEDQTVFKVESNGNAWVMYASRTKTIDDLLYYINTMMVGREPDDFTYQLNEDHIEWID

SEQ ID NO: 52127 - DNA, 50 bp, Enterobacter bugandensis; identical to SEQ ID NO: 43852
  source 1..50: mol_type = genomic DNA

SEQ ID NO: 52128 - DNA, 40 bp, Enterobacter bugandensis; identical to SEQ ID NO: 32693
  source 1..40: mol_type = genomic DNA

SEQ ID NO: 52129 - DNA, 40 bp, Enterobacter bugandensis
  source 1..40: mol_type = genomic DNA
gagcggcatcaatagcttctgccagcgtggcgtacatggt

SEQ ID NO: 52130 - DNA, 50 bp, Enterobacter bugandensis
  source 1..50: mol_type = genomic DNA
gatttaagtgatatttttcgctgctgccagaggactgttgcaaagatatg

SEQ ID NO: 52131 - protein, 611 aa, Cronobacter malonaticus
MRTVKAYIYSRVSSLQQVDAFGLDRQISTVLDFLENAKLPAELGYQLDPSNYEVLESDKGLSGYKGHNFTKGSLGQFKRRVEAGEITEGCLLIESVDRFSRKQGYDAIDEFTFLIKRNIDIVEVETGQIYSYKLDHKLSALSTSIERAHQESKRKARISKKSWNRRKEESLATGVALNNNTPDWLSLSQDKKTYEIDAQKVQTITSIFEWYRDGYGVTEIVNRLNSEGNRYNGRGWNTVTVYNKLRDRRLNGYLIGKYKTIPKKDSESTTDTEKRILENIKIKKEANDNAQRIYPVVIDDELFTKIQSMMDRNVSSKKQRSTTTKQRNLFNGLTKCHECGSPMIVQSMSNGGQYLRCYRQRTKDEKCNSKMLRYFESEKVLLGHIKNLNLDEIYSDRKHAQSLDVLKRQLSDVNEKIVLLNDKVKSASDEDELFAIMEFKRKRILEKDELNQKISSLENESEIVRLNYNYDIDKLTDQDNTALRRKANEHIAKVISAIKCQRIDSSYIGAYYLYDITYHRDILKHILITDNSGKLISEITISEKDNERTYLVREEDQTVFKVESNGNAWVIYASRTKTIDDLLYYINTMMVGREPDDFAYQLNEDHIEWID

SEQ ID NO: 52132 - DNA, 50 bp, Cronobacter malonaticus; identical to SEQ ID NO: 43852
  source 1..50: mol_type = genomic DNA

SEQ ID NO: 52133 - DNA, 40 bp, Cronobacter malonaticus
  source 1..40: mol_type = genomic DNA
gtgctgcgtcaatggcttcttcaagcgtggcgtacatagt

SEQ ID NO: 52134 - DNA, 40 bp, Cronobacter malonaticus
  source 1..40: mol_type = genomic DNA
gtgctgcgtcaatggcttctgcaagcgtggcgtacatagt

SEQ ID NO: 52135 - DNA, 50 bp, Cronobacter malonaticus; identical to SEQ ID NO: 52130
  source 1..50: mol_type = genomic DNA

SEQ ID NO: 52136 - protein, 492 aa, Mycobacteroides abscessus
MKQQAKRALVVVRLSRVTDETTSPLRQREACLELCEQRGYEVIGTAEDLDISAGKTSPFDRPQLGDWLTNRRGEFDVLVTFRMDRIVRRLLDLADLIRWCQSNSVSLVSATETFLDLDSAFGDIIALLVAKVAEMELAAISERNRSAAQHNMRQGKYRGGPPPWGYTTEKVDGDWRFVQDEEQVTVINEVVRRVLDGEPLRQVAADLTDRAVLTPRDRVNQLKGRPIHGYRWHSAKLREMLTSKSLLGHAVTANGSIRNDDGSPIIRATPILERDVFEQVQVELAGRENRKEPTKRSSSLLLRVLYCGVCGKPAYKLKGGKGRQDRYRCASAQYKSTCGNGMVLVADANEVLTDAVMFELGDKYRRDRVWDAGSDYAAELAEIDDTLADLTDQLGTGAFRKGTRQRERLDARIADLAERQAQLAAQATRPAGWTWVPTTELFKDWWKSQTVEQLNMWLRSMDIQMWWNHQGIQIDMLHLEKMAEQWSNPLIG

SEQ ID NO: 52137 - DNA, 50 bp, Mycobacteroides abscessus
  source 1..50: mol_type = genomic DNA
gggctgtaaaagttgataatcgaatattccacgagtatcgtttacaacca

SEQ ID NO: 52138 - DNA, 40 bp, Mycobacteroides abscessus; identical to SEQ ID NO: 28373
  source 1..40: mol_type = genomic DNA

SEQ ID NO: 52139 - DNA, 40 bp, Mycobacteroides abscessus
  source 1..40: mol_type = genomic DNA
gggtatggccacagtcgcaatctcgacggacaccattccc

SEQ ID NO: 52140 - DNA, 50 bp, Mycobacteroides abscessus
  source 1..50: mol_type = genomic DNA
gggccgtaagtttagaaatcctaaattttcaaaagtgagtctgataacca

SEQ ID NO: 52141 - protein, 665 aa, Vibrio lentus
MIKNDEDFMRTPKIHVYARVSTLGQVESGLSLGLQTDDDMINEYCQRYGAELGKVYSDHGRSAFHQKNLAGKLGDFLTDMADKNNLDVQAGDYLLVRALDRISRANLDDAFWLYLQIIRSGVSILTTMDNREYKPNDSVSQILATLSFDLAGEESRKKQAITLAAMRKRIKQYQTGERAPCGNPYNVSTGLPFYAYAKDNVCYIDEKKFQLAKEICQMALDGKGNVTCRNYLRQNGVELTVDSVASIFKSECLYGDRQITLLDLDATNRHPEKKKIYSTFILKEYFPAACTKDEFHRIRAIKDSYKIHDNRRVSYSILGGISRLYCKDTVALGSRENGGIYKCSSPECACGFYARQQLLDHIVLSCLSEHQIVPVEPDKMKIESIQQQIGSYQHQLSTLKKIMFDNPLAFDLADQDRLSELSTKIQELNDQLTIEQENHAHSNSFISLNDVNNWREKKEAYINGSDEDKLEAREIVQRLVKEIRIVEDTVTIKTIDNKVHWYYIPTPLNRRKKAYVKLLVTDQALDMRSINKALDKVCFTEEDIKNGKHHYPLEAYAPDLVTVAIKAPPKEKDEFEILLETVTEPFVFKRRVLLSMGLSANQYQRHASVEKAIKIGFYAVSVEYTSKNYKYPTDIIVSPREITTDDIHRLLWIRCISKIVHLNGS

SEQ ID NO: 52142 - DNA, 50 bp, Vibrio lentus
  source 1..50: mol_type = genomic DNA
gtaatgatttaagcttgataagtattgcctaattaaagtctaatcatggt

SEQ ID NO: 52143 - DNA, 40 bp, Vibrio lentus
  source 1..40: mol_type = genomic DNA
cttagcggcgcgctcgacgttcacttggtcaccaacatcg

SEQ ID NO: 52144 - DNA, 40 bp, Vibrio lentus
  source 1..40: mol_type = genomic DNA
cttagcggcgcgctcgacgaacacttggtcaccaacatcg

SEQ ID NO: 52145 - DNA, 50 bp, Vibrio lentus
  source 1..50: mol_type = genomic DNA
gtaactattacaaattaataagaaaagtcaaattactcaagaaaaatgga

SEQ ID NO: 52146 - protein, 534 aa, Vibrio breoganii
MQQVAYSYTRLSSAKQLAGHGATRQRETIEKLCEARGWTLSDKSYDDLGISAYHAKNRTQGALGLFIEAVEQGVIASGSILVVESIDRLSREEVDRSLRLMLTLLDLGILIFTVSDHKLYRSGSPNAMLDIMTWLIVASRANEESVVKSKRIRDAKARHKAQARETGRIITRQCPKWLKVNHDKTQFIVDTAMAQTIKSIFKWYSEGLSLRSICDKLNAHGATWKPATITSLLVNRKVLGEFQPLVYGEDGKSNPDGDVVCDYYPRIIEDDLFTRCKLLRDTRKAQGRKSSEPYANLFKGLLRCTECGSGIGLSTDRNGGRVYKNLRCANRSATKCSAPRWKYEVVETMIVVALQNLPWDTGSHSASEALCASLRDSIDLLDAEYQGCTEKAENALEALIALPTNKMLQAKAETLDNQVQALSERLAKLRDDLEQAERVRLVETLDHVDMNLVLDSLYSDDEESRPRVNLMLHKQVSVISLTSLKDDPKLHGRIDIELTSGHTAGIEVWKGYSGYSVTLSDGTQYWSEIKHIAH

SEQ ID NO: 52147 - DNA, 50 bp, Vibrio breoganii
  source 1..50: mol_type = genomic DNA
tttctggttaagaccatcatgattgtaatacccttggcgtttaccagacg

SEQ ID NO: 52148 - DNA, 40 bp, Vibrio breoganii
  source 1..40: mol_type = genomic DNA
cattggtattgcgatgattgtggttccgttaatgcccatc

SEQ ID NO: 52149 - DNA, 40 bp, Vibrio breoganii
  source 1..40: mol_type = genomic DNA
cattggtattgcgatgatttcggttccgttaatgcccatc

SEQ ID NO: 52150 - DNA, 50 bp, Vibrio breoganii
  source 1..50: mol_type = genomic DNA
tttcttgttgccatcttcaggatttcaaaagccgtatcaccaacaatacg

SEQ ID NO: 52151 - protein, 538 aa, Clostridium butyricum
MIKVAIYSRKSRETETGDSIENQIILCKEYCNRNYLGEEIEYIIYEDEGFSGKNTDRPRFQQLMKDIKSKKINMLICYRLDRISRSVADFSSTLEFLQLNNCDFISIKEQFDTSTPMGRAMIYIASVFAQLERETIAERVRDNMLQMAKKGQWLGGNTPFGFESKRIKYLDESLKERTMCTISPVNSDLDIIKRIYNIYIETESTTKTAKRLHTEGVTKNNTIMQSITITRILRSAIYVKSSEKTHEYLRKKSDNIYGEANGNGYLTYAKTTNTLKRSRNNEDKWIYAVSKHKGVIDDDTWLKVQRILDRNKNKDFKRTGTGNNPALLSGIFKCKKCGSNMIVRRTGEYYYYICSSKVHKIGSSCNCKNVRVDQLDNNVISQLKNYSNSLLIEELSNSVAKFESIESNSSNSDNLKKELNSKVDMVNNLIKRISLAPSDDIAEMIMNQISDINKEIKSLKSKLDNIDNIKIKDNIDKQNVLLFIDSLKNFSKNIELFEDPIKRRSLIQTVVKKIIWNDDEYVAEIELLEEVSDEYKKK

SEQ ID NO: 52152 - DNA, 50 bp, Clostridium butyricum
  source 1..50: mol_type = genomic DNA
ttttgtgcttgtacaacagtagcaagaccaactgttctaatatgtcaaaa

SEQ ID NO: 52153 - DNA, 40 bp, Clostridium butyricum
  source 1..40: mol_type = genomic DNA
tgatgcgccaaccgcagcaagtgcatctgcccctacaaaa

SEQ ID NO: 52154 - DNA, 40 bp, Clostridium butyricum
  source 1..40: mol_type = genomic DNA
tgatgcgccaaccgcagcatctgcatctgcccctacaaaa

SEQ ID NO: 52155 - DNA, 50 bp, Clostridium butyricum
  source 1..50: mol_type = genomic DNA
ttttattatccttcaacagtaggatcacaatctgtgttgaaatggtaaag

SEQ ID NO: 52156 - protein, 538 aa, Salmonella enterica; identical to SEQ ID NO: 13576

SEQ ID NO: 52157 - DNA, 50 bp, Salmonella enterica; identical to SEQ ID NO: 13577
  source 1..50: mol_type = genomic DNA

SEQ ID NO: 52158 - DNA, 40 bp, Salmonella enterica; identical to SEQ ID NO: 22633
  source 1..40: mol_type = genomic DNA

SEQ ID NO: 52159 - DNA, 40 bp, Salmonella enterica
  source 1..40: mol_type = genomic DNA
aggcgacaagcggtggaatgatacgcagcggttcaagcaa

SEQ ID NO: 52160 - DNA, 50 bp, Salmonella enterica
  source 1..50: mol_type = genomic DNA
ggacttggtagctgcacataggcagaagcacatctaggtagaggatgcaa

SEQ ID NO: 52161 - protein, 538 aa, Eubacterium pyruvativorans; identical to SEQ ID NO: 13576

SEQ ID NO: 52162 - DNA, 50 bp, Eubacterium pyruvativorans; identical to SEQ ID NO: 13577
  source 1..50: mol_type = genomic DNA

SEQ ID NO: 52163 - DNA, 40 bp, Eubacterium pyruvativorans
  source 1..40: mol_type = genomic DNA
agaatacaaacccggaacaaaatcagccgacgcagaatca

SEQ ID NO: 52164 - DNA, 40 bp, Eubacterium pyruvativorans
  source 1..40: mol_type = genomic DNA
agaatacaaacccggaacagaatcagccgacgcagaatca

SEQ ID NO: 52165 - DNA, 50 bp, Eubacterium pyruvativorans; identical to SEQ ID NO: 52160
  source 1..50: mol_type = genomic DNA

SEQ ID NO: 52166 - protein, 538 aa, Klebsiella oxytoca; identical to SEQ ID NO: 13576

SEQ ID NO: 52167 - DNA, 50 bp, Klebsiella oxytoca; identical to SEQ ID NO: 13577
  source 1..50: mol_type = genomic DNA

SEQ ID NO: 52168 - DNA, 40 bp, Klebsiella oxytoca
  source 1..40: mol_type = genomic DNA
ctgctacaacccgcgagaaataacgcaacgcacaaaacga

SEQ ID NO: 52169 - DNA, 40 bp, Klebsiella oxytoca
  source 1..40: mol_type = genomic DNA
ctgctacaacccgcgagaagaaacgcaacgcacaaaacga

SEQ ID NO: 52170 - DNA, 50 bp, Klebsiella oxytoca; identical to SEQ ID NO: 52160
  source 1..50: mol_type = genomic DNA

SEQ ID NO: 52171 - protein, 538 aa, Lachnoclostridium sp An76; identical to SEQ ID NO: 13576

SEQ ID NO: 52172 - DNA, 50 bp, Lachnoclostridium sp An76; identical to SEQ ID NO: 13577
  source 1..50: mol_type = genomic DNA

SEQ ID NO: 52173 - DNA, 40 bp, Lachnoclostridium sp An76
  source 1..40: mol_type = genomic DNA
gcgatagaagccgtgagagaactggcgcgtgaatgagagt

SEQ ID NO: 52174 - DNA, 40 bp, Lachnoclostridium sp An76
  source 1..40: mol_type = genomic DNA
gcgatagaagccgtgagaggactggcgcgtgaatgagagt

SEQ ID NO: 52175 - DNA, 50 bp, Lachnoclostridium sp An76; identical to SEQ ID NO: 52160
  source 1..50: mol_type = genomic DNA

SEQ ID NO: 52176 - protein, 503 aa, Bacillus toyonensis
MAKKEDIKNVAIYLRASRDEENKGIEEALQSQRMLLTEMCETREWKYTIYEEIASSVTMQRSQLNSMLEGVEQGEYDAVVVKDIDRLSRDEFDSSDIKRILYRSDTAIATPPNTIYDWTNRQDMLLLNIKTFLSAQEYEIIRERLMYGKLSASKRGFWAHGTPPLGYKKNHETRKLEPDENMVKHVHYIFNSIVEGKSVSEVRQELNKLGVKTKEGKKFSFNSIFRIINNEAYKGTLVYNRYKVTDERRRDGKRKKTIERPKDEWERIEDAHPAIIDKATWEKANEIVNTYSFAKKRKSSTTYPTSRFTYCGTCGGTLTFQVAHTGKLYVKHCLKCGNRTYQYNPILEGIRAELIPFHQELIDSITALEKTGKDANIEYKKEQLEKRIKSVELGIQRLLPAYQETVITLDEFKTAKAQGEEELKQLHLELDELNKLDPQEQIIGLQELKKQVEQLFGKWHRLDDEGLSDEDLNKALNIIIEKVIWTYPKGEGVEPKLHVQFRK

SEQ ID NO: 52177 - DNA, 50 bp, Bacillus toyonensis
  source 1..50: mol_type = genomic DNA
aagttgtattaagataccaaacaaacaagttgtgtaaccaaatacaactg

SEQ ID NO: 52178 - DNA, 40 bp, Bacillus toyonensis; identical to SEQ ID NO: 21043
  source 1..40: mol_type = genomic DNA

SEQ ID NO: 52179 - DNA, 40 bp, Bacillus toyonensis
  source 1..40: mol_type = genomic DNA
actcgtatttactggaccgcatggttctgggaagacaacg

SEQ ID NO: 52180 - DNA, 50 bp, Bacillus toyonensis
  source 1..50: mol_type = genomic DNA
aagctatactgaattacaaaacttcaaagatgtatgagttgatacaaatg

SEQ ID NO: 52181 - protein, 536 aa, Pantoea eucalypti
MPKAISYIRFSTKQQIQGDSTKRQSRLINSWLEHNPGYVLDEHMRFQDLGISGYSGANAKSGAFSEFLAAVESGYIERGSVLLVESLDRVSRQDIDKAGEQLRKILRAGVEVVTLVDGSWYKEESLRDSLSMIKAMLVMERAHEESLTKSKRLKSAWANKRREAEATGKIMSRRCVAWLRVSEDGTKFEQIPENVKAVQRVFQLRLDGLSHVKIARQMNEEGFVTLNQFRSKAGVWSQSTVTELLSNRAVIGYKVPSKSMVVKGVQEIPDYYPAIISQEQFFAVQQLKQGSGRRPSSDKPLLTNLFKGVMRCALCGFVVIVTGVTEKRSGNYRCSMKYEGRCNAKGISRLQTDKALVQGLLYNAHRLNLSSDNSKVIGNLQSELETLQKQQERLVKLAMLTDDTESVAGELRGLNKQIKEAEKAVAEAHQRDQSSKLDTLNHLDMTVKKDRIEAQIIIKRMIRTITVDTARKVCRIVFHNGLVFHDYPLDRVIDGARDLELLPVMGYSEVRFTNGKGHTPNHVLMADTPDWVKDEE

SEQ ID NO: 52182 - DNA, 50 bp, Pantoea eucalypti
  source 1..50: mol_type = genomic DNA
taagtgcatcattggaaggtttaatgcttaagttacccgccttatgatac

SEQ ID NO: 52183 - DNA, 40 bp, Pantoea eucalypti
  source 1..40: mol_type = genomic DNA
cgcggcatcaatcgcgtcatgctggacagccgcccggttc

SEQ ID NO: 52184 - DNA, 40 bp, Pantoea eucalypti
  source 1..40: mol_type = genomic DNA
cgcggcatcaatcgcgtcatcctggacagccgcccggttc

SEQ ID NO: 52185 - DNA, 50 bp, Pantoea eucalypti
  source 1..50: mol_type = genomic DNA
attaagcaaaatgggaagctctaatccttaatttaccagttttataatac

SEQ ID NO: 52186 - protein, 520 aa, Citrobacter freundii
MKKAVYCYARVSSRGQAKDGYGMSRQQTMLRDYVAAYDDSQHNRGYEFGDISWLYAEGVSAYSGKNIEDGSVLKNFIDDVLQKKITNSVLVIENLDRFSRAAPNRAAGLFLSLINAGCDIHEVETEMIHHQYSDLNIISGGLQRAHNESKRKARLSIKNWDERIKNTIEGTSVLTHRVPSWIEVKNNKYVIKEGEAEKFNLIFKMYADGFGPAAIRDELKKKKMQINESEPTINHLVKIIKDQRLIGKFNSTGRKILDGMIIYPVVVEQSLFEAVNDLRKQRNPLGKVNVKANNLFAGLCICMNCGRYVQVNSVDKKGDTYFRCGGSLLKIDKCKERGFKYKIIENALLEHIRNFDFSMLRSNDDDIQIKINYLSIELATKENYSSEILADMEKEYIPDPNDRRILKNLQRRISEIRTEITRLKQSNVGYEKFSDLKESYTDDLLDSKNTNLRLDFNVKIKRVIKNIKMKRLGNAIMLVVNYIGVNEKQAMVIDSKTGDVDFMAVQNDDLKSVEYLINKS

SEQ ID NO: 52187 - DNA, 50 bp, Citrobacter freundii
  source 1..50: mol_type = genomic DNA
tagagtaattcgttgttaatcatcaccatgatataatgctttttactgtt

SEQ ID NO: 52188 - DNA, 40 bp, Citrobacter freundii; identical to SEQ ID NO: 6888
  source 1..40: mol_type = genomic DNA

SEQ ID NO: 52189 - DNA, 40 bp, Citrobacter freundii
  source 1..40: mol_type = genomic DNA
ggcaataatgccaatcacccacatgagttcgataagcgta

SEQ ID NO: 52190 - DNA, 50 bp, Citrobacter freundii
  source 1..50: mol_type = genomic DNA
tagaatcagagaatgtcaattgtccatatcaaataattctttttattgtt

SEQ ID NO: 52191 - protein, 510 aa, Bacillus amyloliquefaciens; identical to SEQ ID NO: 5976

SEQ ID NO: 52192 - DNA, 50 bp, Bacillus amyloliquefaciens
  source 1..50: mol_type = genomic DNA
tatgtcgtactcaatcaataatcgtcacaagcattatagtttaagtataa

SEQ ID NO: 52193 - DNA, 40 bp, Bacillus amyloliquefaciens
  source 1..40: mol_type = genomic DNA
aaggtcatcccgataatcgtcacgacagatccggttacga

SEQ ID NO: 52194 - DNA, 40 bp, Bacillus amyloliquefaciens
  source 1..40: mol_type = genomic DNA
aaggtcatcccgataatcgttacgacagatccggttacga

SEQ ID NO: 52195 - DNA, 50 bp, Bacillus amyloliquefaciens
  source 1..50: mol_type = genomic DNA
tctatcttataacctctattattattaccagcattaaagtataattttaa

SEQ ID NO: 52196 - protein, 495 aa, Clostridium butyricum; identical to SEQ ID NO: 32111

SEQ ID NO: 52197 - DNA, 50 bp, Clostridium butyricum
  source 1..50: mol_type = genomic DNA
attgtgacttgtcttggtataggtgaagcgtgacctttgaaatccaccat

SEQ ID NO: 52198 - DNA, 40 bp, Clostridium butyricum
  source 1..40: mol_type = genomic DNA
tgggtttcatggtggaggcgaggcgtacagaacccgtgtc

SEQ ID NO: 52199 - DNA, 40 bp, Clostridium butyricum
  source 1..40: mol_type = genomic DNA
tgggtttcatggtggaggcatggcgtacagaacccgtgtc

SEQ ID NO: 52200 - DNA, 50 bp, Clostridium butyricum
  source 1..50: mol_type = genomic DNA
attaagactactcctcatagaggtatggtgagagataggtgatccaccat

SEQ ID NO: 52201 - protein, 478 aa, Brevibacterium aurantiacum
MVELVALRKTNEVAAYVRASMDRKGDRWTVDTQLRKIRALAEAKDWEIVEVYEDNAVSATKKRRAGTRWAEMLDDARAGRFSMVVAVDMDRLLRSTKDLNTLIDLGLRVVTVDGEIDLSTADGEFRATMLAALARFEARRKAERQIRSNERRRAEGVPTSAWKAFGWTREGEVIEEEADAVRRAFDAFLGEPSLSIRRIREDLNSAGHLTARRSEFSVDAVRYLLANPLYAGYIKHYASGELYPVHGGAFPPIVGEQTWRAAVAKLEDNVRRSARQGNQPKYLLSTIGLCGKCGATLVSGTNSRKQATYRCGELFHLTRQREPVDAMVTEAVLTRLSSVDVHDLVMPQEDDGPDREELLTERNALVERVKELSPLLRDIHQPVLEITAAINDVKARIDDIDAELLDRSVSVSAKLLADVDEPVGTAERREMVEAKWEALDMDRRRMLVDELVTVTIEPIAPGHVKFDPDLIRIEPRRD

SEQ ID NO: 52202 - DNA, 50 bp, Brevibacterium aurantiacum
  source 1..50: mol_type = genomic DNA
cagagtcataactccaacatgccctagcgcatgtcgaagttgcaacactc

SEQ ID NO: 52203 - DNA, 40 bp, Brevibacterium aurantiacum; identical to SEQ ID NO: 27918
  source 1..40: mol_type = genomic DNA

SEQ ID NO: 52204 - DNA, 40 bp, Brevibacterium aurantiacum; identical to SEQ ID NO: 27919
  source 1..40: mol_type = genomic DNA

SEQ ID NO: 52205 - DNA, 50 bp, Brevibacterium aurantiacum
  source 1..50: mol_type = genomic DNA
ctgagctagctactccacatgcacaagctcatgtcattcacacaacagtc

SEQ ID NO: 52206 - protein, 539 aa, Aneurinibacillus thermoaerophilus
MQGQLPNTVKYIYGYIRKSRQDIEREKRVDQDTLAEQRTLIEDLLETNFRHIDWDIYEEIGSGGDLIESRPVFSSIIEEIKAKEPRTVAIAIKEISRLGRGDYSQMGIVWDLLMEKHLYLITPGKIYDPYNSYDQKVIKFNMFMANMEYDMIKERMVEARAHYARMGRWMTGGAGIPYGYKFNSYTQKLEPDPDTAWVVQKIFHLYVNEGIGYNAISTRLSREGIPTATGKDYWKPMVIRRILVNPVYVGTVQFRTTRTHKGTKIKQDKKDWIVVENAHEPIIDKETFEKAGQKMKENRSSPKVKLEFEPTPLASLIVCSKCGNKMQRQYSTQYYTKKDGTKSCYRKEFMICLGCSVYMKYNSVEEEVLRILEEDFINVNPETLKEKLKEIIDIEKMQQNKKIDPLNRISVLEKQLQDLDGELTALRRMLRKGQISDEEYEQDRAEILRQKEDKERQLNFLRKETQAEQVEELDVETLQAGFKDILHLYRYGELSKGEKNELLRGIFDYIVLEKTGKGKFNLHAYLNPMLIINSTSSLN

SEQ ID NO: 52207 - DNA, 50 bp, Aneurinibacillus thermoaerophilus
  source 1..50: mol_type = genomic DNA
agtagatatcatttaacaaccaattcatcggtgatggtatgatatctact

SEQ ID NO: 52208 - DNA, 40 bp, Aneurinibacillus thermoaerophilus
  source 1..40: mol_type = genomic DNA
tgtatgggcaacgataagctcgtcagcggaaataagggcg

SEQ ID NO: 52209 - DNA, 40 bp, Aneurinibacillus thermoaerophilus
  source 1..40: mol_type = genomic DNA
tgtatgggcaacgataagccagtcagcggaaataagggcg

SEQ ID NO: 52210 - DNA, 50 bp, Aneurinibacillus thermoaerophilus
  source 1..50: mol_type = genomic DNA
aattgataaaatgcaacaattattcattcgatgatcacaaaatatgtact

SEQ ID NO: 52211 - protein, 519 aa, Microbacterium oxydans
MAQEKVRAALYVRQSDRVEAGIEQQIEVLEDKASREHWIVADVYSDNNTSASKTRGAGTDWARMLEDIDAGKIDLVVAVTAARLLRRRVDVIELAKPKRDVRVVTVRDGIDTSTMGGRIMLDVLTGMAEEEITEKDARAVPYRAKRRSAGHPPSGLVPFGYSWVPADRKDPDWRNRTRYVIVPSEAEIVRYMSAELLGGAKLGAIVAAMNEMGWKTREGARWTSSTVRRILISPFHAAMLPPAMPEGVKYSADRFGWSECTPGAWDAILPEDAVIAARSKLLDDTRRTHDGDTRAKWLLSTIGRCGACGGPLRMATTKTVNPVRGYRCTKGCFQRPASLIEDYVTNAVVGVLSAPGLLSWVDDGGHDIDALRLRREAIAARRAEAEALYRSRRLSAEGFADEVDELDVEADEVERDLADALRSNPLAQFVTGDDIRTIWDGLSMGRRRAVLSALVHDVQVLPVGKGRRLRTVEEIDGTVTLGWRRVERRRSLETGQATRTPKVAQEAQDAIAAALSGQE

SEQ ID NO: 52212 - DNA, 50 bp, Microbacterium oxydans
  source 1..50: mol_type = genomic DNA
aagtgtcatttggctgtgacagtggccaccgtcgcaggaaacgagcataa

SEQ ID NO: 52213 - DNA, 40 bp, Microbacterium oxydans
  source 1..40: mol_type = genomic DNA
cccggcgaaggcgaccgcggccatcgtggtgatcgcgtat

SEQ ID NO: 52214 - DNA, 40 bp, Microbacterium oxydans
  source 1..40: mol_type = genomic DNA
cccggcgaaggcgaccgcgagcatcgtggtgatcgcgtat

SEQ ID NO: 52215 - DNA, 50 bp, Microbacterium oxydans
  source 1..50: mol_type = genomic DNA
atctgtcatcttaatgtgacagttagtaaagtagcacaggaccagaacaa

SEQ ID NO: 52216 - protein, 548 aa, Agathobaculum butyriciproducens
MEATAATLERRVRVIPATRKPEELHRNHDGKMRVAAYCRVSTDSEEQLNSYEAQKTYYTQKIEDSPDWEMAGIYADEGISGTSLKKRTQFNKMITACKRGHIDLIITKSLSRFARNTVDCLDTVRLLKANGIGVYFEKENINTLTESSEFLITLFSGFAQAESESLSKNVAWGKQKSAEAGKVTFQYKKMLGYRKGADGQPEIVPEEAEIIRRIYHRYLDGCTLGQIKRELEEDGVPTAQGVERWSPSIIHNILTNEKYIGDALLQKTYVTDCITKKVKKNRGERTMYYVENSHPAIVSRDLFNQVQQEMTRRSSKRKVLQKSGKTELGKYSGKYALTELLVCGECGSPYKRVTWARNGKKRIVWRCVSRLEFGTKYCQHSPTLDEVKLHSATLAAMNEYAAIRQEVCPDVLAMAEEARQALSQAGARLLQLKKRMDAVSREQSDVLDRLLVNMADTELNARMKALTDEKESLKAQIVDAQQVEVDLEEQAARRRQMWDSIMECAAGYTEFDNELVRQVIQKITVEDAETIRIHFRDSKTVIEQEIYG

SEQ ID NO: 52217 - DNA, 50 bp, Agathobaculum butyriciproducens
  source 1..50: mol_type = genomic DNA
ggtatcttttctgtcgacacacgacaaaatgtgttgatgaaagatgcaac

SEQ ID NO: 52218 - DNA, 40 bp, Agathobaculum butyriciproducens
  source 1..40: mol_type = genomic DNA
cgaatcgcaccgggcgtaccatgtaaaaccgcttatttcg

SEQ ID NO: 52219 - DNA, 40 bp, Agathobaculum butyriciproducens; identical to SEQ ID NO: 52218
  source 1..40: mol_type = genomic DNA

SEQ ID NO: 52220 - DNA, 50 bp, Agathobaculum butyriciproducens
  source 1..50: mol_type = genomic DNA
ggtctcattgtcagtgacaccccacaaaatttcttcttttgagatgaaaa

SEQ ID NO: 52221 - protein, 497 aa, Mycobacteroides abscessus; identical to SEQ ID NO: 20961

SEQ ID NO: 52222 - DNA, 50 bp, Mycobacteroides abscessus
  source 1..50: mol_type = genomic DNA
tttttgttgtcgtgtgtgcagccttcacgttgtactgtgccatacatgaa

SEQ ID NO: 52223 - DNA, 40 bp, Mycobacteroides abscessus
  source 1..40: mol_type = genomic DNA
gcgacgtggccggtggccttcacgttgtactgcgccacct

SEQ ID NO: 52224 - DNA, 40 bp, Mycobacteroides abscessus
  source 1..40: mol_type = genomic DNA
gcgacgtggccggtggcctgtacgttgtactgcgccacct

SEQ ID NO: 52225 - DNA, 50 bp, Mycobacteroides abscessus
  source 1..50: mol_type = genomic DNA
tttttggttgcctatgttcaggctgtaccctcttcttatttattaatgaa

SEQ ID NO: 52226 - protein, 500 aa, Bacillus vallismortis
MIAIYVRVSTEEQAIKGSSIDSQIEACIKKAGTKDVLKYADEGFSGELLERPALNRLREDASKGLISQVICYDPDRLSRKLMNQLIIDDELRKRNIPLIFVNGEYANSPEGQLFFAMRGAISEFEKAKIKERTSSGRLQKMKKGMIIKDSKLYGYKFVKEKRTLEILEEEAKIIRMIFNYFTDHKSPFFGRVNGIALHLTQMGVKTKKGAKVWHRQVVRQILMNSSYKGEHKQYKYDTEGSYVSKQAGNKSIIKIRPEEEQITVAIPAIIPAEQWDYAQELLGQSKRKHLSISPHNYLLSGLVRCGKCGNTMTGKKRKSHGKDYYVYTCRKNYSGAKDRGCGKEMSENKLNRHVWGEIFKFITNPQKYASFKEIEQSNHLSDELELIQKEIEKTKKGRKRLLTLISLSDDDDLDIDEIKAQIIELQKKQNQLTEKCNEIQSKMKVLDDTSSSENALKRAIDYFQSIGADNLTLEDKKTIVNFIVKEVTVVDSDTVYIETY

SEQ ID NO: 52227 - DNA, 50 bp, Bacillus vallismortis; identical to SEQ ID NO: 42192
  source 1..50: mol_type = genomic DNA

SEQ ID NO: 52228 - DNA, 40 bp, Bacillus vallismortis
  source 1..40: mol_type = genomic DNA
gcgcaaatgcatgaggatttcgttctcaatacaccgcgcg

SEQ ID NO: 52229 - DNA, 40 bp, Bacillus vallismortis
  source 1..40: mol_type = genomic DNA
gcgcaaatgcatgaggattaagttctcaatacaccgcgcg

SEQ ID NO: 52230 - DNA, 50 bp, Bacillus vallismortis
  source 1..50: mol_type = genomic DNA
gaaatccctaaataatttataaacaaattattcattttattaagagggtt

SEQ ID NO: 52231 - protein, 501 aa, Dorea longicatena; identical to SEQ ID NO: 49611

SEQ ID NO: 52232 - DNA, 50 bp, Dorea longicatena
  source 1..50: mol_type = genomic DNA
gatgaaacagtatgtcaaccctgtggagctgaccgaagcggaattttatt

SEQ ID NO: 52233 - DNA, 40 bp, Dorea longicatena
  source 1..40: mol_type = genomic DNA
gcattgcgccacagacaaaggagctgaccgccgaacttct

SEQ ID NO: 52234 - DNA, 40 bp, Dorea longicatena
  source 1..40: mol_type = genomic DNA
gcattgcgccacagacaaacaagctgaccgccgaacttct

SEQ ID NO: 52235 - DNA, 50 bp, Dorea longicatena
  source 1..50: mol_type = genomic DNA
gctaaaacaaagcatcaacactgtcaatttgacttgccagtaaattaatt

SEQ ID NO: 52236 - protein, 501 aa, Dorea longicatena
MKQPYNTTIYNTALYLRLSRDDELQGESGSIQTQRMMLRQYAAEHGLTVVDEYIDDGWSGTNFERPSFQRMIDDIEDGKINCVVTKDLSRLGRNYILTGQYTEIYFPSKGVRYIAINDNVDTINGDSELAPFLNILNEMHARQTSKKVKAAMRTRFANGAHYGAYAPLGYVKDPDKKGHLLIDPETRWIVEKIFDLAVHGRGAASITRILVEEKVPTPGWLNYERYGTFANIYAGAPAEKAYAWTIAQVKSILKEETYIGHSVHNKQSNISFKNKKKVRKPQEEWYRVENTHEAIISEEVFQKVQELIASRRRKRRNGTTQIFAGLIKCADCGWSLAYGENKQNKNPYGYYHCSKNGQGLRQCSMHYIRYDVLYAYVLARLQYWSMLAQKDEDKLLKRLLNASDRERNSAKKKQAAELKKAEKRKAEVDGLFAKMYEDWSAGRITEYNFNMLSEKYQNEQKELETKIRQLHETMEAAVQTAADAEKWIALMKQYVNPVELT

SEQ ID NO: 52237 - DNA, 50 bp, Dorea longicatena; identical to SEQ ID NO: 51557
  source 1..50: mol_type = genomic DNA

SEQ ID NO: 52238 - DNA, 40 bp, Dorea longicatena; identical to SEQ ID NO: 52233
  source 1..40: mol_type = genomic DNA

SEQ ID NO: 52239 - DNA, 40 bp, Dorea longicatena; identical to SEQ ID NO: 52234
  source 1..40: mol_type = genomic DNA

SEQ ID NO: 52240 - DNA, 50 bp, Dorea longicatena; identical to SEQ ID NO: 52235
  source 1..50: mol_type = genomic DNA

SEQ ID NO: 52241 - protein, 492 aa, Fusobacterium nucleatum
MKRAVAYCRFSSSNQREESIDAQVRAIKEYCDKNKLKLLKIYKDEAISGTSTKDREMFLEMILDCKKNLFDCVIVHKYDRFARNRYDHALYEKILNDNNVKLISVLEQLVDDSPESVILKSVLAGMNEYYSKNLSREVKKGKKENALKAIHNGGIPPLGYDLDANKKYIVNKKEAEAVKLIFELALDGVGYVSIADILNKRGYKNKRGKEFKKISIRDTLLNIKYIGTYYYGLKDGHGRLQKEPIIIENSHEAIIDKDIFYKVQSKMKKNLKGPRNRNGQLYFLTGYCVCGECGGPFSGGYRSVNRNGSVSYGYYCQKKKRKETKCNNKAIRKELLETFIFDIIKKEIFNDEKIEKIIKDIISFSENKKLIREEEIKEYTKEIEKLQKLTLKLLEKNLEGNILDEIFNIKNNELKEKIQVLREKIYSVKNITKINEEELRKYLRKFKESANEQAKRKVVEAFVQEIRVYRDKIKIVLRKFPKDLDMVSIGGD

SEQ ID NO: 52242 - DNA, 50 bp, Fusobacterium nucleatum
  source 1..50: mol_type = genomic DNA
ttggatatggttagtattggtggagatgaagaaagaaaaattataaccat

SEQ ID NO: 52243 - DNA, 40 bp, Fusobacterium nucleatum; identical to SEQ ID NO: 21778
  source 1..40: mol_type = genomic DNA

SEQ ID NO: 52244 - DNA, 40 bp, Fusobacterium nucleatum
  source 1..40: mol_type = genomic DNA
atattgatattttggtggaaatgacgagagtcgaactcgt

SEQ ID NO: 52245 - DNA, 50 bp, Fusobacterium nucleatum
  source 1..50: mol_type = genomic DNA
ttaaatatgggaaatattgaaggaaaagaagatacacaaaataaatccct

SEQ ID NO: 52246 - protein, 496 aa, Elizabethkingia anophelis
MKTAYLYIRVSTDEQKRKGYSLPEQEDRLLKYCKFNNIEVKGIYREDYSAKNFNRPGWKELFSEIKKESSGEHKNILFIKWDRFSRNVEYAYDMIGKLRKYKTTAVAIDQPIDFSVPESTVMLAVYLAVPEAENTRKAQNTSNGIRRAKLMGRYPNKAPIGFINVTLVDGKKVIVPKEPEAEIIKWVFNQVAQNDHKISKIRKIAVDKGLICSRSHFFRVLRNPIYCGVISVKLDSNEEQMIKGIHEPLISESLFYRVQSVVNTKRKTTSKRDDLRAMFFLRGFLTCSVCNRKLGGSFSKGRSKKYPYYHCYNRCKTRINASFLNDCYQNKLQQLVLSDSVIELFKNILEDQNIKTQKASYLYAKKLIERKIKKEKLILSRGRKLFIAGVLKIDDYNELKEENQINIKNLKREECDIIFKLEAIDKKNQIEDKALVEIFQKFSEFDTSDKKHIVNLIPPVNIDYKTGSLSLDLNETFSKILSKKSHRKTNKKNEFH

SEQ ID NO: 52247 - DNA, 50 bp, Elizabethkingia anophelis
  source 1..50: mol_type = genomic DNA
tatttaatagttgtctcattaagtacccaacaccgaccaaatatcgaatc

SEQ ID NO: 52248 - DNA, 40 bp, Elizabethkingia anophelis
  source 1..40: mol_type = genomic DNA
gtttaagccttttcattgtacccagtgccggaatcgaacc

SEQ ID NO: 52249 - DNA, 40 bp, Elizabethkingia anophelis
  source 1..40: mol_type = genomic DNA
gtttaagccttttcattgtgtccagtgccggaatcgaacc

SEQ ID NO: 52250 - DNA, 50 bp, Elizabethkingia anophelis
  source 1..50: mol_type = genomic DNA
aattagatatatatttcttgaagtgtccaactcagagtagatattcaatc

SEQ ID NO: 52251 - protein, 550 aa, Streptococcus pyogenes
MSKEKIKVYLYTRVSTSIQIDGYSLEAQKSRMKAFALYNDYEIVGEYEDAGKSGKSIEGRVQFTRMMEDIKSGKDGVSFVLVFKLSRFARNAADVLSTLQIMQDFGVNLICVEDGIDSSKDAGKLMISVLSAVAEIERENIRVQTMEGRIQKAREGKWNGGFAPYGYQLIDGKLLINEEEAIAIRTIFDQYVNTTIGANGLSKYLENHGIRKIPRQNGKNPLFDAGLIRRILKNPVYNGKIAFGRRTLEKVHGTRNEYRQVEQDDYLVAEGIHEAIIPDELWQAAQVKLKAQAKKYEHVNKGKNMRTHLLSGIVKCPICGAGMFGNKSIKYKKDGTKYKDFYYYGCKHRLMNRGHKCTYNKQIREELLDDAVAEVIIKLVSNPKFASMMKEKINMKVDTSAIENEIDNYQKELRKSHSTKFKLIEEIDNLDVDDKHYKRRKQDLDDRLYRMYDKIEELESLLIDAKAKKQTIEAEKLTGDNIYKVLIYFDKLYKVMNDVERRQLISALISEIQIYEEKQPNGQWLKSITFKLPIIDEDLNISLDNDEQVE

SEQ ID NO: 52252 - DNA, 50 bp, Streptococcus pyogenes; identical to SEQ ID NO: 37737
  source 1..50: mol_type = genomic DNA

SEQ ID NO: 52253 - DNA, 40 bp, Streptococcus pyogenes; identical to SEQ ID NO: 32898
  source 1..40: mol_type = genomic DNA

SEQ ID NO: 52254 - DNA, 40 bp, Streptococcus pyogenes
  source 1..40: mol_type = genomic DNA
tccgcaaacgcatcacgtcttgtgcgtagtgttgctaatc

SEQ ID NO: 52255 - DNA, 50 bp, Streptococcus pyogenes; identical to SEQ ID NO: 20425
  source 1..50: mol_type = genomic DNA

SEQ ID NO: 52256 - protein, 550 aa, Streptococcus pyogenes; identical to SEQ ID NO: 45846

SEQ ID NO: 52257 - DNA, 50 bp, Streptococcus pyogenes; identical to SEQ ID NO: 37717
  source 1..50: mol_type = genomic DNA

SEQ ID NO: 52258 - DNA, 40 bp, Streptococcus pyogenes; identical to SEQ ID NO: 32898
  source 1..40: mol_type = genomic DNA

SEQ ID NO: 52259 - DNA, 40 bp, Streptococcus pyogenes; identical to SEQ ID NO: 52254
  source 1..40: mol_type = genomic DNA

SEQ ID NO: 52260 - DNA, 50 bp, Streptococcus pyogenes; identical to SEQ ID NO: 20425
  source 1..50: mol_type = genomic DNA

SEQ ID NO: 52261 - protein, 550 aa, Streptococcus pyogenes
MSKEKIKVYLYTRVSTSIQIDGYSLEAQKSRMKAFALYNDYEIVGEYEDAGKSGKSIEGRVQFTRMMEDIKSGKDGVSFVLVFKLSRFARNAADVLSTLQIMQDFGVNLICVEDGIDSSKDAGKLMISVLSAVAEIERENIRVQTMEGRIQKAREGKWNGGFAPYGYQLIDGKLLINEEEAIAIRTIFDQYVNTSIGANGLSKYLENHGIRKIPRQNGKNPLFDAGLIRKILKNPVYNGKIAFGRRTLEKVHGTRNEYRQVEQDDYLVAEGIHEAIIPDELWQAAQVKLKAQAKKYEHVNKGKNMRTHLLSGIVKCPICGAGMFGNKSIKYKKDGTKYKDFYYYGCKHRLMNRGHKCTYNKQIREELLDDAVAEVIIKLVSNPKFASMMQEKINMKVDTSATENEIDNYQKELRKSHSTKFKLIEEIDNLDVDDKHYKRRKQDLDDRLYRMYDKIDELESLLIDAKAKKQTIEAEKLTGDNIYKVLIYFDKLYKVMNDVERRQLIEALISEIQIYEEKQPNGQWLKSITFKLPIIDEDLNISLDNDEQVE

SEQ ID NO: 52262 - DNA, 50 bp, Streptococcus pyogenes; identical to SEQ ID NO: 37737
  source 1..50: mol_type = genomic DNA

SEQ ID NO: 52263 - DNA, 40 bp, Streptococcus pyogenes; identical to SEQ ID NO: 32898
  source 1..40: mol_type = genomic DNA

SEQ ID NO: 52264 - DNA, 40 bp, Streptococcus pyogenes; identical to SEQ ID NO: 52254
  source 1..40: mol_type = genomic DNA

SEQ ID NO: 52265 - DNA, 50 bp, Streptococcus pyogenes; identical to SEQ ID NO: 20425
  source 1..50: mol_type = genomic DNA

SEQ ID NO: 52266 - protein, 550 aa, Streptococcus dysgalactiae; identical to SEQ ID NO: 45751

SEQ ID NO: 52267 - DNA, 50 bp, Streptococcus dysgalactiae; identical to SEQ ID NO: 45752
  source 1..50: mol_type = genomic DNA

SEQ ID NO: 52268 - DNA, 40 bp, Streptococcus dysgalactiae
  source 1..40: mol_type = genomic DNA
tccacagacgcatcacgtggagtgcgtagtgttgccacaa

SEQ ID NO: 52269 - DNA, 40 bp, Streptococcus dysgalactiae
  source 1..40: mol_type = genomic DNA
tccacagacgcatcacgtgttgtgcgtagtgttgccacaa

SEQ ID NO: 52270 - DNA, 50 bp, Streptococcus dysgalactiae; identical to SEQ ID NO: 20425
  source 1..50: mol_type = genomic DNA

SEQ ID NO: 52271 - protein, 552 aa, Streptococcus dysgalactiae
MSKEKIKVYLYTRVSTSIQIDGYSLEAQKSRMKAFALYNDYEIVGEYEDAGKSGKSIEGRIQFTRMMEDIKSGKDGVSFVLVFKLSRFARNAADVLSTLQIMQDFGVNLICVEDGIDSSKDAGKLMISVLSAVAEIEIERENIRVQTMEGRIQKAREGKWNGGFAPYGYQLIDGKLLINEEEAIAIRTIFDQYVNTSIGANGLSKYLENHGIRKIPRQNGKNPLFDAGLIRKILKNPVYNGKIAFGRRTLEKVHGTRNEYRQVEQDDYLVAEGIHEAIIPDELWQAAQVKLKAQAKKYEHVNKGKNMRTHLLSGIVKCPICGAGMFGNKSIKYKKDGTKYKDFYYYGCKHRLMNRGHKCTYNKQIREELLDDAVAEVIIKLVSNPKFASMMQEKINMKVDTSAIENEIDNYQKELRKSHSTKFKLIEEIDNLDVDDKHYKRRKQDLDDRLYRMYDKIEELEGQLIEAKAKKETIEAEKLTGDNIYKVLIYFDKLYKVMNDVERRQLIEALISEIQIYEEKQPNGQWLKSITFKLPIIDEDLNISLDNDEQVE

SEQ ID NO: 52272 - DNA, 50 bp, Streptococcus dysgalactiae; identical to SEQ ID NO: 37717
  source 1..50: mol_type = genomic DNA

SEQ ID NO: 52273 - DNA, 40 bp, Streptococcus dysgalactiae
  source 1..40: mol_type = genomic DNA
tccacagacgcatcatgtggagtgtgtagtgttgctacaa

SEQ ID NO: 52274 - DNA, 40 bp, Streptococcus dysgalactiae
  source 1..40: mol_type = genomic DNA
tccacagacgcatcatgtgttgtgtgtagtgttgctacaa

SEQ ID NO: 52275 - DNA, 50 bp, Streptococcus dysgalactiae; identical to SEQ ID NO: 20425
  source 1..50: mol_type = genomic DNA

SEQ ID NO: 52276 - protein, 550 aa, Streptococcus dysgalactiae; identical to SEQ ID NO: 45751

SEQ ID NO: 52277 - DNA, 50 bp, Streptococcus dysgalactiae; identical to SEQ ID NO: 45752
  source 1..50: mol_type = genomic DNA

SEQ ID NO: 52278 - DNA, 40 bp, Streptococcus dysgalactiae; identical to SEQ ID NO: 52273
  source 1..40: mol_type = genomic DNA

SEQ ID NO: 52279 - DNA, 40 bp, Streptococcus dysgalactiae; identical to SEQ ID NO: 52274
  source 1..40: mol_type = genomic DNA

SEQ ID NO: 52280 - DNA, 50 bp, Streptococcus dysgalactiae; identical to SEQ ID NO: 20425
  source 1..50: mol_type = genomic DNA

SEQ ID NO: 52281 - protein, 550 aa, Streptococcus dysgalactiae
MSKEKIKVYLYTRVSTSIQIEGYSLEAQKSRMKAFAIYNDYEIVGEYEDAGKSGKSIEGRIQFNRMMEDIKSGKDGVSFVLVFKLSRFARNAADVLSTLQIMQDYGVNLICVEDGIDSSKDAGKLMISVLSAVAEIERENIRIQTMEGRIQKAREGKWNGGFAPYGYKLEDGKLFINEEEAVAIRTIFDQYVNTTIGANGLSKCLENHGIRKIPRQNGKNPLFDAGLIRKILKNPVYNGKIAFGRRTLEKVHGTRNEYKQVEQDEYLISEGIHEAIVSDEVWQAAQVKLKSQAKKYEHVNKGKDTRTHLLSGIVKCPICGVGMFGNKCIKKKKDGTKYKDFYYYGCKHRQMIRGHKCTFRKQIREELLDDAVAEVIVKIVSNPKFASMMQEKINMKVDTSEIEKEIDNYQKELRKCHSTKFKLIEEIDNLDVEDKHYKKRKQDLDDRLYRMYDKIDELESSLIDAKAKKQTIEAEKLTGDNIYKILIYFDKLYKVMNDVERRQLITALISEIQIYEEKQPNGQWLKFITFKLPIIDEDLNISLDNDEQVE

SEQ ID NO: 52282 - DNA, 50 bp, Streptococcus dysgalactiae; identical to SEQ ID NO: 37717
  source 1..50: mol_type = genomic DNA

SEQ ID NO: 52283 - DNA, 40 bp, Streptococcus dysgalactiae; identical to SEQ ID NO: 52273
  source 1..40: mol_type = genomic DNA

SEQ ID NO: 52284 - DNA, 40 bp, Streptococcus dysgalactiae; identical to SEQ ID NO: 52274
  source 1..40: mol_type = genomic DNA

SEQ ID NO: 52285 - DNA, 50 bp, Streptococcus dysgalactiae; identical to SEQ ID NO: 20425
  source 1..50: mol_type = genomic DNA

SEQ ID NO: 52286 - protein, 550 aa, Streptococcus dysgalactiae
MSKEKIKVYLYTRVSTSIQIDGYSLEAQKSRMKAFALYNDYEIVGEYEDAGKSGKSIEGRIQFTRMMEDIKSGKDGVSFVLVFKLSRVARNAADVLSTLQIMQDFGVNLICVEDGIDSSKDAGKLMISVLSAVAEIERENIRVQTMEGRIQKAREGKWNGGFAPYGYQLIDGKLLINEEEAIAIRTIFDQYVNTSIGANGLSKYLENHGIRKIPRQNGKNPLFDAGLIRKILKNPVYNGKIAFGRRTLEKVHGTRNEYRQVEQDDYLVAEGIHEAIIPDELWQAAQVKLKAQAKKYEHVNKGKNMRTHLLSGIVKCPICGAGMFGNKSIKYKKDGTKYKDFYYYGCKHRLMNRGHKCTYNKQIREELLDDAVAEVIIKLVSNPKFASMMQEKINMKVDTSAIENEIDNYQKELRKSHSTKFKLIEEIDNLDVDDKHYKRRKQDLDDRLYRMYDKIEELEGQLIEAKAKKETIEAEKLTGDNIYKVLIYFDKLYKVMNDVERRQLIEALISEIQIYEEKQPNGQWLKSITFKLPIIDEDLNISLDNDEQVE

SEQ ID NO: 52287 - DNA, 50 bp, Streptococcus dysgalactiae; identical to SEQ ID NO: 37717
  source 1..50: mol_type = genomic DNA

SEQ ID NO: 52288 - DNA, 40 bp, Streptococcus dysgalactiae; identical to SEQ ID NO: 52273
  source 1..40: mol_type = genomic DNA

SEQ ID NO: 52289 - DNA, 40 bp, Streptococcus dysgalactiae; identical to SEQ ID NO: 52274
  source 1..40: mol_type = genomic DNA

SEQ ID NO: 52290 - DNA, 50 bp, Streptococcus dysgalactiae; identical to SEQ ID NO: 20425
  source 1..50: mol_type = genomic DNA

SEQ ID NO: 52291 - protein, 550 aa, Streptococcus dysgalactiae
MSKEKIKVYLYTRVSTSIQIDGYSLEAQKSRMKAFALYNDYEIVGEYEDAGKSGKSIEGRIQFTRMMEDIKSGKDGVSFVLVFKLSRFARNAADVLSTLQIMQDFGVNLICVEDGIDSSKDAGKLMISVLSAVAEIERENIRVQTMEGRIQKAREGKWNGGFAPYGYQLIDGKLLINEEEAIAIRTIFDQYVNTNIGANGLSKYLENHGIRKIPRQNGKNPLFDAGLIRKILKNPVYNGKIAFGRRTLEKVHGTRNEYRQVEQDDYLVAEGIHEAIIPDELWQAAQVKLKAQAKKYEHVNKGKNMRTHLLSGIVKCPICGAGMFGNKSIKYKKDGTKYKDFYYYGCKHRLMNRGHKCTYNKQIREELLDDAVAEVIIKLVSNPKFASMMQEKINMKVDTSAIENEIDNYQKELRKSHSTKFKLIEEIDNLDVDDKHYKRRKQDLDDRLYRMYDKIEELEGQLIEAKAKKETIEAEKLTGDNIYKVLIYFDKLYKVMNDVERRQLIEALISEIQIYEEKQPNGQWLKSITFKLPIIDEDLNISLDNDEQVE

SEQ ID NO: 52292 - DNA, 50 bp, Streptococcus dysgalactiae; identical to SEQ ID NO: 37717
  source 1..50: mol_type = genomic DNA

SEQ ID NO: 52293 - DNA, 40 bp, Streptococcus dysgalactiae; identical to SEQ ID NO: 52273
  source 1..40: mol_type = genomic DNA

SEQ ID NO: 52294 - DNA, 40 bp, Streptococcus dysgalactiae; identical to SEQ ID NO: 52274
  source 1..40: mol_type = genomic DNA

SEQ ID NO: 52295 - DNA, 50 bp, Streptococcus dysgalactiae; identical to SEQ ID NO: 20425
  source 1..50: mol_type = genomic DNA

SEQ ID NO: 52296 - protein, 550 aa, Streptococcus dysgalactiae
MSKEKIKVYLYTRVSTSIQIDGYSLEAQKSRMKAFALYNDYEIVGEYEDAGKSGKSIEGRIQFTRMMEDIKSGKDGVSFVLVFKLSRFARNAADVLSTLQIMQDFGVNLICVEDGIDSSKDAGKLMISVLSAVAEIERENIRVQTMEGRIQKAREGKWNGGFAPYGYQLIDGKLLINEEEAIAIRTIFDQYVNTSIGANGLSKYLENHGIRKIPRQNGKNPLFDAGLIRKILKNPVYNGKIAFGRRTLEKVHGTRNEYRQVEQDDYLVAEGIHEAIIPDELWQAAQVKLKAQAKKYEHVNKGKNMRTHLLSGIVKCPICGAGMFGNKSIKYKKDGTKYKDFYYYGCKHRLMNRGHKCTYNKQIREELLDDAVAEVIIKLVSNPKFASMMQEKINMKVDTSAIENEIDNYQKELRKSHSTKFKLIEEIDNLDVDDKHYKRRKQDLDDRLYRMYDKIEELEGQLIEAKAKKETIEAEKLTGDNIYKVLIYFDKLYKVMNDVERRQLIEALISEIQIYEEKQPNGQWLKSITFKLPIIDEDLNISLDNDEQVE

SEQ ID NO: 52297 - DNA, 50 bp, Streptococcus dysgalactiae; identical to SEQ ID NO: 37717
  source 1..50: mol_type = genomic DNA

SEQ ID NO: 52298 - DNA, 40 bp, Streptococcus dysgalactiae; identical to SEQ ID NO: 52273
  source 1..40: mol_type = genomic DNA

SEQ ID NO: 52299 - DNA, 40 bp, Streptococcus dysgalactiae; identical to SEQ ID NO: 52274
  source 1..40: mol_type = genomic DNA

SEQ ID NO: 52300 - DNA, 50 bp, Streptococcus dysgalactiae; identical to SEQ ID NO: 20425
  source 1..50: mol_type = genomic DNA

SEQ ID NO: 52301 - protein, 550 aa, Streptococcus agalactiae
MSKEKIKVYLYTRVSTSIQIEGYSLEAQKSRMKAFAIYNDYEIVGEYEDAGKSGRSIEGRIQFNRMMEDIKSGKDGVSFVLVFKLARFARNAADVLSTLQIMQDYGVNLICVDDGIDSSKDAGKLMISVLSAVAEIERENIRIQTMEGRIQKAREGKWNGGFAPYGYKLEDGKLFINEEEAVAIRTIFDQYVNTTIGANGISKYLENHGIRKIPRQNGKNPLFDAGLIRKILKNPVYNGKIAFGRRTLEKVHGTRNEYKQVEQDEYLISEGIHEAIVSDEVWQAAQVKLKSQAKKYEHVNKGKDTRTHLLSGIVKCPICGAGMFGNKCTKKKKDGTKYKDFYYYGCKHRQMIRGHKCTFRKQIREELLDDAVAEVIVKIVSNPKFASMMQEKINMKVDTSEIEKEIDNYQKELRKSHSTKFKLIEEIDNLDVEDKHYKRRKQDLDDRLYRMYDKIDELESSLIDAKAKKQTIEAEKLTGDNIYKVLIYFDKLYKFMNDVERRQLITALISEIQVYEEKQPNGQWLKSITFKLPIIDDDLNISLDNDEQVE

SEQ ID NO: 52302 - DNA, 50 bp, Streptococcus agalactiae; identical to SEQ ID NO: 37717
  source 1..50: mol_type = genomic DNA

SEQ ID NO: 52303 - DNA, 40 bp, Streptococcus agalactiae
  source 1..40: mol_type = genomic DNA
cccaatgacacatcatgtggagtgcgtagcgttgctacaa

SEQ ID NO: 52304 - DNA, 40 bp, Streptococcus agalactiae
  source 1..40: mol_type = genomic DNA
cccaatgacacatcatgtgttgtgcgtagcgttgctacaa

SEQ ID NO: 52305 - DNA, 50 bp, Streptococcus agalactiae; identical to SEQ ID NO: 20425
  source 1..50: mol_type = genomic DNA

SEQ ID NO: 52306 - protein, 550 aa, Streptococcus agalactiae; identical to SEQ ID NO: 45751

SEQ ID NO: 52307 - DNA, 50 bp, Streptococcus agalactiae; identical to SEQ ID NO: 45752
  source 1..50: mol_type = genomic DNA

SEQ ID NO: 52308 - DNA, 40 bp, Streptococcus agalactiae; identical to SEQ ID NO: 52303
  source 1..40: mol_type = genomic DNA

SEQ ID NO: 52309 - DNA, 40 bp, Streptococcus agalactiae; identical to SEQ ID NO: 52304
  source 1..40: mol_type = genomic DNA

SEQ ID NO: 52310 - DNA, 50 bp, Streptococcus agalactiae; identical to SEQ ID NO: 20425
  source 1..50: mol_type = genomic DNA

SEQ ID NO: 52311 - protein, 557 aa, Edwardsiella piscicida
MAVKLPVFCYARVSSFTQTTEQGGYGLSRQHTTFDSFLQYCNEVIPQDLPRLDLERVTYLNDSGLSAYHALNWNKGQLGQLYQQIENGIISNAYLIVENIDRLSRRNPFDAIQKISFMIQHGLYIFEIETNQIFSHNRPESLLALQMSLNRSYSESKRKSVITIKNFKNRIDRYLQDGELFTKSSKSIPRWFDIDVKNKKLIQNDIATTIQKIFEMYADGFGNGTICKRLNDDGLLDVKRHWNTITLSRVLRDRRLIGEKRYGRICRAKEDEELIENFWPPVISRKLFDRVQAIIGNHKVSHIDKTTKKQKNLFHGLTRCGICGSNASITSNNRSMDYICCLSRRHHISDVCTTAQYMRWSPIERALVAFLDGIDWRQIYQPESNSKSVLDGLCAELRAVDQKISELKAELNKSDDDVVLALSRSIRKNQELQTELQRKIAAIEDKSGTKSVSFNFDEKLFDQNEVELRQNANVEYRKVIKEISITKLDDTYVFCTIKYFAEILHFVVIDLNTAKVESFATFDNGKAVMQFTDTEGGDMLRDITKFAINEYIKNNSK

SEQ ID NO: 52312 - DNA, 50 bp, Edwardsiella piscicida
  source 1..50: mol_type = genomic DNA
tgatttgttttattgcccaatatcggcatattgcgttatactatacacaa

SEQ ID NO: 52313 - DNA, 40 bp, Edwardsiella piscicida
  source 1..40: mol_type = genomic DNA
ctggtggctgatatacagcggcatgttgatcaggtacatg

SEQ ID NO: 52314 - DNA, 40 bp, Edwardsiella piscicida
  source 1..40: mol_type = genomic DNA
ctggtggctgatatacagcgtcatgttgatcaggtacatg

SEQ ID NO: 52315 - DNA, 50 bp, Edwardsiella piscicida
  source 1..50: mol_type = genomic DNA
tggtttgttgttggccaaaacatcgttacatggcatatgactatagacaa

SEQ ID NO: 52316 - protein, 547 aa, Burkholderia gladioli
MATKARVYSYLRFSDPKQAAGGSIDRQLEYAARWAAERDLLLDASLSLRDEGLSAYHQRHVKQGALGVFLRAVEDGHVPPGSVLIVEGLDRLSRAEPLQAQAQLAQIVNAGITVVTASDGREYNRERLKAQPMDLVYSLLVMIRAHEESDTKSKRVKAAIRRQCQGWIAGTWRTPIRVGKDPQWVREVDGKFELIPERAAAIRVVVDMYKKGHGAVRTLRDLHNSGMTITNAGLPSAPQLYKLLANRMLIGEKAVELDGEQFRLEGYYPPVLSPAEFADLRNAAGERGRRKGKGEIPGVVTGLGITYCGYCGAAVVAQNIMGRRRMANGLPYPGHRRLHCVTYSSSAGCKVSGSCSVAPVERALMLYCSDQMNLTRLLEGDSGVTALHAELAHARAAVADLERQIGRITDALLTDEGQAPAALLKRMREMEADLERERHRCEALELRAHAAASAEAPAAADAWSTLVRGVEELDYDARMQARQLVADTFSRIVVYQSGFYPETDDGLIGLMLVAKRGSTRLLHVDRRTGEWRSADDVAIADDLPLPS

SEQ ID NO: 52317 - DNA, 50 bp, Burkholderia gladioli
  source 1..50: mol_type = genomic DNA
gtcggtatattttaacttgctctcgggcagccgagggatactatacctat

SEQ ID NO: 52318 - DNA, 40 bp, Burkholderia gladioli
  source 1..40: mol_type = genomic DNA
ggagtcgaccagggccttcgggcagccgagcgatacgaac

SEQ ID NO: 52319 - DNA, 40 bp, Burkholderia gladioli
  source 1..40: mol_type = genomic DNA
ggagtcgaccagggccttctggcagccgagcgatacgaac

SEQ ID NO: 52320 - DNA, 50 bp, Burkholderia gladioli
  source 1..50: mol_type = genomic DNA
ctctgtctacctggcctttctctctggcaggccagggaaattaaagcttt

SEQ ID NO: 52321 - protein, 515 aa, Bacillus wiedmannii
MKTAIYLRKSRADLEAEARGEGETLAKHRTTLLKIAKEMNLNVLSVREEIVSGESLVKRPEMLALLEEIEDNKYDVVLCMDMDRLGRGGMKEQGIILETFKRSNTKIMTPRKTYDLNDEWDEEYSEFEAFMARKELKIITRRMQRGRVASVEAGNYLGTHAPFGYDIHRLNKRERTLTINSEEASVVRMIFDWYANEDMGANAIRSKLNDLGYKSKLGNEWNPYSILDILKNNVYIGKVTWQKRKEVKQPDAVKRSCARQDKSDWIIADGKHEPIIPESLFEQVQEKLNSRYHVPYNTNGIKNPLAGIIKCSKCGYSMVQRYPKNRKETMDCKHRGCENKSSYTELIEKRLLEALKEWYINYKADFEKHKQDDKLKETQVIQINEAALRKLEKELVDVQKQKSNLHDLLERGVYTVDMFLERSNVVSDRITEITSTMENLKKEIKTEIKKEKVKKDTIPQVEHVLDLYFKTDDPKKKNNLLKSVLEKAVYKKEKWQRLDDFELVLYPKLPQDGDI

SEQ ID NO: 52322 - DNA, 50 bp, Bacillus wiedmannii; identical to SEQ ID NO: 11747
  source 1..50: mol_type = genomic DNA

SEQ ID NO: 52323 - DNA, 40 bp, Bacillus wiedmannii
  source 1..40: mol_type = genomic DNA
tgtagccattaggcgcatgagatttactccattcagccct

SEQ ID NO: 52324 - DNA, 40 bp, Bacillus wiedmannii
  source 1..40: mol_type = genomic DNA
tgtagccattaggcgcatgctatttactccattcagccct

SEQ ID NO: 52325 - DNA, 50 bp, Bacillus wiedmannii
  source 1..50: mol_type = genomic DNA
agttgttactgctctgtagaaattctgttgttacctttatgttgatcatg

SEQ ID NO: 52326 - protein, 539 aa, Streptococcus pneumoniae
MNRTKKYIAALYCRLSKDDGSTNESMSIYSQKAMLKQYAEQNNIAIYDYYVDDGYSGTNFERPAFKKMITDIENGKINCVITKDLSRLGRNYLESGAYIEMYFPQKNVRYIAITDGIDTINSYEFDIMPFKNILNEMYAKDTSKKVKSALKSRMKEGTYIGSKAPFGFKKDPDDKHRLIIDERVKPIIELVYELCLEGKGTQLISQEMMKRKIPRPSSFLENADKLYGLTEENKYKWTHRMVLSILRDPVYCGNMERNKRPTLSFKNRKRLYVPKEDRIVVKDTHEGIVSEVVWTQVQNMLDKRKNTNKSGITYDNIFKGLVKCPDCNYALTPKTDYRLNKKDTIDFVHFSCSGYKKYGVKACTSHRINARDLYNVVLEDIQYHGQMALSSRENFVMKIAEKIDKDKVDERKDKTEKLSLYKNKLNDLDKAFEKLYEDRLSESISERNFNLMNEKLSKQQEELIEEIDLLEEEIKAIADTEENCEQFVENISKFAKIKELNRYILNQVIDKIYVYDKEEVDGEIKQKVEIHYKFIGKLD

SEQ ID NO: 52327 - DNA, 50 bp, Streptococcus pneumoniae
  source 1..50: mol_type = genomic DNA
ttgaccacttaggacagttcaactgatgttggacagtccgaagtggtacg

SEQ ID NO: 52328 - DNA, 40 bp, Streptococcus pneumoniae
  source 1..40: mol_type = genomic DNA
tccagtaccctgctcaaccgatctgaaacagcggagcatc

SEQ ID NO: 52329 - DNA, 40 bp, Streptococcus pneumoniae
  source 1..40: mol_type = genomic DNA
tccagtaccctgctcaacccatctgaaacagcggagcatc

SEQ ID NO: 52330 - DNA, 50 bp, Streptococcus pneumoniae
  source 1..50: mol_type = genomic DNA
tttaccactgtacccagttgaacacatgttaaacaaatttacatggtatt

SEQ ID NO: 52331 - protein, 539 aa, Streptococcus suis
MNRTKKYIAALYCRLSKDDGSTNESMSIYSQKAMLKQYAEQNNIAVYDYYVDDGYSGTNFERPAFKKMITDIENGKINCVITKDLSRLGRNYLESGAYIEMYFPQKNVRYIAITDGIDTINSYEFDIMPFKNILNEMYAKDTSKKVKSALKSRMKEGTYIGSKAPFGFKKDPDDKHRLVIDERVKPIIELVYELCLEGKGTQLISQEMMKRKIPRPSSFLENADKLYGLTEENKYKWTHRMVLSILRDPVYCGNMERNKRPTLSFKNRKRLYVSKEDRIVVKDTHEGIVSEEVWTQVQQMLDKRKNTNKSGITYDNIFKGLVKCPTCGYALTPKADYRLNKKETIDFVHFSCSGYKKYGVNACTSHRINARDLYNVVLEDIQYHGQMALSSREDFVMKIAEKIDKDKVDERKDKTEKLNSSKIKLKDLDKAFEKLYEDRLSESISERNFNLMNEKLSRQQEKLIEEIDLLEEEIKEIADTEENCEQFVENISKFAKIKELNRYILNQVIDKIYVYDKEEVDGEIKQKVEIHYKFIGKLD

SEQ ID NO: 52332 - DNA, 50 bp, Streptococcus suis; identical to SEQ ID NO: 267
  source 1..50: mol_type = genomic DNA

SEQ ID NO: 52333 - DNA, 40 bp, Streptococcus suis
  source 1..40: mol_type = genomic DNA
tgttccatggcgtccctcagacattgtccagcgaaatggt

SEQ ID NO: 52334 - DNA, 40 bp, Streptococcus suis
  source 1..40: mol_type = genomic DNA
tgttccatggcgtccctcacacattgtccagcgaaatggt

SEQ ID NO: 52335 - DNA, 50 bp, Streptococcus suis; identical to SEQ ID NO: 52330
  source 1..50: mol_type = genomic DNA

SEQ ID NO: 52336 - protein, 539 aa, Streptococcus suis; identical to SEQ ID NO: 266

SEQ ID NO: 52337 - DNA, 50 bp, Streptococcus suis; identical to SEQ ID NO: 267
  source 1..50: mol_type = genomic DNA

SEQ ID NO: 52338 - DNA, 40 bp, Streptococcus suis; identical to SEQ ID NO: 52333
  source 1..40: mol_type = genomic DNA

SEQ ID NO: 52339 - DNA, 40 bp, Streptococcus suis; identical to SEQ ID NO: 52334
  source 1..40: mol_type = genomic DNA

SEQ ID NO: 52340 - DNA, 50 bp, Streptococcus suis; identical to SEQ ID NO: 52330
  source 1..50: mol_type = genomic DNA

SEQ ID NO: 52341 - protein, 596 aa, Burkholderia pseudomallei
MPVAYSYIRFSTPDQIKGDSLRRQLDTSARYAAEHGLTLDDSLNVRDLGVSAFTGSNFERGALGQFVTAINEGRVAPDSYLLVESLDRLSRLPVTEALAVFQTIINLGVTIVTLVDSTIYSKDRLRNDWTPLLVALVSMSRAHEESAVKSRRVKAAWDAKKERVKAKKEVMSGRCPWWLRPSADNSRYEIIEEKAETVRLIFNLAKDGFGGEAIAKQLNARNVPTAQHAKRWQNSTVQFNLRNIAAIGVLQLDQDNNGRTTTNTFVEDYYPPVIDKALFYEVQALRAERNRNKNTMSAGRKGQCYNVFQGTAKCGYCGSPMHLRRKPGMNSGFLYCSKSLQGGGCVGVSYNIRQLEAEFIEFTRELDLSHVLGDTSMDNARSEKNAGLSACNAMLEEAQTKLANLLNAIEAGGDMPILIQRLRDVEAQVNDLKKQRLALQSEVEILSNTSRDEQASLEMLSQLMEQLGSKESDLEEKLRLRFRMLGEVQKVVRRLDLFPGGPILAQDEIDELRSQLQSGGFDNGRIDDYLTQLPIKPDRSARYFIAHLRNGISRTVRQGRIMETDSARSHKVRSAIRGAMNEEANRDDETLLPSGR

SEQ ID NO: 52342 - DNA, 50 bp, Burkholderia pseudomallei
  source 1..50: mol_type = genomic DNA
tgatgtcaaattagccaaaacattaagattggatggtcaatttgacaacc

SEQ ID NO: 52343 - DNA, 40 bp, Burkholderia pseudomallei; identical to SEQ ID NO: 26273
  source 1..40: mol_type = genomic DNA

SEQ ID NO: 52344 - DNA, 40 bp, Burkholderia pseudomallei
  source 1..40: mol_type = genomic DNA
gtactacgcgcatccgcgccatcagttctggcggctcttg

SEQ ID NO: 52345 - DNA, 50 bp, Burkholderia pseudomallei
  source 1..50: mol_type = genomic DNA
tcatgacaaagacaccaaagcaatcagaatagaagcaaatattgacaagt

SEQ ID NO: 52346 - protein, 562 aa, Vibrio alginolyticus
MDKIIYPYVRFSSEQQSGGSSYKRQMDDILKYAKENGYTVNNSLELKDLGLSAYTAKHIEKGSLGDFLDALDAGVIEADGSAYLCIEQIDRLSRQSIDEAYQVFRKILKANVNVITLMDKKTYTKDSLNDLMSIMYSSMLMGQANEESAKKSERILKSFDKKIDQLNNNEPIQYVGIFPGWIDNRGTKQKRDFIINKKAKIVQNVFKMYIEGTSMGDIARIFNEKGIEQVAKRRHKNFTNSWSSAKINHLLKNRCVLGELYIKKTGEVYKNYYPQIISIDDWDVVQSMTSTKKITKTSGRKSINIFTGKIFCSGCGQKYYFETDDKVTKKGRTLYYMLKCQGRRVLGCKSKSIKYDDFLSSTPNMFGMITKTKKDNSEEIKKIKQKISEISSETKEVEKNINTLESMNDNGSLDYETYLKESSKQRKKIRVNDTRIADFKANIARLSSDNKLAYFDKTDPVSIIKGKRFVNENFAGFVISSDSKVCTALYLNGQVINFVLKNSKIEKQENVKAVDGFGEFFELKQEILDAYGSGKMDGRFIEILRATNFWGVDTPEKDYSFE

SEQ ID NO: 52347 - DNA, 50 bp, Vibrio alginolyticus
  source 1..50: mol_type = genomic DNA
ttcctgttaatcttgcatagcactgtaattttatgtatgattaacaggaa

SEQ ID NO: 52348 - DNA, 40 bp, Vibrio alginolyticus
  source 1..40: mol_type = genomic DNA
tgccggagccaagttcacggtgatccgcttagcaggaaat

SEQ ID NO: 52349 - DNA, 40 bp, Vibrio alginolyticus
  source 1..40: mol_type = genomic DNA
tgccggagccaagttcacgctgatccgcttagcaggaaat

SEQ ID NO: 52350 - DNA, 50 bp, Vibrio alginolyticus
  source 1..50: mol_type = genomic DNA
aacctactgtctttgcagagcactctaattatatatggtagtaacactaa

SEQ ID NO: 52351 - protein, 507 aa, Flavobacterium sp
MENINVIIYSRVSTDEQAQKGFSLDYQEQTLMSHCERMGYNLVKSYREDHSAKNFKRPEWTNLKAYAKANKKAIHKVLFVKWDRFSRNTEQALTVLREFDSMGIELNATEQYLDMSNSDNKMVLSIYLTAGEVERDKISSRTISGTYQAKKEGYFTGKAPYGYDNFRDESKKSTLKPNQFSFFVKKAFVEVAMNIESVETIRKKLKQEGMKLEKSAFSELLKNVVYIGKIKVPEFKKESAMEVKGKHEALIDLDTFNKVQAIFKGKRWHGTKPAHKNLDFPLRDFLTCEVCGHQITGSHSKGRSKKYPYYHCRNKCETRVSVDEAHNRIGSILFNLQINENIKDLFSDILKDSESQINGDRTIQLQNKIELQKVLKSKIEDTEDLLLSKDINKERFNSIIERINGQLNDVNNEIEILSKRTDSIKTYVDSGLELLTKLDIMFANGDYDGKRIVAGSIFTQKLIFGNDDCRTAKVNEVVEVLTRNNKGSEGYKKEKPSFLTAFPLTYP

SEQ ID NO: 52352 - DNA, 50 bp, Flavobacterium sp
  source 1..50: mol_type = genomic DNA
catttctgacagcttttccgcttacgtacccgtaacagttgagttgtcga

SEQ ID NO: 52353 - DNA, 40 bp, Flavobacterium sp
  source 1..40: mol_type = genomic DNA
ttcttttcgaagaggcttttgtacccggagccggagtcga

SEQ ID NO: 52354 - DNA, 40 bp, Flavobacterium sp
  source 1..40: mol_type = genomic DNA
ttcttttcgaagaggcttttttacccggagccggagtcga

SEQ ID NO: 52355 - DNA, 50 bp, Flavobacterium sp
  source 1..50: mol_type = genomic DNA
catttttgaatcgttgtcctgctatttaactgtgacaagttaattgtcta

SEQ ID NO: 52356 - protein, 611 aa, Enterobacter roggenkampii
MRTVKAYIYSRVSSLQQVDAFGLDRQISTVLDFLENAKLPAELGYQLDPSNHEVLDSDKGLSGYAGHNFTKGSLGRFKERVKSGEITEGCLLIESVDRFSRKQGYDAIDEFTFLIKRNIDIVEVETGQIYSYKLDHKLSTLSTSIERAYQESKRKARISKKSWQKRKKDSVDTGIALNNNTPDWLSLSQDKKSYELDVQKVQTITKIFELYRDGYGVTQIVNLMNKEGERYNGKGWNTVTVYNKLRDRRLNGYLVGKYTTIPKKDNESTNDAEKRILENIKIKKEANDNAKRIYPVVIEDDLFSRVQSMMDRNVSSKKQKSTTTKQRNLFNGLTKCNECGSPMIVQSMSNGGQYLRCYRQRTKDEKCNSKMLRYFETEKVLLQHIKNLNLDEIYGDEKSNQSLDTLKRLLSDVNGKIALLNEKVQSANDESELFAIMEFKRKRILEKDELIAKINSLENQCEAVTLNYTYDIEQLTNQDNTVIRRKANEHIAKVISSVKCRRIDSSYIGAYYLYDITYHRDILKHILITDNSGKLISEITISEKDNERTYLVREEDQTVFKVESNGNAWVMYASRTKTIDDLLYYINTMMVGREPDDFTYLLNEDHIEWID

SEQ ID NO: 52357 - DNA, 50 bp, Enterobacter roggenkampii; identical to SEQ ID NO: 43867
  source 1..50: mol_type = genomic DNA

SEQ ID NO: 52358 - DNA, 40 bp, Enterobacter roggenkampii; identical to SEQ ID NO: 32693
  source 1..40: mol_type = genomic DNA

SEQ ID NO: 52359 - DNA, 40 bp, Enterobacter roggenkampii
  source 1..40: mol_type = genomic DNA
gagcggcatcaatagcttcaaccagcgtggcgtacatggt

SEQ ID NO: 52360 - DNA, 50 bp, Enterobacter roggenkampii
  source 1..50: mol_type = genomic DNA
cagaaatattttagttaagtgagcaactagcgaactgtgatattcatatt

SEQ ID NO: 52361 - protein, 509 aa, Marinococcus halophilus
MQYENNAILDVQSVAVYLRKSRNEEGETDVLQKHRNQLLDFVQSYGWKFDLFQEIGSSDDLEFRTEFKRLLERVQAGIYDAVVVVEFDRLTRGDSYDYGYIKRIFAESRTKILTPYGEIIDLSDEFNVMNDMKATMGRYEYLQTKKRLNEGKLRSARLGNWVNGTPPLGYDYDHKTKKLVINEDEAKAVRMIFYLYHEKGNSMDNTSFEMNRLGFKTKRNDYFTVTKIGRILQNQTYVGRIVYGKSEGSGHKHKKSKTLRYKPENEWLVVVDDAHPALISKDVYEQIQIQMTKKRRIPPKARYSGYALTGLMRCNRCNSIMNFTKKQLVKAGWKCYVRTCVTPDPFGNRCNCRGCDASIVLDYVRRNIEEYIPRLMEQRDMGENDSVERLNRKISGLHTEIDKLKEGIGRIKSLFIDGMIDKEEMNGKHEEQTSKIEEKQRELREAEKELAYASSESVDDKIERLEIAKREYDLTDPFSSETNEYLKEIIDCIYYDRVDDEISLKIEFM

SEQ ID NO: 52362 - DNA, 50 bp, Marinococcus halophilus
  source 1..50: mol_type = genomic DNA
atagttgcatttagattctgccaccaatggcaagatttaataacaaccaa

SEQ ID NO: 52363 - DNA, 40 bp, Marinococcus halophilus
  source 1..40: mol_type = genomic DNA
ctgctccattacatgacaccaatggcacgttgaataccca

SEQ ID NO: 52364 - DNA, 40 bp, Marinococcus halophilus
  source 1..40: mol_type = genomic DNA
ctgctccattacatgacacatatggcacgttgaataccca

SEQ ID NO: 52365 - DNA, 50 bp, Marinococcus halophilus
  source 1..50: mol_type = genomic DNA
atagttgcagcaaaattttgacacatataggaatattagccactgacata

SEQ ID NO: 52366 - protein, 458 aa, Staphylococcus epidermidis
MNYERSYLRSCQVSTLEQKEHGYSIEEQERKLKSFCEINDWSVSDVFIDAGFSGAKRERPELQRMMKDIKRFDLVLVYKLDRLTRNVRDLLDLLEIFEQNNVAFRSATEVYDTSTAMGRLFVTLVGAMAEWERETIRERVMMGKRAAIKQGMILTPPPFYYDRVDNTYIPNDYKKVVLWAYDEVMKGNSSKAIARKLNDSDIPPPNGKRWEDRTITRALRSPITRGHYTWGDVFIENSHEPIITEEMYQQIKERLEERINTKIVSHVSVFRGKFICPRCGGTLTLNTTTRKRKKGYVTYKTYYCNTCKGKKKSFGFAENEALRVFRDYLSKLDLEKYKVKTKQKDDVVTIDIDKIMEQRKRYHKLYAKGLMQEEELFELIKETDETVAEYEKQKELVPRKSLDIDKIKKFKNALLESWEIFSLEDKADFIKMAIKSIDIEYVKLKNRHSIEIKDIEFY

SEQ ID NO: 52367 - DNA, 50 bp, Staphylococcus epidermidis
  source 1..50: mol_type = genomic DNA
gtacggaagtatagacactctattaatatttattgtgtatacttccgtaa

SEQ ID NO: 52368 - DNA, 40 bp, Staphylococcus epidermidis; identical to SEQ ID NO: 26028
  source 1..40: mol_type = genomic DNA

SEQ ID NO: 52369 - DNA, 40 bp, Staphylococcus epidermidis
  source 1..40: mol_type = genomic DNA
gtatggcggtacatgcattgctatcggatgtataccgact

SEQ ID NO: 52370 - DNA, 50 bp, Staphylococcus epidermidis
  source 1..50: mol_type = genomic DNA
gcatggaaagtcacacactaagttgctacttattctgtagccttctgcaa

SEQ ID NO: 52371 - protein, 585 aa, Nocardia farcinica
MVSAYVGPGNDADDDLASELPSLPAPLKAGDRAVIYLRVSSPGQFKTDYDPEGISIPAQRVACQNKANQLGLTIVDEYIEPGRSATEMSKRVEFQKLLARIRNHQDVDYVIVYKLSRMARNRFDDAIVMADLRKRNVTLVSATESIDDSPVGQLMHGILATFNEYQSRESGADISYKMGQKARNGGTLGRARLGYLNIFDRFDGREIRTIGVDPERAPLVQLAFQLYATGDYTLDELSEELYDRGLRTRPTHRHPAQRVSKNKLSTMLRDRYYLGYVIYKGEEMQGRHEPLIDENLFDNVQEILESRTNAHERRRVHHHYLKGSLFCGRCQRTGTVGRMIIQRTTNRHGNEYLYFFCRNKQKGTCNAPHINVALVEDAVEAHYATIRFRSDFITSIRNQIAEAINAQETADRLLQKQLTTELQALDAQEENLIDLAADATLPQPKIKAKLRDIAHQRRRLTERLATTTEDLSSSARLIDAALTLLENPQELYRRCNEHQRRLFNQAIFQQLYIDDEQINGHRLHEPFGQLHAAQRAQAGTCGATRHKTSRDAPESGNSRMKGGVGVLLQGVHSAPGSSSDPMVEL

SEQ ID NO: 52372 - DNA, 50 bp, Nocardia farcinica
  source 1..50: mol_type = genomic DNA
gccccgggttctagtagtgaccctagggtggagctaagaggacgtcttac

SEQ ID NO: 52373 - DNA, 40 bp, Nocardia farcinica
  source 1..40: mol_type = genomic DNA
ttgttctagtaagacccctatggtggagctaaggggaatc

SEQ ID NO: 52374 - DNA, 40 bp, Nocardia farcinica
  source 1..40: mol_type = genomic DNA
ttgttctagtaagacccctaaggtggagctaaggggaatc

SEQ ID NO: 52375 - DNA, 50 bp, Nocardia farcinica
  source 1..50: mol_type = genomic DNA
gccctgggttcatctgcagccccaaatctggaggaattatcacgtcttac

SEQ ID NO: 52376 - protein, 456 aa, Macrococcus caseolyticus
MYTALYLRVSTMEQADNNFSLAAQESKLRAYAEAKTLSNIKVFTDPGYSGSNMNRPALTQLLESVKRNQVSNILVYKLDRLSRSQKDTLNIIEDYLLPHDTNLISLSESFDTSTSFGRAMIGILSVFAQLERENFKERSRMGMIQRAKEGKISGYGGKVFGYDYIDGELIINDYEAMIVRKIYDYYVKGLGVTKIFMQLQKEHPNVIKSSHHIWQILRRRTYTGDFDYMDESYEGIHEAIIDKSIYDQVQVLRDSRNSKQKSDAVYMLTGLTYCKCCGYKMQGTVSSSTYKDKRYERRYYKCNTNKRNKVNHNPFRCNTKSIKKDELEHAVISQIKALDIDLKIDDIQTNTIDDKAIDKRLNELEKQSEKLLNLYIEDSISKSILDKKLEEINTEKEALENTETEDNQSKLQALELAKEFNFDDATDYELQNLIHLLVKRIDVDNSSVDIQFIFSV

SEQ ID NO: 52377 - DNA, 50 bp, Macrococcus caseolyticus
  source 1..50: mol_type = genomic DNA
tttagtgtttaatttattagtacgaacatatcgataatataaacacaaat

SEQ ID NO: 52378 - DNA, 40 bp, Macrococcus caseolyticus; identical to SEQ ID NO: 23003
  source 1..40: mol_type = genomic DNA

SEQ ID NO: 52379 - DNA, 40 bp, Macrococcus caseolyticus
  source 1..40: mol_type = genomic DNA
ttgtgcgattccgaccgtgtatggattaatcatgccacct

SEQ ID NO: 52380 - DNA, 50 bp, Macrococcus caseolyticus
  source 1..50: mol_type = genomic DNA
tttattgttcctttttttagtgcatacatttagatatcaaacaaataaaa

SEQ ID NO: 52381 - protein, 548 aa, Vibrio furnissii
MQRIIYPYVRFSSEKQSAGHSHERQIEKIKEYASVNGYEVNDTLNLRDLGVSAFKGKNAEKGALAAFLKMIEDGTIPTDGTSYLCIEQFDRLSRQTVDEAYSLFRKILISNVNIITLMDEKVYTKKSLNEMVSIISSLLLMEQANVESDKKSKRVSAVFKKKLEKLRNGEKVQFAYMLPGWIDNIGTKQDPNFIINDQVKTVRMIIDMYLGGETMGHIARILNEKQIPQFARKKTKNPISSWNSGKISHLLVNRCLIGELKIKKTNEIIKDYYPSVISKDEWDIIQSAKRTNATTKIAGRRSINIFQGRLFCADCGNKYYFETDDKTGKHGKKYIYHMLKCSGRRFHSCDSKSIKYDDLTSGNLFFFEKIQDQESKEYYDKIKLEISNYEKQIDELKKEQDELNLLLDNKTINFTAHAIANSKILDQIEVLEKDIALDKQHIAFTMNNNMVDTFDKNDPISVSKAKKFIKDNYAGILISSKHGAIISLMKSGQFFIKPIPNRYDDSIPKASLQLFEIKEKIQSQDKKGLLDGKLKELLDAFNFLDRFE

SEQ ID NO: 52382 - DNA, 50 bp, Vibrio furnissii
  source 1..50: mol_type = genomic DNA
cctttaatactaaagttaatggtaataaacttgagctttaacgggaaaaa

SEQ ID NO: 52383 - DNA, 40 bp, Vibrio furnissii
  source 1..40: mol_type = genomic DNA
gggagctaaattcaccgtgatgcgtttggcgggaaattca

SEQ ID NO: 52384 - DNA, 40 bp, Vibrio furnissii
  source 1..40: mol_type = genomic DNA
gggagctaaattcaccgtgtcgcgtttggcgggaaattca

SEQ ID NO: 52385 - DNA, 50 bp, Vibrio furnissii
  source 1..50: mol_type = genomic DNA
cctgtaaaatatgtgttaatggtatcaaccttgcagcgctgtgtgagaat

SEQ ID NO: 52386 - protein, 565 aa, Leclercia adecarboxylata
MKTLIWYKRVSTDRQIDGHGLKRQQDYFNSYLQNLPDRNSYRLEEISDEGLSAFHGVNVSDKGGLGSVLKRIQSGDISAGSILVCESQSRLTRLHAVDATLLIHTLNQAGITIWSLADNREITTDSDTGLIMAVLDGIRNRAYSQDISDKVSKKKKAIRQAVRVDKTATYGNVCPYWLRATDNGFEPIPEHVQTIQRIFKERFELKSMASIAAGLNADAVPLITSRNWKKKAAPTGWSQSTVKNLLSNERVIGTLPASTRTSGDKVPGYYGDPVVPLEHWLAAQESLSHRGKKAVRNDKNPFAVRLFKSLMVCQHCGHKMDVNGARQALSAKGTPYHGSLICRGARDNSCMCGEGGTRTPALPMKLVEHSLTCNLFRSLKQRDISNGAQEQIARLRLEITEAENDLAATAPLIVNQRNAIARQALQNELDKLADTISQKRAELATLERKQQATTLETLEGLDLMTVDGRLEAQRVIAKSLALISINTVTAFADITLRNGNVIQGFDLRSTDDFTSTMTHATDDSHHEEIAMVIGEHLPAVYTAKKPVPATDEPDYSDWPEPDTDE

SEQ ID NO: 52387 - DNA, 50 bp, Leclercia adecarboxylata
  source 1..50: mol_type = genomic DNA
gagctatttagcatccaaataatctggattgacactccctttaatagcac

SEQ ID NO: 52388 - DNA, 40 bp, Leclercia adecarboxylata
  source 1..40: mol_type = genomic DNA
ctcgcctgccagttcgatctggatcgtcaacgcctaccag

SEQ ID NO: 52389 - DNA, 40 bp, Leclercia adecarboxylata
  source 1..40: mol_type = genomic DNA
ctcgcctgccagttcgatcaggatcgtcaacgcctaccag

SEQ ID NO: 52390 - DNA, 50 bp, Leclercia adecarboxylata
  source 1..50: mol_type = genomic DNA
tagcaatgcatacacaaaataatcaggagaaacactctagctacttgcac

SEQ ID NO: 52391 - protein, 548 aa, Streptomyces dengpaensis
MARVLGVVRLSRESDESTSVVRQKASIQRWADGNGHVIVGWVEDVDVSGGIEPWKRPEFGKWLPSTIGKDVSDIEHRLAWEESRAGEFDIICAWKLDRLSRRVIHVNVLAEWCDRTGKQIATAEGDIDLSSPMGRILFQLIASFAEGELEAIKARAKSSYVHLMKEGRWRGGKVPYGYRPEKAETGDGWKLVPDEYGLNTAGTLREIVRRIIGGESANSLCRWLNEDATKTPASVDAQRIRSGKEPKGSRWTSSNLAKLLRSPALLGQVEMTEEVTLPDGRTERRTRLVRGADGLPLQRAEPLISKEDWELASKKLEENTSKRSGSRTGGSPLLRVAFCACDEPVYRAPGHNWLHYRCASRITHKPCSTGNKSISAALLESTVEGEFLRVAGDIEIVRRVFRPGVDHTKDVEEVTRALAELREDREAGLYSSETGKQEYRESYARLDAKREQLMSLPTRPDTWEEIPTGQTYRQRWAQLSTDEEKGKELRSAGLRVTVHIDDVPVAYIGGKPLVTLDEGKMRQRIGRIEIEFPRDFSDRVRQFTATHG

SEQ ID NO: 52392 - DNA, 50 bp, Streptomyces dengpaensis
  source 1..50: mol_type = genomic DNA
atgcgtcaaaatgcctacttggcagtgtcgaagaagtcattttgacatta

SEQ ID NO: 52393 - DNA, 40 bp, Streptomyces dengpaensis
  source 1..40: mol_type = genomic DNA
ccagccgtacacgttcgcggtgtcgaagtatttgatccct

SEQ ID NO: 52394 - DNA, 40 bp, Streptomyces dengpaensis
  source 1..40: mol_type = genomic DNA
ccagccgtacacgttcgcgtcgtcgaagtatttgatccct

SEQ ID NO: 52395 - DNA, 50 bp, Streptomyces dengpaensis
  source 1..50: mol_type = genomic DNA
atgcagcaatcccactactaggtatctacccagaagaaaaatagtcatta

SEQ ID NO: 52396 - protein, 540 aa, Sinorhizobium meliloti
MSTDIQLRGDSLRRQTEASKKYAAENDLELIADFKLEDIGVSAFEGKNVAQGSLGKFLALVEEGQVPKGSYLIVESLDRISRQNPQAATSLFLQILQAGIHIVTLTDNHVYRADGGNFSDIIVSVVIMSRAHEESRTKSLRVGAAWENKRQNIHEKKLTRVAPIWLKLSEDRANFEMISERVAVLRAIFEEADHGKGSLQIARRLNREGVPTFAPSKGWYESYVSKVLTNRAVLGEFQPHRYVGGKRVPYGEPIADYFPVIVSREQFERIQAGRAVRRLRGSGRKGRNNINLFQGVARCGYCNGRMMIVNKGDGPKGGVYIRCDNARRAAGCTASNWPLEHFEAAFLWFVEELDVGAIAEGAEAEEARKALDGQIAIVSVDLEKQKVMRERAFELLGDSSTAAAFVKSKIDEASLNIDRLEKRLAELLGSAMTDQVRKSRPLEEVKEVIRNIGHWKLAHENARTRVSDWIKRNVKELLVYSDGLEPTGVPQARQFSALFVTGVFRTVQMTGVDPTVAAYSIHASGDRWVLMENGKQSVYS

SEQ ID NO: 52397 - DNA, 50 bp, Sinorhizobium meliloti
  source 1..50: mol_type = genomic DNA
gtctcattaatccacctcatcatccaaatgttgaggcaaattaatttcta

SEQ ID NO: 52398 - DNA, 40 bp, Sinorhizobium meliloti
  source 1..40: mol_type = genomic DNA
acccggcaaggtcggtatgcagatcgtcggactgccggac

SEQ ID NO: 52399 - DNA, 40 bp, Sinorhizobium meliloti
  source 1..40: mol_type = genomic DNA
acccggcaaggtcggtatgctgatcgtcggactgccggac

SEQ ID NO: 52400 - DNA, 50 bp, Sinorhizobium meliloti
  source 1..50: mol_type = genomic DNA
gtttcattatttttcctcatcctcctgactttgtggttgtctaagtcttt

SEQ ID NO: 52401 - protein, 588 aa, Burkholderia ubonensis
MPNVDTQTPLAYSYVRFSTARQALGDSLRRQLELTERYCEKKGLRLVRESAYRDLGVSAFRKKNMETGKLAEFIEAVKAGKVPPGSFLIIEQFDRLSRANVNVALRLLMDLIEAGIVVVTLVDEKEWTRDSLSDLADLFTAIIFMARANDESARKSDRLTAVWEQKKKRAADGTATRIVTSEAPRWLRAKADKTGFEPVPDLVESVRRVFEMRIDGAGAVAICSRANRERWPAPGKAPVRKAGETDEDFAQRKEASGQWHLSLVSRILKNRAVLGEYQPRRVDRDDSRNRIPVGEPIRDYYPAIIDETTFLRAQATSLRRGIRPGRRDAQARNWLYGLVKCGECGNSLVRKNKTSAKQPGYARYYCVARVRGLTKCASVGSSQLEGCVSHVVSTWLPNHWRTDTSFDALRARADLLETDIAKFKANIDGLADLASSVTAPSARKTLIERLDREGDALNASEQELARVRAELADHAHLGSDAESIAAFEKAFHEIDALAAGRDGVDGALRLREELARIVQKIVVHQPTGHIEFFIKGRGEPVWLPLDFVNAEPPSEPSAEQLEAAERDIDALRRAMLDLNVASDSAGTL

SEQ ID NO: 52402 - DNA, 50 bp, Burkholderia ubonensis
  source 1..50: mol_type = genomic DNA
gagtgcaattaattcccgacgatggacaaggtggttatataattgcacca

SEQ ID NO: 52403 - DNA, 40 bp, Burkholderia ubonensis
  source 1..40: mol_type = genomic DNA
atcgggcaggccgacgatcgagaacgacggcaggccgttg

SEQ ID NO: 52404 - DNA, 40 bp, Burkholderia ubonensis
  source 1..40: mol_type = genomic DNA
atcgggcaggccgacgatcgcgaacgacggcaggccgttg

SEQ ID NO: 52405 - DNA, 50 bp, Burkholderia ubonensis
  source 1..50: mol_type = genomic DNA
tagtgcaagtaaactcccattatggcctaggttgttaagcccttgcatca

SEQ ID NO: 52406 - protein, 531 aa, Yersinia enterocolitica; identical to SEQ ID NO: 26236

SEQ ID NO: 52407 - DNA, 50 bp, Yersinia enterocolitica
  source 1..50: mol_type = genomic DNA
ttagatgtatctcaaactttagtcgtgataaactccagtgaagcatcaaa

SEQ ID NO: 52408 - DNA, 40 bp, Yersinia enterocolitica; identical to SEQ ID NO: 26243
  source 1..40: mol_type = genomic DNA

SEQ ID NO: 52409 - DNA, 40 bp, Yersinia enterocolitica
  source 1..40: mol_type = genomic DNA
cgctgatttcactttagtctagaccacagtgtcatccaga

SEQ ID NO: 52410 - DNA, 50 bp, Yersinia enterocolitica
  source 1..50: mol_type = genomic DNA
ctagctttagtgaaaactatactctagccacaccccaacaaagcttcaaa

SEQ ID NO: 52411 - protein, 510 aa, Mycobacteroides abscessus
MGARVSVLSGPQKVSHEAQIDTATKWANAQDYPVVGVFEDLGVSASVPPHERPDLGPWIRERSHEWEVIIWSKLDRAFRSMRHCSDFIEWAEANKKIVVFAEDGMTLNYLNPSSKIDSILGELFVTIAAAFAQIELNRFKSRAEDMHRAIRPTTRWAAGLPPLGYQVVDHPSGRGKGLAIDPDAANLVREMADKLVDGWSFVRITEWLNESGKLTSQGRSRKARGLEPKGRWTTTNVIEILTGYRTLGIKTHKGQPVLDDSGEPIRLAPPLFTPERWDEVQRAAQLRKGKPRTPSDTSNPMLGVGYCGAPCSHKRSGSECLGDCQGICGSSLAQQFSKTRPRKSDGHVTFYRYYRCSRTPINCKAVFVVADDLDELLSEQFLLERGDRRVTERVFIPGEDNSYELDFINQRIELLREDRASGLFPSGEDELVYRNQMKQLLARRDELASVPVRQAGYENVELEKTYREVWPGAAPEDKRKMLIDAEISIRLRESPGKSIRAEMIVGSPYT

SEQ ID NO: 52412 - DNA, 50 bp, Mycobacteroides abscessus
  source 1..50: mol_type = genomic DNA
tcttctcataggtgtacttctcgatcaacagtagcatacactcttgaagc

SEQ ID NO: 52413 - DNA, 40 bp, Mycobacteroides abscessus; identical to SEQ ID NO: 23373
  source 1..40: mol_type = genomic DNA

SEQ ID NO: 52414 - DNA, 40 bp, Mycobacteroides abscessus
  source 1..40: mol_type = genomic DNA
tgatagcgatgctcctggaacagcagattccgatggaggt

SEQ ID NO: 52415 - DNA, 50 bp, Mycobacteroides abscessus
  source 1..50: mol_type = genomic DNA
tcttatcccaagattacttctctaaccacagcagtaccttttccttaaga

SEQ ID NO: 52416 - protein, 510 aa, Mycobacteroides abscessus; identical to SEQ ID NO: 52411

SEQ ID NO: 52417 - DNA, 50 bp, Mycobacteroides abscessus; identical to SEQ ID NO: 52412
  source 1..50: mol_type = genomic DNA

SEQ ID NO: 52418 - DNA, 40 bp, Mycobacteroides abscessus
  source 1..40: mol_type = genomic DNA
tgatagcgatgctcctggatcaacagattccgatggaggt

SEQ ID NO: 52419 - DNA, 40 bp, Mycobacteroides abscessus
  source 1..40: mol_type = genomic DNA
tgatagcgatgctcctggaacaacagattccgatggaggt

SEQ ID NO: 52420 - DNA, 50 bp, Mycobacteroides abscessus; identical to SEQ ID NO: 52415
  source 1..50: mol_type = genomic DNA

SEQ ID NO: 52421 - protein, 507 aa, Escherichia coli
MKRVISYIRFSSERQAKGDSLRRQSKMVNDWLKAHPEYYLDQDLSFRDLGVSGFTGKHLKGGLGDFLTAIEKGLVKAGDTLLIESLDRLSRQDVDQASELLRNILRSGVDVVTLSDGEHYTKESLRDPLSLIKSILIMQRAHEESLRKAERIQAAWDAKKEAAKAGIKVSKRCPAWLKLNDDRKSFSVIPEKVETVKRCFQLRLEGKSIWEIVRTLNDEGHQTLHQHKAGSFGQSSVQDLLKNRSVIGYFTPKGCEEISGYYPAIIDETTFYKVQQLSYARYGRKPASDKPLSVNLFKGVIRCSECGHALIITGFSDTRSGIYRCPLRNENRCSAKGLSRKQTDGTLLTLLSRLDRFDSDTTNTIDTLKLHREHISSNIEKLVQLSLEIEDLSAITIKLKQLKGELSQVDADIEKETQRLKSIDVGCLSDCDLTTKAGRIEAQLIIKSAVKEVVLNTAKRRCKVTFHNGKSITLPITENPSEDVTEAIQSLSEVTERGLIDVDEVII

SEQ ID NO: 52422 - DNA, 50 bp, Escherichia coli
  source 1..50: mol_type = genomic DNA
cagtgtatttagaccttgatgattttcatcagacacgtttaaatacacca

SEQ ID NO: 52423 - DNA, 40 bp, Escherichia coli; identical to SEQ ID NO: 5188
  source 1..40: mol_type = genomic DNA

SEQ ID NO: 52424 - DNA, 40 bp, Escherichia coli; identical to SEQ ID NO: 5188
  source 1..40: mol_type = genomic DNA

SEQ ID NO: 52425 - DNA, 50 bp, Escherichia coli
  source 1..50: mol_type = genomic DNA
cagcattttaatcacttgatcattttaatcacacagcttgcaagactcaa

SEQ ID NO: 52426 - protein, 559 aa, Streptococcus pyogenes; identical to SEQ ID NO: 20396

SEQ ID NO: 52427 - DNA, 50 bp, Streptococcus pyogenes
  source 1..50: mol_type = genomic DNA
ctggaccttttgactcccgcagacccatcatatagagacttgtgtgttgc

SEQ ID NO: 52428 - DNA, 40 bp, Streptococcus pyogenes
  source 1..40: mol_type = genomic DNA
tagatttgtttccccagacgcatcacgtcgagtgcgtagt

SEQ ID NO: 52429 - DNA, 40 bp, Streptococcus pyogenes
  source 1..40: mol_type = genomic DNA
tagatttgtttccccagacacatcacgtcgagtgcgtagt

SEQ ID NO: 52430 - DNA, 50 bp, Streptococcus pyogenes
  source 1..50: mol_type = genomic DNA
ctggacctggagcttcctgaagccacagaatatagcttactttgtgtgcc

SEQ ID NO: 52431 - protein, 479 aa, Mycobacteroides abscessus; identical to SEQ ID NO: 17141

SEQ ID NO: 52432 - DNA, 50 bp, Mycobacteroides abscessus; identical to SEQ ID NO: 17142
  source 1..50: mol_type = genomic DNA

SEQ ID NO: 52433 - DNA, 40 bp, Mycobacteroides abscessus; identical to SEQ ID NO: 8958
  source 1..40: mol_type = genomic DNA

SEQ ID NO: 52434 - DNA, 40 bp, Mycobacteroides abscessus
  source 1..40: mol_type = genomic DNA
tgggcatacgagtgccgattgtctgaaagcgctgtgccgt

SEQ ID NO: 52435 - DNA, 50 bp, Mycobacteroides abscessus
  source 1..50: mol_type = genomic DNA
agtatatatttttggttatttacatggcttaaatgtcctccaacttccct

SEQ ID NO: 52436 - protein, 479 aa, Mycobacteroides abscessus; identical to SEQ ID NO: 17141

SEQ ID NO: 52437 - DNA, 50 bp, Mycobacteroides abscessus; identical to SEQ ID NO: 17142
  source 1..50: mol_type = genomic DNA

SEQ ID NO: 52438 - DNA, 40 bp, Mycobacteroides abscessus
  source 1..40: mol_type = genomic DNA
tgggcatacgagtgccgataatctgaaagcgttgtgccgt

SEQ ID NO: 52439 - DNA, 40 bp, Mycobacteroides abscessus
  source 1..40: mol_type = genomic DNA
tgggcatacgagtgccgattgtctgaaagcgttgtgccgt

SEQ ID NO: 52440 - DNA, 50 bp, Mycobacteroides abscessus; identical to SEQ ID NO: 52435
  source 1..50: mol_type = genomic DNA

SEQ ID NO: 52441 - protein, 589 aa, Klebsiella pneumoniae
MSTYVTIPRNTLLPAKHNVMNRPRLYSYIRYSSERQVKGNSLERQKSYIAKMAKQIAEEYKLEVFEEYQDLGVSAYKGKNVQEGALSDFIAQVKSGVIPKGSFLLIESLDRFSRQNAMQAVNLFTGLLLNGITVITGIDRQVYKHTDANNDTFQQLMFSVMLFSRANEESSTKSQRTIASALSKIGRHQQRKPGDPVIAIKELGSDKWWTDSSSGYVNPHPVLFPIAKEIIQLKQDGWSNRMILQHLKNSYDGPIIGNKKSKGIWNMQHCSRILEPAIYGRKVITINNAEYILDDYYPAIISKDEYEALKLQVGNKGFAPNRESNPEIPLLSGIGILYCAHCSCYMVKAKSTLKNHPHAYRYQCASRDLHQDCNKWGFRASTLERTILQLIADRVFLPTKSQPSGLEGKIADIQSQIENYVLAIGSAKSPEIINNITSKIDQLEQKKQRLVVAKRLYDESIVQMNTEGWDKFREFDINDALAPLRAKIRASIKTVVMRVDCFRIDKKHNLFTITYRDQQKQRVVIENNSGWRKGKVYVEVQTINNTQLIESEGFILHDHIDILINRDKFMMEVKKRLENPRTLIDELTE

SEQ ID NO: 52442 - DNA, 50 bp, Klebsiella pneumoniae
  source 1..50: mol_type = genomic DNA
gattatacctattacactttagtgaatactaaggtaaactacatctcatt

SEQ ID NO: 52443 - DNA, 40 bp, Klebsiella pneumoniae
  source 1..40: mol_type = genomic DNA
gctcggggtaaccatcggcaacaccgacggcaatatcatc

SEQ ID NO: 52444 - DNA, 40 bp, Klebsiella pneumoniae
  source 1..40: mol_type = genomic DNA
gctcggggtaaccatcggctgcaccgacggcaatatcatc

SEQ ID NO: 52445 - DNA, 50 bp, Klebsiella pneumoniae
  source 1..50: mol_type = genomic DNA
gattaaacaaggtaaactttcctgtgttcttctgcagcaagcatctcatt

SEQ ID NO: 52446 - protein, 507 aa, Salmonella enterica
MKRVISYIRFSSEKQARGDSLRRQSKMVTDWLKAHPEYYLDESLTFRDLGVSGFTGKHLQGGLGDFLTAIEKGLVKAGDTLLIESLDRLSRQDVDQASELLRNILRSGVDVVTLSDGEHYTKESLKDPLALIKSILIMQRAHEESLRKSERIQAAWDAKKEEAKAGIKISKRCPAWLKLNDDRKSFSVIPEKVETVKRCFQLRLEGKSIWDIVRTLNAEGHQTLNQYKAGSFGQTSVQDLLKNRSVIGYFTPKGCEEISGYYPSIIPETDFYRVQQLSYSRYGRKPVSENPMAVNLFKGVIRCSECGHTLIINGFTEKRHGIYRCPCKQENRCNAKGLSRKQTDGTLLALLSRIDRFEPEQINVIDTLKLQREGILKNIEKLVELSLIIDDMTAITSKLKQLKSDLSLIESDIEKENQRIKSIDTGSLSDCDLRTKAGRIEAQLIIRGVVKEAVLDTTNKRSKVVFHNGKVIDLPITENPLEAVTEAIQSLSEIASKGLLDIDEFSL

SEQ ID NO: 52447 - DNA, 50 bp, Salmonella enterica; identical to SEQ ID NO: 50582
  source 1..50: mol_type = genomic DNA

SEQ ID NO: 52448 - DNA, 40 bp, Salmonella enterica; identical to SEQ ID NO: 22693
  source 1..40: mol_type = genomic DNA

SEQ ID NO: 52449 - DNA, 40 bp, Salmonella enterica
  source 1..40: mol_type = genomic DNA
cggcgtaaaccgcgtgatccaggatagtcgtccggtacat

SEQ ID NO: 52450 - DNA, 50 bp, Salmonella enterica
  source 1..50: mol_type = genomic DNA
aggagtataaacttcttgggaagacaggacaaacacatagaaattaacaa

SEQ ID NO: 52451 - protein, 500 aa, Bacillus subtilis; identical to SEQ ID NO: 39546

SEQ ID NO: 52452 - DNA, 50 bp, Bacillus subtilis; identical to SEQ ID NO: 12727
  source 1..50: mol_type = genomic DNA

SEQ ID NO: 52453 - DNA, 40 bp, Bacillus subtilis
  source 1..40: mol_type = genomic DNA
gcgcaaatgcatgaggatttcattttcaatacaccgcgcg

SEQ ID NO: 52454 - DNA, 40 bp, Bacillus subtilis
  source 1..40: mol_type = genomic DNA
gcgcaaatgcatgaggatttaattttcaatacaccgcgcg

SEQ ID NO: 52455 - DNA, 50 bp, Bacillus subtilis; identical to SEQ ID NO: 20775
  source 1..50: mol_type = genomic DNA

SEQ ID NO: 52456 - protein, 508 aa, Bacillus pumilus
MYFRKKSSVEEIIKYDDYPYKVYTRVSTDRDEQISSKENQIDVCRYWIEQHNYEWDDRSVLLDDGISGTVLEDRAAMKYIFSLAEKKEIKMVIFKSITRLARDLKDALYIREILVSNGVRVVTLEEDYDSLYESKASMKFEMSALFAEQLPKSMSVNISGVLAAKARRGEHSGRVPYGYIKEGKHLVINENEAQVIRLIFHLYNNEGLGQKRVTYALQEKCKLGEIPPPKKRSNWQLTTVQTILRNPIYCGVHIANRHTTIKVDGRKKFIRNPPEKWTIYEDFCPPIVSREDWEKANNKPTVNKKTKFTPWNELRQLLICGKCGSNMVIIQTSRAKQNGEKTYWKYVKCSNYRRAGQEGCVNHVPITYEEVRDLVIENLIEFSKDISHDYRKNALEQKEKQMKSVKVELKSLETQNKRLLELYLEDQIISKAEFQTKRNEIQSNIIKLEQSLFSLQQVRDEKSSMMEMQAVLRELEDKEKDLKHVFDKLIDHIVIHPNGKMNFHYRFK

SEQ ID NO: 52457 - DNA, 50 bp, Bacillus pumilus
  source 1..50: mol_type = genomic DNA
cgtttgtaaaagatatgcataacaaatgctaagcataccttttgcaaatt

SEQ ID NO: 52458 - DNA, 40 bp, Bacillus pumilus; identical to SEQ ID NO: 20513
  source 1..40: mol_type = genomic DNA

SEQ ID NO: 52459 - DNA, 40 bp, Bacillus pumilus
  source 1..40: mol_type = genomic DNA
tgttcgaaatcatatttcgtatgccatgcaaaagctagga

SEQ ID NO: 52460 - DNA, 50 bp, Bacillus pumilus
  source 1..50: mol_type = genomic DNA
tgtgtgtaaagaggctgcctcatatatgccacacacatgctttgcaaatt

SEQ ID NO: 52461 - protein, 583 aa, Citrobacter sp FDAARGOS 156; identical to SEQ ID NO: 37621

SEQ ID NO: 52462 - DNA, 50 bp, Citrobacter sp FDAARGOS 156; identical to SEQ ID NO: 37612
  source 1..50: mol_type = genomic DNA

SEQ ID NO: 52463 - DNA, 40 bp, Citrobacter sp FDAARGOS 156
  source 1..40: mol_type = genomic DNA
aagagtgcgcattaatggcaagcctgaaatgatgattctc

SEQ ID NO: 52464 - DNA, 40 bp, Citrobacter sp FDAARGOS 156
  source 1..40: mol_type = genomic DNA
aagagtgcgcattaatggcctgcctgaaatgatgattctc

SEQ ID NO: 52465 - DNA, 50 bp, Citrobacter sp FDAARGOS 156
  source 1..50: mol_type = genomic DNA
aatttcatctcttatagttatgccctgcagaagaattaaaggatgccaat

SEQ ID NO: 52466 - protein, 495 aa, Coprococcus comes
MSLKYAYGYIRVSTHDQEEISPDSQEHLLRDYAAKNNIVILKIFTDLGISGRKADKRPGFQEMIGLAKGPDHPVDCILVWKFSRFARNQEESIVYKSLLKKQHNVDVISISEPLADGPFGSLIERIIEWMDEYYSIRLSGEVFRGMKENATRGAYQARPPLGYKVVERGKPPVIVPEEAAIVRMIFDKYVNGKMSFFDIARHLNSLGLKTSHGKAFERRSIEYIIQNPSYCGMIRWNRMENATNRIKNQDEWIIADGMQEAIISKELFDAAQERLKKIYKPVGKRPSSTYKHWLSGLLKCPVCGRTLTATTMERANGEKYAYFSCYGYSKGKCDKPHGVSSLVIEKEVLKALEEALGSNSIVYEMREIRPQELSNERTLISERLASLKGKEDRIRASYREGIDTLEEYKENKALIAKERDALEQQLAELEENAPDKTPEDSTPKMLDRVSSVHDILVSDSYSLVQKNEALKQIIDKIVYDRESDTLKIHFFLYHS

SEQ ID NO: 52467 - DNA, 50 bp, Coprococcus comes
  source 1..50: mol_type = genomic DNA
ctttataggttgtggcaatttggtcaaccattttgccacaacctataaag

SEQ ID NO: 52468 - DNA, 40 bp, Coprococcus comes; identical to SEQ ID NO: 29453
  source 1..40: mol_type = genomic DNA

SEQ ID NO: 52469 - DNA, 40 bp, Coprococcus comes
  source 1..40: mol_type = genomic DNA
ctttagaaccccattgggtaatccagttcggacactgaac

SEQ ID NO: 52470 - DNA, 50 bp, Coprococcus comes
  source 1..50: mol_type = genomic DNA
ataaatgggcacaatcaatttggaaaacaatttggctctgacttataaat

SEQ ID NO: 52471 - protein, 495 aa, Coprococcus comes
MSVKYAYGYIRVSTHDQEEISPDSQEHLLRDYAAKNNIVILKIFTDLGISGRKADKRPGFQEMIGLAKGPDHPVDCILVWKFSRFARNQEESIVYKSLLKKQHNVDVISISEPLADGPFGSLIERIIEWMDEYYSIRLSGEVFRGMKENATRGAYQARPPLGYQVIERGKPPVIVPEEAAIVRMIFDKYVNGKMSFFDIARHLNSLGLKTSHGKAFERRSIEYIIQNPSYCGMIRWNRMENATNRIKDQDEWIIADGMQEAIISKELFDAAQERLKKIYKPVGKRPSSTYKHWLSGLLKCPVCGRTLTATTMKRANGEKYAYFSCYGYSKGKCDKPHGVSSLVIEKEVLKALEEALGSNSIVYEMREIRPQELSNERTLISERLASLKGKEDRIRASYREGIDTLEEYKENKALIAKERDSLERQLAELEENAPDKTPEDPTPKMLDRVSSVHDILVSDSYSLVQKNEALKQIIDKIVYDRESDTLKIHFFLYHS

SEQ ID NO: 52472 - DNA, 50 bp, Coprococcus comes
  source 1..50: mol_type = genomic DNA
ctttataggttgtgacaatttggtcaaccattttgccacaacctataaag

SEQ ID NO: 52473 - DNA, 40 bp, Coprococcus comes; identical to SEQ ID NO: 29453
  source 1..40: mol_type = genomic DNA

SEQ ID NO: 52474 - DNA, 40 bp, Coprococcus comes; identical to SEQ ID NO: 52469
  source 1..40: mol_type = genomic DNA

SEQ ID NO: 52475 - DNA, 50 bp, Coprococcus comes; identical to SEQ ID NO: 52470
  source 1..50: mol_type = genomic DNA

SEQ ID NO: 52476 - protein, 495 aa, Coprococcus comes
MSLKYAYGYIRVSTHDQEEISPDSQEHLLRDYAAKNNIVILKIFTDLGISGRKADKRPGFQEMIGLAKGPDHPVDCILVWKFSRFARNQEESIVYKSLLKKQHNVDVISISEPLADGPFGSLIERIIEWMDEYYSIRLSGEVFRGMKENATRGAYQARPPLGYKVIERGKPPVIIPEEAAIVRMIFDKYVNGKMSFFDIARHLNSLGLKTSHGKAFERRSIEYIIQNPSYCGMIRWNRMENATNRIKDQDEWIIADGMQEAIISKELFDAAQERLKKIYKPVGKRPSSTYKHWLSGLLKCPVCGRTLTATTMKRANGEKYAYFSCYGYSKGKCDKPHGVSSLVIEKEVLKALEEALGSNSIVYEMREIRPQELSNERTLISERLASLKGKEDRIRASYREGIDTLEEYKENKALIAKERDSLERQLAELEENTPDKIPDDPTPKMLDRVSSVHDILVSDSYSLIQKNEALKQIIDKIVYDRESDTLKIHFFLYHS

SEQ ID NO: 52477 - DNA, 50 bp, Coprococcus comes; identical to SEQ ID NO: 52472
  source 1..50: mol_type = genomic DNA

SEQ ID NO: 52478 - DNA, 40 bp, Coprococcus comes; identical to SEQ ID NO: 29453
  source 1..40: mol_type = genomic DNA

SEQ ID NO: 52479 - DNA, 40 bp, Coprococcus comes; identical to SEQ ID NO: 52469
  source 1..40: mol_type = genomic DNA

SEQ ID NO: 52480 - DNA, 50 bp, Coprococcus comes; identical to SEQ ID NO: 52470
  source 1..50: mol_type = genomic DNA

SEQ ID NO: 52481 - protein, 548 aa, Adlercreutzia caecimuris
MGNDRTGGIGRKTRVSPPVVSFSRDFSPSSEPPQPIIQNELRAVIYARFSCDKQRDASIDDQVAACTEYCGRMGYDVVGVYPDYALSGRSDDRPQFLRMVDDAKKGLFDVVVVWKVDRFARNMMDQYHYERELSLSGVTLESCKENIAGNTIEADMNKGMLALFAQIRSQQSAVDTMRGMVGKAEKCQYLGVPRFGYSHEGDEITLDPVWAPVARRIHTDYLAGVSIEYLARELRDMGATTTRGTEPDYEFVLGILKSTAYAGVYQWGRKRDDRGRVVTDENGDPVPLVYKEGGMPAIVDMDTKMACLRRIGQRKRYAAKADYILVGKLSNAETGAPMHGETARGRSGRQYFYYVDKSGGKRVSVRKDAIEAALAEAVRSLLSDKAVTARLVARAASFKREADKSADMALRAARDDLAALERKRANVIDAIADGAPLDGFREKLESINASIERAKARIAKEDDAGRGDYEERMAAFLASSKFANLPDEKIISMFVGSAAYFDGRAAAILNFTRDSGDAAEVREILIGEMKKSNPRSDLGFDNYGSGSP

SEQ ID NO: 52482 - DNA, 50 bp, Adlercreutzia caecimuris
  source 1..50: mol_type = genomic DNA
gggttcgacaattatgggtctggctccccgggcccatctgcaggcgaacc

SEQ ID NO: 52483 - DNA, 40 bp, Adlercreutzia caecimuris
  source 1..40: mol_type = genomic DNA
ggttccgaacgttcatggctccccgggtaggattcgaacc

SEQ ID NO: 52484 - DNA, 40 bp, Adlercreutzia caecimuris
  source 1..40: mol_type = genomic DNA
ggttccgaacgttcatggcgccccgggtaggattcgaacc

SEQ ID NO: 52485 - DNA, 50 bp, Adlercreutzia caecimuris
  source 1..50: mol_type = genomic DNA
ggcttcggggtcagcgcgccgggcgccccggggacattccgaggggaacc

SEQ ID NO: 52486 - protein, 576 aa, Rhizobium leguminosarum
MKPKAYSYIRMSTDIQLKGDSLRRQTEESKRYCDENGLELVEDFKLQDIGVSAYRGRNVAQGELGRFLSLAEGGLIPKGSFLIVESLDRISREKPQTAVALFLQILESGVDIITLTDRRIYRSGSADVSDILMSVLIMARAYEESRTKGLRVGAAWENKRKNIHEKKLTQVAPAWLRLSEDRRAYNVIPERVAVLQAIYNDADKGKGSFQIARKLNLDGVPTFAPSKGWHESYVSKLLTNRSVLGEFQPHRYIEGKRTPAGDPIADYFPAVVSQDQFERIQAGRAVRKIRGSGRKGRDNVNLFSGVATCGYCNGKMMIVDKGTGPKGGVYIRCDNARRGNDCWAAMWPLKHLETAFLFFVKELDLQSLIVESSAKDARLLAEGQLATISNELTKKKKMRDSAFELLSDDSVGTDFVREKLADLASEIQRLEKEQAEINSQAKQELARQADRDLDVRTLIEAISAGPKENLDSRIAVADWIRRNVQQMKIYPDGRDGPQREIDRMSASLDPDVAKLLEASIAFTKRNNALVDGSHRHFSVGFGGHRFRAVDVDRNDPTKHIVMTFMDDDSWETDRAT

SEQ ID NO: 52487 - DNA, 50 bp, Rhizobium leguminosarum
  source 1..50: mol_type = genomic DNA
aataaaataatccaccttacaatgcagatgttgaggtggattaatttatg

SEQ ID NO: 52488 - DNA, 40 bp, Rhizobium leguminosarum
  source 1..40: mol_type = genomic DNA
tcccggaaaagtcgggatgcagatcgtcggcctgcctgac

SEQ ID NO: 52489 - DNA, 40 bp, Rhizobium leguminosarum
  source 1..40: mol_type = genomic DNA
tcccggaaaagtcgggatgttgatcgtcggcctgcctgac

SEQ ID NO: 52490 - DNA, 50 bp, Rhizobium leguminosarum
  source 1..50: mol_type = genomic DNA
aaaaaaatacagaacctttaaatattgaactcaagggcaactaatttaaa

SEQ ID NO: 52491 - protein, 551 aa, Stenotrophomonas acidaminiphila
MANAYTYIRFSTPDQQRGDSLRRQAEAVGRFVSENNLTLTKSAAFQDLGVSGYRGANLKSGLGNFIAEVNSGQVPKGSYLIVESLDRLSRQKVMDALTLLVTLIDKGIKVVTLNDAGPQILDKDAGLPSLVLALSTMHRANSESEMKSQRVKAAWANKRKNAGNVPVSSRGPEWLKFNSLTKSFEPIPERVTSIQKIFELADSGIGRNRIVKYLNGNGYPSFRNPSQGWQPSSVAKLLKNRALIGYYQPFRLMYDEQTGTRYRTPEGDEVPDYYPAVIDVDLFRRVSSRKYTPVIPLKGRQGESLSNLFTAMVYCKWCGAPMTFTNKGPGRKGGAYLVCSKARRGKDCTYRSWRYDDAEMYILYALRQLDIGAILTGIDIDGRLKEIRNELALVASQLDSNQKKLDGYENELSRSKDVPSRTILKIVKALEESIDEGKETLERLQAEERNLDAPTEDASTFAEKLLTLYTEMNGVAPTERYLIRVRLRERISRIISRIELLPVGRGDPDMIDNAPKQKKIFLSFRDGKRKLVLPIGKNGVHMVDLPESKTT

SEQ ID NO: 52492 - DNA, 50 bp, Stenotrophomonas acidaminiphila
  source 1..50: mol_type = genomic DNA
tggggtgtaataggttacttttttcttaggtatatgccatattgcacccc

SEQ ID NO: 52493 - DNA, 40 bp, Stenotrophomonas acidaminiphila
  source 1..40: mol_type = genomic DNA
tcggcgtggacatcacaggctcgatgcgggtgtggcccat

SEQ ID NO: 52494 - DNA, 40 bp, Stenotrophomonas acidaminiphila; identical to SEQ ID NO: 52493
  source 1..40: mol_type = genomic DNA

SEQ ID NO: 52495 - DNA, 50 bp, Stenotrophomonas acidaminiphila
  source 1..50: mol_type = genomic DNA
tgtggagaatcggtttatttttttcttaagtgtttggtagaattcaccca

SEQ ID NO: 52496 - protein, 517 aa, Geobacillus subterraneus
MYRPRNLDVFIYLRKSRKDIEEEKKAAESGASYDTLQRHRDNLLAIARKEGHNILGIFEEIVSGESIAERSEIQKLLRELETGIADAVLVMDIDRLGRGDMLDQGILDRAFRYSGTKIITPTEVYDPESETWELVFGVKSIVSREELKVITKRLQGGRRDSAAKGRSISKKPPYGYLRDEKLKLYPDPETSWVVVKIFEMMRDGYGRQAIAAELDRLGVKPPDEKRSFWSPSTISTIIKNEVYLGHIIWGKVKYIKQNGKYKRKKMPRERWYVKENAHEPLVSKELWEAANKAYRSRWRPSTVESKPLANPLAGLLKCELCGYTMWYQPRKDRPHPLVRCPNPKCKGVQKGALLPLVEEKILQSLAEFVDQFEVQEEALARKEQRSVIPLKQKAIEKKEKELRELHKQKDTLHDLLERGVYTIETFLERQQTIASRIKKTQDEIDQLREEIAKEQLKEKNINEYIPTVKKVLDAYRLTDDVEKKNRLLKSVLEKATYLRKPEWTKKDQFTIQLYPRI

SEQ ID NO: 52497 - DNA, 50 bp, Geobacillus subterraneus
  source 1..50: mol_type = genomic DNA
agtgtagagggtgtacggttgtactgatacaactatacacgctatacaca

SEQ ID NO: 52498 - DNA, 40 bp, Geobacillus subterraneus
  source 1..40: mol_type = genomic DNA
cgtggaatggcggttgtactggttgacttccccgtaccca

SEQ ID NO: 52499 - DNA, 40 bp, Geobacillus subterraneus
  source 1..40: mol_type = genomic DNA
cgtggaatggcggttgtactagttgacttccccgtaccca

SEQ ID NO: 52500 - DNA, 50 bp, Geobacillus subterraneus
  source 1..50: mol_type = genomic DNA
tatgtagaaagcatatggttatactaaaataactattcagaaaataaaca

SEQ ID NO: 52501 - protein, 571 aa, Sinorhizobium meliloti
MSTDAQLKGDSLRRQTEASKLYAEQNGYELIDDFKLEDIGVSAFNGRNVSQGALGRFLDAVQQARVPHGSYLLVESLDRISREPPQVATGLFLQILAAGVNIVTLTDGRVYRTASSDPTDLIFSVVIMSRAYEESLTKSLRVGAAWENKRKNLTSKKLTEVAPAWLALSSDRSSFDLIERNADTVRRIFDEADAGKGSYQIARGFNLEGLPPFTRSNGWHESYITKILTTRAVLGEFQPCKYINGKRVPHGESIEGYFPPIISREQFERVQLARKARKNRGSGRKGKSHVNLFSGVAKCGYCGSSMYVVDKGPKPKGGVYLRCDSARRGNGCKASAWPLAHFETAFLYFVRELDLAALLSAEKRQQELRQTEGALASKQADLEKQKRVREDAFALLATSSASYDFVGQKIDDATVAIGKIECEIGALKDLLAGYRTASVRVDLDIKSIIEKLLSESDAQFENRVKVADWIRTNVNSLRVYADGTDGPADRIAEMRGEVETALDPEALAIVDRITREARRKGALTSDFDRRFVVSFDHGGFRSVRIDRDDPTKHVTSIHYAEGEWSIDDRRL

SEQ ID NO: 52502 - DNA, 50 bp, Sinorhizobium meliloti
  source 1..50: mol_type = genomic DNA
atcgaaataatccacctcaccatccagatgttgaggtggattaatttcta

SEQ ID NO: 52503 - DNA, 40 bp, Sinorhizobium meliloti; identical to SEQ ID NO: 52398
  source 1..40: mol_type = genomic DNA

SEQ ID NO: 52504 - DNA, 40 bp, Sinorhizobium meliloti
  source 1..40: mol_type = genomic DNA
acccggcaaggtcggtatgaggatcgtcggactgccggac

SEQ ID NO: 52505 - DNA, 50 bp, Sinorhizobium meliloti
  source 1..50: mol_type = genomic DNA
attgaaataaatgttctcattatcaggttgtctatgcaaattgaattcta

SEQ ID NO: 52506 - protein, 489 aa, Phascolarctobacterium faecium
MSKAVIYARYSSTNQREESIEGQIRECTNFAKHQDITIVGSYIDRALTGKTDARPQFQKMIADSSKQLFDIVIVYTLDRFARNRYDSATYKAKLKKNGVKVISAKENITDDPSGIILESVLEGMAEYYSVELAQKVLRGMTENALECKWLSGIIPLGYKLDDDKHLIIDDTAAPIVRRIFEMYAAGERIVDISKYANSTHLKTAKGNEFSRCSFTHMLKNETYIGTYKWRDIVKTKVIPRFIPDDLFYAVQKRIKSRKETNIRGKSENFLLSSKLKCGKCGQFMTGVSGTSKQKRRYYYYQCYASKSKKCDMPLFPREKLEDIILTETIRLLSEPQTIDFIANTVANLPIDGNTQIIILETEITEIKNKLKNCVKAVESGLISDTISKNISEYEKKLSVLEKDLSIEKVLNEPFKITPDHIKFFLCNILQIKNTDERRDMIISTFVRDIVLTKDDIGYTVKITYNYNENPSNSLDNSVQKGSQKSSLVA

SEQ ID NO: 52507 - DNA, 50 bp, Phascolarctobacterium faecium
  source 1..50: mol_type = genomic DNA
agggttcgcaaaaatctagtttggtagcgcaaaaaagcatgaaaaagaat

SEQ ID NO: 52508 - DNA, 40 bp, Phascolarctobacterium faecium
  source 1..40: mol_type = genomic DNA
gggtttactgtcagtttggtagcgccaacgagaatcgaac

SEQ ID NO: 52509 - DNA, 40 bp, Phascolarctobacterium faecium
  source 1..40: mol_type = genomic DNA
gggtttactgtcagtttggacgcgccaacgagaatcgaac

SEQ ID NO: 52510 - DNA, 50 bp, Phascolarctobacterium faecium
  source 1..50: mol_type = genomic DNA
agggtttacagcttgtttgttttgacatgcagaaaataaacaaaaagaaa

SEQ ID NO: 52511 - protein, 520 aa, Enterobacter hormaechei
MRQVITYLRFSSKPQERGDSIRRQEELFDRWLKSNPDATIADKFMDEGQSAYHGKHLKGDFGRMLQSIQDGKYPSGQTVLLVESENRLNRQSARKTENLVDLITGKGVDVICLESGKVYNSTNIDDLDTSIQLKIAAHIAHQQSKEKSIKVSAAWENRAKLALSGEQQLTKMVPGWIDPDTRKLNEHAQTIKTIFSLLLAGESLHNIARYLQAHKIKSFSRRKDANGFSVHSVRTILTSESTVGTLAASKHNDRPAIPSYYEAAVDIATFNQAQEILSKNRKGRTPASDNPVTINLFKGLMRCKCGASVHPTGVKNTYQGVYRCNNTVDGRCKVPTMKRKPFDRWMIENIVGLLERSGDNDTAKHIAELKYQIEMLTKRIKKAANLLLELDDVPELKEQAKELSHQRQQKQSELDSLSHHESLSDKALPQLAEIDLTSKTGRVEVQLILSKYIQTIEVQHEMIVITLRNGNVIGCSRSLEPVMSKKLVKEVMKNTTVDIIDVVSSDKDFRHSGRSVTKRA

SEQ ID NO: 52512 - DNA, 50 bp, Enterobacter hormaechei
  source 1..50: mol_type = genomic DNA
gaaccgaatagactgcatacaatagtcattgtatttgagctattcggcat

SEQ ID NO: 52513 - DNA, 40 bp, Enterobacter hormaechei
  source 1..40: mol_type = genomic DNA
gcggcgaggtaaatcaagggtcatcgaagtcataatcatc

SEQ ID NO: 52514 - DNA, 40 bp, Enterobacter hormaechei
  source 1..40: mol_type = genomic DNA
gcggcgaggtaaatcaaggcacatcgaagtcataatcatc

SEQ ID NO: 52515 - DNA, 50 bp, Enterobacter hormaechei
  source 1..50: mol_type = genomic DNA
gaaccaaatgaattgaatacaagacaatttgaaatttctccattaggtaa

SEQ ID NO: 52516 - protein, 529 aa, Salmonella enterica; identical to SEQ ID NO: 35296

SEQ ID NO: 52517 - DNA, 50 bp, Salmonella enterica
  source 1..50: mol_type = genomic DNA
tacttactataccaattgggagcagttgatgtataatgtacgccacagta

SEQ ID NO: 52518 - DNA, 40 bp, Salmonella enterica; identical to SEQ ID NO: 20888
  source 1..40: mol_type = genomic DNA

SEQ ID NO: 52519 - DNA, 40 bp, Salmonella enterica; identical to SEQ ID NO: 20889
  source 1..40: mol_type = genomic DNA

SEQ ID NO: 52520 - DNA, 50 bp, Salmonella enterica; identical to SEQ ID NO: 20890
  source 1..50: mol_type = genomic DNA

SEQ ID NO: 52521 - protein, 529 aa, Salmonella enterica
MKVPVWSYARVSTLNQVDGFGIQRQVNTINQFIQYLVLDHRLPYVLDTDNITQMVAEGRSAFKGKNWNPKTKLGQYRKMVMDGVVPDSVLIVENIDRLTRLDPFQAVEIISGLINRGTTILEIETGMTYSRYIPESITVLTMQINRANGESKRKSVMMKKSHQNRYGNVSKVRPRWFDVVEVDGIKQYRTNNTAKAIQRMYNDYVNGIGAAQIVRTYGDTDNGKPWTLVTVLRALSDKRVADDARYPSIIDKELYERVQALKISPSKGKTHQKNMLNLFAGMSRCPICKQAIITKRNSHGGLFTVCLGKRTDKTCTARSIAYNALERPLLNAIVGLDFSEVYGQEESNVLTLRDQWIQNERDIAAFRDRLTKASRHEKFAILDELEVMNREQDELTIRLKSVDAPKDITLTYDDDKLDMNVEYRIELNNRMKKLIQRIDIVREDVSKTNYKIFCSIKYWTELLTHLVIIDVDVKRIGRGGTNQLTTTLRSVSSLDLEGNIKGNPDMEALEHWESVVNQAVDIAVKQVQK

SEQ ID NO: 52522 - DNA, 50 bp, Salmonella enterica; identical to SEQ ID NO: 52517
  source 1..50: mol_type = genomic DNA

SEQ ID NO: 52523 - DNA, 40 bp, Salmonella enterica
  source 1..40: mol_type = genomic DNA
ccattagtagcatggaacagtcggtggtgccgccgccaat

SEQ ID NO: 52524 - DNA, 40 bp, Salmonella enterica
  source 1..40: mol_type = genomic DNA
ccattagtagcatggaacatacggtggtgccgccgccaat

SEQ ID NO: 52525 - DNA, 50 bp, Salmonella enterica; identical to SEQ ID NO: 20890
  source 1..50: mol_type = genomic DNA

SEQ ID NO: 52526 - protein, 513 aa, Salmonella enterica
MMKIPVWSYARVSTLNQVDGFGIQRQVNTINQFIQYLVLDHRLPYVLDTDNITQMVAEGRSAFKGKNWNPKTKLGQYRKMVMDGVVPDSVLIVENIDRLTRLDPFQAVEIISGLINRGTTILEIETGMTYSRYIPESITVLTMQINRANGESKRKSVMMKKSHQNRYGNVSKVRPRWFDVVEVDGIKQYRTNNTAKAIQRMYNDYVNGIGAAQIVRTYGDTDNGKPWTLVTVLRALSDKRVADDARYPSIIDKALYERVQAMKLSPSKGNTHQKYMLNLFAGMSRCPLCGQAIITKRNSHGGLFTVCLGKRTDKTCTARSIAYNALERPLLNAIVGLDFSEVYGQEESNVLTLRDQWIQNERDIAAFRERLTKASRHEKFAILDELEVMNREQDELTIRLKSVDAPKDITLTYDDDKLDMNVEYRIELNNRMKKLIQRIDIVREDVSKTNYKIFCSIKYWTELLTHLVIIDVDVQRIGRGGTNQLTTTLRSVSSLDLEGNIKGNPDMEALEYW

SEQ ID NO: 52527 - DNA, 50 bp, Salmonella enterica; identical to SEQ ID NO: 52517
  source 1..50: mol_type = genomic DNA

SEQ ID NO: 52528 - DNA, 40 bp, Salmonella enterica; identical to SEQ ID NO: 20888
  source 1..40: mol_type = genomic DNA

SEQ ID NO: 52529 - DNA, 40 bp, Salmonella enterica; identical to SEQ ID NO: 20889
  source 1..40: mol_type = genomic DNA

SEQ ID NO: 52530 - DNA, 50 bp, Salmonella enterica; identical to SEQ ID NO: 20890
  source 1..50: mol_type = genomic DNA

SEQ ID NO: 52531 - protein, 490 aa, Glutamicibacter arilaitensis
MKASIYARLSQDKRKGSAEEGSSVQAQVEACKAFIEAKGWTLDKTYVDNDISATSGAVRPQFEQMLKDSPANVVAFKSDRISRDVMDTLRLKASGITGWLCDGGKLDFSSSDSTMLTLFRSVIDSTEQTKKSERQRLATLRDAKAGKYRGSIRPFGQERDGTWIEPEASAVREATEKLISGEWTFFKVATEWNTRGLLTPQTGKQGGREWTSGTVSQYFKRPRLKGYQEYEGTLYKLADWKPLLSEEEFEHIQLIRDSRKTGVRGKQGYRHKPHLLSGWIECGICGRKLNTAYRGKPKNTRAYSCPTPRHVTRAAEHIEKLLVSRVLVPLFAPSAERVLSPTGASEASKLRREQLALVKEHQEWMQEAIDAELRPAVLAQKEAKHTEKLTELKERIAELEADNVFAGITWIDHARNIMEFEPIAWEHWNALSLERQRVLIQALYTSVKVMPQGVGTGTAFKPELIKTEISPLLQELEEVAMEWLLIASFR

SEQ ID NO: 52532 - DNA, 50 bp, Glutamicibacter arilaitensis
  source 1..50: mol_type = genomic DNA
atgtagtacctaaatatctttgtccagcagaagatattccgataccctat

SEQ ID NO: 52533 - DNA, 40 bp, Glutamicibacter arilaitensis
  source 1..40: mol_type = genomic DNA
catgagcgtgatcatgacccatcctggtacgtctcctcga

SEQ ID NO: 52534 - DNA, 40 bp, Glutamicibacter arilaitensis
  source 1..40: mol_type = genomic DNA
catgagcgtgatcatgacccttcctggtacgtctcctcga

SEQ ID NO: 52535 - DNA, 50 bp, Glutamicibacter arilaitensis
  source 1..50: mol_type = genomic DNA
atgcagtacagatgtgccccagtcctgcagaaaatatagccctactctct

SEQ ID NO: 52536 - protein, 490 aa, Bacillus cereus
MLFSNENIKHVAVYLRLSRDEENQGIEQVLANHRQTLINLCNENKWSYELFEEVASSSTIINREKMVKLLDRVEQNYYDAVVVMDVDRLSRNEFDASLIKRILLETETYIVTPYRMYDLTKDDDSLLLGITNLIASGEYKQILKRMQRGKKYAQQQGLWTNGIAPLGYSKDPKTRKLFPNERAKDVQFIFSEIVKGTTIPSLIGKLNNMGIKTRQGYDFKYNSIQRIINNDAYKGTIASNKTIGQYKPRPKEEWIIVHNAHPPVVDEATWETANKIVNEYSFKTPRSKNRIYPTSNLIYCANCGRVQGCNEHKRLNKVYIKHCKCGNRSSYYNTVLAIIKEEVLGHKETVLKELEILEAGTQEDDNQFRKETLLSRLNKSKKALKHNNFLFEEEEIDIVEYRERKAIRQEEIKLIEEEILALEKEDKSAKIDNLKKQIEDYDSVLGNWNFLDGEGYSDERINRTLHGLVSGILWTFRKGDESPDLFIIYK

SEQ ID NO: 52537 - DNA, 50 bp, Bacillus cereus
  source 1..50: mol_type = genomic DNA
aaattatacccaaaaactgaacaaactggttgagtgcttagggacaacgt

SEQ ID NO: 52538 - DNA, 40 bp, Bacillus cereus; identical to SEQ ID NO: 22328
  source 1..40: mol_type = genomic DNA

SEQ ID NO: 52539 - DNA, 40 bp, Bacillus cereus; identical to SEQ ID NO: 22328
  source 1..40: mol_type = genomic DNA

SEQ ID NO: 52540 - DNA, 50 bp, Bacillus cereus
  source 1..50: mol_type = genomic DNA
caaatgtagtgtaaaactacacaaactgattaagttctggaggtcaacgt

SEQ ID NO: 52541 - protein, 508 aa, Notoacmeibacter marinus
MSDVMPTKAVIYCRVSSKGQQSDGHGLESQETRCRQHAAAKGLEVAAVFPDTITGGIDFMKRPGMKALLAFLDAQPDERFTVIFDDLKRFARDTRFHLDLRDAFRARQATIECLNFKLDDTPEGEFIETIIAAQGALERKQNGRQVAQKMRARMENGYWIHNPPVGYAYKTVKGHGKLLVANEPLASIVRDAFEGYAAGRFQSQAEIKRFFETFPEFPRNRAGKITQQRVTDILTQPLYTGHICSETYGLDWLKGHHEPLISIATFDKVQERRNGIAKLPARKNIGNDFVLRGFVHCAECQKPLRSSWTTGSTKRYPYYLCQTKGCGSYGKSIARDKIEGDVADIVKSMQPTRKLFDLAVMMFRDTWEHRASLAADIVKSTENQLRHTEKQIEGLLTRILDATNPTVVRAYEDRIAGLERDKLKLRETMAHHVPEAGTFDQMLELSLRFLANPWKIWQSGNITMRRTVLRLAFAEPLNYHRNEGPRTPKTTLPFKALAGVLGQDMRYG

SEQ ID NO: 52542 - DNA, 50 bp, Notoacmeibacter marinus
  source 1..50: mol_type = genomic DNA
ttttggggcaggatatgagatatggtgcagttgaagagaataacatagaa

SEQ ID NO: 52543 - DNA, 40 bp, Notoacmeibacter marinus
  source 1..40: mol_type = genomic DNA
cggccgaagccgggtcatggtgcccaggagaggactcgaa

SEQ ID NO: 52544 - DNA, 40 bp, Notoacmeibacter marinus
  source 1..40: mol_type = genomic DNA
cggccgaagccgggtcatggggcccaggagaggactcgaa

SEQ ID NO: 52545 - DNA, 50 bp, Notoacmeibacter marinus
  source 1..50: mol_type = genomic DNA
ttttggggcattaaataaaatatgggctacttgaacacaaggactgagat

SEQ ID NO: 52546 - protein, 527 aa, Roseburia intestinalis
MNIAAYCRVSTDKSDQLNSLETQKEFFLEYTKRTGDNLIKLYADEGISGTKIKNRKEFQRMLADAEKGLFAMVVVKDISRFARNTVDLLQSVRKLKSLGIETQFLTANMTSMGNSEFVLTIFGALAQEESANTSKRIKFGKKMNAEKGRVPNIVFGYDKTIGDYFNLSINENEAKAIRQIFQWYTEEGYGGSKIANMLNERGIKTKRGNNWSQNAVCRILTNEIYTGKIINGKEEIADFLTGQRKEKDESEWLVTIRPELRIIEDEVFDKAQDILKGRHDSFKITHERQSNKYLFSTLIKCKECGWSFRRTVRQYKNTYVRWVCSGHNGKGADSCPNAVTVDEEELIQALQEYFQEILSKKKKVINYVIKEFQRVYKAKDENIEYEKQLNAELNKLRKSREKYMDMYTDDLISREELNEKIGGMRKEIERLENELKMVSYHLTKGEQLEAILNSTFKQLEDITDVHEMTNAQLKRLINKIEVDKDGNVDIYLRLIGDLGLDETVLIEGDKNTEEKGTKKVPNSYNHT

SEQ ID NO: 52547 - DNA, 50 bp, Roseburia intestinalis; identical to SEQ ID NO: 42572
  source 1..50: mol_type = genomic DNA

SEQ ID NO: 52548 - DNA, 40 bp, Roseburia intestinalis
  source 1..40: mol_type = genomic DNA
aatcagcaagagtacggtacataaagatgttacagaacgc

SEQ ID NO: 52549 - DNA, 40 bp, Roseburia intestinalis; identical to SEQ ID NO: 52548
  source 1..40: mol_type = genomic DNA

SEQ ID NO: 52550 - DNA, 50 bp, Roseburia intestinalis
  source 1..50: mol_type = genomic DNA
gggttcccagctcctacaaccatacagtctgtaataactgcagagcatga

SEQ ID NO: 52551 - protein, 527 aa, Roseburia hominis; identical to SEQ ID NO: 42571

SEQ ID NO: 52552 - DNA, 50 bp, Roseburia hominis; identical to SEQ ID NO: 42572
  source 1..50: mol_type = genomic DNA

SEQ ID NO: 52553 - DNA, 40 bp, Roseburia hominis
  source 1..40: mol_type = genomic DNA
gatcagcaagagtacggtacataaggacgtcaccgagcgc

SEQ ID NO: 52554 - DNA, 40 bp, Roseburia hominis; identical to SEQ ID NO: 52553
  source 1..40: mol_type = genomic DNA

SEQ ID NO: 52555 - DNA, 50 bp, Roseburia hominis; identical to SEQ ID NO: 52550
  source 1..50: mol_type = genomic DNA

SEQ ID NO: 52556 - protein, 472 aa, Deinococcus indicus
MTGPAIGCTRISTHGQRDGYGQADQAAEITRYAEANGYDLLEVVPEVESGARELAGRDAVQRYYQLADATPGLTFIFPRVDRIGRRAELILGIVRELHARRANVVILGFPMDLRTREGLLMLTTLAGMAEFDYGGIRDRMEAGRRAKAQAGRWPHGTPPWGYQLARDARGVATLPEIIEDRAAAVRRAFELALEHGEAEIVRTMRAEGWPAPTSSGWVRKTVANVVTNPLYAGRRVYQGVTIEYPAIIEPALMARVQAARERRRIHGGPKGAQPLLWSGHARCTCGAAIGRDQAQTTTQGERVRYPVYRCWRRNKARLTGQVEGQHAREIKAEWADQRWWDALTALLVNADALREIARPTQVAPPLPPERVEALEAAIARAYEPLTAGAAGYTMAIAERLAQPYADELARLRADHAAQAGNPEPDADALAAQFQDWLAEPRTWDERRELLRTLNVQVQIGPDGVAGFQVELP

SEQ ID NO: 52557 - DNA, 50 bp, Deinococcus indicus
  source 1..50: mol_type = genomic DNA
atcagggagagtgcgcccactatcacgattcagggttcagactgccggat

SEQ ID NO: 52558 - DNA, 40 bp, Deinococcus indicus
  source 1..40: mol_type = genomic DNA
gccgggactgccggccttcacggtggtcggcctgccggat

SEQ ID NO: 52559 - DNA, 40 bp, Deinococcus indicus
  source 1..40: mol_type = genomic DNA
gccgggactgccggccttcttggtggtcggcctgccggat

SEQ ID NO: 52560 - DNA, 50 bp, Deinococcus indicus
  source 1..50: mol_type = genomic DNA
tccagggtggggatgcaccctatttttcttcagggtgatgtctgcctgag

SEQ ID NO: 52561 - protein, 507 aa, Escherichia coli; identical to SEQ ID NO: 5406

SEQ ID NO: 52562 - DNA, 50 bp, Escherichia coli
  source 1..50: mol_type = genomic DNA
tagtgtatttagaccctcatgactttcatcagacacgtttaaatacacca

SEQ ID NO: 52563 - DNA, 40 bp, Escherichia coli; identical to SEQ ID NO: 5188
  source 1..40: mol_type = genomic DNA

SEQ ID NO: 52564 - DNA, 40 bp, Escherichia coli; identical to SEQ ID NO: 21859
  source 1..40: mol_type = genomic DNA

SEQ ID NO: 52565 - DNA, 50 bp, Escherichia coli
  source 1..50: mol_type = genomic DNA
atgtgtttctccatcagcatggcttgaaccagaaacagtccaatacacca

SEQ ID NO: 52566 - protein, 541 aa, Faecalibacterium prausnitzii; identical to SEQ ID NO: 47626

SEQ ID NO: 52567 - DNA, 50 bp, Faecalibacterium prausnitzii; identical to SEQ ID NO: 48897
  source 1..50: mol_type = genomic DNA

SEQ ID NO: 52568 - DNA, 40 bp, Faecalibacterium prausnitzii
  source 1..40: mol_type = genomic DNA
cgaagtggtaaatgcgtgtgacgctgggcgcgagggagaa

SEQ ID NO: 52569 - DNA, 40 bp, Faecalibacterium prausnitzii; identical to SEQ ID NO: 52568
  source 1..40: mol_type = genomic DNA

SEQ ID NO: 52570 - DNA, 50 bp, Faecalibacterium prausnitzii
  source 1..50: mol_type = genomic DNA
gccagctccactgccattcctacagaagaaggggaggagattttggtgga

SEQ ID NO: 52571 - protein, 546 aa, Streptomyces ambofaciens
MTEPTPVTARAMPRARRRKGVPASAPGMRAAIYVRLSRETDETTSPERQRAACEALCEARGWEVVAAEEDIDVSGFSRGLDRPGLQRILTRLAELDVIVFFKIDRLARSTVDFAEIMRLAEHQSVALASATEPLDLTSSMGRAMAKVIAVFAELESDTIGMRVSSAHEHLRREGRYTGGRVPYGYMVVPNPTGAGKVLAVNEGEAKTIKRIVERVLAKDSLMQIINDLNQEGVPSPGHTSRQTTGKRSDSKQWYTTTLRSMLGNPQLLGQVIEDGKPILRTDGLPLVNRPPILDTDTWQVLQDELERRANPGEKRRQGTSLLRGIMHCGVCGERMYTFSGRNGQLRYRCIGPLKYRQRAAKGEEKPGVKCYGPTVAGVTTEEHVTEQFLAKYGHLSVMRMVQEVGEDFRPQIRQAEEALADLQKDRYDRGLFRGDDGAIRYAEQYAKLEERLATLKERQRTAKPGGVKAEPIGETHAEQWKRSDVAGKRDLLLNAGGYVEVAPARRGGKKLDTSRLSVYFGEEGHMRRAAAAKESERETEAADSQG

SEQ ID NO: 52572 - DNA, 50 bp, Streptomyces ambofaciens
  source 1..50: mol_type = genomic DNA
atggtgatggctcggtcagtggacgattaggcaggacacgcatacctccg

SEQ ID NO: 52573 - DNA, 40 bp, Streptomyces ambofaciens
  source 1..40: mol_type = genomic DNA
gggtcttgtcggactggacgatcagcggaccattcacggg

SEQ ID NO: 52574 - DNA, 40 bp, Streptomyces ambofaciens
  source 1..40: mol_type = genomic DNA
gggtcttgtcggactggaccgtcagcggaccattcacggg

SEQ ID NO: 52575 - DNA, 50 bp, Streptomyces ambofaciens
  source 1..50: mol_type = genomic DNA
actgtgatgacaaagccaggagatcgtcaggcatgagagaaattcctctg

SEQ ID NO: 52576 - protein, 589 aa, Klebsiella quasivariicola; identical to SEQ ID NO: 12416

SEQ ID NO: 52577 - DNA, 50 bp, Klebsiella quasivariicola; identical to SEQ ID NO: 12417
  source 1..50: mol_type = genomic DNA

SEQ ID NO: 52578 - DNA, 40 bp, Klebsiella quasivariicola
  source 1..40: mol_type = genomic DNA
gctcggagtgaccatcggcaacaccgacggcaatatcatc

SEQ ID NO: 52579 - DNA, 40 bp, Klebsiella quasivariicola
  source 1..40: mol_type = genomic DNA
gctcggagtgaccatcggcgccaccgacggcaatatcatc

SEQ ID NO: 52580 - DNA, 50 bp, Klebsiella quasivariicola
  source 1..50: mol_type = genomic DNA
gactacaccccaggcacttcactggccactaaaggaacacagagatgaat

SEQ ID NO: 52581 - protein, 589 aa, Enterobacter hormaechei
MPAHVTILRNTVRPVKFNTMNRPRLYSYIRYSSERQGRGNSIERQKSYIAEMAKKIAAEYDLEIFEEYQDLGVSAYKGKNVQEGALSDFIAQVESGLIPKGSFLLIESLDRFSRQNAMQAVNLFTSLLLNGITVITGIDKQIYRQTEVNTEILQQLMFSVMLFSRANEESSTKSHRTIASALSKIRRHQKRKPGDPVIAIKELGSDKWWTDSSTGYVNPHPVLFPIAKKIIQLKQDGWSNRMILMHLKNNYDGPVIGNKKSKGIWNMQHCSRILEPAIYGRKVITVNNAEYVLDDYYPAIISKDEYEALKIQVGNKGFAPNREINPEIPLLSGIGILHCAHCSCYMVKAKSTLKNHPHAYRYQCASRDLHQDCNKWGFRASTLERTILQLIADRIFLQTKYQPSGLEWKISDIESKIENYVLAIGSAKSPAIINSMTSQIEQLEQEKQSLVEEKRLYDESIVQMNTEGWDKFRKFDINDALNPLRAKIRANIKTVITRIDCSRIDKKHNLFTITYRDQHKQRIVIENNSGWKKGKIYVEAQTINDTQILESEGLILHDHIDILINRDKFMTEAKKRLEHPRTLIDELTE

SEQ ID NO: 52582 - DNA, 50 bp, Enterobacter hormaechei
  source 1..50: mol_type = genomic DNA
gatcatacctatcgcacttcagtgaacactaaagtaaaatacacctcatt

SEQ ID NO: 52583 - DNA, 40 bp, Enterobacter hormaechei
  source 1..40: mol_type = genomic DNA
gctcggtgtaaccatcggtaacactgacggtaacgtgatt

SEQ ID NO: 52584 - DNA, 40 bp, Enterobacter hormaechei
  source 1..40: mol_type = genomic DNA
gctcggtgtaaccatcggtgccactgacggtaacgtgatt

SEQ ID NO: 52585 - DNA, 50 bp, Enterobacter hormaechei; identical to SEQ ID NO: 52580
  source 1..50: mol_type = genomic DNA

SEQ ID NO: 52586 - protein, 589 aa, Enterobacter hormaechei
MSAHVTILRNTVLPVKFNTMNRPRLYSYIRYSSERQGKGSSIERQKSYIAEMAKQIATEYDLEIFEEYQDLGVSAYKGKNVQEGALSDFIDQVESGLIPKGSFLLIESLDRFSRQNAMQAVNLFTSLLLNGITVITGIDKQVYRQTEVNTETLQQLMFSVMLFSRANEESSTKSHRTIASALSKIRRHQERKPGDPVVAIKELGSDKWWTDSSTGYVNPHPVLFPIAKKIIQLKQDGWSNRMILQHLKNNYDGPVIGNKKSKGIWNMQHCSRILEPAIYGRKVITVNNAEYVLDDYYPAIISKDEYEALKLQVGNKGFAPNRESNPEIPLLSGIGILHCAHCSCYMVKAKSTLKNHPHAYRYQCASRDLHQDCNKWGFRASTLERTILQLIADRIFLQTKYQPSGLEGKIADIQSQIENYVLAIGSAKSPEIINSLTSQIDQLEQEKQSLIVEKRLYDESIVQMNTEGWDKFRKFDIDDALNPLRTKIRANIKTVIMRVDCSRIDKKHNLFTITYRDQHKQRIVIENNSGWKKGKIYVEAQTINDIQVLESEGLILHDHIDILINRDKFMTEAKKRLDHPRTLIDELTE

SEQ ID NO: 52587 - DNA, 50 bp, Enterobacter hormaechei; identical to SEQ ID NO: 12417
  source 1..50: mol_type = genomic DNA

SEQ ID NO: 52588 - DNA, 40 bp, Enterobacter hormaechei
  source 1..40: mol_type = genomic DNA
gctcggtgtgaccatcggtaacaccgacggtaacgtgatt

SEQ ID NO: 52589 - DNA, 40 bp, Enterobacter hormaechei
  source 1..40: mol_type = genomic DNA
gctcggtgtgaccatcggtgccaccgacggtaacgtgatt

SEQ ID NO: 52590 - DNA, 50 bp, Enterobacter hormaechei; identical to SEQ ID NO: 52580
  source 1..50: mol_type = genomic DNA

SEQ ID NO: 52591 - protein, 589 aa, Enterobacter hormaechei; identical to SEQ ID NO: 12416

SEQ ID NO: 52592 - DNA, 50 bp, Enterobacter hormaechei; identical to SEQ ID NO: 12422
  source 1..50: mol_type = genomic DNA

SEQ ID NO: 52593 - DNA, 40 bp, Enterobacter hormaechei; identical to SEQ ID NO: 52588
  source 1..40: mol_type = genomic DNA

SEQ ID NO: 52594 - DNA, 40 bp, Enterobacter hormaechei; identical to SEQ ID NO: 52589
  source 1..40: mol_type = genomic DNA

SEQ ID NO: 52595 - DNA, 50 bp, Enterobacter hormaechei; identical to SEQ ID NO: 52580
  source 1..50: mol_type = genomic DNA

SEQ ID NO: 52596 - protein, 589 aa, Enterobacter hormaechei; identical to SEQ ID NO: 52581

SEQ ID NO: 52597 - DNA, 50 bp, Enterobacter hormaechei; identical to SEQ ID NO: 52582
  source 1..50: mol_type = genomic DNA

SEQ ID NO: 52598 - DNA, 40 bp, Enterobacter hormaechei; identical to SEQ ID NO: 52588
  source 1..40: mol_type = genomic DNA

SEQ ID NO: 52599 - DNA, 40 bp, Enterobacter hormaechei; identical to SEQ ID NO: 52589
  source 1..40: mol_type = genomic DNA

SEQ ID NO: 52600 - DNA, 50 bp, Enterobacter hormaechei; identical to SEQ ID NO: 52580
  source 1..50: mol_type = genomic DNA

SEQ ID NO: 52601 - protein, 589 aa, Klebsiella variicola; identical to SEQ ID NO: 12416

SEQ ID NO: 52602 - DNA, 50 bp, Klebsiella variicola; identical to SEQ ID NO: 12417
  source 1..50: mol_type = genomic DNA

SEQ ID NO: 52603 - DNA, 40 bp, Klebsiella variicola
  source 1..40: mol_type = genomic DNA
gctcggggtgaccatcggcaacaccgacggcaatatcatc

SEQ ID NO: 52604 - DNA, 40 bp, Klebsiella variicola
  source 1..40: mol_type = genomic DNA
gctcggggtgaccatcggcgccaccgacggcaatatcatc

SEQ ID NO: 52605 - DNA, 50 bp, Klebsiella variicola; identical to SEQ ID NO: 52580
  source 1..50: mol_type = genomic DNA

SEQ ID NO: 52606 - protein, 589 aa, Citrobacter sp FDAARGOS 156; identical to SEQ ID NO: 12416

SEQ ID NO: 52607 - DNA, 50 bp, Citrobacter sp FDAARGOS 156; identical to SEQ ID NO: 12417
  source 1..50: mol_type = genomic DNA

SEQ ID NO: 52608 - DNA, 40 bp, Citrobacter sp FDAARGOS 156
  source 1..40: mol_type = genomic DNA
gctcggtgtgactatcggcaacacagacggtaacctgatt

SEQ ID NO: 52609 - DNA, 40 bp, Citrobacter sp FDAARGOS 156
  source 1..40: mol_type = genomic DNA
gctcggtgtgactatcggcgccacagacggtaacctgatt

SEQ ID NO: 52610 - DNA, 50 bp, Citrobacter sp FDAARGOS 156; identical to SEQ ID NO: 52580
  source 1..50: mol_type = genomic DNA

SEQ ID NO: 52611 - protein, 589 aa, Klebsiella pneumoniae
MSAHVTILRNTVLPVKFNTMNRPRLYSYIRYSSERQGKGSSIERQKSYIAEMAKQIATEYDLEIFEEYQDLGVSAYKGKNVQEGALSDFIDQVESGLIPKGSFLLIESLDRFSRQNAMQAVNLFTSLLLNGITVITGIDKQVYRQTEVNTETLQQLMFSVMLFSRANEESSTKSHRTIASALSKIRRHQERKTGDPVVAIKELGSDKWWTDSSTGYVNPHPVLFPIAKKIIQLKQDGWSNRMILQHLKNNYDGPVIGNKKSKGIWNMQHCSRILEPAIYGRKVITVNNAEYVLDDYYPAIISKDEYEALKLQVGNKGFAPNRESNPEIPLLSGIGILHCAHCSCYMVKAKSTLKNHPHAYRYQCASRDLHQDCNKWGFRASTLERTILQLIADRIFLQTKYQPSGLEGKIADIQSQIENYVLAIGSAKSPEIINSLTSQIDQLEQEKQSLIVEKRLYDESIVQMNTEGWDKFRKFDIDDALNPLRTKIRANIKTVIMRVDCSRIDKKHNLFTITYRDQHKQRIVIENNSGWKKGKIYVEAQTINDIQILESEGLILHDHIDILINRDKFMTEAKKRLDHPRTLIDELTE

SEQ ID NO: 52612 - DNA, 50 bp, Klebsiella pneumoniae; identical to SEQ ID NO: 12417
  source 1..50: mol_type = genomic DNA

SEQ ID NO: 52613 - DNA, 40 bp, Klebsiella pneumoniae; identical to SEQ ID NO: 52443
  source 1..40: mol_type = genomic DNA

SEQ ID NO: 52614 - DNA, 40 bp, Klebsiella pneumoniae
  source 1..40: mol_type = genomic DNA
gctcggggtaaccatcggcgccaccgacggcaatatcatc

SEQ ID NO: 52615 - DNA, 50 bp, Klebsiella pneumoniae; identical to SEQ ID NO: 52580
  source 1..50: mol_type = genomic DNA

SEQ ID NO: 52616 - protein, 589 aa, Klebsiella pneumoniae; identical to SEQ ID NO: 12416

SEQ ID NO: 52617 - DNA, 50 bp, Klebsiella pneumoniae; identical to SEQ ID NO: 12417
  source 1..50: mol_type = genomic DNA

SEQ ID NO: 52618 - DNA, 40 bp, Klebsiella pneumoniae
  source 1..40: mol_type = genomic DNA
gctcggggtaaccataggcaacaccgacggcaatatcatc

SEQ ID NO: 52619 - DNA, 40 bp, Klebsiella pneumoniae
  source 1..40: mol_type = genomic DNA
gctcggggtaaccataggcgccaccgacggcaatatcatc

SEQ ID NO: 52620 - DNA, 50 bp, Klebsiella pneumoniae; identical to SEQ ID NO: 52580
  source 1..50: mol_type = genomic DNA

SEQ ID NO: 52621 - protein, 589 aa, Klebsiella pneumoniae; identical to SEQ ID NO: 12416

SEQ ID NO: 52622 - DNA, 50 bp, Klebsiella pneumoniae; identical to SEQ ID NO: 12417
  source 1..50: mol_type = genomic DNA

SEQ ID NO: 52623 - DNA, 40 bp, Klebsiella pneumoniae
  source 1..40: mol_type = genomic DNA
gctcggcatcaccatcggcaacaccgacggcaatattatc

SEQ ID NO: 52624 - DNA, 40 bp, Klebsiella pneumoniae
  source 1..40: mol_type = genomic DNA
gctcggcatcaccatcggcgccaccgacggcaatattatc

SEQ ID NO: 52625 - DNA, 50 bp, Klebsiella pneumoniae; identical to SEQ ID NO: 52580
  source 1..50: mol_type = genomic DNA

SEQ ID NO: 52626 - protein, 589 aa, Klebsiella pneumoniae; identical to SEQ ID NO: 12416

SEQ ID NO: 52627 - DNA, 50 bp, Klebsiella pneumoniae; identical to SEQ ID NO: 12417
  source 1..50: mol_type = genomic DNA

SEQ ID NO: 52628 - DNA, 40 bp, Klebsiella pneumoniae; identical to SEQ ID NO: 52443
  source 1..40: mol_type = genomic DNA

SEQ ID NO: 52629 - DNA, 40 bp, Klebsiella pneumoniae; identical to SEQ ID NO: 52614
  source 1..40: mol_type = genomic DNA

SEQ ID NO: 52630 - DNA, 50 bp, Klebsiella pneumoniae; identical to SEQ ID NO: 52580
  source 1..50: mol_type = genomic DNA

SEQ ID NO: 52631 - protein, 589 aa, Cronobacter sakazakii; identical to SEQ ID NO: 12416

SEQ ID NO: 52632 - DNA, 50 bp, Cronobacter sakazakii; identical to SEQ ID NO: 12417
  source 1..50: mol_type = genomic DNA

SEQ ID NO: 52633 - DNA, 40 bp, Cronobacter sakazakii
  source 1..40: mol_type = genomic DNA
gcttggcgtgaccattggcaacaccgacggcaatattatc

SEQ ID NO: 52634 - DNA, 40 bp, Cronobacter sakazakii
  source 1..40: mol_type = genomic DNA
gcttggcgtgaccattggcgccaccgacggcaatattatc

SEQ ID NO: 52635 - DNA, 50 bp, Cronobacter sakazakii; identical to SEQ ID NO: 52580
  source 1..50: mol_type = genomic DNA

SEQ ID NO: 52636 - protein, 589 aa, Citrobacter freundii
MSAHVTILRNTVLPVKFNTMNRPRLYSYIRYSSERQGKGSSIERQKSYIAEMAKQIATEYDLEIFEEYQDLGVSAYKGKNVQEGALSDFIDQVESGLIPKGSFLLIESLDRFSRQNAMQAVNLFTSLLLNGITVITGIDKQVYRQTEVNTETLQQLMFSVMLFSRANEESSTKSHRTIASALSKIRRHQERKPGDPVVAIKELGSDKWWTDSSTGYVNPHPVLFPIAKKIIQLKQDGWSNRMILQHLKNNYDGPVIGNKKSKGIWNMQHCSRILEPAIYGRKVITVNNAEYVLDDYYPAIISKDEYEALKLQVGNKGFAPNRESNPEIPLLSGIGILHCAHCSCYMVKAKSTLKNHPHAYRYQCASRDLHQDCNKWGFRASTLERTILQLIADRIFLQTKYQPSGLEGKIADIQSQIENYVLAIGSAKSPEIINSLTSQIDQLEQEKQSLIVEKRLYDESIVQMNTEGWDKFRKFDIDDALNPLRTKIRANIKTVIMRVDCSRIDKKHNLFTITYRDQHKQRIVIENNSGWKKGKIYVEAQTINDIQILESEGLILHDHIDILINRDKFMTEAKKRLDHPRTLIDELTK

SEQ ID NO: 52637 - DNA, 50 bp, Citrobacter freundii; identical to SEQ ID NO: 12422
  source 1..50: mol_type = genomic DNA

SEQ ID NO: 52638 - DNA, 40 bp, Citrobacter freundii
  source 1..40: mol_type = genomic DNA
gttaggcgtcaccatcggcaacacggacggtaacctgatt

SEQ ID NO: 52639 - DNA, 40 bp, Citrobacter freundii
  source 1..40: mol_type = genomic DNA
gttaggcgtcaccatcggcgccacggacggtaacctgatt

SEQ ID NO: 52640 - DNA, 50 bp, Citrobacter freundii; identical to SEQ ID NO: 52580
  source 1..50: mol_type = genomic DNA

SEQ ID NO: 52641 - protein, 589 aa, Citrobacter freundii
MSAHVTILRNTVLPVKFNTMNRPRLYSYIRYSSERQGKGSSIERQKSYIAEMAKQIATEYDLEIFEEYQDLGVSAYKGKNVQEGALSDFIAQVESGLIPKGSFLLIESLDRFSRQNAMQAVNLFTSLLLNGITVITGIDKQVYRQTEVNTETLQQLMFSVMLFSRANEESSTKSHRTIASALSKIRRHQERKPGDPVVAIKELGSDKWWTDSSTGYVNPHPVLFPIAKKIIQLKQDGWSNRMILQHLKNNYDGPVIGNKKSKGIWNMQHCSRILEPAIYGRKVITVNNAEYVLDDYYPAIISKDEYEALKLQVGNKGFAPNRESNPEIPLLSGIGILHCAHCSCYMVKAKSTLKNHPHAYRYQCASRDLHQDCNKWGFRASTLERTILQLIADRIFLRTKYQPSGLEGKIADIQSQIENYVLAIGSAKSPAIINSLTSQIDQLEQEKQSLIVEKRLYDESIVQMNTEGWDKFRKFDIDDALNPLRTKIRANIKTVIMRVDCSRIDKKHNLFTITYRDQHKQRIVIENNSGWKKGKIYVEAQTINDIQILESEGLILHDHIDILINRDKFMTEAKKRLEHPRTLLDELTE

SEQ ID NO: 52642 - DNA, 50 bp, Citrobacter freundii; identical to SEQ ID NO: 12422
  source 1..50: mol_type = genomic DNA

SEQ ID NO: 52643 - DNA, 40 bp, Citrobacter freundii
  source 1..40: mol_type = genomic DNA
gcttggcgtcaccatcggtaacaccgacggtaacctgatt

SEQ ID NO: 52644 - DNA, 40 bp, Citrobacter freundii
  source 1..40: mol_type = genomic DNA
gcttggcgtcaccatcggtgccaccgacggtaacctgatt

SEQ ID NO: 52645 - DNA, 50 bp, Citrobacter freundii; identical to SEQ ID NO: 52580
  source 1..50: mol_type = genomic DNA

SEQ ID NO: 52646 - protein, 589 aa, Citrobacter freundii; identical to SEQ ID NO: 12416

SEQ ID NO: 52647 - DNA, 50 bp, Citrobacter freundii; identical to SEQ ID NO: 12417
  source 1..50: mol_type = genomic DNA

SEQ ID NO: 52648 - DNA, 40 bp, Citrobacter freundii; identical to SEQ ID NO: 52643
  source 1..40: mol_type = genomic DNA

SEQ ID NO: 52649 - DNA, 40 bp, Citrobacter freundii; identical to SEQ ID NO: 52644
  source 1..40: mol_type = genomic DNA

SEQ ID NO: 52650 - DNA, 50 bp, Citrobacter freundii; identical to SEQ ID NO: 52580
  source 1..50: mol_type = genomic DNA

SEQ ID NO: 52651 - protein, 589 aa, Citrobacter freundii; identical to SEQ ID NO: 52586

SEQ ID NO: 52652 - DNA, 50 bp, Citrobacter freundii; identical to SEQ ID NO: 12417
  source 1..50: mol_type = genomic DNA

SEQ ID NO: 52653 - DNA, 40 bp, Citrobacter freundii; identical to SEQ ID NO: 52643
  source 1..40: mol_type = genomic DNA

SEQ ID NO: 52654 - DNA, 40 bp, Citrobacter freundii; identical to SEQ ID NO: 52644
  source 1..40: mol_type = genomic DNA

SEQ ID NO: 52655 - DNA, 50 bp, Citrobacter freundii; identical to SEQ ID NO: 52580
  source 1..50: mol_type = genomic DNA

SEQ ID NO: 52656 - protein, 589 aa, Enterobacter cloacae; identical to SEQ ID NO: 52581

SEQ ID NO: 52657 - DNA, 50 bp, Enterobacter cloacae; identical to SEQ ID NO: 52582
  source 1..50: mol_type = genomic DNA

SEQ ID NO: 52658 - DNA, 40 bp, Enterobacter cloacae
  source 1..40: mol_type = genomic DNA
actgggcgtcaccatcggtaataccgacggcaacgtgatt

SEQ ID NO: 52659 - DNA, 40 bp, Enterobacter cloacae
  source 1..40: mol_type = genomic DNA
actgggcgtcaccatcggtgctaccgacggcaacgtgatt

SEQ ID NO: 52660 - DNA, 50 bp, Enterobacter cloacae; identical to SEQ ID NO: 52580
  source 1..50: mol_type = genomic DNA

SEQ ID NO: 52661 - protein, 589 aa, Enterobacter cloacae; identical to SEQ ID NO: 12416

SEQ ID NO: 52662 - DNA, 50 bp, Enterobacter cloacae; identical to SEQ ID NO: 12422
  source 1..50: mol_type = genomic DNA

SEQ ID NO: 52663 - DNA, 40 bp, Enterobacter cloacae
  source 1..40: mol_type = genomic DNA
gctgggcgtcaccatcggtaataccgacggcaacgtgatt

SEQ ID NO: 52664 - DNA, 40 bp, Enterobacter cloacae
  source 1..40: mol_type = genomic DNA
gctgggcgtcaccatcggtgctaccgacggcaacgtgatt

SEQ ID NO: 52665 - DNA, 50 bp, Enterobacter cloacae; identical to SEQ ID NO: 52580
  source 1..50: mol_type = genomic DNA

SEQ ID NO: 52666 - protein, 589 aa, Klebsiella pneumoniae
MSAHVTILRNTVLPVKFNTMNRPRLYSYIRYSSERQGKGSSIERQKSYIAEMAKQIATEYDLEIFEEYQDLGVSAYKGKNVQEGALSDFIDQVESGLIPKGSFLLIESLDRFSRQNAMQAVNLFTSLLLNGITVITGIDKQVYRQTEVNTETLQQLMFSVMLFSRANEESSTKSHRTIASALSKIRRHQERKPGDPVVAIKELGSDKWWTDSSTGYVNPHPVLFPIAKKIIQLKQDGWSNRMILQHLKNNYDGPVIGNKKSKGIWNMQHCSRILEPAIYGRKVITVNNAEYVLDDYYPAIISKDEYEALKLQVGNKGFAPNRESNPEIPLLSGIGILHCAHCSCYMVKAKSTLKNHPHAYRYQCASRDLHQDCNKWGFRASTLERTILQLIADRIFLQTKYQPSGLEGKIADIQSQIENYVLAIGSAKSPEIINSLTSQIDQLEQEKQSLIVEKRLYDESIVQMNTEGWDKFRKFDIDDALNPLRTKIRANIKTVIMRVDCSRIDKKNNLFTITYRDQHKQRIVIENNSGWKKGKIYVEAQTINDIQILESEGLILHDHIDILINRDKFMTEAKKRLDHPRTLIDELTE

SEQ ID NO: 52667 - DNA, 50 bp, Klebsiella pneumoniae; identical to SEQ ID NO: 12417
  source 1..50: mol_type = genomic DNA

SEQ ID NO: 52668 - DNA, 40 bp, Klebsiella pneumoniae; identical to SEQ ID NO: 52443
  source 1..40: mol_type = genomic DNA

SEQ ID NO: 52669 - DNA, 40 bp, Klebsiella pneumoniae; identical to SEQ ID NO: 52614
  source 1..40: mol_type = genomic DNA

SEQ ID NO: 52670 - DNA, 50 bp, Klebsiella pneumoniae; identical to SEQ ID NO: 52580
  source 1..50: mol_type = genomic DNA

SEQ ID NO: 52671 - protein, 589 aa, Klebsiella pneumoniae; identical to SEQ ID NO: 12416

SEQ ID NO: 52672 - DNA, 50 bp, Klebsiella pneumoniae; identical to SEQ ID NO: 12417
  source 1..50: mol_type = genomic DNA

SEQ ID NO: 52673 - DNA, 40 bp, Klebsiella pneumoniae
  source 1..40: mol_type = genomic DNA
gctcggggtaaccatcggcaacaccgacggcaatatcata

SEQ ID NO: 52674 - DNA, 40 bp, Klebsiella pneumoniae
  source 1..40: mol_type = genomic DNA
gctcggggtaaccatcggcgccaccgacggcaatatcata

SEQ ID NO: 52675 - DNA, 50 bp, Klebsiella pneumoniae; identical to SEQ ID NO: 52580
  source 1..50: mol_type = genomic DNA

SEQ ID NO: 52676 - protein, 589 aa, Klebsiella oxytoca; identical to SEQ ID NO: 12416

SEQ ID NO: 52677 - DNA, 50 bp, Klebsiella oxytoca; identical to SEQ ID NO: 12417
  source 1..50: mol_type = genomic DNA

SEQ ID NO: 52678 - DNA, 40 bp, Klebsiella oxytoca
  source 1..40: mol_type = genomic DNA
tctgggcgtgactatcggcaacaccgacggcaacgttatc

SEQ ID NO: 52679 - DNA, 40 bp, Klebsiella oxytoca
  source 1..40: mol_type = genomic DNA
tctgggcgtgactatcggcgccaccgacggcaacgttatc

SEQ ID NO: 52680 - DNA, 50 bp, Klebsiella oxytoca; identical to SEQ ID NO: 52580
  source 1..50: mol_type = genomic DNA

SEQ ID NO: 52681 - protein, 589 aa, Enterobacter hormaechei; identical to SEQ ID NO: 52581

SEQ ID NO: 52682 - DNA, 50 bp, Enterobacter hormaechei
  source 1..50: mol_type = genomic DNA
gatcatacctatcgcacttcaatgaacactaaagtaaaatacacctcatt

SEQ ID NO: 52683 - DNA, 40 bp, Enterobacter hormaechei; identical to SEQ ID NO: 52588
  source 1..40: mol_type = genomic DNA

SEQ ID NO: 52684 - DNA, 40 bp, Enterobacter hormaechei; identical to SEQ ID NO: 52589
  source 1..40: mol_type = genomic DNA

SEQ ID NO: 52685 - DNA, 50 bp, Enterobacter hormaechei; identical to SEQ ID NO: 52580
  source 1..50: mol_type = genomic DNA

SEQ ID NO: 52686 - protein, 589 aa, Enterobacter hormaechei
MSAHVTILRNTVLPVKFNTMNRPRLYSYIRYSSERQGKGSSIERQKSYIAEMAKQIATEYDLEIFEEYQDLGVSAYKGKNVQEGALSDFIDQVESGLIPKGSFLLIESLDRFSRQNAMQAVNLFTSLLLNGITVITGIDKQVYRQTEVNTETLQQLMFSVMLFSRANEESSTKSHRTIASALSKIRRHQERKPGDPVVAIKELGSDKWWTDSSTGYVNPHPVLFPIAKKIIQLKQDGWSNRMILQHLKNNYDGPVIGNKKSKGIWNMQHCSRILEPAIYGRKVITVNNAEYVLDDYYPAIISKDEYEALKLQVGNKGFAPNRESNPEIPLLSGIGILHCAHCSCYMVKAKSTLKNHPHAYRYQCASRDLHQDCNKWGFRASTLERTILQLIADRIFLQTKYQPSGLEGKIADIQSQIENYVLAIGSAKSPEIINSLTSQIDQLEQEKQSLIVEKRLYDESIVQMNTEGWDKFRKFDIDDALNPLRTKIRANIKTVIMRVDCSRIDKKHNLFTITYRDQHKQRIVIENNSGWNKGKIYVEAQTINDIQILESEGLILHDHIDILINRDKFMTEAKKRLDHPRTLIDELTE

SEQ ID NO: 52687 - DNA, 50 bp, Enterobacter hormaechei; identical to SEQ ID NO: 12422
  source 1..50: mol_type = genomic DNA

SEQ ID NO: 52688 - DNA, 40 bp, Enterobacter hormaechei; identical to SEQ ID NO: 52588
  source 1..40: mol_type = genomic DNA

SEQ ID NO: 52689 - DNA, 40 bp, Enterobacter hormaechei; identical to SEQ ID NO: 52589
  source 1..40: mol_type = genomic DNA

SEQ ID NO: 52690 - DNA, 50 bp, Enterobacter hormaechei; identical to SEQ ID NO: 52580
  source 1..50: mol_type = genomic DNA

SEQ ID NO: 52691 - protein, 589 aa, Enterobacter hormaechei; identical to SEQ ID NO: 12416

SEQ ID NO: 52692 - DNA, 50 bp, Enterobacter hormaechei; identical to SEQ ID NO: 12422
  source 1..50: mol_type = genomic DNA

SEQ ID NO: 52693 - DNA, 40 bp, Enterobacter hormaechei
  source 1..40: mol_type = genomic DNA
gctcggtgtaaccatcggtaacaccgacggtaacgtgatt

SEQ ID NO: 52694 - DNA, 40 bp, Enterobacter hormaechei
  source 1..40: mol_type = genomic DNA
gctcggtgtaaccatcggtgccaccgacggtaacgtgatt

SEQ ID NO: 52695 - DNA, 50 bp, Enterobacter hormaechei; identical to SEQ ID NO: 52580
  source 1..50: mol_type = genomic DNA

SEQ ID NO: 52696 - protein, 589 aa, Enterobacter hormaechei; identical to SEQ ID NO: 52581

SEQ ID NO: 52697 - DNA, 50 bp, Enterobacter hormaechei; identical to SEQ ID NO: 52582
  source 1..50: mol_type = genomic DNA

SEQ ID NO: 52698 - DNA, 40 bp, Enterobacter hormaechei
  source 1..40: mol_type = genomic DNA
gctcggtgttaccatcggtaacaccgacggtaacgtgatt

SEQ ID NO: 52699 - DNA, 40 bp, Enterobacter hormaechei
  source 1..40: mol_type = genomic DNA
gctcggtgttaccatcggtgccaccgacggtaacgtgatt

SEQ ID NO: 52700 - DNA, 50 bp, Enterobacter hormaechei; identical to SEQ ID NO: 52580
  source 1..50: mol_type = genomic DNA

SEQ ID NO: 52701 - protein, 589 aa, Enterobacter hormaechei; identical to SEQ ID NO: 12416

SEQ ID NO: 52702 - DNA, 50 bp, Enterobacter hormaechei; identical to SEQ ID NO: 12422
  source 1..50: mol_type = genomic DNA

SEQ ID NO: 52703 - DNA, 40 bp, Enterobacter hormaechei; identical to SEQ ID NO: 52583
  source 1..40: mol_type = genomic DNA

SEQ ID NO: 52704 - DNA, 40 bp, Enterobacter hormaechei; identical to SEQ ID NO: 52584
  source 1..40: mol_type = genomic DNA

SEQ ID NO: 52705 - DNA, 50 bp, Enterobacter hormaechei; identical to SEQ ID NO: 52580
  source 1..50: mol_type = genomic DNA

SEQ ID NO: 52706 - protein, 589 aa, Klebsiella grimontii; identical to SEQ ID NO: 12416

SEQ ID NO: 52707 - DNA, 50 bp, Klebsiella grimontii; identical to SEQ ID NO: 12417
  source 1..50: mol_type = genomic DNA

SEQ ID NO: 52708 - DNA, 40 bp, Klebsiella grimontii
  source 1..40: mol_type = genomic DNA
cctcggcgtgactatcggcaacaccgacggcaacgttatc

SEQ ID NO: 52709 - DNA, 40 bp, Klebsiella grimontii
  source 1..40: mol_type = genomic DNA
cctcggcgtgactatcggcgccaccgacggcaacgttatc

SEQ ID NO: 52710 - DNA, 50 bp, Klebsiella grimontii; identical to SEQ ID NO: 52580
  source 1..50: mol_type = genomic DNA

SEQ ID NO: 52711 - protein, 589 aa, Enterobacter roggenkampii
MSAHVTILRNTVLPVKFNTMNRPRLYSYIRYSSERQGKGSSIERQKSYIAEMAKQIATEYDLEIFEEYQDLGVSAYKGKNVQEGALSDFIDQVESDLIPKGSFLLIESLDRFSRQNAMQAVNLFTSLLLNGITVITGIDKQVYRQTEVNTETLQQLMFSVMLFSRANEESSTKSHRTIASALSKIRRHQERKPGDPVVAIKELGSDKWWTDSSTGYVNPHPVLFPIAKKIIQLKQDGWSNRMILQHLKNNYDGPVIGNKKSKGIWNMQHCSRILEPAIYGRKVITVNNAEYVLDDYYPAIISKDEYEALKLQVGNKGFAPNRESNPEIPLLSGIGILHCAHCSCYMVKAKSTLKNHPHAYRYQCASRDLHQDCNKWGFRASTLERTILQLIADRIFLQTKYQPSGLEGKIADIQSQIENYVLAIGSAKSPEIINSLTSQIDQLEQEKQSLIVEKRLYDESIVQMNTEGWDKFRKFDIDDALNPLRTKIRANIKTVIMRVDCSRIDKKHNLFTITYRDQHKQRIVIENNSGWKKGKIYVEAQTINDIQILESEGLILHDHIDILINRDKFMTEAKKRLDHPRTLIDELTE

SEQ ID NO: 52712 - DNA, 50 bp, Enterobacter roggenkampii; identical to SEQ ID NO: 12422
  source 1..50: mol_type = genomic DNA

SEQ ID NO: 52713 - DNA, 40 bp, Enterobacter roggenkampii
  source 1..40: mol_type = genomic DNA
gctgggcgttaccatcggcaacactgacggcaacgtgatc

SEQ ID NO: 52714 - DNA, 40 bp, Enterobacter roggenkampii
  source 1..40: mol_type = genomic DNA
gctgggcgttaccatcggcgccactgacggcaacgtgatc

SEQ ID NO: 52715 - DNA, 50 bp, Enterobacter roggenkampii; identical to SEQ ID NO: 52580
  source 1..50: mol_type = genomic DNA

SEQ ID NO: 52716 - protein, 589 aa, Enterobacter kobei; identical to SEQ ID NO: 12416

SEQ ID NO: 52717 - DNA, 50 bp, Enterobacter kobei; identical to SEQ ID NO: 12422
  source 1..50: mol_type = genomic DNA

SEQ ID NO: 52718 - DNA, 40 bp, Enterobacter kobei
  source 1..40: mol_type = genomic DNA
gctgggcgtcactatcggtaataccgacggcaacgtgatt

SEQ ID NO: 52719 - DNA, 40 bp, Enterobacter kobei
  source 1..40: mol_type = genomic DNA
gctgggcgtcactatcggtgctaccgacggcaacgtgatt

SEQ ID NO: 52720 - DNA, 50 bp, Enterobacter kobei; identical to SEQ ID NO: 52580
  source 1..50: mol_type = genomic DNA

SEQ ID NO: 52721 - protein, 589 aa, Enterobacter chengduensis; identical to SEQ ID NO: 12416

SEQ ID NO: 52722 - DNA, 50 bp, Enterobacter chengduensis; identical to SEQ ID NO: 12417
  source 1..50: mol_type = genomic DNA

SEQ ID NO: 52723 - DNA, 40 bp, Enterobacter chengduensis
  source 1..40: mol_type = genomic DNA
gctgggcgtcaccatcggtaacaccgacggcaacgtgatt

SEQ ID NO: 52724 - DNA, 40 bp, Enterobacter chengduensis
  source 1..40: mol_type = genomic DNA
gctgggcgtcaccatcggtgccaccgacggcaacgtgatt

SEQ ID NO: 52725 - DNA, 50 bp, Enterobacter chengduensis; identical to SEQ ID NO: 52580
  source 1..50: mol_type = genomic DNA

SEQ ID NO: 52726 - protein, 589 aa, Klebsiella variicola
MSAHVTILRNTVLPVKFNTMNRPRLYSYIRYSSERQGKGSSIERQKSYIAEMAKQIATEYDLEIFEEYQDLGVSAYKGKNVQEGALSDFIDQVESGLIPKGSFLLIESLDRFSRQNAMQAVNLFTSLLLNGITVITGIDKQVYRQTEVNTETLQQLMFSVMLFSRANEESSTKSHRTIASALSKIRRHQERKPGDPVVAIKELGSDKWWTDSSTGYVNPHPVLFPIAKKIIQLKQDGWSNRMILQHLKNNYDGPVIGNKKSKGIWNMQHCSRILEPAIYGRKVITVNNAEYVLDDYYPAIISKDEYEALKLQVGNKGFAPNRESNPEIPLLSGIGILHCAHCSCYMVKAKSTLKNHPHAYRYQCASRDLHQDCNKWGFRASTLERTILQLIADRIFLQTKYQPSGLEGKIADIQSQIENYVLAIGSAKSPEIINSLTSQIDQLEQEKQSLIVEKRLYDESIVQMNTEGWDKFRKFDIDDALNHLRTKIRANIKTVIMRVDCSRIDKKHNLFTITYRDQHKQRIVIENNSGWKKGKIYVEAQTINDIQILESEGLILHDHIDILINRDKFMTEAKKRLDHPRTLIDELTE

SEQ ID NO: 52727 - DNA, 50 bp, Klebsiella variicola; identical to SEQ ID NO: 12417
  source 1..50: mol_type = genomic DNA

SEQ ID NO: 52728 - DNA, 40 bp, Klebsiella variicola; identical to SEQ ID NO: 52603
  source 1..40: mol_type = genomic DNA

SEQ ID NO: 52729 - DNA, 40 bp, Klebsiella variicola; identical to SEQ ID NO: 52604
  source 1..40: mol_type = genomic DNA

SEQ ID NO: 52730 - DNA, 50 bp, Klebsiella variicola; identical to SEQ ID NO: 52580
  source 1..50: mol_type = genomic DNA

SEQ ID NO: 52731 - protein, 589 aa, Klebsiella oxytoca
MSAHVTILRNTVLPVKFNTMNRPRLYSYIRYSSERQGKGSSIERQKSYIAEMAKQIATEYDLEIFEEYQDLGVSAYKGKNVQEGALSDFIDQVESGLIPKGSFLLIESLDRFSRQNAMQAVNLFTSLLLNGITVITGIDKQVYRQTEVNTETLQQLMFSVMLFSRANEESSTKSHRTIASALSKIRRHQERKPGDPVVAIKELGSDKWWTDSSTGYVNPHPVLFPIAKKIIQLKQDGWSNRMILQHLKNNYDGPVIGNKKSKGIWNMQHCSRILEPAIYGRKVITVNNAEYVLDDYYPAIISKDEYEALKLQVGNKGFAPNRESNPEIPLLSGIGILHCAHCSCYMVKAKSTLKNHPHAYRYQCASRDLHQDCNKWGFRASTLERTILQLIADRIFLQTKYQPSGLEGKIADIQSQLENYVLAIGSAKSPEIINSLTSQIDQLEQEKQSLIVEKRLYDESIVQMNTEGWDKFRKFDIDDALNPLRTKIRANIKTVIMRVDCSRIDKKHNLFTITYRDQHKQRIVIENNSGWKKGKIYVEAQTINDIQILESEGLILHDHIDILINRDKFMTEAKKRLDHPRTLIDELTE

SEQ ID NO: 52732 - DNA, 50 bp, Klebsiella oxytoca; identical to SEQ ID NO: 12417
  source 1..50: mol_type = genomic DNA

SEQ ID NO: 52733 - DNA, 40 bp, Klebsiella oxytoca
  source 1..40: mol_type = genomic DNA
cctcggcgtgacaatcggcaacaccgacggcaacgttatc

SEQ ID NO: 52734 - DNA, 40 bp, Klebsiella oxytoca
  source 1..40: mol_type = genomic DNA
cctcggcgtgacaatcggcgccaccgacggcaacgttatc

SEQ ID NO: 52735 - DNA, 50 bp, Klebsiella oxytoca; identical to SEQ ID NO: 52580
  source 1..50: mol_type = genomic DNA

SEQ ID NO: 52736 - protein, 589 aa, Raoultella ornithinolytica; identical to SEQ ID NO: 12416

SEQ ID NO: 52737 - DNA, 50 bp, Raoultella ornithinolytica; identical to SEQ ID NO: 12417
  source 1..50: mol_type = genomic DNA

SEQ ID NO: 52738 - DNA, 40 bp, Raoultella ornithinolytica
  source 1..40: mol_type = genomic DNA
gctgggcgtcactatcggcaacaccgacgggaacgtcatt

SEQ ID NO: 52739 - DNA, 40 bp, Raoultella ornithinolytica
  source 1..40: mol_type = genomic DNA
gctgggcgtcactatcggcgccaccgacgggaacgtcatt

SEQ ID NO: 52740 - DNA, 50 bp, Raoultella ornithinolytica; identical to SEQ ID NO: 52580
  source 1..50: mol_type = genomic DNA

SEQ ID NO: 52741 - protein, 589 aa, Klebsiella pneumoniae
MSAHVTILRNTVLPVKFNTMNRPRLYSYIRYSSERQGKGSSIERQKSYIAEMAKQIATEYDLEIFEEYQDLGVSAYKGKNVQEGALSDFIDQVESGLIPKGSFLLIESLDRFSRQNAMQAVNLFTSLLLNGITVITGIDKQVYRQTEVNTETLQQLMFSVMLFSRANEESSTKSHRTIASALSKIRRHQERKPGDPVVAIKELGSDKWWTDSSTGYVNPHPVLFPIAKKIIQLKHDGWSNRMILQHLKNNYDGPVIGNKKSKGIWNMQHCSRILEPAIYGRKVITVNNAEYVLDDYYPAIISKDEYEALKLQVGNKGFAPNRESNPEIPLLSGIGILHCAHCSCYMVKAKSTLKNHPHAYRYQCASRDLHQDCNKWGFRASTLERTILQLIADRIFLQTKYQPSGLEGKIADIQSQIENYVLAIGSAKSPEIINSLTSQIDQLEQEKQSLIVEKRLYDESIVQMNTEGWDKFRKFDIDDALNPLRTKIRANIKTVIMRVDCSRIDKKHNLFTITYRDQHKQRIVIENNSGWKKGKIYVEAQTINDIQILESEGLILHDHIDILINRDKFMTEAKKRLDHPRTLIDELTE

SEQ ID NO: 52742 - DNA, 50 bp, Klebsiella pneumoniae; identical to SEQ ID NO: 12417
  source 1..50: mol_type = genomic DNA

SEQ ID NO: 52743 - DNA, 40 bp, Klebsiella pneumoniae; identical to SEQ ID NO: 52443
  source 1..40: mol_type = genomic DNA

SEQ ID NO: 52744 - DNA, 40 bp, Klebsiella pneumoniae; identical to SEQ ID NO: 52614
  source 1..40: mol_type = genomic DNA

SEQ ID NO: 52745 - DNA, 50 bp, Klebsiella pneumoniae; identical to SEQ ID NO: 52580
  source 1..50: mol_type = genomic DNA

SEQ ID NO: 52746 - protein, 589 aa, Klebsiella pneumoniae
MSAHVTILRNTVLPVKFNTMNRPRLYSYIRYSSERQGKGSSIERQKSYIAEMAKQIATEYDLEIFEEYQDLGVSAYKGKNVQEGALSDFIDQVESGLIPKGSFLLIESLDRFSRQNAMQAVNLFTSLLLNGITVITGIDKQVYRQTEVNTETLQQLMFSVMLFSRANEESSTKSHRTIASALSKIRRHQERKPGDPVVAIKELGSDKWWTDSSTGYVNPHPVLFPIAKKIIQLKQDGWSNRMILQHLKNNYDGPVIGNKKSKGIWNMQHCSRILEPAIYRRKVITVNNAEYVLDDYYPAIISKDEYEALKLQVGNKGFAPNRESNPEIPLLSGIGILHCAHCSCYMVKAKSTLKNHPHAYRYQCASRDLHQDCNKWGFRASTLERTILQLIADRIFLQTKYQPSGLEGKIADIQSQIENYVLAIGSAKSPEIINSLTSQIDQLEQEKQSLIVEKRLYDESIVQMNTEGWDKFRKFDIDDALNPLRTKIRANIKTVIMRVDCSRIDKKHNLFTITYRDQHKQRIVIENNSGWKKGKIYVEAQTINDIQILESEGLILHDHIDILINRDKFMTEAKKRLDHPRTLIDELTE

SEQ ID NO: 52747 - DNA, 50 bp, Klebsiella pneumoniae; identical to SEQ ID NO: 12417
  source 1..50: mol_type = genomic DNA

SEQ ID NO: 52748 - DNA, 40 bp, Klebsiella pneumoniae; identical to SEQ ID NO: 52443
  source 1..40: mol_type = genomic DNA

SEQ ID NO: 52749 - DNA, 40 bp, Klebsiella pneumoniae; identical to SEQ ID NO: 52614
  source 1..40: mol_type = genomic DNA

SEQ ID NO: 52750 - DNA, 50 bp, Klebsiella pneumoniae; identical to SEQ ID NO: 52580
  source 1..50: mol_type = genomic DNA

SEQ ID NO: 52751 - protein, 589 aa, Citrobacter freundii; identical to SEQ ID NO: 12416

SEQ ID NO: 52752 - DNA, 50 bp, Citrobacter freundii; identical to SEQ ID NO: 12422
  source 1..50: mol_type = genomic DNA

SEQ ID NO: 52753 - DNA, 40 bp, Citrobacter freundii; identical to SEQ ID NO: 52643
  source 1..40: mol_type = genomic DNA

SEQ ID NO: 52754 - DNA, 40 bp, Citrobacter freundii; identical to SEQ ID NO: 52644
  source 1..40: mol_type = genomic DNA

SEQ ID NO: 52755 - DNA, 50 bp, Citrobacter freundii; identical to SEQ ID NO: 52580
  source 1..50: mol_type = genomic DNA

SEQ ID NO: 52756 - protein, 589 aa, Citrobacter freundii; identical to SEQ ID NO: 52581

SEQ ID NO: 52757 - DNA, 50 bp, Citrobacter freundii; identical to SEQ ID NO: 52582
  source 1..50: mol_type = genomic DNA

SEQ ID NO: 52758 - DNA, 40 bp, Citrobacter freundii; identical to SEQ ID NO: 52643
  source 1..40: mol_type = genomic DNA

SEQ ID NO: 52759 - DNA, 40 bp, Citrobacter freundii; identical to SEQ ID NO: 52644
  source 1..40: mol_type = genomic DNA

SEQ ID NO: 52760 - DNA, 50 bp, Citrobacter freundii; identical to SEQ ID NO: 52580
  source 1..50: mol_type = genomic DNA

SEQ ID NO: 52761 - protein, 589 aa, Citrobacter freundii; identical to SEQ ID NO: 12421

SEQ ID NO: 52762 - DNA, 50 bp, Citrobacter freundii; identical to SEQ ID NO: 12422
  source 1..50: mol_type = genomic DNA

SEQ ID NO: 52763 - DNA, 40 bp, Citrobacter freundii; identical to SEQ ID NO: 52643
  source 1..40: mol_type = genomic DNA

SEQ ID NO: 52764 - DNA, 40 bp, Citrobacter freundii; identical to SEQ ID NO: 52644
  source 1..40: mol_type = genomic DNA

SEQ ID NO: 52765 - DNA, 50 bp, Citrobacter freundii; identical to SEQ ID NO: 52580
  source 1..50: mol_type = genomic DNA

SEQ ID NO: 52766 - protein, 584 aa, Citrobacter freundii
MSAHVTILRNTVLPVKFNTMNRPRLYSYIRYSSERQGKGSSIERQKSYIAEMAKQIATEYDLEIFEEYQDLGVSAYKGKNVQEGALSDFIDQVESGLIPKGSFLLIESLDRFSRQNAMQAVNLFTSLLLNGITVITGIDKQVYRQTEVNTETLQQLMFSVMLFSRANEESSTKSHRTIASALSKIRRHQERKPGDPVVAIKELGSDKWWTDSSTGYVNPHPVLFPIAKKIIQLKQDGWSNRMILQHLKNNYDGPVIGNKKSKGIWNMQHCSRILEPAIYGRKVITVNNAEYVLDDYYPAIISKDEYEALKLQVGNKGFAPNRESNPEIPLLSGIGILHCAHCSCYMVKAKSTLKNHPHAYRYQCASRDLHQDCNKWGFRASTLERTILQLIADRIFLQTKYQPSGLEGKIADIQSQIENYVLAIGSAKSPEIINSLTSQIDQLEQEKQSLIVEKRLYDESIVQMNTEGWDKFRKFDIDDALNPLRTKIRANIKTVIMRVDCSRIDKKHNLFTITYRDQHKQRIVIENNSGWKKGKIYVEAQTINDIQILESEGLILHDHIDILINRDKFMTEAKKRLGKVRTSP

SEQ ID NO: 52767 - DNA, 50 bp, Citrobacter freundii; identical to SEQ ID NO: 12422
  source 1..50: mol_type = genomic DNA

SEQ ID NO: 52768 - DNA, 40 bp, Citrobacter freundii; identical to SEQ ID NO: 52643
  source 1..40: mol_type = genomic DNA

SEQ ID NO: 52769 - DNA, 40 bp, Citrobacter freundii; identical to SEQ ID NO: 52644
  source 1..40: mol_type = genomic DNA

SEQ ID NO: 52770 - DNA, 50 bp, Citrobacter freundii; identical to SEQ ID NO: 52580
  source 1..50: mol_type = genomic DNA

SEQ ID NO: 52771 - protein, 589 aa, Citrobacter freundii; identical to SEQ ID NO: 12416

SEQ ID NO: 52772 - DNA, 50 bp, Citrobacter freundii; identical to SEQ ID NO: 12417
  source 1..50: mol_type = genomic DNA

SEQ ID NO: 52773 - DNA, 40 bp, Citrobacter freundii
  source 1..40: mol_type = genomic DNA
gcttggcgtcactatcggtaacaccgacggtaacctgatt

SEQ ID NO: 52774 - DNA, 40 bp, Citrobacter freundii
  source 1..40: mol_type = genomic DNA
gcttggcgtcactatcggtgccaccgacggtaacctgatt

SEQ ID NO: 52775 - DNA, 50 bp, Citrobacter freundii; identical to SEQ ID NO: 52580
  source 1..50: mol_type = genomic DNA

SEQ ID NO: 52776 - protein, 589 aa, Citrobacter freundii
MSAHVTILRNTVLPVKFNTMNRPRLYSYIRYSSERQGKGSSIERQKSYIAEMAKQIATEYDLEIFEEYQDLGVSAYKGKNVQEGALSDFIAQVESGLIPKGSFLLIESLDRFSRQNAMQAVNLFTSLLLNGITVITGIDKQVYRQTEVNTETLQQLMFSVMLFSRANEESSTKSHRTIASALSKIRRHQERKPGDPVVAIKELGSDKWWTDSSTGYVNPHPVLFPIAKKIIQLKQDGWSNRMILQHLKNNYDGPVIGNKKSKGIWNMQHCSRILEPAIYGRKVITVNNAEYVLDDYYPAIISKDEYEALKLQVGNKGFAPNRESNPEIPLLSGIGILHCAHCSCYMVKAKSTLKNHPHAYRYQCASRDLHQDCNKWGFRASTLERTILQLIADRIFLQTKYQPSGLEGKIADIQSKIENYVLAIGSAKSPAIINSLTSQIDQLEQEKQSLIVEKRLYDESIVQMNTEGWDKFRKFDIDDALNPLRTKIRANIKTVIMRVDCSRIDKKHNLFTITYRDQHKQRIVIENNSGWKKGKIYVEAQTINDIQILESEGLILHDHIDILINRDKFMTEAKKRLEHPRTLLDELTE

SEQ ID NO: 52777 - DNA, 50 bp, Citrobacter freundii; identical to SEQ ID NO: 12422
  source 1..50: mol_type = genomic DNA

SEQ ID NO: 52778 - DNA, 40 bp, Citrobacter freundii
  source 1..40: mol_type = genomic DNA
gttaggcgtcaccatcggtaacacggacggtaacctgatt

SEQ ID NO: 52779 - DNA, 40 bp, Citrobacter freundii
  source 1..40: mol_type = genomic DNA
gttaggcgtcaccatcggtgccacggacggtaacctgatt

SEQ ID NO: 52780 - DNA, 50 bp, Citrobacter freundii; identical to SEQ ID NO: 52580
  source 1..50: mol_type = genomic DNA

SEQ ID NO: 52781 - protein, 589 aa, Escherichia coli; identical to SEQ ID NO: 12416

SEQ ID NO: 52782 - DNA, 50 bp, Escherichia coli; identical to SEQ ID NO: 12417
  source 1..50: mol_type = genomic DNA

SEQ ID NO: 52783 - DNA, 40 bp, Escherichia coli
  source 1..40: mol_type = genomic DNA
gctcggcgtcaccatcggtaataccgacggcaatatcatc

SEQ ID NO: 52784 - DNA, 40 bp, Escherichia coli
  source 1..40: mol_type = genomic DNA
gctcggcgtcaccatcggtgctaccgacggcaatatcatc

SEQ ID NO: 52785 - DNA, 50 bp, Escherichia coli; identical to SEQ ID NO: 52580
  source 1..50: mol_type = genomic DNA

SEQ ID NO: 52786 - protein, 589 aa, Citrobacter werkmanii; identical to SEQ ID NO: 52581

SEQ ID NO: 52787 - DNA, 50 bp, Citrobacter werkmanii; identical to SEQ ID NO: 52582
  source 1..50: mol_type = genomic DNA

SEQ ID NO: 52788 - DNA, 40 bp, Citrobacter werkmanii
  source 1..40: mol_type = genomic DNA
gcttggcgttaccatcggtaatactgacggtaacctgatc

SEQ ID NO: 52789 - DNA, 40 bp, Citrobacter werkmanii
  source 1..40: mol_type = genomic DNA
gcttggcgttaccatcggtgctactgacggtaacctgatc

SEQ ID NO: 52790 - DNA, 50 bp, Citrobacter werkmanii; identical to SEQ ID NO: 52580
  source 1..50: mol_type = genomic DNA

SEQ ID NO: 52791 - protein, 589 aa, Enterobacter cloacae; identical to SEQ ID NO: 12416

SEQ ID NO: 52792 - DNA, 50 bp, Enterobacter cloacae; identical to SEQ ID NO: 12417
  source 1..50: mol_type = genomic DNA

SEQ ID NO: 52793 - DNA, 40 bp, Enterobacter cloacae
  source 1..40: mol_type = genomic DNA
gctgggcgtcaccatcggtaacaccgacggcaacgtaatt

SEQ ID NO: 52794 - DNA, 40 bp, Enterobacter cloacae
  source 1..40: mol_type = genomic DNA
gctgggcgtcaccatcggtgccaccgacggcaacgtaatt

SEQ ID NO: 52795 - DNA, 50 bp, Enterobacter cloacae; identical to SEQ ID NO: 52580
  source 1..50: mol_type = genomic DNA

SEQ ID NO: 52796 - protein, 589 aa, Enterobacter soli; identical to SEQ ID NO: 12416

SEQ ID NO: 52797 - DNA, 50 bp, Enterobacter soli; identical to SEQ ID NO: 12422
  source 1..50: mol_type = genomic DNA

SEQ ID NO: 52798 - DNA, 40 bp, Enterobacter soli
  source 1..40: mol_type = genomic DNA
gctgggcgtgactatcggtaacaccgacggcaacgtgatc

SEQ ID NO: 52799 - DNA, 40 bp, Enterobacter soli
  source 1..40: mol_type = genomic DNA
gctgggcgtgactatcggtgccaccgacggcaacgtgatc

SEQ ID NO: 52800 - DNA, 50 bp, Enterobacter soli; identical to SEQ ID NO: 52580
  source 1..50: mol_type = genomic DNA

SEQ ID NO: 52801 - protein, 589 aa, Raoultella terrigena; identical to SEQ ID NO: 12416

SEQ ID NO: 52802 - DNA, 50 bp, Raoultella terrigena; identical to SEQ ID NO: 12417
  source 1..50: mol_type = genomic DNA

SEQ ID NO: 52803 - DNA, 40 bp, Raoultella terrigena
  source 1..40: mol_type = genomic DNA
gctcggggtaaccatcggcaataccgacggcaacgtgatt

SEQ ID NO: 52804 - DNA, 40 bp, Raoultella terrigena
  source 1..40: mol_type = genomic DNA
gctcggggtaaccatcggcgctaccgacggcaacgtgatt

SEQ ID NO: 52805 - DNA, 50 bp, Raoultella terrigena; identical to SEQ ID NO: 52580
  source 1..50: mol_type = genomic DNA

SEQ ID NO: 52806 - protein, 589 aa, Leclercia adecarboxylata
MSAHVTILRNTVLPVKFNTMNRPRLYSYIRYSSERQGKGSSIERQKSYIAEMAKQIATEYDLEIFEEYQDLGVSAYKGKNVQEGALSDFIDQVESGLIPKGSFLLIESLDRFSRQNAMQAVNLFTSLLLNGITVITGIDKQVYRQTEVNTETLQQLMFSVMLFSRANEESSTKSHRTIASALSKIRRHQERKPGDPVVAIKELGSDKWWTDSSSGYVNPHPVLFPIAKKIIQLKQDGWSNRMILQHLKNNYDGPVIGNKKSKGIWNMQHCSRILEPAIYGRKVITVNNAEYVLDDYYPAIISKDEYEALKLQVGNKGFAPNRESNPEIPLLSGIGILHCAHCSCYMVKAKSTLKNHPHAYRYQCASRDLHQDCNKWGFRASTLERTILQLIADRIFLQTKYQPSGLEGKIADIQSQIENYVLAIGSAKSPAIINSLTSQIDQLEQEKQSLIVEKRLYDESIVQMNTEGWDKFRKFDIDDALNPLRTKIRANIKTVIMRVDCSRIDKKHNLFTITYRDQHKQRIVIENNSGWKKGKIYVEAQTINDIQILESEGLILHDHIDILINRDKFMTEAKKRLDHPRTLIDELTE

SEQ ID NO: 52807 - DNA, 50 bp, Leclercia adecarboxylata; identical to SEQ ID NO: 12422
  source 1..50: mol_type = genomic DNA

SEQ ID NO: 52808 - DNA, 40 bp, Leclercia adecarboxylata
  source 1..40: mol_type = genomic DNA
gctgggtgtgactatcggcaacaccgacggcaacgtgatc

SEQ ID NO: 52809 - DNA, 40 bp, Leclercia adecarboxylata
  source 1..40: mol_type = genomic DNA
gctgggtgtgactatcggcgccaccgacggcaacgtgatc

SEQ ID NO: 52810 - DNA, 50 bp, Leclercia adecarboxylata; identical to SEQ ID NO: 52580
  source 1..50: mol_type = genomic DNA

SEQ ID NO: 52811 - protein, 514 aa, Shewanella inventionis
MKAYIYSRISTKIQKKGDGLDRQLELTHAYANSIGLEIQLDSFQDIASGYHGRQMQGRLGVFLDAIKTGKVNTPAALVVESLDRLGREHTMDALPRLIDIINSGVEVHEVSTGVVYNREDTHKIHIAIAVMERAHNESKVKALRAKQAYKTAREKASETGKVITSLVPVWMEVKDGKIELIPERAELIKRIFQMYINGCGGGVIAKTLTSENIEYPVYRDAAHKHKPVWNEQRIVRIIKSPSTYGAFVSTTNAHKDNILYDYYPAVITIDTFNKAQQIRINRVTTKTKTHAMQNIFTSLLVCGKCGYTYQPNMSNTTRNGIKVRMMYLRCSGRTGTGQCKAKAINLPDTEYTILNWFRSLRFSKLQVDKRDEISDKQAQITQLNEQAQNLLVLVSKGNSRAIAMYEDIEDQLTQAKAELFRLEDTRTKPQLERIETKLALDPENIDLRRLVNLELQKVINKIVINSDAKDINFEVHFKNESFGIKQIKGYRKSIKNASADSELPSGWHTQAQNI

SEQ ID NO: 52812 - DNA, 50 bp, Shewanella inventionis
  source 1..50: mol_type = genomic DNA
aactgtagttgctttattagcagcacgcgcataaacttacaactacagtt

SEQ ID NO: 52813 - DNA, 40 bp, Shewanella inventionis
  source 1..40: mol_type = genomic DNA
gacggtacactatcatggcacattaatcgacggcactgta

SEQ ID NO: 52814 - DNA, 40 bp, Shewanella inventionis
  source 1..40: mol_type = genomic DNA
gacggtacactatcatggcaaattaatcgacggcactgta

SEQ ID NO: 52815 - DNA, 50 bp, Shewanella inventionis
  source 1..50: mol_type = genomic DNA
aactattgaactcatattatgtgcaaaaccatatactgggcactacagtt

SEQ ID NO: 52816 - protein, 511 aa, Pseudoalteromonas lipolytica
MKKAYSYIRFSTKGQIEGRSLKRQLENAKAYADSNGLALQGLSFRDLGVSGYKGKNSSDGELGRFIEAVKDGVIEKGSYLLIESFDRMSRQPVETSLMLLMNIIDLGITVVTLMDKQVYKKGEMDMQSLMISLVSMSRAHEESATKSKRVGDAWHKKQSRAISEPMGSPLPAWLYYSDDRKEILVSQKKALIVKYIFLLSAEGYGRAAIVRRLNDEGISPIGSRATKWHLSYITKLLNGRTVLGEYHPHITNSLGQREATGEVIKDYYPAIIDEDLWYKSQAGIKSRRIGSTGSIKKGITRNIFSGFISCKCGSSVQFVNKGSSPKGGYYLVCSLARHGGGCKYVSHRYYYTQWVILIALQKLLTPYAKKPEDNSKEMSLEGELITLQKQIDELIQDIDENGFSTYISKAIRQKELRISEITRELEDIQAKKAIRDESLDITELTANINEQSERLKLHQHLKRQLKTIVLSPDKNTIDIFVNDGDDIHLSYDENTKVWSSGDGMSFKVEKA

SEQ ID NO: 52817 - DNA, 50 bp, Pseudoalteromonas lipolytica
  source 1..50: mol_type = genomic DNA
tgggtctattagtacaacaagataagtttatgatggtataatagacccat

SEQ ID NO: 52818 - DNA, 40 bp, Pseudoalteromonas lipolytica
  source 1..40: mol_type = genomic DNA
gcctggcgggcctaaaaaaagcaagttatggccacccgca

SEQ ID NO: 52819 - DNA, 40 bp, Pseudoalteromonas lipolytica
  source 1..40: mol_type = genomic DNA
gcctggcgggcctaaaaaactcaagttatggccacccgca

SEQ ID NO: 52820 - DNA, 50 bp, Pseudoalteromonas lipolytica
  source 1..50: mol_type = genomic DNA
tccctatattgcaacaacaaaatactttcaagatggggtcagagaccccc

SEQ ID NO: 52821 - protein, 458 aa, Staphylococcus epidermidis
MNYERSYLRSCQVSTLEQKEHGYSIEEQERKLKSFCEINDWCISDVFIDAGFSGAKRERPELQRMMKDIKRFNLVLVYKLDRLTRNVRDLLDLLEIFEQNNVAFRSATEVYDTSTAMGRLFVTLVGAMAEWERETIRERVMMGKRAAIKQGMILTPPPFYYDRVDNTYIPNDYKKVVLWAYDEVLKGISSKGIARKLNDSDIPPPNGKRWEDRTITRALRSPITRGHYTWGDVFIENSHEPIITEEMYQQIKERLEERINTKIVSHVSVFRGKFICPRCGGTLTMNTATRKRKKGYVTYKTYYCNTCKGKKKSFGFAENEALRVFRDYLSKLDLEKYEVKTKQKDNVVTIDIDKIMEQRKRYHKLYAKGLMQEEELFELIKETDETIAEYEKQKELAPRKTLNVDKIKKFKSVLLESWEIFSLEDKADFIKMAIKSINIEYVKLKNKHSIKINDIEFY

SEQ ID NO: 52822 - DNA, 50 bp, Staphylococcus epidermidis; identical to SEQ ID NO: 17362
  source 1..50: mol_type = genomic DNA

SEQ ID NO: 52823 - DNA, 40 bp, Staphylococcus epidermidis
  source 1..40: mol_type = genomic DNA
gtatggcggtacatgcattaatatcggatgtataccaact

SEQ ID NO: 52824 - DNA, 40 bp, Staphylococcus epidermidis
  source 1..40: mol_type = genomic DNA
gtatggcggtacatgcattgatatcggatgtataccaact

SEQ ID NO: 52825 - DNA, 50 bp, Staphylococcus epidermidis
  source 1..50: mol_type = genomic DNA
ctccctaagagtgaatactctcttgatttttatagtatttacttccttat

SEQ ID NO: 52826 - protein, 458 aa, Staphylococcus epidermidis
MNYERSYLRSCQVSTLEQKEHGYSIEEQERKLKSFCEINDWSVSDVFIDAGFSGAKRERPELQRMMNDIKRFDLVLVYKLDRLTRNVRDLLDLLEVFEQNNVAFRSATEVYDTSTAMGRLFVTLVGAMAEWERETIRERVMMGKRAAIKQGMILTPPPFYYDRVDNTYIPNDYKKVVLWAYDEVMKGNSSKAIARKLNDSDIPPPNSKRWEDRTITRALRNPITRGHYTWGDVFIENSHEPIITEEMYQQIKERLEERINTKIVSHVSVFRGKFICPRCGGTLTLNTVTRKRKKGYVTYKTYYCNTCKTKKQSFGFSENEALRVFRDYLSKLDLEKYEVKTKQKDDVVTIDIDKIMEQRKRYHKLYAKGLMQEEELFELIKETDETIAEYEKQKELVTRKSLDIDKIKKFKNALLESWKIFSLEDKADFIKMAIKSIDIEYVKIKNRHSIEIKDIEFY

SEQ ID NO: 52827 - DNA, 50 bp, Staphylococcus epidermidis; identical to SEQ ID NO: 17362
  source 1..50: mol_type = genomic DNA

SEQ ID NO: 52828 - DNA, 40 bp, Staphylococcus epidermidis; identical to SEQ ID NO: 26028
  source 1..40: mol_type = genomic DNA

SEQ ID NO: 52829 - DNA, 40 bp, Staphylococcus epidermidis
  source 1..40: mol_type = genomic DNA
gtatggcggtacatgcattgatatcggatgtataccgact

SEQ ID NO: 52830 - DNA, 50 bp, Staphylococcus epidermidis; identical to SEQ ID NO: 52825
  source 1..50: mol_type = genomic DNA

SEQ ID NO: 52831 - protein, 559 aa, Pseudomonas salomonii
MARLISYLRMSTTEQLKGFSLERQRKLIADFASRNGLSLDESHSIEDIGRSSFSDDAEQRQLARFFTDLEAGKFSPGDVFALENIDRLTRRGPFDALMKVNTILSKGLKLAIISDKEQKTIDDINDVYTIINLSIDAKRSHGESKNKSNKGLSNWEEKRQLAARHGVAMTAQAPAWLDTETFYIMDESKGIQVKRRRYVLNPEKSETVRLIFELFQNGNGSLKIKNILNERNIPTFKGAEYWEPSIISKILRNPATHGFYQPQKQGTGKRDLIPAGEPIHDYFPAIVSLETFEQCQRITAANSTRKGRKGKLFTNLFTGLLKCVDCGGPVHLLNPGIDKRAKVPKSVNYIVCKKGKFTRECILKRLRYDDFEAVMLNAIQEINLADVLNENNPLEQLIKQIRAIETKIEKNQKLLENFQKSFVETGDLPAFMIEAAKNAETANKALEIERIELQAQISQLNVYNANIENAIDELKNNGTYETRAKINLLLHDIIKTINIDFELLDYAIIFKNGVKRFINDGIVQNVFTTKTGSDQYYSEIEEILNHPTTQQTKQHAKKI

SEQ ID NO: 52832 - DNA, 50 bp, Pseudomonas salomonii
  source 1..50: mol_type = genomic DNA
cacaggttaaaagctaccgtcttgatcaagtcgggcgtataatacctgta

SEQ ID NO: 52833 - DNA, 40 bp, Pseudomonas salomonii
  source 1..40: mol_type = genomic DNA
ccacgggtaagccgatttgatcagcaccgcattgccgggg

SEQ ID NO: 52834 - DNA, 40 bp, Pseudomonas salomonii
  source 1..40: mol_type = genomic DNA
ccacgggtaagccgatttggccagcaccgcattgccgggg

SEQ ID NO: 52835 - DNA, 50 bp, Pseudomonas salomonii
  source 1..50: mol_type = genomic DNA
aaaaggttaaaatgtccactcttggccacgtgtggtagctcacacctgta

SEQ ID NO: 52836 - protein, 552 aa, Pseudomonas synxantha
MARLISYLRMSTSEQMKGFSLERQRKLIADFALRYGLSLDESHAIEDIGNSAFSDDANQKQLARFFTDLEAGKFSPGDVFALENIDRLTRRGPIDAILKVNTILSKGLKLAIISTNEQKIIDDINDVFTIINLSIDASRSHSESKNKSNKGLSNWEEKRQLAASHGVAMTAQAPAWLDTESFYVMDESKGIQIKRRRYVLNPEKAETVRLIFELFQNGNGSLKIKNILNERNIPTFKGAEYWEPSIISKILRNPATHGFYQPQKQGTGKRDLIPAGEPIHDYFPAIVSLETFEQCQHITAANSTRKGRKGKLFTNLFTGLLKCVDCGGPVHLLNPGIDKRAKVPKSINYIVCKKGKFTRECILKRLRYDDFEAVMLNAIQEINLADVLNENNPLEQLIKQIRAIETKIEKNQKLLENFQKSFIETGDLPAFMIEAAKNAETANKALEIERIELQAQISQLNVYNANIENAIEELKNNGTYETRAKINLLLHEIIKSINIDFELLDFSIIFKNGVKRFVNDGIIQNVYIAKSFSEQSFREFEEILNYTPPEKF

SEQ ID NO: 52837 - DNA, 50 bp, Pseudomonas synxantha
  source 1..50: mol_type = genomic DNA
cacaggttaaacgctaccgtcttgatcaagtcgggcgtataatacctgta

SEQ ID NO: 52838 - DNA, 40 bp, Pseudomonas synxantha
  source 1..40: mol_type = genomic DNA
cccggggaatgccgtgctgatcaagtcggcttacccgtgg

SEQ ID NO: 52839 - DNA, 40 bp, Pseudomonas synxantha
  source 1..40: mol_type = genomic DNA
cccggggaatgccgtgctggccaagtcggcttacccgtgg

SEQ ID NO: 52840 - DNA, 50 bp, Pseudomonas synxantha; identical to SEQ ID NO: 52835
  source 1..50: mol_type = genomic DNA

SEQ ID NO: 52841 - protein, 624 aa, Eisenbergiella massiliensis
MKARKTDKGKITALYERLSRDDDLTGDSNSIINQKKLLEDYAREHGFTNCVHFTDDGWSGANFERPNWKRMIAGIESGEIGYVLVKDLSRVGRDYLQVGFYTEVMFKERGVRFIAIANGVDSDKRESSEFAPFLNIMNEWYVRDSSRKITSVLHARGMSGKHTNSHCIYGYKKDPNDKDHWIIDEEAAEVVRRIYRMALESKGPYEIARILALEKVERPSYYLAQRGVGKHQSNFNPAERYTWRGGTVADILSKPEYMGHTVNFRTYKESYKDKRSRMTPKEDLVIFENTQEAIIDKETWERVQSLRKTIRRTDTIGAANPLTGLMFCADCGAKMYNHRGGAGLARDWAGRPNGRKRPERDEYNCSRYDLGNQHYNRYCTTHLIRTAVVNELLLEAIKEVCDYALNNEAAFMEQVCSASSERQVKAAKAIRQRKQRSEKRADELSRLIRKLYEDNVNGRLSDKLFEQMLHDFEAELEGLTDSITQDQQELDRISRETVNAEKFLALVKKYTDFSELTPAMINEFVEKILVHQAEGKGASRTQEVEIFFNFIGKVEIPRKEIELTEEEKAALAEQERRRAKKAEYNRRYMEKKRRQWKEQQEREKEQQEALELPAASTEKGERIA

SEQ ID NO: 52842 - DNA, 50 bp, Eisenbergiella massiliensis
  source 1..50: mol_type = genomic DNA
aacacccttgacaaagcgtatcagaagttatatgctatgaaagggggata

SEQ ID NO: 52843 - DNA, 40 bp, Eisenbergiella massiliensis
  source 1..40: mol_type = genomic DNA
ccgccaaaatcctacacggaagataccctgctttccgcta

SEQ ID NO: 52844 - DNA, 40 bp, Eisenbergiella massiliensis
  source 1..40: mol_type = genomic DNA
ccgccaaaatcctacacggctgataccctgctttccgcta

SEQ ID NO: 52845 - DNA, 50 bp, Eisenbergiella massiliensis
  source 1..50: mol_type = genomic DNA
aacacccttctttgatgatctcatctgttatatactatctaatgctgatg

SEQ ID NO: 52846 - protein, 623 aa, Ruminococcus lactaris
MKARKTDKGKITALYERLSRDDDLTGDSNSIINQKKLLEDYAREHGFTNCVHFTDDGWSGANFERPNWKRMIAGIESGEIGYVLVKDLSRVGRDYLQVGFYTEVMFKERGVRFIAIANGVDSDKRESSEFAPFLNIMNEWYVRDSSRKITSVLRARGMSGKHTNSHCIYGYKKDPNDKDHWIIDEEAAEVVRRIYRMALESKGPYEIARILALEKVERPSYYLAQRGVGKHQSNFNPAERYTWRGGTVADILSKPEYMGHTVNFRTYKESYKDKRSRMTPKEDLVIFENTQEAIIDKETWERVQSLRKTIRRTDTIGAANPLTGLMFCADCGAKMYNHRGGAGLARDWAGRPNGRKRPERDEYNCSRYDLGNQHYDRYCTTHLIRTAVVNELLLEAIKEVCDYALNNEAAFMEQVCSASSERQAKAAKAIRQRKQRSEKRADELSRLIRKLYEDNVNGRLSDKLFEQMLHDFEAELESLTESVTQDEQELDRISWETVNAEKFLALVKKYTDFSELTPAMINEFVEKILVHQAEGKGASRTQEVEIFFNFVGKVEIPHEEIVLTEEEKAALAEQERRRAKKAEYNRRYMEKKRRQWREQREREQEQKPHELPPVADKKGEKSA

SEQ ID NO: 52847 - DNA, 50 bp, Ruminococcus lactaris
  source 1..50: mol_type = genomic DNA
aaacacccttgacaaaacgtatcagaagttatatgctatgaaagggggat

SEQ ID NO: 52848 - DNA, 40 bp, Ruminococcus lactaris
  source 1..40: mol_type = genomic DNA
gctacataagaactatgcagaggtggaactcctgtgggct

SEQ ID NO: 52849 - DNA, 40 bp, Ruminococcus lactaris
  source 1..40: mol_type = genomic DNA
gctacataagaactatgcatcggtggaactcctgtgggct

SEQ ID NO: 52850 - DNA, 50 bp, Ruminococcus lactaris
  source 1..50: mol_type = genomic DNA
aaacacccttctttgatgatctcatctgttatatactatctaatgctgat

SEQ ID NO: 52851 - protein, 485 aa, Eggerthella lenta
MAVAAIYARYSSAGQREESIEDQVRVCTEAAERAGDNVVRVYQDRASTGTSVDHRHGFLQMVADGQRGAFEVLYVYKTDRFARNRYDSAVYKMRLRRAGVRVVSATERIEDGPDGILLESVLEGMAEYYSANLSENVRRGLDGNAEKCRHNGVRTFGYELGADGYFALDEAEAPVVLGCFEAYADGMGMPEICAEYSWVRTKMGKPLTVSMLSRMLRNEKYRGRYSYGGHVVEGGMPRIVSDELFYAVQRMLAAATRRRRGVMDYLLTGKLFDEEGHRYQSQSGHGKSGRKYTYYKCPATGHAVRQDALEAEVARGVAGILEADDGAVAAIVAMVLAEQDEAAAGDVAAMDAMRSRLAENAREQSRMVDLAAKTGAVDAVAAKMAELSEERGALERDLAEMERACPLLSGEEVEFWVRRVMGRRDPLEAVRLFVSRVVLDRARGEILVEFTFDGGRGGGGGGGGEKPNPRPGDCPGGGSDRLRMA

SEQ ID NO: 52852 - DNA, 50 bp, Eggerthella lenta
  source 1..50: mol_type = genomic DNA
gggttcggataggttgcgaatggcggggcgctggcaacttattgagaaca

SEQ ID NO: 52853 - DNA, 40 bp, Eggerthella lenta
  source 1..40: mol_type = genomic DNA
cgcgtaagtcgcaactggcggagagctggggattcgaacc

SEQ ID NO: 52854 - DNA, 40 bp, Eggerthella lenta
  source 1..40: mol_type = genomic DNA
cgcgtaagtcgcaactggctaagagctggggattcgaacc

SEQ ID NO: 52855 - DNA, 50 bp, Eggerthella lenta
  source 1..50: mol_type = genomic DNA
gggtggggacttcttgagaatgactagtcacatgcagctcctagagtaca

SEQ ID NO: 52856 - protein, 541 aa, Blautia massiliensis
MQTTEIRETWTALYARLSLDDGNVGESMSIQSQKAILTRKAEELGIYNYQFYVDDGYSGTNFNRPSFQQMIADIEAGKVTCVITKDLSRLGRNYLESSAYIEVFFPKHQVRYIAVNDGVDSANSGEMDITPFKNILNEFYSRDVSKKVKSGKYIRASQGKFMGTHAPFGYQKDPEDKNHLIADEETAPTVRYIFQLALQGMGNNKIGKILYEQKIPKPAYYKPEYFGKFLVKEDDAYNWKQETIIRILRNPLYKGYFWVQKYDKKHFKQETRGYIPMSERTIIPSDHDALVDEHTWDTVQEILDRHTKVKPCTSGYENKFRGILKCADCGSTLMVHTDGRNKEKPVIERTFYQCRIYRVRGTGFCSQHRINADDLEELVLADIQTHAKRVIKNREKFMRKVLGQMDTTAANNRENIQKKLEKLEKKLLESDRQFIKLYEDFTKQLVSEQQFRMLSTHFEQEKKETTEEIEKLKTTADNLKDSTCKAEQLANEMVECAEIKELTTAIVNRLIEKIEVSEPQTIDGEKVQNIRIFYKFVGEIN

SEQ ID NO: 52857 - DNA, 50 bp, Blautia massiliensis
  source 1..50: mol_type = genomic DNA
tgtatctataattcaagagccattgagttcgctcaagtattataggcata

SEQ ID NO: 52858 - DNA, 40 bp, Blautia massiliensis
  source 1..40: mol_type = genomic DNA
ggagacagtaaccgcaatcgaattatcaccggaaggaacg

SEQ ID NO: 52859 - DNA, 40 bp, Blautia massiliensis
  source 1..40: mol_type = genomic DNA
ggagacagtaaccgcaatcttattatcaccggaaggaacg

SEQ ID NO: 52860 - DNA, 50 bp, Blautia massiliensis
  source 1..50: mol_type = genomic DNA
tgtatctaccattgaagagacattttgacccctgtagagatttagacaaa

SEQ ID NO: 52861 - protein, 541 aa, Blautia massiliensis
MQTTEIRETWTALYARLSLDDGNVGESMSIQSQKAILTRKAEELGIYNYQFYVDDGYSGTNFNRPSFQQMIADIEAGKVTCVITKDLSRLGRNYLESGAYIEVFFPKHQVRYIAVNDGVDSANSGEMDITPFKNILNEFYSRDVSKKVKSGKYIRASQGKFMGTHAPFGYQKDPEDKNHLIADEETAPTVRYIFQLALQGMGNNKIGKILYEQKIPKPAYYKPEYFGKFLVKEDDAYNWKQETIIRILRNPLYKGYFWVQKYDKKHFKQETRGYIPMSERTIIPSDHDALVDEHTWDTVQEILDRHTKVKPCTSGYENKFRGILKCADCGSTLMVHTDGRNKEKPVIERTFYQCRIYRVRGTGFCSQHRINADDLEELVLADIQTHAKRVIKNREKFMRKVLGQMDTTAANNRENIQKKLEKLEKKLLESDRQFIKLYEDFTKQLVSEQQFRMLSTHFEQEKKETTEEIEKLKTTADNLKDSTCKAEQLANEMVECAEIKELTTAIVNRLIEKIEVSEPQTIDGEKVQNIRIFYKFVGEIN

SEQ ID NO: 52862 - DNA, 50 bp, Blautia massiliensis; identical to SEQ ID NO: 52857
  source 1..50: mol_type = genomic DNA

SEQ ID NO: 52863 - DNA, 40 bp, Blautia massiliensis; identical to SEQ ID NO: 52858
  source 1..40: mol_type = genomic DNA

SEQ ID NO: 52864 - DNA, 40 bp, Blautia massiliensis; identical to SEQ ID NO: 52859
  source 1..40: mol_type = genomic DNA

SEQ ID NO: 52865 - DNA, 50 bp, Blautia massiliensis; identical to SEQ ID NO: 52860
  source 1..50: mol_type = genomic DNA

SEQ ID NO: 52866 - protein, 598 aa, Escherichia coli; identical to SEQ ID NO: 20256

SEQ ID NO: 52867 - DNA, 50 bp, Escherichia coli
  source 1..50: mol_type = genomic DNA
tagtgtttataacttccataatgcctgctatcgtatagctaaccacacta

SEQ ID NO: 52868 - DNA, 40 bp, Escherichia coli; identical to SEQ ID NO: 20258
  source 1..40: mol_type = genomic DNA

SEQ ID NO: 52869 - DNA, 40 bp, Escherichia coli; identical to SEQ ID NO: 20259
  source 1..40: mol_type = genomic DNA

SEQ ID NO: 52870 - DNA, 50 bp, Escherichia coli
  source 1..50: mol_type = genomic DNA
tagtgttaaccacttaaataatgcatgcaaacctaacagaacctacacaa

SEQ ID NO: 52871 - protein, 521 aa, Escherichia coli
MKVQVWCYARISTLKQIDGFGIQRQINTINQFLQCVELDHRLPFTLDTQNVTQMVSEGKSAFRGGNWKPSTKLGQYRKMVMDGVLSDSVLIVENVDRLVRIEPYRAVEILSGLINRGTTILEIETGMTYSRYIPESLSVLTMQINRANGESKRKSIMMQKSHANRYGKVSKVRPRWFDVVEIDGVKQYRPNETAKAIQRMYNDYINGIGAAHIVRTYGNTDNGKPWTLVTVLRALSDKRVADDARYPPIVDKELYDRVQAIKAATNKKGNTHQKNMLNIFSGMSRCPICNQSIIVKRNSHGNLFTVCLGKRNNKTCEARSFSYFALERPLLTAIRGLDFSEVYKHEDKNVLTLRDQWIQNERDIAAFRERLNKASRYEKFAILDELEIMNREQEELTIRLKSVDVPKDIQLTFDDDKLDLDTNYRIELNNRIKKLIQHINIVREDVSKSSYTIYCTIKYWTDVISHLVIIDVNIKRTGTGGTNTLTTTLRSVSSLNIDGTVSGNPDSDAWEYWKSFLDNLK

SEQ ID NO: 52872 - DNA, 50 bp, Escherichia coli
  source 1..50: mol_type = genomic DNA
cggtgtacattattgcatgattacgaacagttatgatatgatgtacacca

SEQ ID NO: 52873 - DNA, 40 bp, Escherichia coli; identical to SEQ ID NO: 34068
  source 1..40: mol_type = genomic DNA

SEQ ID NO: 52874 - DNA, 40 bp, Escherichia coli
  source 1..40: mol_type = genomic DNA
cggtcccatcagcagcaatagacagtcagtcgtaccaccg

SEQ ID NO: 52875 - DNA, 50 bp, Escherichia coli
  source 1..50: mol_type = genomic DNA
cacagcaatataaaggataattagagactgttatgaacaactgtacacca

SEQ ID NO: 52876 - protein, 521 aa, Escherichia coli
MKVQVWCYARISTLKQIDGFGIQRQINTINQFLQCVELDHRLPFTLDTQNVTQMVSEGKSAFRGGNWKPSTKLGQYRKMVMDGVLSDSVLIVENVDRLVRIEPYRAVEILSGLINRGTTILEIETGMTYSRYIPESLSVLTMQINRANGESKRKSIMMQKSHANRYGKVSKVRPRWFDVVEINGVKQYRPNETAKAIQRMYNDYINGIGAAHIVRTYGNTDNGKPWTLVTVLRALSDKRVADDARYPPIVDKELYDRVQAIKAATNKKGNTHQKNMLNIFSGMSRCPICNQSIIVKRNSHGNLFTVCLGKRNNKTCEARSFSYFALERPLLTAIRGLDFSEVYKHEDKNVLTLRDQWIQNERDIAAFRERLNKASRYEKFAILDELEIMNREQEELTIRLKSVDVPKDIQLTFDDDKLDLDTNYRIELNNRIKKLIQHINIVREDVSKSSYTIYCTIKYWTDVISHLVIIDVNIKRTGTGGTNTLTTTLRSVSSLNIDGTVSGNPDSDAWEYWKSFLDNLK

SEQ ID NO: 52877 - DNA, 50 bp, Escherichia coli; identical to SEQ ID NO: 52872
  source 1..50: mol_type = genomic DNA

SEQ ID NO: 52878 - DNA, 40 bp, Escherichia coli; identical to SEQ ID NO: 34068
  source 1..40: mol_type = genomic DNA

SEQ ID NO: 52879 - DNA, 40 bp, Escherichia coli; identical to SEQ ID NO: 52874
  source 1..40: mol_type = genomic DNA

SEQ ID NO: 52880 - DNA, 50 bp, Escherichia coli; identical to SEQ ID NO: 52875
  source 1..50: mol_type = genomic DNA

SEQ ID NO: 52881 - protein, 461 aa, Glutamicibacter soli
MRAGIYARISHDPYETTLGVQRQIEDCTREAKRRGWEVVDQFVDNDVSATRSKVRPEYERMMQAVKDRHIDALIVWDIDRLTRTPRELEDIIDLADTMNLSMANIGGEIDLSTPQGKMTARIKGSVARHESDQLSRRLKRAYQQRAIAGKPHSFPGFGFQRVERDGDVWDIPHPENAAIVNEAARRYVAGESLRSICQDFMSRGIHGPRTDNWTTTTLRQIMQRPANIGLRQHKGEIVGKANADPIMTEALYNQVMARLNDPERIKNSYGRTPNYLLTAIAVCGLCGGKMRMTRERVFNGKRYPDQYNCKVCFKVRRKREPVDELVTAVLVARLQDPKILAALAKDTTGELPRLRERVDELTARLDVAADNFADGLITGEQLRRINGKIMPELDDAKRRVGHLQGTNPVTQFIGANAAERWHKAPLEIQRQAIQELMTVTIMPAGSGGRFDPEQIKIEWKV

SEQ ID NO: 52882 - DNA, 50 bp, Glutamicibacter soli
  source 1..50: mol_type = genomic DNA
gaaagtcttatctaaatttccgtacctgtcaactttcaattggactattc

SEQ ID NO: 52883 - DNA, 40 bp, Glutamicibacter soli
  source 1..40: mol_type = genomic DNA
cgaaatctccatgctggtgcccatcatcttcggcgtgctg

SEQ ID NO: 52884 - DNA, 40 bp, Glutamicibacter soli; identical to SEQ ID NO: 52883
  source 1..40: mol_type = genomic DNA

SEQ ID NO: 52885 - DNA, 50 bp, Glutamicibacter soli
  source 1..50: mol_type = genomic DNA
gaaagtctagagataatttcaggaccaatcacaattaagtaggatgattc

SEQ ID NO: 52886 - protein, 468 aa, Staphylococcus sciuri
MKVAIYCRVSTLEQSREGHSIDEQRKRLKAFCEVQDWKIYDEYIDPGFSGGNTTRPGLDKLMNDLDKIDLILVYKLDRLTRSVKDLMNLLEIFEKNNVSFRSATEVFDTTNAFGKLFITLVGAMAEWERSTIAERTKMGRQAATQKGIYTTGPPFYYDKVDGKLVPNEKREIADYIIKRALEGISIRGITEELTLSKYSPPKGKVWDRTTVRYVLTSPVSRGHTKIGDVLVENTHEPIMDEETYQLIMEKTRSRTRTKKRSHTTIFRNKIVCHQCGKKLTLNTWRRKRKDGSYRYNASYICEKCQKNKEVSSFSLQKELVENAFISYLSKADFKEDELDINKKTEHIEIIDGDKILKQREKYQQAYSLELITLDEFTKRMNETQKAYKLYEEQLEELNKRKSEDIKIDEVIELRDTIINSWQLLSESDKESLVRSSVKNIYYSFIEGSGYGKNRIPNDLIVNHIDFYR

SEQ ID NO: 52887 - DNA, 50 bp, Staphylococcus sciuri
  source 1..50: mol_type = genomic DNA
agtgggggtaacggtggaacgtttgggaaatactctcctttaatcccgct

SEQ ID NO: 52888 - DNA, 40 bp, Staphylococcus sciuri
  source 1..40: mol_type = genomic DNA
tatggggggtggaacgtttggaaattggacaccaacagct

SEQ ID NO: 52889 - DNA, 40 bp, Staphylococcus sciuri
  source 1..40: mol_type = genomic DNA
tatggggggtggaacgtttagaaattggacaccaacagct

SEQ ID NO: 52890 - DNA, 50 bp, Staphylococcus sciuri
  source 1..50: mol_type = genomic DNA
agttggggtagtgcaggaaaattgagaaaataccatccgggaataccggt

SEQ ID NO: 52891 - protein, 521 aa, Pseudomonas mediterranea
MIKATTTKATKTKGKPRAKAYSYLRFSSPEQQKGDSFARQTRMALEYAARHGLELDESLTFQDLGVSAYRGLNAEAGRLADFLEAVREGLVPRGSYLLVEALDRLSRLTPRKAMRVLEDIVEEGITLVTLNDGREYTVETLNDDPTSLLIAIVLFMRANEESATKSRRLTSAWEGKRARISDKALTSRTPAWIRLNKETGALELIPERAEIVRRIFDLYAKGVGHNLIAGTLNREGVPCFGSAAHWHRTYIKKILNNESVVGTIIPHRYIYQDGRNVRVPLEPVTGYYPPVIDGATFADAQKRGESPAKQRTGSLANVLAGLAKCPQCGHTMTRVQKGDPNKGGVPKMVCTRAKAGAGCVYKSVPYHQVEDAIYANTSYLVGTAPSGKPGLDDELSQLETHLEVTRAAIDNLLTDLATAPSRIISQRVRELEVSMDQTQARRDELLDELLAASGPVLMKRLRELEAALEVNPRDTARANAALRLVISSVVIDYDRGQLDFTWKHGGESSIVYAMPAQEAAE

SEQ ID NO: 52892 - DNA, 50 bp, Pseudomonas mediterranea
  source 1..50: mol_type = genomic DNA
aaagggtctttaagagacaaccttagcaggttattttcaaaagacccagt

SEQ ID NO: 52893 - DNA, 40 bp, Pseudomonas mediterranea
  source 1..40: mol_type = genomic DNA
accgggtggcccgctgaacagcaggttgtgcgcgccggcg

SEQ ID NO: 52894 - DNA, 40 bp, Pseudomonas mediterranea; identical to SEQ ID NO: 52893
  source 1..40: mol_type = genomic DNA

SEQ ID NO: 52895 - DNA, 50 bp, Pseudomonas mediterranea
  source 1..50: mol_type = genomic DNA
agacggtctctacgggacaaaattagcagagtttttgagggagacctggt

SEQ ID NO: 52896 - protein, 452 aa, Listeria seeligeri; identical to SEQ ID NO: 39176

SEQ ID NO: 52897 - DNA, 50 bp, Listeria seeligeri
  source 1..50: mol_type = genomic DNA
tttagtacctcattatctctcgctggacggagaacaaatgagtaactaaa

SEQ ID NO: 52898 - DNA, 40 bp, Listeria seeligeri; identical to SEQ ID NO: 21013
  source 1..40: mol_type = genomic DNA

SEQ ID NO: 52899 - DNA, 40 bp, Listeria seeligeri
  source 1..40: mol_type = genomic DNA
ttttggttcaagctacgatatacggaaagagggaaccaag

SEQ ID NO: 52900 - DNA, 50 bp, Listeria seeligeri
  source 1..50: mol_type = genomic DNA
tttactgccttttcatctctggttatatgtggaacatttttataataaaa

SEQ ID NO: 52901 - protein, 483 aa, Bacillus megaterium
MRTAVYVRVSTEEQAKEGYSIRAQTERLKAYCLSQGWEIVDFYIDDGQSAKDMERTNLKRMIQHIEQGLIECVLVYKLDRLTRSVLDLYKLLEIFDAHGCKFKSATEVYDTTTAMGRMFITIVAALAQWERENLSERVRMGMEQKAREGQWVINMAPFGYELDKKNKSLIINDKEAAIVTRIFNMYLSGKGMKKIATELNAVNIPTKTGKTWSDNKIGYILKNPTYVGTIRYNYRVHNDQYFEVENAVPAIIDRVTFEKVQSVATARKKVHPKAATSEFIFSGTIKCAKCGAPFSGKYGYSKRGEKIHRPRSYYCSKQILGLCTQRNISERFIEHHFLKYLQDIEIDQDQIKNVEPTNEQKDIQQQIMLLEKDLRAIEQRRKKWQYAWVNNMIDDDDFAARMEEENQTEVKIQEELNNIQPVANSMDPVEFKTILKDIRTNWNSLTAIEKKMMLQMLVKKMVVDKISPKPKVDSVEIVEIEFN

SEQ ID NO: 52902 - DNA, 50 bp, Bacillus megaterium
  source 1..50: mol_type = genomic DNA
cattgtcctattatcaaaacagaatgttctgtcatgataataggacactt

SEQ ID NO: 52903 - DNA, 40 bp, Bacillus megaterium; identical to SEQ ID NO: 29308
  source 1..40: mol_type = genomic DNA

SEQ ID NO: 52904 - DNA, 40 bp, Bacillus megaterium
  source 1..40: mol_type = genomic DNA
catcgttgtcaaaaccaagtatccggtaagcgctgctctc

SEQ ID NO: 52905 - DNA, 50 bp, Bacillus megaterium
  source 1..50: mol_type = genomic DNA
tattttcactctcttaatagagaatattctctcatgcatattggacattt

SEQ ID NO: 52906 - protein, 514 aa, Lentzea guizhouensis
MAKTPRREMGRTLIDTAPDQLVWILSARESRTEADRAADDGKVDHQLSDLRKFVGNIGGRIAKEVPEANVSSFKRKRVLLPDGTYGYRVVRPDWESILTSLRRGEANALACVDLDRATRDPRLLEDVIDAVELYGVYVVSMTGNIDLSTDHGISAARSTVNQRNDESRNTSRRVAVGKRKAAAKGKNHGGPNRSYGWRKDRVTLHKRESAHILAAVPRIIAGALTPLTLAKEWNDRKIPTVKGGEWRAATIRNMFLRPRMCGKVVYREEILMDENNEPVRGQWEPMMTDSQWDAVVAQWTPVNSDKSDRTRLGSRGTGFRTNTLLSPFVRCGKCKARMIGSRRPSSQGEMAKYYLCPSKGQGGCGGVARLAAPVDEYITALVIADQERMASHKVEDLPPWPRRKELDDLEARINESTRRYEAGKYRAERYFPSLSRMESDLAVLRREHREYETQREGIKTVVANLAQEWEKPAFTMEQRQAAIARSLTAVIIAPVGKGKKFNPEQITPVWREIR

SEQ ID NO: 52907 - DNA, 50 bp, Lentzea guizhouensis
  source 1..50: mol_type = genomic DNA
gagttcactagaggcgccttagttgtcgccaaggatcttttagtgcacac

SEQ ID NO: 52908 - DNA, 40 bp, Lentzea guizhouensis
  source 1..40: mol_type = genomic DNA
cctgcggtacttcgtcgcggtcgccgaggagttgcacttc

SEQ ID NO: 52909 - DNA, 40 bp, Lentzea guizhouensis
  source 1..40: mol_type = genomic DNA
cctgcggtacttcgtcgcgatcgccgaggagttgcacttc

SEQ ID NO: 52910 - DNA, 50 bp, Lentzea guizhouensis
  source 1..50: mol_type = genomic DNA
gtgttcactaaccgtgccttgggcatcgctaaccatgcctcactgcagac

SEQ ID NO: 52911 - protein, 573 aa, Nocardia farcinica
MTDNTTTGPQIAVSYLRVSTTRQMDTGADVDAEGNSIATQREANNAKAARMGAIIEKEFVEPGASAQTIDKRPVFKQLLAYLGEHPEVSLVIIYMRSRAFRNLGDAVITKRRLEAMGVKLVSAKEDFGEGIMADAMEAVTDIINEVQVRMSGEDIKVKMRHKAQMGGTNGRAPIGYRNVRLDHAGRQVNGIAVDEERAPLIKQAFELYATGDYSIDRLQETMADLGLKARPQGRGGTKQLSRSHLHRILSDPYYIGIVRYKGETFPGRHQPIISADLFERVQKVIEDRSARGQRDRVLYHYLKGLLYCERCRANGRTSRLVYTEAKGNGGNYAYYLCLARQRGECDLPHLPVPDVEWYVLDHYAKLGLPPKFLDYIREAIDRAMADAQAHVRGLHVTYRKKLDKLAQQEERLLDLAADGDLAPDKIRVRLRKIQAERTRAQQGLDETGEQLELGARKLQQYLDLLDDPQSLYVRAPEDGRRDLNTASFRKLWLDDAGVVTDELTPAISELHEAARAFTRHNSTSEADCATDNQQGPDQGETPKLPGDSREFRLDHRFRLADMFRVGSSKNVLV

SEQ ID NO: 52912 - DNA, 50 bp, Nocardia farcinica
  source 1..50: mol_type = genomic DNA
tgtcggttcgagtaagaacgttctggtgcacacactgggacggtactcag

SEQ ID NO: 52913 - DNA, 40 bp, Nocardia farcinica
  source 1..40: mol_type = genomic DNA
cgacccgaacgggagagatggtgccgagtgtgggactcga

SEQ ID NO: 52914 - DNA, 40 bp, Nocardia farcinica
  source 1..40: mol_type = genomic DNA
cgacccgaacgggagagatcttgccgagtgtgggactcga

SEQ ID NO: 52915 - DNA, 50 bp, Nocardia farcinica
  source 1..50: mol_type = genomic DNA
tattgtttcttaccagagtgttctctagtaaaccctatcttggtattcag

SEQ ID NO: 52916 - protein, 574 aa, Pseudomonas synxantha
MKRKCYSYVRFSHKKQELGTSFARQSDIQHFVEKHNLIVDTKLEDLGVSAFRGKNSQKGQLGDFIDLVENGLIEENSILLIENFDRLSRQKVIKSTQIFINLLNRGVDIAVLDTGKIYSKNTLLSSDFFIAVIEFERANAESARKSDFTSAAWNIHRSEMRNNKSVKTKKTPSWIGVSGVVKARPGDEPARFFIIENEARKIRKIFELALFKGLSETARAVNEWLEPDEKKYSIHQIQYLLKNKKVIGEHQPMKFHESESGEMKLMPEGPTIYDYYPAIIDKEIFEEVQEKISGRKPFSGRFNKSRLNIFQGFINCYHCAGTIRYMDKSSTERSNKHYFVCTNSMSGKCVLGKRLTYNASEAMQFFFEKTDRLNLSEIFENDENILRLNNSIKDAERALKNTNHQLEQLKKQIREMLRTGKNISDTLNEMLIEFETFQREQNNTLKKLKNEKETSVAQIEVSKNFNQENILELLNDKSAEATRKRININNHLKQIVENIQFFCRGYSKKNPMTGVEDKRSTLIPTMIVKFKNGAVRVIVENEMIKEVGDSSGGAELYLQILEDMHQKMTLKKLQ

SEQ ID NO: 52917 - DNA, 50 bp, Pseudomonas synxantha
  source 1..50: mol_type = genomic DNA
gagtatccttttacagaatagatacacctgtgttacgctataagacactc

SEQ ID NO: 52918 - DNA, 40 bp, Pseudomonas synxantha
  source 1..40: mol_type = genomic DNA
ccgcgcatagcagtagatgcaaccatgctcgcagccgcga

SEQ ID NO: 52919 - DNA, 40 bp, Pseudomonas synxantha
  source 1..40: mol_type = genomic DNA
ccgcgcatagcagtagatggcaccatgctcgcagccgcga

SEQ ID NO: 52920 - DNA, 50 bp, Pseudomonas synxantha
  source 1..50: mol_type = genomic DNA
gtatgtcctgagacagaagaaatagccccattttacagaagaagaaaccc

SEQ ID NO: 52921 - protein, 550 aa, Streptococcus dysgalactiae
MSKEKIKVYLYTRVSTSIQIEGYSLEAQKSRMKAFAIYNDYEIVGEYEDAGKSGKSIEGRIQFNRMMEDIKSGKDGVSFVLVFKLSRFARNAADVLSTLQIMQDYGVNLICVEDGIDSSKDAGKLMISVLSAVAEIERENIRIQTMEGRIQKAREGKWNGGFAPYGYKLEDGKLFINEEEALAIRTIFDQYVNTTIGANGISKYLENHGIRKIPRQNGKNPLFDAGLIRKILKNPVYNGKIAFGRRTLEKVHGTRNEYKQVEQDEYLISEGIHEAIVSDEVWQAAQVKLKSQAKKYEHVNKGKDTRTHLLSGIVKCPICGVGMFGNKCIKKKKDGTKYKDFYYYGCKHRQMIRGHKCTFSKQIREELLDDAVAEVIVKIVSNPKFASMMQEKINMKVDTSEIEKEIDNYQKELRKSHSTKFKLIEEIDNLDVDDKHYKRRKQDLDDRLYRMYDKIEELESLLIDAKAKKQTIEAEKLTGDNIYKVLIYFDKLYKVMNDVERRQLITALISEIQVYEEKQPNGQWLKSITFKLPIIDDDLNISLDNDEQVE

SEQ ID NO: 52922 - DNA, 50 bp, Streptococcus dysgalactiae
  source 1..50: mol_type = genomic DNA
agtttggacaatgatgaacaagttgagactatagcgttgatacaaaagat

SEQ ID NO: 52923 - DNA, 40 bp, Streptococcus dysgalactiae; identical to SEQ ID NO: 52013
  source 1..40: mol_type = genomic DNA

SEQ ID NO: 52924 - DNA, 40 bp, Streptococcus dysgalactiae
  source 1..40: mol_type = genomic DNA
tccacagacgcatcatgtgaggtgcgtagtgttgctacaa

SEQ ID NO: 52925 - DNA, 50 bp, Streptococcus dysgalactiae
  source 1..50: mol_type = genomic DNA
agtttggaccagcctgggcaacatagcaagaccgcgcctctacaaaaaat

SEQ ID NO: 52926 - protein, 566 aa, Streptococcus dysgalactiae
MGEYKDIEKYIEVNAMSKEKTKVYLYTRVSTSIQIDGYSLEAQKSRMKAFALYNDYEIVGEYEDAGKSGKSIEGRIQFTRMMEDIKSGKDGVSFVLVFKLSRFARNAADVLSTLQTMQDFGVNLICVEDGIDSSKDAGKLMISVLSAVAEIERENIRVQTMEGRIQKAREGKWNGGFAPYGYQLIDGKLIINEEEAIAIRTIFDQYVNTTIGANGLSKYLENHGIRKIPRQNGKNPLFDAGLIRKILKNPVYNGKIAFGRRTLEKVHGTRNEYKQVEQDEYLIAEGIHEAIISDELWQAAQVKLKSQAKKYEHVNKGKDTRTHLLSGIVKCPICGVGMFGNKCIKKKKDGTKYKDFYYYGCKHRHMIRGHKCTYNKQIREELLDDAVAEVIIKIVSNPKFASMMQEKINMKVDTSEIEKEIDNYHKELRKSHSTKFKLIEEIDNLDADDKHYKRRKQDLDDRLYRMYDKIEDLESLLIDAKAKKQTIEAEKLTGDNIYKILIYFDKLYKVMNDVERRQLITALISEIQIYEEKQPNGQWLKSITFKLPIIDEDLNIGLDNNEQVEC

SEQ ID NO: 52927 - DNA, 50 bp, Streptococcus dysgalactiae
  source 1..50: mol_type = genomic DNA
ttggacaataatgagcaagttgagtgcatagcgttgatacaaagagtgaa

SEQ ID NO: 52928 - DNA, 40 bp, Streptococcus dysgalactiae
  source 1..40: mol_type = genomic DNA
acagacgcatcatgtggagtgcgtagtgttgctacaacga

SEQ ID NO: 52929 - DNA, 40 bp, Streptococcus dysgalactiae
  source 1..40: mol_type = genomic DNA
acagacgcatcatgtggagtacgtagtgttgctacaacga

SEQ ID NO: 52930 - DNA, 50 bp, Streptococcus dysgalactiae
  source 1..50: mol_type = genomic DNA
ttgtccaattatatgcaagcttagtacatgttgttaaataaaagattcaa

SEQ ID NO: 52931 - protein, 461 aa, Mycobacteroides abscessus; identical to SEQ ID NO: 51336

SEQ ID NO: 52932 - DNA, 50 bp, Mycobacteroides abscessus; identical to SEQ ID NO: 51337
  source 1..50: mol_type = genomic DNA

SEQ ID NO: 52933 - DNA, 40 bp, Mycobacteroides abscessus; identical to SEQ ID NO: 51888
  source 1..40: mol_type = genomic DNA

SEQ ID NO: 52934 - DNA, 40 bp, Mycobacteroides abscessus
  source 1..40: mol_type = genomic DNA
cagcgcctcgtgctgcacgaacgcgatcgtggctgcaccc

SEQ ID NO: 52935 - DNA, 50 bp, Mycobacteroides abscessus
  source 1..50: mol_type = genomic DNA
aggtaaccttctagttaggtctttaataagagtttcccaagcagatacct

SEQ ID NO: 52936 - protein, 550 aa, Mycobacterium marinum
MDRALIAVRLSRVTDATTSPERQLAACQELCVRRGYEVVGIAEDLDVSAGSTSPFDRPQLGDWLTNRQGDFDVLVFFRADRIVRRLFDLADLIRWCRDHSVTLVSATESYFDLSTDFGDIIALLVAKVAEMELAAISERTSSAFRHNLKAGKYCGGTPPWGYLPDDKTGEWRLVPDPDQVPVIREVVDRVLNGEPLRSVAHGLTERGILTPRDRFAQHQGREIKGYEWHSGGLKRSLTSPTLLGYAVTREPLLDVQGRMLRTPAGKKRFGPESVVRNDDGSPVVRSEPIVTREVFDRLAVELADRENRKEPTKRSSGLLLQIVQCGVCGRPAYRLKGGPGRKPRYRCASAQQKRPCGNKSIALDYADAAIEGVIMRMIGESERLERVWDSGSDHSAELAEINETLADLTSLIGSGVYRAGTSQRAALDKRIGDLAARQAELSAAAVKPAGWTWKPTGEKFGGWWARQDTTARNVWLRSMNVRMEFWCSTGPNGRVGVDRVNLDLGDLFKLTEQLEATGPVAEWQSVLTALRAAGAHGLTVKPDGTVTVTD

SEQ ID NO: 52937 - DNA, 50 bp, Mycobacterium marinum
  source 1..50: mol_type = genomic DNA
agggtgtaaagctagacaatcgaatacccggctgtgtacgtttacaacta

SEQ ID NO: 52938 - DNA, 40 bp, Mycobacterium marinum
  source 1..40: mol_type = genomic DNA
gggcatgtccaccgtcgaatatgctttgggcacaatcgca

SEQ ID NO: 52939 - DNA, 40 bp, Mycobacterium marinum
  source 1..40: mol_type = genomic DNA
gggcatgtccaccgtcgaagttgctttgggcacaatcgca

SEQ ID NO: 52940 - DNA, 50 bp, Mycobacterium marinum
  source 1..50: mol_type = genomic DNA
aggctgtaggagcagacaattggtgtctcagctgcaggcgatcacaacta

SEQ ID NO: 52941 - protein, 561 aa, Paenibacillus polymyxa; identical to SEQ ID NO: 5491

SEQ ID NO: 52942 - DNA, 50 bp, Paenibacillus polymyxa
  source 1..50: mol_type = genomic DNA
tacgtgataatgttgcataatatcttaaaaatgggatacattatcacgta

SEQ ID NO: 52943 - DNA, 40 bp, Paenibacillus polymyxa
  source 1..40: mol_type = genomic DNA
agccgggatgcataatattttgcttatgggaccgccaggg

SEQ ID NO: 52944 - DNA, 40 bp, Paenibacillus polymyxa
  source 1..40: mol_type = genomic DNA
agccgggatgcataatattgagcttatgggaccgccaggg

SEQ ID NO: 52945 - DNA, 50 bp, Paenibacillus polymyxa
  source 1..50: mol_type = genomic DNA
taggtgatatacaagcaaataattgaaagagtgggagagtgaatcatgtg

SEQ ID NO: 52946 - protein, 571 aa, Brevibacillus thermoruber
MSGEIDYSKDWTMYYIRIEVRAAMDTRETIAAYVRVSTKSTDQLTSFEGQRAFFEQEYGDKYRVLIYADRGLSGTSLRRREQFEQMLYDAGLRRKYADTDEWEPDPSREPLFRRILVRNTSRFARNVLVVGILRALRANGVYVHFLDKGIDTKDEDWEFVFNLFMNFDQQESIDKSKKVRAGLKMSAQRGQIYTADRLFGYKYYPGENRLEIIPEEAAIVRELFDLYERGEGIRRILNIFREKGYRTREGREFQKSTISRMLGNEKYAGILVRNKYDSGIVFQKHRTHRLRPREEWVIHEGVIPAIIDREQFERVQAIRDGKVHTGLQRGVHKGRSLYAGKIRCGKCGANYRRNVDNGRFYYNCATKKARGLAACDSPNVNEARLNEIVSEVTAELPGIIERNKTSTLERLAVLREELAASIDQDKSALVAELNKQADDLRQKKTRLLDLYLDGSFDKEMLAEKTTEIDRQLTALTARIAEASRTNDEIMMEIARIDQYIERVRTLKARDYTEEEVREMVRFDVMFNRGEVFVSINALDEVTATRQTLVDALPKYAAAIKATRFGVVKSIR

SEQ ID NO: 52947 - DNA, 50 bp, Brevibacillus thermoruber
  source 1..50: mol_type = genomic DNA
tgctggacaatgtaccacaacgtgctaagaatgtggtacaaaatcctggt

SEQ ID NO: 52948 - DNA, 40 bp, Brevibacillus thermoruber
  source 1..40: mol_type = genomic DNA
cgccggatttcataacgtgctgctggtcggccctcccggc

SEQ ID NO: 52949 - DNA, 40 bp, Brevibacillus thermoruber
  source 1..40: mol_type = genomic DNA
cgccggatttcataacgtgccgctggtcggccctcccggc

SEQ ID NO: 52950 - DNA, 50 bp, Brevibacillus thermoruber
  source 1..50: mol_type = genomic DNA
ttctcgtcagccatccacatcctgccatcagtgtgggatgcaatggtggt

SEQ ID NO: 52951 - protein, 478 aa, Caldibacillus thermoamylovorans
MKVAAYLRVSTDEQAEKGNSLTEQRERLEAYAKVMGWDTPIFYIDDGYSAGSLKRPNLQKLLKDVEHKKVSVIITTKLDRLSRNLLDLLQLIKYMESNDCNYVSATESFDTSTAAGRMVLHLLGVFAEFERGRTSERVKDNMSSLARNTDKALSGPCFGFDIVDGKYILNAKEAKYGLRMVEMAENGYGTRSIAQWLNSLGITTKRGKEWDSTSVRRLLRTETIAGIRVFNKRKKDSNGKIVMRPKEEWIINRNNHKGFITPERFDQLQNILDARKLNKHHENETYLLTGLIKCGHCGSTMKGSTARHKRSGGKVYEYHRYICSSYVTKYGCKHHFAHRDELEQEVIKQIELITKSSSKDIEVKVAISADQEEIKEIERTLKELDQQMLRQIEAFGKGLIEEEDLKKSTVYVKEQRTLLRNQLESLKQIDTSKALKEKAELLLPDIKSLDRKKAKTTIAKLIDSLVLTDGNLDITWRI

SEQ ID NO: 52952 - DNA, 50 bp, Caldibacillus thermoamylovorans
  source 1..50: mol_type = genomic DNA
tttatgtctttaaatacaatcggatcaccttttatatttaacgacataac

SEQ ID NO: 52953 - DNA, 40 bp, Caldibacillus thermoamylovorans
  source 1..40: mol_type = genomic DNA
atacaaatcggtaatcggatcacctttagcttggatataa

SEQ ID NO: 52954 - DNA, 40 bp, Caldibacillus thermoamylovorans; identical to SEQ ID NO: 52953
  source 1..40: mol_type = genomic DNA

SEQ ID NO: 52955 - DNA, 50 bp, Caldibacillus thermoamylovorans
  source 1..50: mol_type = genomic DNA
gtcatgtctcggctaacaatctgatcaagttctatatatgtctacataca

SEQ ID NO: 52956 - protein, 540 aa, Cronobacter sakazakii; identical to SEQ ID NO: 47771

SEQ ID NO: 52957 - DNA, 50 bp, Cronobacter sakazakii; identical to SEQ ID NO: 47772
  source 1..50: mol_type = genomic DNA

SEQ ID NO: 52958 - DNA, 40 bp, Cronobacter sakazakii; identical to SEQ ID NO: 26313
  source 1..40: mol_type = genomic DNA

SEQ ID NO: 52959 - DNA, 40 bp, Cronobacter sakazakii; identical to SEQ ID NO: 26314
  source 1..40: mol_type = genomic DNA

SEQ ID NO: 52960 - DNA, 50 bp, Cronobacter sakazakii
  source 1..50: mol_type = genomic DNA
attagttttgagataatggtaatttttcctttgaattaggaaagataaat

SEQ ID NO: 52961 - protein, 471 aa, Listeria seeligeri
MTVGIYIRVSTEEQANEGYSISAQKEKLKAYCTAQGWTEFKFYVDEGKSAKDMNRPLLQELIAHIKKGLIDTVLVYKLDRLTRSVVDLHNLLSVFDEHNCSFKSATEVYDTASAMGRFFITIISSVAQFERENTSERVAFGMAEKVRQGEYIPLAPWGYDKGVDGKLKVNEEEKELFLHVVNLILTGYSLRQACDYLTNIGVKTRRSNDIWKVSTLIWILKNPAVYGAIKWNGEIYENTHEALIDKVAYDKLMKILSLRSKSKSSRRGHTQHIFKGKLICYSCGKKLTGLRTKYTNQEKEVTYNNNYRCISCKERRLPTVQISERKIEKAFLEYISNYTLKKAKVTSKKLDSNLRKQEMILKEIINLQKKREKYQKAWAADLMEDDEFSKLMNQTKKEINEAEARKSEFDVSMFASPEEITKRNSILREMKTNWSSLSTAEKIDFVSMFIEAIEYVKDESNKAVVTKIRFL

SEQ ID NO: 52962 - DNA, 50 bp, Listeria seeligeri
  source 1..50: mol_type = genomic DNA
tataggctttttgtcaagtacagactagtgtacttgacaaaagcactata

SEQ ID NO: 52963 - DNA, 40 bp, Listeria seeligeri
  source 1..40: mol_type = genomic DNA
ctcgatattactgtaaccacttgtatatttatatcccatc

SEQ ID NO: 52964 - DNA, 40 bp, Listeria seeligeri
  source 1..40: mol_type = genomic DNA
ctcgatattactgtaaccaactgtatatttatatcccatc

SEQ ID NO: 52965 - DNA, 50 bp, Listeria seeligeri
  source 1..50: mol_type = genomic DNA
tttaggtttgagggcagatacaggacagtttacttaggcacagaccaata

SEQ ID NO: 52966 - protein, 538 aa, Microbacterium profundi
MTTVLLDSAQVKPPPFRWTGPETPLPGTRPVFLYLRLSRAHGDSRDAIERQRLDLTRKLAAEGGWTVMGEYVDRDSASAYARTKRPGWRALNAGIASGRVRAVAFWKLDRTLRIASRCLEWVTSCQQQGVTLLSHQDSTEELNSVTAAAKLSTGVKALLAEAETDTMSERQRAAKRHAAQAGFINGGRRPFGWQPGPRVTDHAGRTGRRLEPHPVEQQALKDAVALVLAGAGLREVAVHWQSRYGITGPEGGLVSEQKVRAALISPRMVGYRQHHLPPHRRGVTVDPLDHIARTPDGEPVISQEPVCDLATWHRIQAALRSRSTGARNGWGTRAWLLTGLLRCPCGGPLAGVAQPQKPDADGHRVVRYVYRCKANRRDGAGSCTGGASITAPAAEQYVIDWLFEFFSSDRLDAHNKKAESTNAEAVARVDAELAVAGDELDALRSKASSLAVGSELHQIVTGMIARVLERIANLNEERAALTIEHPAPLTHEQLVAVWPTLNNESRRTLLRQLIHHIDLAPGRGGPVERLNIVLHAEE

SEQ ID NO: 52967 - DNA, 50 bp, Microbacterium profundi
  source 1..50: mol_type = genomic DNA
ggtgtactttccattccttgctgaggctcgcaagatcactattgcaccct

SEQ ID NO: 52968 - DNA, 40 bp, Microbacterium profundi
  source 1..40: mol_type = genomic DNA
ggatcctgttcctcgacgaggcggcggaattctcgcgcgt

SEQ ID NO: 52969 - DNA, 40 bp, Microbacterium profundi; identical to SEQ ID NO: 52968
  source 1..40: mol_type = genomic DNA

SEQ ID NO: 52970 - DNA, 50 bp, Microbacterium profundi
  source 1..50: mol_type = genomic DNA
ggtgtcatattttctccttgtggaggctcgcaaaagatcctttcaacccc

SEQ ID NO: 52971 - protein, 589 aa, Klebsiella michiganensis; identical to SEQ ID NO: 47751

SEQ ID NO: 52972 - DNA, 50 bp, Klebsiella michiganensis
  source 1..50: mol_type = genomic DNA
ttatacctattacacttcagtgaacactaaggtaaactacatcccattaa

SEQ ID NO: 52973 - DNA, 40 bp, Klebsiella michiganensis
  source 1..40: mol_type = genomic DNA
tgggcgtgactatcggcaataccgacggcaacgttatcga

SEQ ID NO: 52974 - DNA, 40 bp, Klebsiella michiganensis
  source 1..40: mol_type = genomic DNA
tgggcgtgactatcggcaattccgacggcaacgttatcga

SEQ ID NO: 52975 - DNA, 50 bp, Klebsiella michiganensis
  source 1..50: mol_type = genomic DNA
ttatagcaacttctcttcattgaattctcagcttgtcactttctcagtaa

SEQ ID NO: 52976 - protein, 610 aa, Mesorhizobium erdmanii
MGPPTLGGMNSAPNPLAYSYIRMSTDIQLKGDSLRRQQQSSKAYADQNGLELVEDFKLEDIGVSAFKGANVSSGALGKFLALVKGGEIARGSYLLVESLDRISRQQVLDSIPVFFDIIKSGINVVTLADAHLYRAGETNFADIMYSVMILGRAYEESKTKSMRVGEAWRNKRNKASEKKLTKVAPAWLTLREDRSVFDIIKERADVVQQIFDFADAGHGSFVITRRLNQSDVPTFTKSDGWHESYVTKILNNRAVLGEFQPHRYDELGERIASGDPIRSYFPRIVDEDQFLRVQAARRRRLVEGAGRKGPEYRNLFSKIAKCDYCGAPMRFVHKGRPPKGTQALKCTNAVRNLGCESVSWKYSDFETSFLYFVKEVDLTAILQAAAQDSGQAMLQQRMAALEEKVHQLQVKRERIFEMLDDPGSSTTFIKGKLEECESEISKEQQQIEQLQGQLLASQPMPSITALELKSLIDAIQDMTASDIFDRRAVVANRLRSMIRSLRVASDGSQPKAKRIEHFLSSTGVDPEERRRLLDQIQWSNEHAQRFQRTFSVVLADGISRHVVVKSDDPTDFIAEVLVGKDGAISGSDRGMPIGWSDGLDDVFDEPASAQ

SEQ ID NO: 52977 - DNA, 50 bp, Mesorhizobium erdmanii
  source 1..50: mol_type = genomic DNA
ctgaaattaatccgcctcacgatccagatgctgaagcggattaattttat

SEQ ID NO: 52978 - DNA, 40 bp, Mesorhizobium erdmanii
  source 1..40: mol_type = genomic DNA
gcccggcaaggtcggcattcagatcgtcggactgcccgac

SEQ ID NO: 52979 - DNA, 40 bp, Mesorhizobium erdmanii
  source 1..40: mol_type = genomic DNA
gcccggcaaggtcggcattatgatcgtcggactgcccgac

SEQ ID NO: 52980 - DNA, 50 bp, Mesorhizobium erdmanii
  source 1..50: mol_type = genomic DNA
ctgaactaattattcctcataaacattctgcttaagactatcaattgtat

SEQ ID NO: 52981 - protein, 577 aa, Pseudomonas aeruginosa; identical to SEQ ID NO: 21171

SEQ ID NO: 52982 - DNA, 50 bp, Pseudomonas aeruginosa
  source 1..50: mol_type = genomic DNA
tgattctatttattgcacctaatggtcaatagtggcataattagaagcat

SEQ ID NO: 52983 - DNA, 40 bp, Pseudomonas aeruginosa; identical to SEQ ID NO: 23043
  source 1..40: mol_type = genomic DNA

SEQ ID NO: 52984 - DNA, 40 bp, Pseudomonas aeruginosa
  source 1..40: mol_type = genomic DNA
cgtctacccgcgccaggtgatcaagcgcaccctggcgcac

SEQ ID NO: 52985 - DNA, 50 bp, Pseudomonas aeruginosa
  source 1..50: mol_type = genomic DNA
tgtttctattgttacaacataataatcaataggggaaaattcagtagcaa

SEQ ID NO: 52986 - protein, 545 aa, Vibrio alginolyticus; identical to SEQ ID NO: 33736

SEQ ID NO: 52987 - DNA, 50 bp, Vibrio alginolyticus
  source 1..50: mol_type = genomic DNA
atgtcgtctatcatatagttgactaaagacaactaaatgttatactacat

SEQ ID NO: 52988 - DNA, 40 bp, Vibrio alginolyticus; identical to SEQ ID NO: 8223
  source 1..40: mol_type = genomic DNA

SEQ ID NO: 52989 - DNA, 40 bp, Vibrio alginolyticus
  source 1..40: mol_type = genomic DNA
gggtaagccacagtttgcaactgacacaaatggaccgcgt

SEQ ID NO: 52990 - DNA, 50 bp, Vibrio alginolyticus
  source 1..50: mol_type = genomic DNA
atctcctctaatttttaattgagtacacataatttatcctaataatacat

SEQ ID NO: 52991 - protein, 545 aa, Vibrio alginolyticus; identical to SEQ ID NO: 33746

SEQ ID NO: 52992 - DNA, 50 bp, Vibrio alginolyticus; identical to SEQ ID NO: 52987
  source 1..50: mol_type = genomic DNA

SEQ ID NO: 52993 - DNA, 40 bp, Vibrio alginolyticus
  source 1..40: mol_type = genomic DNA
gggtaagccacagtttgcaaatgacacaaatgggccgcgt

SEQ ID NO: 52994 - DNA, 40 bp, Vibrio alginolyticus
  source 1..40: mol_type = genomic DNA
gggtaagccacagtttgcaactgacacaaatgggccgcgt

SEQ ID NO: 52995 - DNA, 50 bp, Vibrio alginolyticus; identical to SEQ ID NO: 52990
  source 1..50: mol_type = genomic DNA

SEQ ID NO: 52996 - protein, 527 aa, Lacrimispora sphenoides
MSYLMYLRKSRADKEAEARGEGETLARHEQLLTELAVKMGLEVGAIYKELVSGETISARPKMQQVLLEVMQGIWEGVLVMEVERLARGDTKDQGTVAEAFKFSNTKIVTPLKTYDPSDEFDEEYFEFNLFMSRREYKTINRRIQRGRIAAFRDGWYIAGTAPYGYEKVKHKGDKGYTLKIVPEEAKIVEYIYELYIAGEMKEDGCYAPFGSYQIRDRLNELQIPSRSERPWSASSIIEILNNPTYCGYQRWQWRKVQKQMIDGKIIETRPKDADCEKVRGRFTAIIPEEKYDLVQKIKSGKPLPVNTSTALQNPLSGLVYCFKCGTLMTRQPSNTRLRYAILRCPNSKCSNISSPLSLIEEQIIEGLKEWIPEYELDWPEETEKENETTLAVLENSLHNIEEKYTRTVKQLNKAFELLEQGVYSLDLFQERRINLENQKKELQEELKLIKEERDRIAAREQARKNFIPAIKHLVEVYWEVDDIMIRNSMLRNILDHVDYLKTERNRKGAGNTANFTLQFYPRIPESH

SEQ ID NO: 52997 - DNA, 50 bp, Lacrimispora sphenoides
  source 1..50: mol_type = genomic DNA
tacctatcccctgtcggcccatatgtatatggaccgttagctcatatgta

SEQ ID NO: 52998 - DNA, 40 bp, Lacrimispora sphenoides
  source 1..40: mol_type = genomic DNA
tgccatgggagggccgaaagtatatccccattcataagtc

SEQ ID NO: 52999 - DNA, 40 bp, Lacrimispora sphenoides
  source 1..40: mol_type = genomic DNA
tgccatgggagggccgaaatcatatccccattcataagtc

SEQ ID NO: 53000 - DNA, 50 bp, Lacrimispora sphenoides
  source 1..50: mol_type = genomic DNA
cacttatcctaggccatctcatattcttattacccattttgtcatatgta

SEQ ID NO: 53001 - protein, 479 aa, Geobacillus thermoleovorans
MRTALYIRVSTEDQAREGYSISAQKDKLQAYCLSQGWDIEDFYIDDGYSAKDLNRPGIKRMIDHIQKGLIDCVLVYRLDRLTRSVLDLYKLLEIFEKHNCKFKSATEIYDTTTAMGRMFITIVAALAQWERENIGERVKIGLQQKVKEGGWHGGIVPYGYRYTENGLEIDEEEAKVVRLIYDLYLSGKGDHKIAGILNRMGHRTRNGNEWTGKVIRDILQNPAYTGDIRYMGEVHQGFMTAIVSREVFEQAQKSRESRRGKHPRRNASTYIFSGVMRCGRCGALMNGKANYSRYKGKRLHYKLYVCINTRTGACDMPLLNEADIEATLIQFLSQYRDDVLSLEVANTMDKKDNIQEEMKSIENQLEQIKKRKRKWQVAYANEVITLDDLRELTQKDNELEKTLRQRYEDLKSQTTEEWKTPELIAAIISDFLNNWAFLTEEEKKECIRIYIKEFFVQASSDRPNQYKKREISISDVEFN

SEQ ID NO: 53002 - DNA, 50 bp, Geobacillus thermoleovorans
  source 1..50: mol_type = genomic DNA
acattatttattgttactatcggatttccgaatgtatcaatagataaagt

SEQ ID NO: 53003 - DNA, 40 bp, Geobacillus thermoleovorans
  source 1..40: mol_type = genomic DNA
ctccgccaactctttcggattggcgatcgtcgccgacgtg

SEQ ID NO: 53004 - DNA, 40 bp, Geobacillus thermoleovorans
  source 1..40: mol_type = genomic DNA
ctccgccaactctttcggaaaggcgatcgtcgccgacgtg

SEQ ID NO: 53005 - DNA, 50 bp, Geobacillus thermoleovorans
  source 1..50: mol_type = genomic DNA
acattatttccagctaccatggcaaatcagaatttatagtgtaatatata

SEQ ID NO: 53006 - protein, 454 aa, Macrococcus canis
MYTALYLRVSTMEQADNNFSLAAQESKLRAYAEAKSLDNIKVFVDPGYSGSNMNRPALTQLLELVKRNQVSNILVYKLDRLSRSQKDTLNIIEDYLLPHDANLISLSESFDTSTSFGRAMIGILSVFAQLERENFKERSRMGMLQRAKEGKISGYGGKIFGYDYINGELIINDYEAMIVKKIYNYYIKGLGVTKIFMQLQKEHPGIIKSSHHIWQILRRRTYTGDFDYMDESYEGIHEAIIDKSIYDQVQVLRNSRNSKQKSDAVYMLTGLTYCKCCGYKMQGTVSASTYKDKHYKRRYYRCNTNKRNKVNNNPFRCATKSIKKDELEHVVISQIKALDIDLKIDDIQTNTIDTKAIDKRLNELEKQSEKLLNLYIEDSISKSILDKKIEEINIEIEALQNVETEDNQTKLQALEIAKEFNFDKATDYEVQNLIHLLVKRIDVDNSSVDIQFIF

SEQ ID NO: 53007 - DNA, 50 bp, Macrococcus canis
  source 1..50: mol_type = genomic DNA
agaggttattttattagcgcgaacggattgataatataaacacaaaagca

SEQ ID NO: 53008 - DNA, 40 bp, Macrococcus canis
  source 1..40: mol_type = genomic DNA
agcaattccgaccgtaaatggattgatcataccaccaagg

SEQ ID NO: 53009 - DNA, 40 bp, Macrococcus canis
  source 1..40: mol_type = genomic DNA
agcaattccgaccgtaaatcaattgatcataccaccaagg

SEQ ID NO: 53010 - DNA, 50 bp, Macrococcus canis
  source 1..50: mol_type = genomic DNA
aaggatgattaaagtagatcaaaccaggtgaaaataaggagacaaaagca

SEQ ID NO: 53011 - protein, 466 aa, Brochothrix thermosphacta
MKLRAAIYVRVSTTEQAEEGFSIKAQTEKLKNFANAKDYNFVKTYTDPGFSGAKLERPALKELINDIEKGFIDIVLVYKLDRLSRSQKNTLYLIEDVFLKNSVQFVSMQESFDTSTSFGRAMIGVLSVFAQLERDAITERMQMGAKERAKAGLYHGSGAGTIPTGYDYVNGELVINEYSDVVKDVFELYVNGLGLNAISVKLKEKYPSKKISRGTVLGGILDNDVYIGKVKYAGKSYEGKHEAIISEKQYNIVKAIRTRKSDTYKNQTHKKYMLTGLLRCAYCGGRVARSGVSRVKSNGLEFYYECYSRRKSPAHMIKDPNCPSKRHKNTEIEYDVIEFVKNIRFNHDNKNEINNKIDEVTTMKKELNSLDSQIDKMIELYQVSAIPMDKINTKISDLNRKKESLTDKIKNLKLSSISKVNREEKIKEVESFDWDNSDIPQKANLLKSVIDEIIIYNDTFEINWSI

SEQ ID NO: 53012 - DNA, 50 bp, Brochothrix thermosphacta
  source 1..50: mol_type = genomic DNA
actaacaaacatggacgtacgtcccataatgctattttatgtttgtacaa

SEQ ID NO: 53013 - DNA, 40 bp, Brochothrix thermosphacta
  source 1..40: mol_type = genomic DNA
gaataccgtcggcacgtttcataaaatagtgatagctcac

SEQ ID NO: 53014 - DNA, 40 bp, Brochothrix thermosphacta
  source 1..40: mol_type = genomic DNA
gaataccgtcggcacgttttctaaaatagtgatagctcac

SEQ ID NO: 53015 - DNA, 50 bp, Brochothrix thermosphacta
  source 1..50: mol_type = genomic DNA
actagcaaattcctagttatgtgttcaaatgatcctaagtctttgtacaa

SEQ ID NO: 53016 - protein, 620 aa, Anaerotruncus colihominis
MKPKKLGNGKITALYERLSRDDDLTGDSNSIINQKKMLEDYAKANGFTNCVHFTDDGWSGGSFDRPSWKRMIEGIEKGEIAAVLVKDLSRVGRDYLQVGFYTEVMFREKGVRFIAITNGVDSDKRESSEFAPFLNIMNEWYIRDCSRKITTVLRARGMSGKHTSNHCIYGYRKDPNNKDHWIIDEEAAEVVRRIYRMAIEGKGPYEIARILATEKVERPSYYLAQRGMGNHQSNYNAADPYTWRGGTVADILSKQEYMGHTVNFRTYKESYKDKRVKMTPKEDLVIFENTQEAIIDKETWERVQTLRKTIRRTDSIGKANPLTGLMFCADCGAKMYNHRGKAGNARDWAGRPNGKKRPDRDEYNCSRYDLGNQHYDKYCTTHLIRTAVVNELLLEAIKGVCDYALSSEAEFMAQVCSASEARQEKAARAIRQRKQRNEKRTDELTRLIRKLYEDNVSGRLSDTIFEQMLSDFEAELSDLTEIISQDQQELERISRETINAEKFLSLVRKYTDFSELTPAMINEFVEKILVHQAQGKGASRTQEIEIFFNFVGKVDIPHKEVKLTEEEKAALAEQERRRAKKAEYNRRYMEKKRRQWKAQQEQEQAKQLPPAAEQKGEHIA

SEQ ID NO: 53017 - DNA, 50 bp, Anaerotruncus colihominis
  source 1..50: mol_type = genomic DNA
aaacacccttgacaaaacgtatcagaagatatatgctgtgaaagggggat

SEQ ID NO: 53018 - DNA, 40 bp, Anaerotruncus colihominis
  source 1..40: mol_type = genomic DNA
gccgccgaagccccacagcgaagcgtcgcttctctctgct

SEQ ID NO: 53019 - DNA, 40 bp, Anaerotruncus colihominis
  source 1..40: mol_type = genomic DNA
gccgccgaagccccacagcacagcgtcgcttctctctgct

SEQ ID NO: 53020 - DNA, 50 bp, Anaerotruncus colihominis
  source 1..50: mol_type = genomic DNA
aaaaataccttcagagtcatatcaacagatattttcaatttaagggggac

SEQ ID NO: 53021 - protein, 505 aa, Sphingobacterium spiritivorum
MKRAIRYLRFSQLGQSNGSIERQELYTDQWLKFNDVELVDTFIDRGKSARTFDRPDFIKLREFITKHHRTVDYLLVDQLDRFSRDAGEAMSMVKLLQQKYSIQVVSVTEGIVFDYDTPGSFFRAGLQLLLAEEDNINRSIKVKGGIYTAKAKEGRYVYKNAPFGYRKQGERKERRLIIEETEAKIVRFIYDAYLRDTPLYLIKEQAQRLGFPTKGNMAIERVLKNPTYAGLLKVETYKDYAGGLFDGIHEPIVDKTTWMMVQEKMKRPEKTRTVIDDEIPLRGVLKCHCGNPLSGAPSRGKSGKYFYYYKCRHSKHNNISAIKAHNQFLEACELMSLPSARVRKIRTVTKSSLDMEMESNRKKAMEKKSQLQEAEEKLFSVEEKWIKNEINKDTYDRWYSIYSNEILNLKGAIERLGNDQSKAFSILEDNLNLLTDMRHVYSKSDTLQKREFVNRVFDSNLYYENGIYRTPTMLGLLSHNHLKMKEKGLLIYEKKEGLLDEDPLS

SEQ ID NO: 53022 - DNA, 50 bp, Sphingobacterium spiritivorum
  source 1..50: mol_type = genomic DNA
cttcttgatgaagaccctctcagcgggctgacagggattacagtcgaaca

SEQ ID NO: 53023 - DNA, 40 bp, Sphingobacterium spiritivorum
  source 1..40: mol_type = genomic DNA
tttcgatgaaggtttctgcggagagtgagggattcgaacc

SEQ ID NO: 53024 - DNA, 40 bp, Sphingobacterium spiritivorum
  source 1..40: mol_type = genomic DNA
tttcgatgaaggtttctgcatagagtgagggattcgaacc

SEQ ID NO: 53025 - DNA, 50 bp, Sphingobacterium spiritivorum
  source 1..50: mol_type = genomic DNA
catgtggcttgagcccctctcagcatgatggctgggttctgagacaaaga

SEQ ID NO: 53026 - protein, 546 aa, Burkholderia sp LA-2-3-30-S1-D2
MAAKARVYSYLRFSDPKQAAGGSIDRQLEYAARWAADHDLELDASLSLRDEGLSAYHERHVRQGALGVFLRAVEDGQVHAGSVLIVEGLDRLSRAEPLQAQAQLAQIVNAGITVVTASDGREYNRERLKAQPMDLVYSLLVMIRAHEESDTKSKRVKAAIRRQCQGWIAGTWRAPIRAGKDPQWVREGEGGGFELIPERAAAVRLVVEMFKQGHGAVRTIRELSERGLAVTESGRMAASHIYKILANRMLVGEKSVEVDGETFRLEGYYPALLSAAEFAELRYLAEQRGRRKGKGEIPGVVTGLGITYCGYCGAAIVAQNLMSRKRMADGRPAPGHRRLHCVTYSTGAGCKVSGSCSVVPVERALMLYCSDQINLTRLLEGDAGTATVSAQLARARQRVAELEAQVQRVTDALLLDDGEAPAAVLRRVRELESQLASERRHIDSFEHQLAASASNVAPAAADAWRELVNGVEHLDYDARMLARQLVADTFSRIVVYQSGFQPDVADGTIGLLLIAKRGTTRLLHVDRKTGEWRAAEDVNLPDRHPM

SEQ ID NO: 53027 - DNA, 50 bp, Burkholderia sp LA-2-3-30-S1-D2
  source 1..50: mol_type = genomic DNA
ggtatacttttagtatcactcgggcacccgagggataccatacctatacg

SEQ ID NO: 53028 - DNA, 40 bp, Burkholderia sp LA-2-3-30-S1-D2
  source 1..40: mol_type = genomic DNA
gtcgacgagcgccttggggcacccgagcgacacgaagcct

SEQ ID NO: 53029 - DNA, 40 bp, Burkholderia sp LA-2-3-30-S1-D2
  source 1..40: mol_type = genomic DNA
gtcgacgagcgccttggggtgcccgagcgacacgaagcct

SEQ ID NO: 53030 - DNA, 50 bp, Burkholderia sp LA-2-3-30-S1-D2
  source 1..50: mol_type = genomic DNA
ggattacttgagccatcactggggtgaccaaggggtactgcaccagaatg

SEQ ID NO: 53031 - protein, 510 aa, Burkholderia cepacia
MELDASLSLRDEGLSAYHQRHVRQGALGVFLRAVEDGQVPAGSVLIVEGLDRLSRAEPLQAQAQLAQIVNAGITVVTASDGREYNRERLKAQPMDLVYSLLVMIRAHEESDTKSKRVKAAIRRQCQGWIAGTWRLPIRVGRDPHWVRETESGGFELAADRASAVHLVVEMFKQGHGAVRIVRELAERGLQITDSGRTASTNIYRLLANRMLIGEKSVEVDGETFRLDGYYPALLTPAEFADLRYLAEQRGRRKGKGEIPGVLTGLGIAYCGYCGAAIVAQNIMGRRRAADGRPYPGHRRLHCVTYSQGAGCKISGSCSVVPVERALMLYCSDQINLTRLLEGDAGTATVSAQLSSARQRVAELEAQVQRVTDALLLDDGEAPAAVLRRVRELESQLASERRDVDSFEHNLAASASNVTPAAADAWRELVQGVEQLDYDARMMARQLVADTFSRIVIYQSGFRPDVDKEAIGLLLIAKRGTTRMLHVDRKSGEWRAAEDIRIDQIESLPSK

SEQ ID NO: 53032 - DNA, 50 bp, Burkholderia cepacia
  source 1..50: mol_type = genomic DNA
ggtttactttcactatccctcgggcacccgagggataccatacctatacg

SEQ ID NO: 53033 - DNA, 40 bp, Burkholderia cepacia
  source 1..40: mol_type = genomic DNA
atcgacgagggctttcgggcacccgagggatacgaaccct

SEQ ID NO: 53034 - DNA, 40 bp, Burkholderia cepacia
  source 1..40: mol_type = genomic DNA
atcgacgagggctttcgggtgcccgagggatacgaaccct

SEQ ID NO: 53035 - DNA, 50 bp, Burkholderia cepacia; identical to SEQ ID NO: 53030
  source 1..50: mol_type = genomic DNA

SEQ ID NO: 53036 - protein, 476 aa, Tsukamurella paurometabola
MSTPASAPGRAVIYARVSSDRAGGRSVEEQVSECRTECERHAWPVADVLVDNDVSASRYATKDRPEYARLQALLQPGDVLVMWEASRAQRDLKRYVELRDLCARRGVRWSYSGRLYDLSDGDDRFSTGLDALLAEKEAEQTRTRILRAHRANLADGKPHGRVPYGYRIIRDPETGKPVRREPHPGQAPLIAEAARRVLAGQSFASVVRWIAEQDDSLRWDAAKLRRLLINPTLAGFRVHTEVKDGVRGPRMIHGRGTWEPILTEDQHNDLVALFAARQSGPRGVPVKYLVSGIAECGVCGEKVWRGRGGTKKDGSRYEVYTCRPGRHAARRLDLVDEAVHEVVEQILTSPAVLAALAETPEADTTAPARLAELRARLDAVETEIIEGRMPASTGARAATRLEALIAEAEAAAAPVFTDPAVRSLATAADPVAEWRGMPLADQREFIKATLHIRIERIGRGRWHDKRAGITIEPQRR

SEQ ID NO: 53037 - DNA, 50 bp, Tsukamurella paurometabola
  source 1..50: mol_type = genomic DNA
ttacaggggtatttgacattgaagtgttatttcggcgtaaactcccctac

SEQ ID NO: 53038 - DNA, 40 bp, Tsukamurella paurometabola
  source 1..40: mol_type = genomic DNA
gtagatcgtgtcgaaggcgtgcttgagcgcgcccgacatg

SEQ ID NO: 53039 - DNA, 40 bp, Tsukamurella paurometabola
  source 1..40: mol_type = genomic DNA
gtagatcgtgtcgaaggcgaacttgagcgcgcccgacatg

SEQ ID NO: 53040 - DNA, 50 bp, Tsukamurella paurometabola
  source 1..50: mol_type = genomic DNA
taaaatgggcataaaacattgaagaatttttttttcttgaccaccccaac

SEQ ID NO: 53041 - protein, 525 aa, Pseudomonas aeruginosa
MPSAFSYVRFSSGKQAKGSSEQRQRSMLGQWLEQHPSFTLSDLRFEDLGRSGFSGEHLDHGLGQLLAAIDSGAIKSGDVILVEAVDRIGRLEPLEMLPLFSRIVRAGVSVITLEDGHVYSKDSVNETSLFLLVAKVQQAHDYSNRLSRRINASYTARREKARAGLGVKRETPVWLTTDGQLVPHVAPHIAQAFQDYADGLGERRICRKLRESGLEEFSKTNATTVRRWLKNKTAIGYWNDIPDVYPHVVDPALFYRVQQRLDAPKVDRAKPSAHYLTGLVKCAVCGRNYNFKQRKHTDPAMLCTSRARLAGEGCSNSKTYPVIVLDQVRKLTSLPFLQHAMESASSQADPSSQRLAVIDGEIGELSRKISEATKALLVLGFTPEIQESLEQLKTAREALEEERAALLLPQAEKLTAAQLEAFSNGLLDDEPMKLNHVLQTAGYSMVVHPDGSIDVDGKRFVYEGASRKEKVYKLRLLGEDKRWNLPILTPQMATYKSLFMAAVRLPGDPSEEELRRFEEAKHSER

SEQ ID NO: 53042 - DNA, 50 bp, Pseudomonas aeruginosa
  source 1..50: mol_type = genomic DNA
cgagtccatcttgagtcttctttctcgcaagacaatacaaaatagacaca

SEQ ID NO: 53043 - DNA, 40 bp, Pseudomonas aeruginosa; identical to SEQ ID NO: 20278
  source 1..40: mol_type = genomic DNA

SEQ ID NO: 53044 - DNA, 40 bp, Pseudomonas aeruginosa; identical to SEQ ID NO: 28459
  source 1..40: mol_type = genomic DNA

SEQ ID NO: 53045 - DNA, 50 bp, Pseudomonas aeruginosa
  source 1..50: mol_type = genomic DNA
caagtctatttagattcttcattcttaaaagataaatttttataaagaca

SEQ ID NO: 53046 - protein, 487 aa, Mycobacteroides chelonae
MKLQARRALVVIRLSRVTDATTSPARQLEACLELCKQRGYEVIGTAEDLDISAGKTSPFDRPQLGDWLTNRRGEFDVLVTFRMDRIVRRLLDLADLIRWCQEGSVSLVSATETFLDLDSAFGDIIALLVAKVAEMELTAISERNRSAAQHNMREGKYRGGPPPWGYRAEKIDGDWRFVQDDQQVRVINEVVRRVLDGEPLRQVAADLTGREVLTPRDRAYQLKGKEIRGYSWHSAKLREMLTSKSLLGHAVTANGSIRNDDGSPIIRATPILEREVFERLQVELAGRENRTEPTKRSSSLLLRVIYCGVCGKPAYKLKGGRGRQDRYRCASAQYKSTCGNRTVMIADAEEILTDAVMSVLGGKYRRDKVWDPGSDHAAELAELEETLSDLTDQLGVGSFRKGTRQRERLDARIAELARRQSELAARASKPAGWTWVPTDELFGDWWTSQTVEQLNLWLRSMDIRMCWNHQGIQTDMLHLEKMSEQWS

SEQ ID NO: 53047 - DNA, 50 bp, Mycobacteroides chelonae
  source 1..50: mol_type = genomic DNA
cgctagtaataattgacaatggaatattccacagtatatatttacaacca

SEQ ID NO: 53048 - DNA, 40 bp, Mycobacteroides chelonae
  source 1..40: mol_type = genomic DNA
cgcgatcgttccgatcgcgtattcgacggtggacatgccg

SEQ ID NO: 53049 - DNA, 40 bp, Mycobacteroides chelonae
  source 1..40: mol_type = genomic DNA
cgcgatcgttccgatcgcgtgttcgacggtggacatgccg

SEQ ID NO: 53050 - DNA, 50 bp, Mycobacteroides chelonae
  source 1..50: mol_type = genomic DNA
tgcaagttatttattaccatggactgattcacagttataagttacaaaca

SEQ ID NO: 53051 - protein, 614 aa, Serratia sp SSNIH1
MKIKDKRFKITALYERLSKDDEVQGESNSIVNQKRMLTQYAEQHGYENIEHYTDDGWTGTNFDRPDWKRMLADIEAGKVGTVIVKDMSRIGRDYLQVGFYTEVMFREKGVHFIAISNGVDSERRESAEFAPFLNIMNEWYVRDTSRKITTVLKARGMSGKAHTTNRCCYGYKKSADNPDKWVIDEEAAEVVRRIFNMCLNGKGPYQIARELAEDKVERPEYYLGIRGRGVNIKSFDMEHPYMWRGGTVKTILTRMEYTGCTVNFRTKKESYKDKRPTKVDSSEWIIFEDTQEPIIDKHTWETVQKLVDTPRRKGVFDENNPLTGKVFCADCGAKMYHHRNAQGIWKKNYFKAGEMIYHAPEDRYDCSNNIRGRQRYEKLCCSHSVTTKALETLVLETIKRTCDYAVENEAEFREKVCSISEEQQGELSVRLEKRLAKKQKRVSEVNRLIKKLYEDNISGKLNDKRFNAMLSDYESELETLEADIDRDNAELEGMSAKKTDVDVFMELVKKHTTFEELTPAMLNEFVDKIMVYKAVGSGANRTQDVDIYLNYIGRFVVPEVVVELTEEEKLAEAKRQEKLEKKRASNRKYMARKREEARKAWAEIEAEKAKAVGQ

SEQ ID NO: 53052 - DNA, 50 bp, Serratia sp SSNIH1
  source 1..50: mol_type = genomic DNA
atcctaccttgacaaatactcacagatgtaatacactttgagagtaggca

SEQ ID NO: 53053 - DNA, 40 bp, Serratia sp SSNIH1
  source 1..40: mol_type = genomic DNA
gccagcaccgcacttcaccgaagccacattgcttgccgcg

SEQ ID NO: 53054 - DNA, 40 bp, Serratia sp SSNIH1
  source 1..40: mol_type = genomic DNA
gccagcaccgcacttcaccatagccacattgcttgccgcg

SEQ ID NO: 53055 - DNA, 50 bp, Serratia sp SSNIH1
  source 1..50: mol_type = genomic DNA
atcctacctgatttaatacttaaaataaaactacactattagagacagta

SEQ ID NO: 53056 - protein, 558 aa, Eisenbergiella tayi; identical to SEQ ID NO: 76

SEQ ID NO: 53057 - DNA, 50 bp, Eisenbergiella tayi
  source 1..50: mol_type = genomic DNA
tgcctactctcaaagtgtattacatctgtgagtatttgtcaaggtaggat

SEQ ID NO: 53058 - DNA, 40 bp, Eisenbergiella tayi
  source 1..40: mol_type = genomic DNA
agcggaaaggagggtatcttccgtgtaggattttggcggt

SEQ ID NO: 53059 - DNA, 40 bp, Eisenbergiella tayi
  source 1..40: mol_type = genomic DNA
agcggaaaggagggtatctatcgtgtaggattttggcggt

SEQ ID NO: 53060 - DNA, 50 bp, Eisenbergiella tayi
  source 1..50: mol_type = genomic DNA
tactgtctctaatagtgtagttttattttaagtattaaatcaggtaggat

SEQ ID NO: 53061 - protein, 614 aa, Klebsiella pneumoniae
MKIKDKRFKITALYERLSKDDEVQGESNSIVNQKRMLTQYAEQHGYENIEHYTDDGWTGTNFDRPDWKRMLADIEAGKVGTVIVKDMSRIGRDYLQVGFYTEVMFREKGVHFIAISNGVDSERRESAEFAPFLNIMNEWYVRDTSRKITTVLKARGMSGKAHTTNRCCYGYKKSADNPDKWVIDEEAAEVVRRIFNMCLNGKGPYQIARELAEDKVERPEYYLGIRGRGVNIKSFDMEHPYMWRGGTVKTILTRMEYTGCTVNFRTKKESYKDKRPTKVDSSEWIIFEDTQEPIIDKHTWETVQKLVDTPRRKGVFDENNPLTGKVFCADCGAKMYHHRNAQGIWKKNYFKAGEMIYHAPEDRYDCSNNIRGRQRYEKLCCSHSVTTKALETLVLETIKRTCDYAVENEAEFREKGCSISEEQQGELSVRLEKRLAKKQKRVSEVNRLIKKLYEDNISGKLNDKRFNAMLSDYESELETLEADIDRDNAELEGMSAKKTDVDVFMELVKKHTTFEELTPAMLNEFVDKIMVYKAVGSGANRTQDVDIYLNYIGRFVVPEVVVELTEEEKLAEAKRQEKLEKKRASNRKYMARKREEARKAWAEIEAEKAKAVGQ

SEQ ID NO: 53062 - DNA, 50 bp, Klebsiella pneumoniae; identical to SEQ ID NO: 53052
  source 1..50: mol_type = genomic DNA

SEQ ID NO: 53063 - DNA, 40 bp, Klebsiella pneumoniae; identical to SEQ ID NO: 53053
  source 1..40: mol_type = genomic DNA

SEQ ID NO: 53064 - DNA, 40 bp, Klebsiella pneumoniae; identical to SEQ ID NO: 53054
  source 1..40: mol_type = genomic DNA

SEQ ID NO: 53065 - DNA, 50 bp, Klebsiella pneumoniae; identical to SEQ ID NO: 53055
  source 1..50: mol_type = genomic DNA

SEQ ID NO: 53066 - protein, 558 aa, Streptococcus pyogenes
MKNKKAYVYTRVSTSMQIDGYSLDAQEERIKQYAKAYGIEIIETYKDAGKSGTSISGRNEFIAMLNDIEAEKDKVDYVMVFKLSRFGRNAADVLQSLQVMENHNVNLICVDDSLDSSKDSGKLVITILSAVAEMERENILSQTMEGRKQKAREGKWNGGFAPIGYSLDNGELVVNEDEAKAVRMIFDLYANSDMGANGVSKYLVSLGINKPIRQNGKNPYFSASLIRQILDNPVYNGKIAYGRRKTIKDKTTGKIKLEKSDHYIIAQGNHEALIDDELWNTVQEKRKSQAKKYEKINRGKDERVHILSNLIKCPYCGAGLYGNKSRKRNKNKEGEHYKDYYYYGCKHRQMMNGHKCTFNKQIRAELIEKEVETIITQVVSNPTFAKKIEEKINIQIDTKEIDEVINKHLAKIRQLTGTKASLINQIDSLNFEDKHYDRKYTDLNLRLDAIYDQLEYAEMQLNDSRKRKEAILEEKITSDNIYKILVNFNSLYTVLSDIDKKRLLNEMIEEIQIYDEKTEKDTWIKSVVFKLPLIDNEIDFGLDNKDNVECVSLLEKRS

SEQ ID NO: 53067 - DNA, 50 bp, Streptococcus pyogenes
  source 1..50: mol_type = genomic DNA
ctggaccttttgactcccgcagacccatcacgtggagacggtagctctgt

SEQ ID NO: 53068 - DNA, 40 bp, Streptococcus pyogenes; identical to SEQ ID NO: 52428
  source 1..40: mol_type = genomic DNA

SEQ ID NO: 53069 - DNA, 40 bp, Streptococcus pyogenes
  source 1..40: mol_type = genomic DNA
tagatttgtttccccagactcatcacgtcgagtgcgtagt

SEQ ID NO: 53070 - DNA, 50 bp, Streptococcus pyogenes
  source 1..50: mol_type = genomic DNA
ctgggccttcgccttgccggaggctcatctagtgggccgcgtatccctgg

SEQ ID NO: 53071 - protein, 403 aa, Bradyrhizobium manausense
MAATVRAALYLRVSTGRQADSDLSIPDQRRQAKDYCESSGLEIVADYVEPGASATDDRRPEFQRMIDAATVKPTAFDVILVHSFSRFFRDQFQLEFYVRRLAKNGVRLVSITQELGDDPMSNMIRQIMALFDEYQSKENAKHTLRAMKENARQGFWNGALPPIGYRVVEAAEQRGHRTKKTLEIDPIQAETVRLIYRLAREGNGSSGPMGVKSIAKHLNESGIRTRDGGRWGVDAVHKVLTRTTYIGRHRFNTKFWKTRERKSDAEVVEMVVPPIIEAAEFETVQTLLKTRSLAMSAPRIVSGPTLLTGICFCAACGGAMTLRTGKSGRYRYYTCCTKARQGETGCKGRTIPMEKLDNVVAEHIEQRLLQPKRLEEVLSAVLHRRKERGAPNGAYRRIAQACD

SEQ ID NO: 53072 - DNA, 50 bp, Bradyrhizobium manausense
  source 1..50: mol_type = genomic DNA
tgcccagttttgtaccgaaatggcgcaccgcggccgatgaagacgggcac

SEQ ID NO: 53073 - DNA, 40 bp, Bradyrhizobium manausense
  source 1..40: mol_type = genomic DNA
tgcagcgggatgaaatggcgcacccgacacgattcgaacg

SEQ ID NO: 53074 - DNA, 40 bp, Bradyrhizobium manausense
  source 1..40: mol_type = genomic DNA
tgcagcgggatgaaatggcacacccgacacgattcgaacg

SEQ ID NO: 53075 - DNA, 50 bp, Bradyrhizobium manausense
  source 1..50: mol_type = genomic DNA
tgcccaggtcagccccgaagctgcacactcaccccgtgggcgccgggcac

SEQ ID NO: 53076 - protein, 504 aa, Burkholderia cenocepacia; identical to SEQ ID NO: 48911

SEQ ID NO: 53077 - DNA, 50 bp, Burkholderia cenocepacia; identical to SEQ ID NO: 48912
  source 1..50: mol_type = genomic DNA

SEQ ID NO: 53078 - DNA, 40 bp, Burkholderia cenocepacia
  source 1..40: mol_type = genomic DNA
atcgacgagcgctttcgggcagccgagggatacgaaccct

SEQ ID NO: 53079 - DNA, 40 bp, Burkholderia cenocepacia
  source 1..40: mol_type = genomic DNA
atcgacgagcgctttcgggttgccgagggatacgaaccct

SEQ ID NO: 53080 - DNA, 50 bp, Burkholderia cenocepacia
  source 1..50: mol_type = genomic DNA
ggtatttattgttctatattagagttctccagggaaacagaaccaataag

SEQ ID NO: 53081 - protein, 532 aa, Pseudomonas fluorescens
MSTANPLPRAFSEVFQGEDTINVYSYIRFSSKSQKLGFSEMRQLEQLNRFFEQYPQSRQVERYEDLGVSAFKGKNLKSGQLAKFVERIKSKEILPNALLLVESFDRISRVGGYDALELIISIIQADCSIYTLFDNRLYSRRKKDSSADISLIQNILERANDESKVKSERISDAKARNLIKGENGGVITRRCPFWISFTDGKFILNEHANAVKRITELCFDMGFQSIAKELNKENHPKKYTDSIVGKVLHKHAIYGSFLAMKLDENGDRTVFNKEIKNYYPAVISEPEFHRISAKLKERQDPSLAGRKAQEFRNILRGLVFCKCGSTFRYHAQKSLYVDLVCHASTVGQCSYANPGKGVRHRYALVESIFLAYQSLIPFHQIIVKTDDIKALEKEHEEISGLIILKEKALINNFNILEQSSESAQKYILGRIDEVSQELDKLKEDEHRLNVKISSMHLASKSDFNVMEIYRLLLTERGRIKINNFLHSQKIKLIINPIKKKLFELDIYHADKHLDTIDVTPDGYTARYKPHLR

SEQ ID NO: 53082 - DNA, 50 bp, Pseudomonas fluorescens
  source 1..50: mol_type = genomic DNA
attctactaaaagctctcatgattgcaatcagtggaggtttttgtagata

SEQ ID NO: 53083 - DNA, 40 bp, Pseudomonas fluorescens
  source 1..40: mol_type = genomic DNA
ttcgagcatgccgatcacggcattcatcggggtcctgatt

SEQ ID NO: 53084 - DNA, 40 bp, Pseudomonas fluorescens
  source 1..40: mol_type = genomic DNA
ttcgagcatgccgatcacgttattcatcggggtcctgatt

SEQ ID NO: 53085 - DNA, 50 bp, Pseudomonas fluorescens
  source 1..50: mol_type = genomic DNA
atttttctaattgctgttatgatttttttcagttgctgggtttggatata

SEQ ID NO: 53086 - protein, 584 aa, Pseudomonas sp FDAARGOS 380
MPTAYAYIRYSSKAQGEAGRDSVDRQMASIQAITKQQGIKLPPENIYSDTGISAHDGSNKRKGKLKELIDMISDMHIKEGDYIFVESIDRLSRQRLLQAKELVNGILEKGVILITTIDGQRYEKPNETNRIDDLQQDILLSVIAKRAYEESKTKSVRRKSAWNRAKKLAEEEKVIFNAHNPPYGIRYNTELNCFEIEEEEAQEIRDFFESLKYVGVSLSIKKLNAYSKRKWSSRNIKHLIDTKYVLGAYMAQRRDENKKKVFERYIENYYPQIVSYELFNEAIAAMKNRAQRKNYGNQSVGSLNIFRHSIKCDCCDASMLFEKQTNPKGVVYPYFQCYTRKELKNGCDQPRFRFDLAFGLFLELIYQSTTHEDFDVHPWQNEIEDTGIQYEWITRESGMKYRLPTQEDIDEEERTENFKELLIKLLSNRETQTKDNKKIVELNNLLLEQKSYRDNLMKSFAGFTSGVIPKEFLEVVSKTEANINDIEQNLAELQTQINIKKTTINIYSENDIIDLYKTEDGRLKINQFFVANDITFKFNFDKTTRTLFAKIFQNGFEIDRIAKQFSLHNPLKEFGINNLNEYFN

SEQ ID NO: 53087 - DNA, 50 bp, Pseudomonas sp FDAARGOS 380; identical to SEQ ID NO: 51152
  source 1..50: mol_type = genomic DNA

SEQ ID NO: 53088 - DNA, 40 bp, Pseudomonas sp FDAARGOS 380; identical to SEQ ID NO: 24078
  source 1..40: mol_type = genomic DNA

SEQ ID NO: 53089 - DNA, 40 bp, Pseudomonas sp FDAARGOS 380
  source 1..40: mol_type = genomic DNA
ggtactgcgtgagccattgccatcggggcatatcgtgatc

SEQ ID NO: 53090 - DNA, 50 bp, Pseudomonas sp FDAARGOS 380
  source 1..50: mol_type = genomic DNA
gtggctgatgccttcaaaccattccccactgccaagcccttttgttacac

SEQ ID NO: 53091 - protein, 551 aa, Pseudomonas aeruginosa
MPTAYAYIRYSSKAQGEAGRDSVDRQMASIQAITKQQGIELRTENIFSDTGISGFDGSNKNKGKLKDLIDLIISQKIQDGDFVFVESIDRLSRQKMRLSKDLVYTILDRGVTLVTTIDGQMYSRAKDGMEQDIMLSVIAQRAHEESKTKSVRRKSAWNRAKKLADEEKEIFNGHNPPYGISFNKEESRFEIVEEEAQEIRDIFESLKYVGVSLTIKKVNEYSKRKWTNRNIKHLLDTKYVLGSYMAQRRDENKKKVFERYIENYYPQIVSFELFNEAVASMKNRAHRKHYGNQTVGSLNIFRHSIKCSNCNASMLFEKQTNPKGVVYPYFQCFTRKELKNGCDQPRFRFDLAFGVFLELVKFATTSSETINPNDWNNEITSVGSFHKTLFKLLTSTEKDKELEKKISHVKNLLLEQKNYQDNINKSFEAFTDGIIPAAFIKKASETEIKIEALERELAELNIESSTRNVSLLVHSYNDIIDLYKTEAGRLKINSFFTSNNIAFSFSFDQKTRMLRCKVYYKDIHVDVINKKFPLHNPLKEFGIDNLNQYFN

SEQ ID NO: 53092 - DNA, 50 bp, Pseudomonas aeruginosa; identical to SEQ ID NO: 51152
  source 1..50: mol_type = genomic DNA

SEQ ID NO: 53093 - DNA, 40 bp, Pseudomonas aeruginosa; identical to SEQ ID NO: 22678
  source 1..40: mol_type = genomic DNA

SEQ ID NO: 53094 - DNA, 40 bp, Pseudomonas aeruginosa
  source 1..40: mol_type = genomic DNA
ggtcctgcgcgagccgctgccaagcggcgagatcgtcatt

SEQ ID NO: 53095 - DNA, 50 bp, Pseudomonas aeruginosa; identical to SEQ ID NO: 53090
  source 1..50: mol_type = genomic DNA

SEQ ID NO: 53096 - protein, 551 aa, Pseudomonas aeruginosa
MPTAYAYIRYSSKAQGEAGRDSVDRQMASIQAITKQQGIELRTENIFSDTGISGFDGSNKNKGKLKDLIDLIISQKIQEGDFVFVESIDRLSRQKMRLSKDLVYTILDRGVTLVTTIDGQMYSRNKDGMEQDIMLSVIAQRAHEESKTKSVRRKSAWNRAKKLADEEKAIFNGHNPPYGISFNKEENRFEIVEEEAQEIRDIFESLKYVGVSLTIKKVNEYSNRKWTNRNIKHLLDTKYVLGSYMAQKRDENKKKVFERYIENYYPQIIPFELFNEAVASMKNRAQRKHYGNQTVGSLNIFRHSIKCSNCNASMLFEKQTNPKGVVYPYFQCFTRKELKNGCDQPRFRFDLAFGVFLELVKFATTSSESINPNEWDNENASVGSFHKTLFKLLTSTEKDKKLEKKISHVKNLLLEQKNYQDNINKSFEAFTDGIIPAAFIKKARETEIKIEALERELAELNIESSTRNVSLMVHSYNDIIDLYQTENGRQKINNFFTSNDIAFSFSFDQKTRMLRCKVYYKDIHVDVINKKFPLHNPLKEFGIDNLNQYFN

SEQ ID NO: 53097 - DNA, 50 bp, Pseudomonas aeruginosa; identical to SEQ ID NO: 51152
  source 1..50: mol_type = genomic DNA

SEQ ID NO: 53098 - DNA, 40 bp, Pseudomonas aeruginosa; identical to SEQ ID NO: 22678
  source 1..40: mol_type = genomic DNA

SEQ ID NO: 53099 - DNA, 40 bp, Pseudomonas aeruginosa; identical to SEQ ID NO: 53094
  source 1..40: mol_type = genomic DNA

SEQ ID NO: 53100 - DNA, 50 bp, Pseudomonas aeruginosa; identical to SEQ ID NO: 53090
  source 1..50: mol_type = genomic DNA

SEQ ID NO: 53101 - protein, 584 aa, Pseudomonas fluorescens; identical to SEQ ID NO: 53086

SEQ ID NO: 53102 - DNA, 50 bp, Pseudomonas fluorescens; identical to SEQ ID NO: 51152
  source 1..50: mol_type = genomic DNA

SEQ ID NO: 53103 - DNA, 40 bp, Pseudomonas fluorescens
  source 1..40: mol_type = genomic DNA
ggtgctgcgcgagccccttgaatcggggcatatcgtgatt

SEQ ID NO: 53104 - DNA, 40 bp, Pseudomonas fluorescens
  source 1..40: mol_type = genomic DNA
ggtgctgcgcgagccccttccatcggggcatatcgtgatt

SEQ ID NO: 53105 - DNA, 50 bp, Pseudomonas fluorescens; identical to SEQ ID NO: 53090
  source 1..50: mol_type = genomic DNA

SEQ ID NO: 53106 - protein, 518 aa, Enterobacter hormaechei; identical to SEQ ID NO: 21381

SEQ ID NO: 53107 - DNA, 50 bp, Enterobacter hormaechei
  source 1..50: mol_type = genomic DNA
gtatcattagaaaggttatttaaagaatataccctcttatgatacacttc

SEQ ID NO: 53108 - DNA, 40 bp, Enterobacter hormaechei; identical to SEQ ID NO: 21388
  source 1..40: mol_type = genomic DNA

SEQ ID NO: 53109 - DNA, 40 bp, Enterobacter hormaechei
  source 1..40: mol_type = genomic DNA
gcacggggcggctgtcgagattcacgcggttgaccgatcg

SEQ ID NO: 53110 - DNA, 50 bp, Enterobacter hormaechei
  source 1..50: mol_type = genomic DNA
gtggcatttgttaaattatttaaaatatgtatcctaggcctcatcacttc

SEQ ID NO: 53111 - protein, 507 aa, Escherichia marmotae
MKRVISYIRFSSEKQAKGDSLRRQSKMVNDWLKAHPEYYLDQDLSFRDLGVSGFTGKHLKGGLGDFLTAIEKGLVKAGDTLLIESLDRLSRQAVDRASELLRNILRSGVDVVTLSDGEHYTSESLKDPLALIKSILIMQRAHEESLRKAERIQAAWDAKKEAAKAGIKVSKRCPAWLKLNDDRKSFSVIPEKVETVKRCFQLRLEGKSIWEIVRTLNDEGHQSMSQYKPGKFGQTSVQDLLKNRSVIGYFTPKGCEEIAGYYPAIIDETTFYKVQQLSHSRYGRKPVSAKPLSVNLFKGVIRCSECGHALIITGFSDTRNGIYRCPLRNENRCSAKGLSRKQTDGTLLALLSRLDRFDSDTTNTIDTLKLHREHISSNIEKLVQLSLEIEDLNAITSKLKQLKGELSQVDADIEKETQRLKSIDVGCLSDCDLTTKAGRIEAQLIIKSAVKEVVLNTAKRRCKVTFHNGKVIDLSITENPSEDVTEAIQSLSEVTERGLIDVDEVII

SEQ ID NO: 53112 - DNA, 50 bp, Escherichia marmotae; identical to SEQ ID NO: 47642
  source 1..50: mol_type = genomic DNA

SEQ ID NO: 53113 - DNA, 40 bp, Escherichia marmotae; identical to SEQ ID NO: 24623
  source 1..40: mol_type = genomic DNA

SEQ ID NO: 53114 - DNA, 40 bp, Escherichia marmotae; identical to SEQ ID NO: 24623
  source 1..40: mol_type = genomic DNA

SEQ ID NO: 53115 - DNA, 50 bp, Escherichia marmotae; identical to SEQ ID NO: 21330
  source 1..50: mol_type = genomic DNA

SEQ ID NO: 53116 - protein, 507 aa, Escherichia fergusonii
MKRAISYIRFSSEKQSRGDSLRRQSKMVNDWLKAHPEYYLDQDLSFRDLGVSGFTGKHLKGGLGDFLTAIEKGLVKAGDTLLIESLDRLSRQDIDIASELLRRILRAGVDVVTLSDGEHYTRESLKDPLSLIKSILIMQRSHEESLRKSERIQAAWDAKKEAAKAGIKISRRCPAWLKLNDDRKSFSVIPEKVETVKRCFQLRLEGKSIWEIVRTLNDEGHQSMSQYKPGKFGQTSVQDLLKNRSVIGYFTPKGCEEISGYYPAIIDETTFYKVQQLSYARYGRKPASDKPLSVNLFKGVIRCSECGHALIITGFSDTRNGIYRCPLRNENRCSAKGLSRKQTDGTLLALLSRLDRFDSDMTNTVDTLKLHREHISSNIEKLVQLSLEIEDLSAITSKLKQLKGELSQVDADIEKETQRLKSIDVGCLSDCDLTTKAGRIEAQLIIKSAVKEVVLNTAKRRCKVTFHNGRAITLPITETPSEDVTEAIQSLSEVTERGLIDVDEVII

SEQ ID NO: 53117 - DNA, 50 bp, Escherichia fergusonii; identical to SEQ ID NO: 47642
  source 1..50: mol_type = genomic DNA

SEQ ID NO: 53118 - DNA, 40 bp, Escherichia fergusonii
  source 1..40: mol_type = genomic DNA
cggcgtaaatcgggtgattttagacagccgcccggttcat

SEQ ID NO: 53119 - DNA, 40 bp, Escherichia fergusonii; identical to SEQ ID NO: 53118
  source 1..40: mol_type = genomic DNA

SEQ ID NO: 53120 - DNA, 50 bp, Escherichia fergusonii; identical to SEQ ID NO: 21330
  source 1..50: mol_type = genomic DNA

SEQ ID NO: 53121 - protein, 507 aa, Escherichia fergusonii
MKRVISYIRFSSERQAKGDSLRRQSKMVNDWLKAHPEYYLDQDLSFRDLGVSGFTGKHLKGGLGDFLTAIEKGLVKAGDTLLIESLDRLSRQDIDIASELLRNILRSGVDVVTLSDGEHYTRESLRDPLALIKSILIMQRAHEESLRKAERIQAAWDAKKEAAKAGIKVSKRCPAWLKLNDDRKSFSVIPDKVETVKRCFQLRLEGKSIWEIVRTLNDEGHQSMSQYKPGSFGQTSVQDLLKNRSVIGYFTPKGCEEISGYFPPIIPETDFYKVQQLSYSRYGRKPASDKPLSVNLFKGVIRCSECGHALIITGFSDTRNGIYRCPLRNENRCSAKGLSRKQTDGTLLALLSRLDRFDSDTTNTIDTLKLHREHISSNIEKLVQLSLEIEDLSAITSKLKQLKGELSQVDADIEKETQRLKSIDVGCLSDCDLTTKAGRIEAQLIIKSAVKEVVLNTAKRRCKVTFHNGRAITLPITENPSEDVTEAIQSLSEVTERGLIDVDVVEI

SEQ ID NO: 53122 - DNA, 50 bp, Escherichia fergusonii; identical to SEQ ID NO: 47642
  source 1..50: mol_type = genomic DNA

SEQ ID NO: 53123 - DNA, 40 bp, Escherichia fergusonii; identical to SEQ ID NO: 5188
  source 1..40: mol_type = genomic DNA

SEQ ID NO: 53124 - DNA, 40 bp, Escherichia fergusonii; identical to SEQ ID NO: 5188
  source 1..40: mol_type = genomic DNA

SEQ ID NO: 53125 - DNA, 50 bp, Escherichia fergusonii; identical to SEQ ID NO: 21330
  source 1..50: mol_type = genomic DNA

SEQ ID NO: 53126 - protein, 507 aa, Escherichia coli
MKRVISYIRFSSEKQSRGDSLRRQSKMVNDWLKAHPEYYLDQDLSFRDLGVSGFTGKHLKGGLGDFLTAIEKGLVKAGDTLLIESLDRLSRQAVDRASELLRNILRSGVDVVTLSDGEHYTSESLKDPLALIKSILIMQRAHEESLRKSERIQAAWNRKKELISEGIKVSKRCPAWLRLNDDRKSFSVIPDKVETVKRCFQLRLEGKSIWEIVRTLNDEGHQSMSQYKPGKFGQTSVQDLLKNRSVIGYFTPKGREEIAGYFPSIIHETDFYKVQQLSYARHGRKPASAKPLSVNLFKGVIRCSECGHALIITGFSDTRNGIYRCPLRNENRCNAKGLSRKQTDGTLLTLLSRLDRFDSDTTNTIDTLKLHREHISSNIEKLVQLSLEIEDLSAITSKLKQLKGELSQVDADIEKETQRLKSIDVGCLSDCDLTTKAGRIEAQLIIKSAVKEVVLNTAKRRCKVTFHNSKSITLPITENPSEDVTEAIQSLSEVTERGLIDVDEVII

SEQ ID NO: 53127 - DNA, 50 bp, Escherichia coli; identical to SEQ ID NO: 47642
  source 1..50: mol_type = genomic DNA

SEQ ID NO: 53128 - DNA, 40 bp, Escherichia coli; identical to SEQ ID NO: 5188
  source 1..40: mol_type = genomic DNA

SEQ ID NO: 53129 - DNA, 40 bp, Escherichia coli; identical to SEQ ID NO: 5188
  source 1..40: mol_type = genomic DNA

SEQ ID NO: 53130 - DNA, 50 bp, Escherichia coli; identical to SEQ ID NO: 21330
  source 1..50: mol_type = genomic DNA

SEQ ID NO: 53131 - protein, 507 aa, Escherichia coli
MKRVISYIRFSSEKQAKGDSLRRQSKMVTDWLKAHPEYYLDESLTFRDLGVSGFTGKHLKGGLGDFLTAIEKGLVKAGDTLLIESLDRLSRQAVDRASELLRNILRSGVDVVTLSDGEHYTSESLKDPLALIKSILIMQRAHEESLRKSERIQAAWDAKKEAAKAGIKVSKRCPAWLRLNDDRKSFSVIPEKVETVKRCFQLRLEGKSIWEIVRTLNDEGHQSMSQYKPGSFGQSSVQDLLKNRSVIGYFTPKGCEEIAGYYPSIIPESDFYKVQQLSHSRHGRKPVSAKPLSVNLFKGVIRCSECGHALIITGFSDTRNGIYRCPLRNENRCSAKGLSRKQTDGTLLALLSRLDRFDSDTTNTIDMLRLHREHISSNIEKLVQLSLEIEDLSAITSKLKQLKGELSQVDADIEKETQRLKSIDVGCLSDCDLTTKAGRIEAQLIIKSAVKEVVLNTAKRRCKVTFHNSKSITLPITENPSDNVTEAIQSLSEVTERGLIDVDEVII

SEQ ID NO: 53132 - DNA, 50 bp, Escherichia coli; identical to SEQ ID NO: 47642
  source 1..50: mol_type = genomic DNA

SEQ ID NO: 53133 - DNA, 40 bp, Escherichia coli; identical to SEQ ID NO: 5188
  source 1..40: mol_type = genomic DNA

SEQ ID NO: 53134 - DNA, 40 bp, Escherichia coli; identical to SEQ ID NO: 5188
  source 1..40: mol_type = genomic DNA

SEQ ID NO: 53135 - DNA, 50 bp, Escherichia coli; identical to SEQ ID NO: 21330
  source 1..50: mol_type = genomic DNA

SEQ ID NO: 53136 - protein, 507 aa, Escherichia coli
MKRAISYIRFSSEKQSRGDSLRRQSKMVNDWLKAHPEYYLDQDLSFRDLGVSGFTGKHLKGGLGDFLTAIEKGLVKAGDTLLIESLDRLSRQDVDQASELLRNILRSGVDVVTLSDGEHYTKESLKDPLALIKSILIMQRAHEESLRKAERIQAAWDAKKEAAKAGIKISRRCPAWLKLNDDRKSFSVIPEKVETVKRCFQLRLEGKSIWEIVRTLNAEGHRSMNQYKPGKFGQTSVQDLLKNRSVIGYFTPKGCEEISGYYPAIIDETTFYKVQQLSHSRYGKRSVSDKPLSVNLFKGVIRCSECGHALIITGFSDTRNGIYRCPLRNENRCNAKGLSRKQTDGTLLTLLSRLDRFDSDTTNTIDMLRLHREHLSSNIEKLVQLSLEIEDLSAITSKLKQLKNELSQVDADIEKETQRLKSIDVGCLSDCDLTTKAGRIEAQLIIKSAVKEVVLNTAKRRCKVTFHNGRAITLLITENPSKDVTEAIQSLSEVTERGLIDVDEVII

SEQ ID NO: 53137 - DNA, 50 bp, Escherichia coli; identical to SEQ ID NO: 47642
  source 1..50: mol_type = genomic DNA

SEQ ID NO: 53138 - DNA, 40 bp, Escherichia coli; identical to SEQ ID NO: 5188
  source 1..40: mol_type = genomic DNA

SEQ ID NO: 53139 - DNA, 40 bp, Escherichia coli; identical to SEQ ID NO: 5188
  source 1..40: mol_type = genomic DNA

SEQ ID NO: 53140 - DNA, 50 bp, Escherichia coli; identical to SEQ ID NO: 21330
  source 1..50: mol_type = genomic DNA

SEQ ID NO: 53141 - protein, 507 aa, Escherichia coli
MKRAISYIRFSSEKQSRGDSLRRQSKMVNDWLKAHPEYYLDQDLSFRDLGVSGFTGKHLKGGLGDFLTAIEKGLVKAGDTLLIESLDRLSRQDVDQASELLRNILRSGVDVVTLSDGEHYTKESLKDPLALIKSILIMQRSHEESLRKSERIQAAWDAKKEAAKAGIKIYKRCPAWLKLNDDRKTFSVIPEKVETVKRCFQLRLEGKSIWEIVRTLNDEGHQTLNQYKAGKFGQTSVQDLLKNRSVIGYFTPKGCEEIAGYFPPIIPETDFYKVQQLSYSRYGRKPASDKPLSVNLFKGVIRCSECGHALIITGFSDTRNGIYRCPLRNENRCSAKGLSRKQTDGTLLALLSRIDRFDSDMTNTIDTLKLHREHISSNIEKLVQLSLEIEDLSAITSKLKQLKGELSQVDADIEKETQRLKSIDVGCLSDCDLTTKAGRIEAQLIIKSAVKEVILNTAKRRCKVTFHNSKSITLPITETPSEDVTEAIQSLSEVTERGLIDVDEVII

SEQ ID NO: 53142 - DNA, 50 bp, Escherichia coli; identical to SEQ ID NO: 47642
  source 1..50: mol_type = genomic DNA

SEQ ID NO: 53143 - DNA, 40 bp, Escherichia coli; identical to SEQ ID NO: 5188
  source 1..40: mol_type = genomic DNA

SEQ ID NO: 53144 - DNA, 40 bp, Escherichia coli; identical to SEQ ID NO: 5188
  source 1..40: mol_type = genomic DNA

SEQ ID NO: 53145 - DNA, 50 bp, Escherichia coli; identical to SEQ ID NO: 21330
  source 1..50: mol_type = genomic DNA

SEQ ID NO: 53146 - protein, 507 aa, Escherichia coli
MKRVISYIRFSSERQAKGDSLRRQSKMVNDWLKAHPEYYLDQDLSFRDLGVSGFTGKHLKGGLGDFLTAIEKGLVKAGDTLLIESLDRLSRQAVDRASELLRNILRSGVDVVTLSDGEHYTSESLKDPLALIKSILIMQRAHEESLRKSERIQAAWNRKKELISEGIKVSKRCPAWLRLNDDRKSFSVIPDKVETVKRCFQLRLEGKSIWEIVRTLNDEGHQTLNQYKAGKFGQTSVQDLLKNRSVIGYFTPKGCEEISGYYPAIIDETTFYKVQQLSHYRYGRKPVSDKPLSVNLFKGVIRCSECGHALIITGFSDTRSGIYRCPLRNENRCSAKGLSRKQTDGTLLTLLSRLDRFDSDTTNTIDTLKLHREHISSNIEKLVQLSLEIEDLSAITSKLKQLKGELSQVDADIEKETQRLKSIDVGCLSDCDLTTKAGRIEAQLIIKSAVKEVVLNTAKRRCKVTFHNGKSITLPITENPSEDVTEAIQSLSEVTERGLIDVDVVEI

SEQ ID NO: 53147 - DNA, 50 bp, Escherichia coli; identical to SEQ ID NO: 47642
  source 1..50: mol_type = genomic DNA

SEQ ID NO: 53148 - DNA, 40 bp, Escherichia coli; identical to SEQ ID NO: 5188
  source 1..40: mol_type = genomic DNA

SEQ ID NO: 53149 - DNA, 40 bp, Escherichia coli; identical to SEQ ID NO: 5188
  source 1..40: mol_type = genomic DNA

SEQ ID NO: 53150 - DNA, 50 bp, Escherichia coli; identical to SEQ ID NO: 21330
  source 1..50: mol_type = genomic DNA

SEQ ID NO: 53151 - protein, 507 aa, Escherichia coli
MKRVISYIRFSSERQAKGDSLRRQAKMVTDWLKAHPEYYLDESLTFRDLGVSGFTGKHLKGGLGDFLTAIEKGLVKAGDTLLIESLDRLSRQDVDQASELLRNILRSGVDVVTLSDGEHYTRESLKDPLALIKSILIMQRSHEESLRKSERIQAAWDAKKEAAKAGIKISKRCPAWLKLNDDRKTFSVIPEKVETVRRCFQLRLEGKSIWEIVRTLNDEGHQTLNQYKAGKFGQTSVQDLLKNRSVIGYFTPKGCEEIAGYFPPIIPETDFYKVQQLSYSRYGRKPASDKPLSVNLFKGVIRCSECGHALIITGFSDTRSGIYRCPSRNENRCNAKGLSRKQTDSTLLALLSRLDRFDSDMTNTVDTLKLHREHISSNIEKLVQLSLEIEDLSAITSKLKQLKGELSQVDADIEKETQRLKSIDVGCLSDCDLTTKAGRIEAQLIIKSAVKEVVLNTAKRRCKVTFHNGKIIDLPITENPSEDVTEAIQSLSEVTERGLIDVDVVEI

SEQ ID NO: 53152 - DNA, 50 bp, Escherichia coli; identical to SEQ ID NO: 47642
  source 1..50: mol_type = genomic DNA

SEQ ID NO: 53153 - DNA, 40 bp, Escherichia coli
  source 1..40: mol_type = genomic DNA
tggcgttaatcgggtaattttagacagccgtccggttcat

SEQ ID NO: 53154 - DNA, 40 bp, Escherichia coli; identical to SEQ ID NO: 53153
  source 1..40: mol_type = genomic DNA

SEQ ID NO: 53155 - DNA, 50 bp, Escherichia coli; identical to SEQ ID NO: 21330
  source 1..50: mol_type = genomic DNA

SEQ ID NO: 53156 - protein, 507 aa, Salmonella enterica
MKRVISYIRFSSERQAKGDSLRRQSKMVNDWLKAHPEYYLDQDLSFRDLGVSGFTGKHLKGGLGDFLTAIEKGLVKAGDTLLIESLDRLSRQDVDQASELLRNILRSGVDVVTLSDGEHYTKESLRDPLSLIKSILIMQRAHEESLRKAERIQAAWDAKKEAAKAGIKISRRCPAWLKLNDDRKSFSVIPEKVETVKRCFQLRLEGKSIWEIVRTLNAEGHQTLNQYKAGKFGQTSVQDLLKNRSVIGYFTPKGCEEISGYYPAIIDETTFYKVQQLSYARYGRKPASDKPMAVNLFKGVIRCSECGHALIITGFSDTRNGIYRCPLRNENRCSAKGLSRKQTDGTLLALLSRLDRFDSDMTNTIDTLKLHREHISSNIEKLVQLSLEIEDLSAITSKLRQLKNELSQVDADIEKETQRLKSIDVGCLSDCDLTTKAGRIEAQLIIKSAVKEVVLNTAKRRCKVTFHNGKTITLPITENPSDNVTGAIQSLSEVTERGLIDVDEVII

SEQ ID NO: 53157 - DNA, 50 bp, Salmonella enterica
  source 1..50: mol_type = genomic DNA
tagtgtatttagaccttgatgattcttattagacacgtttaaatacacca

SEQ ID NO: 53158 - DNA, 40 bp, Salmonella enterica; identical to SEQ ID NO: 22693
  source 1..40: mol_type = genomic DNA

SEQ ID NO: 53159 - DNA, 40 bp, Salmonella enterica
  source 1..40: mol_type = genomic DNA
cggcgtaaaccgcgtgatcttggatagtcgtccggtacat

SEQ ID NO: 53160 - DNA, 50 bp, Salmonella enterica; identical to SEQ ID NO: 21330
  source 1..50: mol_type = genomic DNA

SEQ ID NO: 53161 - protein, 507 aa, Salmonella enterica; identical to SEQ ID NO: 53156

SEQ ID NO: 53162 - DNA, 50 bp, Salmonella enterica; identical to SEQ ID NO: 53157
  source 1..50: mol_type = genomic DNA

SEQ ID NO: 53163 - DNA, 40 bp, Salmonella enterica
  source 1..40: mol_type = genomic DNA
cggcgtaaaccgcgtgatcctggatagtcgtccggttcat

SEQ ID NO: 53164 - DNA, 40 bp, Salmonella enterica
  source 1..40: mol_type = genomic DNA
cggcgtaaaccgcgtgatcttggatagtcgtccggttcat

SEQ ID NO: 53165 - DNA, 50 bp, Salmonella enterica; identical to SEQ ID NO: 21330
  source 1..50: mol_type = genomic DNA

SEQ ID NO: 53166 - protein, 507 aa, Escherichia coli
MKRVISYIRFSSERQAKGDSLRRQSKMVNDWLKAHPEYYLDQDLSFRDLGVSGFTGKHLKGGLGDFLTAIEKGLVKAGDTLLIESLDRLSRQDVDQASELLRNILRSGVDVVTLSDGEHYTKESLRDPLSLIKSILIMQRAHEESLRKAERIQAAWDAKKEAAKAGIKISRRCPAWLKLNDDRKSFSVIPEKVETVKRCFQLRLEGKSIWEIVRTLNAEGHQTLNQYKAGKFGQTSVQDLLKNRSVIGYFTPKGCEEISGYYPAIIDETTFYKVQQLSYARYGRKPASDKPMAVNLFKGVIRCSECGHALIITGFSDTRNGIYRCPLRNENRCSAKGLSRKQTDGTLLALLSRLDRFDSDMTNTIDTLKLHREHISSNIEKLVQLSLEIEDLSAITSKLRQLKNELSQVDADIEKETQRLKSIDVGCLSDCDLTTKAGRIEAQLIIKSAVKEVVLNTAKRRCKVTFHNGKTITLPITENPSEDVTEAIQSLSEVTERGLIDVDEVII

SEQ ID NO: 53167 - DNA, 50 bp, Escherichia coli; identical to SEQ ID NO: 47642
  source 1..50: mol_type = genomic DNA

SEQ ID NO: 53168 - DNA, 40 bp, Escherichia coli; identical to SEQ ID NO: 5188
  source 1..40: mol_type = genomic DNA

SEQ ID NO: 53169 - DNA, 40 bp, Escherichia coli; identical to SEQ ID NO: 5188
  source 1..40: mol_type = genomic DNA

SEQ ID NO: 53170 - DNA, 50 bp, Escherichia coli; identical to SEQ ID NO: 21330
  source 1..50: mol_type = genomic DNA

SEQ ID NO: 53171 - protein, 507 aa, Escherichia coli
MKRVISYIRFSSERQAKGDSLRRQSKMVNDWLKAHPEYYLDQDLSFRDLGVSGFTGKHLKGGLGDFLTAIEKGLVKAGDTLLIESLDRLSRQDIDIASELLRRILRAGVDVVTLSDGEHYTKESLRDPLSLIKSILIMQRAHEESLRKAERIQAAWDAKKEAAKAGIKISRRCPAWLKLNDDRKSFSVIPEKVETVKRCFQLRLEGKSIWEIVRTLNAEGHQTLNQYKAGKFGQTSVQDLLKNRSVIGYFTPKGCEEISGYYPAIIDETTFYKVQQLSYARYGRKPASDKPMAVNLFKGVIRCSECGHALIITGFSDTRNGIYRCPLRNENRCSAKGLSRKQTDGTLLALLSRLDRFDSDTTNTIDTLKLHREHISSNIEKLVQLSLEIEDLSAITSKLRQLKNELSQVDADIEKETQRLKSIDVGCLSDCDLTTKAGRIEAQLIIKSAVKEVVLNTAKRRCKVTFHNGKVIDLPITENPSEDVTEAIQSLSEVTERGLIDVDEVII

SEQ ID NO: 53172 - DNA, 50 bp, Escherichia coli; identical to SEQ ID NO: 47642
  source 1..50: mol_type = genomic DNA

SEQ ID NO: 53173 - DNA, 40 bp, Escherichia coli; identical to SEQ ID NO: 5188
  source 1..40: mol_type = genomic DNA

SEQ ID NO: 53174 - DNA, 40 bp, Escherichia coli; identical to SEQ ID NO: 5188
  source 1..40: mol_type = genomic DNA

SEQ ID NO: 53175 - DNA, 50 bp, Escherichia coli; identical to SEQ ID NO: 21330
  source 1..50: mol_type = genomic DNA

SEQ ID NO: 53176 - protein, 507 aa, Escherichia coli
MKRVISYIRFSSERQAKGDSLRRQSKMVNDWLKAHPEYYLDQDLSFRDLGVSGFTGKHLKGGLGDFLTAIEKGLVKAGDTLLIESLDRLSRQAVDQASELLRNILRSGVDVVTLSDGEHYTRESLKDPLALIKSILIMQRSHEESLRKSERIQAAWNRKKELISEGIKISKRCPAWLRLNDDRKSFSVIPDKVETVKRCFQLRLEGKSIWEIVRTMNAEGHQTLNQYKAGSFGQTSVQDLLKNRSVIGYFTPKGCEEISGYYPAIIDETTFYKVQQLSYARYGRKPASDKPMAVNLFKGVIRCSECGHALIITGFSDTRNGIYRCPLRNENRCSAKGLSRKQTDGTLLALLSRLDRFDSDTTNVIDMLRLHREHISNNIEKLVQLSLEIEDLNAITNKLKQLKNELSQVDADIEKETQRLKSIDVGCLSDCDLSTKAGRIEAQLIIKSAVKEVVLNTTKRRCKVTFHNGKVIDLSITENPSEDVTEAIQSLSEVTERGLIDVDEVII

SEQ ID NO: 53177 - DNA, 50 bp, Escherichia coli; identical to SEQ ID NO: 47642
  source 1..50: mol_type = genomic DNA

SEQ ID NO: 53178 - DNA, 40 bp, Escherichia coli; identical to SEQ ID NO: 5188
  source 1..40: mol_type = genomic DNA

SEQ ID NO: 53179 - DNA, 40 bp, Escherichia coli; identical to SEQ ID NO: 5188
  source 1..40: mol_type = genomic DNA

SEQ ID NO: 53180 - DNA, 50 bp, Escherichia coli; identical to SEQ ID NO: 21330
  source 1..50: mol_type = genomic DNA

SEQ ID NO: 53181 - protein, 507 aa, Escherichia coli
MKRVISYIRFSSERQAKGDSLRRQSKMVNDWLKAHPEYYLDQDLSFRDLGVSGFTGKHLKGGLGDFLTAIEKGLVKAGDTLLIESLDRLSRQDVDQASELLRNILRSGVDVVTLSDGEHYTKESLRDPLSLIKSILIMQRAHEESLRKAERIQAAWDAKKEAAKAGIKISRRCPAWLKLNDDRKSFSVIPEKVETVKRCFQLRLEGKSIWEIVRTLNAEGHQTLNQYKAGKFGQTSVQDLLKNRSVIGYFTPKGCEEISGYYPAIIDETTFYKVQQLSYARYGRKPASDKPMAVNLFKGVIRCSECGHALIITGFSDTRNGIYRCPLRNENRCSAKGLSRKQTDGTLLALLSRLDRFDSDMTNTIDTLKLHREHISSNIEKLVQLSLEIEDLSAITSKLRQLKNELSQVDADIEKETQRLKSIDVGCLSDCDLTTKAGRIEAQLIIKSAVKEVVLNTAKRRCKVTFHNGKTITLPITENPSDNVTEAIQSLSEVTERGLIDVDEVII

SEQ ID NO: 53182 - DNA, 50 bp, Escherichia coli; identical to SEQ ID NO: 47642
  source 1..50: mol_type = genomic DNA

SEQ ID NO: 53183 - DNA, 40 bp, Escherichia coli; identical to SEQ ID NO: 5188
  source 1..40: mol_type = genomic DNA

SEQ ID NO: 53184 - DNA, 40 bp, Escherichia coli; identical to SEQ ID NO: 5188
  source 1..40: mol_type = genomic DNA

SEQ ID NO: 53185 - DNA, 50 bp, Escherichia coli; identical to SEQ ID NO: 21330
  source 1..50: mol_type = genomic DNA

SEQ ID NO: 53186 - protein, 507 aa, Escherichia coli
MKRAISYIRFSSEKQSRGDSLRRQSKMVTDWLKAHPEYYLDQDLSFRDLGVSGFTGKHLKGGLGDFLTAIEKGLVKAGDTLLIESLDRLSRQAVDRASELLRNILRSGVDVVTLSDGEHYTKESLRDPLSLIKSILIMQRAHEESLRKSERIQAAWDAKKEAAKAGIKVSKRCPAWLKLNDDRKSFSVIPEKVETVRRCFQLRLEGKSIWEIVRTMNAEGHQTLHQHKPGSFGQSSVQDLLKNRSVIGYFTPKGCEEISGYYPAIIDETTFYKVQQLSYARHGRKPASDKPLSVNLFKGVIRCSECGHALIITGFSDTRSGIYRCPLRNENRCSAKGLSRKQTDGTLLTLLSRLDRFDSDTTNTIDMLRLHREHISSNIEKLVQLSLEIEDLSAITIKLKQLKGELSQVDADIEKETQRLKSIDTGSLSDCDLSTKAGRIEAQLIIKSAVKEVVLNTAKRRCKVTFHNSKSITLPITENPSEDVTEAIQSLSEVTERGLIDVDVVEI

SEQ ID NO: 53187 - DNA, 50 bp, Escherichia coli; identical to SEQ ID NO: 47642
  source 1..50: mol_type = genomic DNA

SEQ ID NO: 53188 - DNA, 40 bp, Escherichia coli; identical to SEQ ID NO: 5188
  source 1..40: mol_type = genomic DNA

SEQ ID NO: 53189 - DNA, 40 bp, Escherichia coli; identical to SEQ ID NO: 5188
  source 1..40: mol_type = genomic DNA

SEQ ID NO: 53190 - DNA, 50 bp, Escherichia coli; identical to SEQ ID NO: 21330
  source 1..50: mol_type = genomic DNA

SEQ ID NO: 53191 - protein, 507 aa, Escherichia coli
MKRVISYIRFSSERQAKGDSLRRQSKMVNDWLKAHPEYYLDQDLSFRDLGVSGFTGKHLKGGLGDFLTAIEKGLVKAGDTLLIESLDRLSRQDVDQASELLRNILRSGVDVVTLSDGEHYTKESLRDPLSLIKSILIMQRAHEESLRKAERIQAAWDAKKEAAKAGIKISRRCPAWLKLNDDRKSFSVIPEKVETVKRCFQLRLEGKSIWEIVRTLNAEGHQTLNQYKAGKFGQTSVQDLLKNRSVIGYFTPKGCEEISGYYPAIIDETTFYKVQQLSYARYGRKPASDKPMAVNLFKGVIRCSECGHALIITGFSDTRNGIYRCPLRNENRCSAKGLSRKQTDGTLLALLSRLDRFDSDTTNTIDTLKLHREHISSNIEKLVQLSLEIEDLSAITSKLRQLKNELSQVDADIEKETQRLKSIDVGCLSDCDLTTKAGRIEAQLIIKSAVKEVVLNTAKRRCKVTFHNGKVIDLPITENPSDNVTEAIQSLSEVTERGLIDVDEVII

SEQ ID NO: 53192 - DNA, 50 bp, Escherichia coli; identical to SEQ ID NO: 47642
  source 1..50: mol_type = genomic DNA

SEQ ID NO: 53193 - DNA, 40 bp, Escherichia coli; identical to SEQ ID NO: 5188
  source 1..40: mol_type = genomic DNA

SEQ ID NO: 53194 - DNA, 40 bp, Escherichia coli; identical to SEQ ID NO: 5188
  source 1..40: mol_type = genomic DNA

SEQ ID NO: 53195 - DNA, 50 bp, Escherichia coli; identical to SEQ ID NO: 21330
  source 1..50: mol_type = genomic DNA

SEQ ID NO: 53196 - protein, 507 aa, Escherichia coli
MKRAISYIRFSSEKQSRGDSLRRQSKMVNDWLKAHPEYYLDQDLSFRDLGVSGFTGKHLKGGLGDFLTAIEKGLVKAGDTLLIESLDRLSRQNVDRASELLRNILRSGVDVVTLSDGEHYTRESLKDPLALIKSILIMQRSHEESLRKSERIQAAWNRKKELISEGIKISKRCPAWLRLNDDRKSFSVIPEKVETVKRCFQLRLEGKSIWEIVRTLNAEGHQTLNQYKAGKFGQTSVQDLLKNRSVIGYFTPKGREEISGYYPAIVDETTFYKVQQLSYARHGRKPASAKPLSVNLFKGVIRCSECGHALIITGFSDTRSGIYRCPLRNENRCSAKGLSRKQTDGTLLALLSRLDRFDSDTTNTIDTLKLHREHISSNIEKLVQLSLEIEDLNAITNKLKQLKNELSQVDADIEKETQRLKSIDVGCLSDCDLTTKAGRIEAQLIIKSAVKEVVLNTAKRRCKVTFHNGKVFDLPITENPSDNVTEAIQSLSEVIERGLIDVDVVAI

SEQ ID NO: 53197 - DNA, 50 bp, Escherichia coli; identical to SEQ ID NO: 47642
  source 1..50: mol_type = genomic DNA

SEQ ID NO: 53198 - DNA, 40 bp, Escherichia coli; identical to SEQ ID NO: 5188
  source 1..40: mol_type = genomic DNA

SEQ ID NO: 53199 - DNA, 40 bp, Escherichia coli; identical to SEQ ID NO: 5188
  source 1..40: mol_type = genomic DNA

SEQ ID NO: 53200 - DNA, 50 bp, Escherichia coli; identical to SEQ ID NO: 21330
  source 1..50: mol_type = genomic DNA

SEQ ID NO: 53201 - protein, 507 aa, Escherichia coli
MKRVISYIRFSSEKQAKGDSLRRQSKMVTDWLKAHPEYYLDQDLSFRDLGVSGFTGKHLKGGLGDFLTAIEKGLVKAGDTLLIESLDRLSRQDIDIASELLRRILRAGVDVVTLSDGEHYTSESLKDPLALIKSILIMQRSHEESLRKSERIQAAWNRKKELISEGIKISKRCPAWLKLNDDRKSFSVIPDKVETVKRCFQLRLEGKSIWEIVRTLNAEGHRSMNQYKPGKFGQTSVQDLLKNRSVIGYFTPKGCEEISGYYPAIIDETTFYKVQQLSHYRYGRKPVSDKPLSVNLFKGVIRCSECGHALIITGFSDTRNGIYRCPLRNENRCSAKGLSRKQTDGTLLTLLSRLDRFDSDTTNTIDMLRLHREHISSNIEKLVQLSLEIEDLSAITNKLKQLKNELSQVDADIEKETQRLKSIDTGSLSDCDLSTKAGRIEAQLIIRSAVKEVVLNTAKRRCKVTFHNGRAITLPITENPSEDVTEAIQSLSEVTERGLIDVDVVEI

SEQ ID NO: 53202 - DNA, 50 bp, Escherichia coli; identical to SEQ ID NO: 47642
  source 1..50: mol_type = genomic DNA

SEQ ID NO: 53203 - DNA, 40 bp, Escherichia coli; identical to SEQ ID NO: 5188
  source 1..40: mol_type = genomic DNA

SEQ ID NO: 53204 - DNA, 40 bp, Escherichia coli; identical to SEQ ID NO: 5188
  source 1..40: mol_type = genomic DNA

SEQ ID NO: 53205 - DNA, 50 bp, Escherichia coli; identical to SEQ ID NO: 21330
  source 1..50: mol_type = genomic DNA

SEQ ID NO: 53206 - protein, 507 aa, Escherichia coli
MKRVISYIRFSSERQAKGDSLRRQSKMVNDWLKAHPEYYLDQDLSFRDLGVSGFTGKHLKGGLGDFLTAIEKGLVKAGDTLLIESLDRLSRQDVDQASELLRNILRSGVDVVTLSDGEHYTKESLRDPLSLIKSILIMQRAHEESLRKAERIQAAWDAKKEAAKAGIKISKRCPAWLKLNDDRKSFSVIPEKVETVKRCFQLRLEGKSIWEIVRTLNAEGHQTLNQYKAGKFGQTSVQDLLKNRSVIGYFTPKGCEEISGYYPAIIDETTFYKVQQLSYARYGRKPASDKPMAVNLFKGVIRCSECGHALIITGFSDTRNGIYRCPLRNENRCSAKGLSRKQTDGTLLALLSRLDRFDSDMTNTIDTLKLHREHISSNIEKLVQLSLEIEDLSAITSKLRQLKNELSQVDADIEKETQRLKSIDVGCLSDCDLTTKAGRIEAQLIIKSAVKEVVLNTAKRRCKVTFHNGKVIDLSITENPSEDVTEAIQSLSEVTERGLIDVDEVII

SEQ ID NO: 53207 - DNA, 50 bp, Escherichia coli; identical to SEQ ID NO: 47642
  source 1..50: mol_type = genomic DNA

SEQ ID NO: 53208 - DNA, 40 bp, Escherichia coli; identical to SEQ ID NO: 5188
  source 1..40: mol_type = genomic DNA

SEQ ID NO: 53209 - DNA, 40 bp, Escherichia coli; identical to SEQ ID NO: 5188
  source 1..40: mol_type = genomic DNA

SEQ ID NO: 53210 - DNA, 50 bp, Escherichia coli; identical to SEQ ID NO: 21330
  source 1..50: mol_type = genomic DNA

SEQ ID NO: 53211 - protein, 507 aa, Escherichia coli
MKRAISYIRFSSEKQSRGDSLRRQSKMVTDWLKAHPEYYLDQDLSFRDLGVSGFTGKHLKGGLGDFLTAIEKGLVKAGDTLLIESLDRLSRQDVDQASELLRNILRSGVDVVTLSDGEHYTRESLKDPLALIKSILIMQRAHEESLRKAERIQAAWDAKKEAAKAGIKISRRCPAWLRLNDDRKTFSVIPEKVATVKRCFQLRLEGKSIWEIVRTLNAEGHQTLNQYKAGSFGQSSVQDLLKNRSVIGYFTPKGCEEISSYYPSVIDETTFYKVQQLSHSRYGRKPVSDKPLSVNLFKGVIRCSECGHALIITGFSDTRNGIYRCPLRNENRCSAKGLSRKQTDGTLLTLLSRLDRFDSDTTNTIDTLKLHREHISSNIEKLVQLSLEIEDLSAITSKLKQLKGELSQVDADIEKETQRLKSIDTGSLSDCDLSTKAGRIEAQLIIKSAVKEVVLNTAKRRCKVTFHNGKLIDLPITETPSDNVTEAIQSLSEVTERGLIDVDEVII

SEQ ID NO: 53212 - DNA, 50 bp, Escherichia coli; identical to SEQ ID NO: 47642
  source 1..50: mol_type = genomic DNA

SEQ ID NO: 53213 - DNA, 40 bp, Escherichia coli; identical to SEQ ID NO: 5188
  source 1..40: mol_type = genomic DNA

SEQ ID NO: 53214 - DNA, 40 bp, Escherichia coli; identical to SEQ ID NO: 5188
  source 1..40: mol_type = genomic DNA

SEQ ID NO: 53215 - DNA, 50 bp, Escherichia coli; identical to SEQ ID NO: 21330
  source 1..50: mol_type = genomic DNA

SEQ ID NO: 53216 - protein, 507 aa, Escherichia coli
MKRAISYIRFSSEKQSRGDSLRRQSKMVTDWLKAHPEYYLDQDLSFRDLGVSGFTGKHLKGGLGDFLTAIEKGLVKAGDTLLIESLDRLSRQNVDRASELLRNILRSGVDVVTLSDGEHYTRESLKDPLALIKSILIMQRSHEESLRKSERIQAAWNRKKELISEGIKISKRCPAWLKLNDDRKSFSVIPDKVETVKRCFQLRLEGKSIWEIVRTLNAEGHRSMNQYKPGKFGQTSVQDLLKNRSVIGYFTPKGCEEIAGYYPSVIDETTFYKVQQLSYARHGRKPASAKPLSVNLFKGVIRCSECGHALIITGFSDTRSGIYRCPLRNENRCSAKGLSRKQTDGTLLTLLSRLDRFDSDTTNTIDMLRLHREHISSNIEKLVQLSLEIEDLSAITIKLKQLKGELSQVDADIEKETQRLKSIDVGCLSDCDLTTKAGRIEAQLIIKSAVKEVVLNTAKRRCKVTFHNGKVIDLPITENPSEDVTEAIQSLSEVTAKGLIDVDEVII

SEQ ID NO: 53217 - DNA, 50 bp, Escherichia coli; identical to SEQ ID NO: 47642
  source 1..50: mol_type = genomic DNA

SEQ ID NO: 53218 - DNA, 40 bp, Escherichia coli; identical to SEQ ID NO: 5188
  source 1..40: mol_type = genomic DNA

SEQ ID NO: 53219 - DNA, 40 bp, Escherichia coli; identical to SEQ ID NO: 5188
  source 1..40: mol_type = genomic DNA

SEQ ID NO: 53220 - DNA, 50 bp, Escherichia coli; identical to SEQ ID NO: 21330
  source 1..50: mol_type = genomic DNA

SEQ ID NO: 53221 - protein, 507 aa, Escherichia coli
MKRVISYIRFSSERQAKGDSLRRQSKMVNDWLKAHPEYYLDQDLSFRDLGVSGFTGKHLKGGLGDFLTAIEKGLVKAGDTLLIESLDRLSRQDVDQASELLRNILRSGVDVVTLSDGEHYTKESLRDPLSLIKSILIMQRAHEESLRKAERIQAAWDAKKEAAKAGIKISRRCPAWLKLNDDRKSFSVIPEKVETVKRCFQLRLEGKSIWEIVRTLNAEGHQTLNQYKAGKFGQTSVQDLLKNRSVIGYFTPKGCEEISGYYPSIIHETDFYKVQQLSYARYGRKPASDKPLSVNLFKGVIRCSECGHALIITGFSDTRSGIYRCPLRNENRCSAKGLSRKQTDGTLLTLLSRLDRFDSDTTNIIDMLRLHREHISSNIEKLVQLSLEIEDLNAITSKLKQLKGELSQVDADIEKETQRLKSIDMGCLSDCDLTTKAGRIEAQLIIKSAVKEVVLNTAKRRCKVTFHNGKAITLPITENPSEDVTEAIQSLSEVTERGLIDVDEVII

SEQ ID NO: 53222 - DNA, 50 bp, Escherichia coli; identical to SEQ ID NO: 47642
  source 1..50: mol_type = genomic DNA

SEQ ID NO: 53223 - DNA, 40 bp, Escherichia coli; identical to SEQ ID NO: 5188
  source 1..40: mol_type = genomic DNA

SEQ ID NO: 53224 - DNA, 40 bp, Escherichia coli; identical to SEQ ID NO: 5188
  source 1..40: mol_type = genomic DNA

SEQ ID NO: 53225 - DNA, 50 bp, Escherichia coli; identical to SEQ ID NO: 21330
  source 1..50: mol_type = genomic DNA

SEQ ID NO: 53226 - protein, 507 aa, Escherichia coli
MKRVISYIRFSSEKQAKGDSLRRQSKMVTDWLKAHPEYYLDQDLSFRDLGVSGFTGKHLKGGLGDFLTAIEKGLVKAGDTLLIESLDRLSRQAVDRASELLRNILRSGVDVVTLSDGEHYTKESLRDPLSLIKSILIMQRSHEESLRKSERIQAAWDAKKEAAKAGIKVSKRCPAWLKLNDDRKSFSVIPDKVETVKRCFQLRLEGKSIWEIVRTLNAEGHRSMNQYKPGKFGQTSVQDLLKNRSVIGYFTPKGCEEIAGYYPSVIDETTFYKVQQLSHSRHGRKPVSDKPLSVNLFKGVIRCSECGHALIITGFSDTRNGIYRCPLRNENRCSAKGLSRKQTDGTLLTLLSRLDRFDSDTTNTIDTLKLHREHLSSNIEKLVQLSLEIEDLNAITNKLKQLKNELSQVDADIEKETQRLKSIDTGSLSDCDLSTKAGRIEAQLIIRSAVKEVVLNTAKRRCKVTFHNGKSITLPITENPSDNVTEAIQSLSEVTERGLIDVDVVEI

SEQ ID NO: 53227 - DNA, 50 bp, Escherichia coli; identical to SEQ ID NO: 47642
  source 1..50: mol_type = genomic DNA

SEQ ID NO: 53228 - DNA, 40 bp, Escherichia coli; identical to SEQ ID NO: 5188
  source 1..40: mol_type = genomic DNA

SEQ ID NO: 53229 - DNA, 40 bp, Escherichia coli; identical to SEQ ID NO: 5188
  source 1..40: mol_type = genomic DNA

SEQ ID NO: 53230 - DNA, 50 bp, Escherichia coli; identical to SEQ ID NO: 21330
  source 1..50: mol_type = genomic DNA

SEQ ID NO: 53231 - protein, 507 aa, Escherichia coli
MKRAISYIRFSSEKQSRGDSLRRQSKMVTDWLKAHPEYYLDQDLSFRDLGVSGFTGKHLKGGLGDFLTAIEKGLVKAGDTLLIESLDRLSRQNVDRASELLRNILRSGVDVVTLSDGEHYTRESLKDPLALIKSILIMQRSHEESLRKSERIQAAWNRKKELISEGIKISKRCPAWLKLNDDRKSFSVIPEKVETVKRCFQLRLEGKSIWEIVRTLNDEGHQTLNQYKAGSFGQTSVQDLLKNRSVIGYFTPKGCEEIADYYPAIIDETTFYKVQQLSYARYGRKPASDKPMAVNLFKGVIRCSECGHALIITGFSDTRSGIYRCPLRNENRCSAKGLSRKQTDGTLLTLLSRLDRFDSDTTNTIDMLRLHREHISSNIEKLVQLSLEIEDLSAITSKLKQLKGELSQVDADIEKETQRLKSIDVGCLSDCDLTTKAGRIEAQLIIKSAVKEVVLNTAKRRCKVTFHNSKSITLSITENPSEDVTEAIQSLSEVTERGLIDVDVVEI

SEQ ID NO: 53232 - DNA, 50 bp, Escherichia coli; identical to SEQ ID NO: 47642
  source 1..50: mol_type = genomic DNA

SEQ ID NO: 53233 - DNA, 40 bp, Escherichia coli; identical to SEQ ID NO: 5188
  source 1..40: mol_type = genomic DNA

SEQ ID NO: 53234 - DNA, 40 bp, Escherichia coli; identical to SEQ ID NO: 5188
  source 1..40: mol_type = genomic DNA

SEQ ID NO: 53235 - DNA, 50 bp, Escherichia coli; identical to SEQ ID NO: 21330
  source 1..50: mol_type = genomic DNA

SEQ ID NO: 53236 - protein, 507 aa, Escherichia coli
MKRVISYIRFSSERQAKGDSLRRQSKMVNDWLKAHPEYYLDQDLSFRDLGVSGFTGKHLKGGLGDFLTAIEKGLVKAGDTLLIESLDRLSRQAVDRASELLRNILRSGVDVVTLSDGEHYTSESLKDPLALIKSILIMQRAHEESLRKSERIQAAWNRKKELISEGIKISKRCPAWLKLNDDRKSFSVIPDKVETVKRCFQLRLEGKSIWEIVRTLNDEGHQTLNQYKAGKFGQTSVQDLLKNRSVIGYFTPKGCEEISGYYPAIIDETTFYKVQQLSHYRYGRKPVSDKPLSVNLFKGVIRCSECGHALIITGFSDTRSGIYRCPLRNENRCSAKGLSRKQTDGTLLTLLSRLDRFDSDTTNTIDTLKLHREHISSNIEKLVQLSLEIEDLSAITSKLKQLKGELSQVDADIEKETQRLKSIDVGCLSDCDLTTKAGRIEAQLIIKSAVKEVVLNTAKRRCKVTFHNGKVIDLPITENPSEDVTEAIQSLSEVIERGLIDADVVEI

SEQ ID NO: 53237 - DNA, 50 bp, Escherichia coli; identical to SEQ ID NO: 47642
  source 1..50: mol_type = genomic DNA

SEQ ID NO: 53238 - DNA, 40 bp, Escherichia coli; identical to SEQ ID NO: 5188
  source 1..40: mol_type = genomic DNA

SEQ ID NO: 53239 - DNA, 40 bp, Escherichia coli; identical to SEQ ID NO: 5188
  source 1..40: mol_type = genomic DNA

SEQ ID NO: 53240 - DNA, 50 bp, Escherichia coli; identical to SEQ ID NO: 21330
  source 1..50: mol_type = genomic DNA

SEQ ID NO: 53241 - protein, 507 aa, Escherichia coli
MKRVISYIRFSSERQAKGDSLRRQSKMVNDWLKAHPEYYLDQDLSFRDLGVSGFTGKHLKGGLGDFLTAIEKGLVKAGDTLLIESLDRLSRQDIDIASELLRRILRAGVDVVTLSDGEHYTRESLKDPLSLIKSILIMQRSHEESLRKSERIQAAWNRKKELISEGIKISKRCPAWLKLNDDRKSFSVIPEKVETVKRCFQLRLEGKSIWEIVRTLNAEGHQTLNQYKAGSFGQTSVQDLLKNRSVIGYFTPKGCEEISGYYPSIIHETDFYKVQQLSYSRYGRKPASDKPMAVNLFKGVIRCSECGHALIITGFSDTRSGIYRCPLRNENRCSAKGLSRKQTDGTLLALLSRLDRFDSDMTNTIDTLKLHREHISNNIEKLVQLSLEIEDLSAITIKLKQLKGELSQVDADIEKETQRLKSIDVGCLSDCDLTTKAGRIEAQLIIKSAVKEVVLNTAKRRCKVTFHNSKSITLPITENPSEDVTEAIQSLSEVTERGLIDVDEVII

SEQ ID NO: 53242 - DNA, 50 bp, Escherichia coli; identical to SEQ ID NO: 47642
  source 1..50: mol_type = genomic DNA

SEQ ID NO: 53243 - DNA, 40 bp, Escherichia coli; identical to SEQ ID NO: 5188
  source 1..40: mol_type = genomic DNA

SEQ ID NO: 53244 - DNA, 40 bp, Escherichia coli; identical to SEQ ID NO: 5188
  source 1..40: mol_type = genomic DNA

SEQ ID NO: 53245 - DNA, 50 bp, Escherichia coli; identical to SEQ ID NO: 21330
  source 1..50: mol_type = genomic DNA

SEQ ID NO: 53246 - protein, 507 aa, Escherichia coli
MKRVISYIRFSSERQAKGDSLRRQSKMVTDWLKAHPEYYLDQDLSFRDLGVSGFTGKHLKGGLGDFLTAIEKGLVKAGDTLLIESLDRLSRQAVDRASELLRNILRSGVDVVTLSDGEHYTSESLKDPLALIKSILIMQRAHEESLRKSERIQAAWNRKKELISEGIKISKRCPAWLKLNDDRKSFSVIPEKVETVKRCFQLRLEGKSIWEIVRTLNDEGHQSMSQYKPGKFGQTSVQDLLKNRSVIGYFTPKGCEEISGYFPPIIPETDFYKVQQLSYSRYGRKPASAKPLSVNLFKGVIRCSECGHALIITGFSDTRNGIYRCPLRNENRCSAKGLSRKQTDGTLLALLSRLDRFDSDTTNTVDTLKLHREHISSNIEKLVQLSLEIEDLSAITSKLKQLKGELSQVDADIEKETQRLKSIDVGCLSDCDLTTKAGRIEAQLIIKSAVKEVVLNTAKRRCKVTFHNGKVIDLPITENPSEDVTEAIQSLSEVTEKGLIDVDVVEI

SEQ ID NO: 53247 - DNA, 50 bp, Escherichia coli; identical to SEQ ID NO: 47642
  source 1..50: mol_type = genomic DNA

SEQ ID NO: 53248 - DNA, 40 bp, Escherichia coli; identical to SEQ ID NO: 5188
  source 1..40: mol_type = genomic DNA

SEQ ID NO: 53249 - DNA, 40 bp, Escherichia coli; identical to SEQ ID NO: 5188
  source 1..40: mol_type = genomic DNA

SEQ ID NO: 53250 - DNA, 50 bp, Escherichia coli; identical to SEQ ID NO: 21330
  source 1..50: mol_type = genomic DNA

SEQ ID NO: 53251 - protein, 507 aa, Escherichia coli
MKRVISYIRFSSERQAKGDSLRRQSKMVNDWLKAHPEYYLDQDLSFRDLGVSGFTGKHLKGGLGDFLTAIEKGLVKAGDTLLIESLDRLSRQDVDQASELLRNILRSGVDVVTLSDGEHYTRESLKDPLALIKSILIMQRAHEESLRKAERIQAAWNRKKELISEGIKVSRRCPAWLRLNDDRKSFSVIPEKVETVKRCFQLRLEGKSIWEIVRTLNDEGHQTLNQYKAGKFGQTSVQDLLKNRSVIGYFTPKGCCEIAGYYPSIIPESDFYKVQQLSYARGGRKPASDKPLSVNLFKGVIRCSECGHALIITGFSDARNGIYRCPLRNENRCNAKGLSRKQTDGTLLALLSRIDRFDSDMTNTIDTLKLHREHISSNIEKLVQLSLEIEDLSAITSKLKQLKGELSQVDADIEKETQRLKSIDVGCLSDCDLTTKAGRIEAQLIIKSAVKEVVLNTAKRRCKVTFHNGKVIDLPITEAPSEDVTEAIQSLSEVTERGLIDVDEVII

SEQ ID NO: 53252 - DNA, 50 bp, Escherichia coli; identical to SEQ ID NO: 47642
  source 1..50: mol_type = genomic DNA

SEQ ID NO: 53253 - DNA, 40 bp, Escherichia coli; identical to SEQ ID NO: 5188
  source 1..40: mol_type = genomic DNA

SEQ ID NO: 53254 - DNA, 40 bp, Escherichia coli; identical to SEQ ID NO: 5188
  source 1..40: mol_type = genomic DNA

SEQ ID NO: 53255 - DNA, 50 bp, Escherichia coli; identical to SEQ ID NO: 21330
  source 1..50: mol_type = genomic DNA

SEQ ID NO: 53256 - protein, 507 aa, Escherichia coli
MKRAISYIRFSSEKQSRGDSLRRQSKMVNDWLKAHPEYYLDQDLSFRDLGVSGFTGKHLKGGLGDFLTAIEKGLVKAGDTLLIESLDRLSRQDVDQASELLRNILRSGVDVVTLSDGEHYTKESLKDPLALIKSILIMQRAHEESLRKAERIQAAWDAKKEAAKAGIKISRRCPAWLKLNDDRKSFSVIPEKVETVKRCFQLRLEGKSIWEIVRTLNAEGHRSMNQYKPGKFGQTSVQDLLKNRSVIGYFTPKGCEEISGYYPAIIDETTFYKVQQLSHSRYGKRSVSDKPLSVNLFKGVIRCSECGHALIITGFSDTRNGIYRCPLRNENRCNAKGLSRKQTDGTLLALLSRLDRFDSDMTNVIDALKLHREHISNNIEKLVQLSLEIEDLSAITIKLKQLKGELSQVDADIEKETQRLKSIDVGCLSDCDLTTKAGRIEAQLIIKSAVKEVVLNTAKRRCKVTFHNSKSITLPITENPSEDVTEAIQSLSEVTERGLIDVDEVII

SEQ ID NO: 53257 - DNA, 50 bp, Escherichia coli; identical to SEQ ID NO: 47642
  source 1..50: mol_type = genomic DNA

SEQ ID NO: 53258 - DNA, 40 bp, Escherichia coli; identical to SEQ ID NO: 5188
  source 1..40: mol_type = genomic DNA

SEQ ID NO: 53259 - DNA, 40 bp, Escherichia coli; identical to SEQ ID NO: 5188
  source 1..40: mol_type = genomic DNA

SEQ ID NO: 53260 - DNA, 50 bp, Escherichia coli; identical to SEQ ID NO: 21330
  source 1..50: mol_type = genomic DNA

SEQ ID NO: 53261 - protein, 507 aa, Escherichia coli
MKRAISYIRFSSEKQSRGDSLRRQSKMVNDWLKAHPEYYLDQDLSFRDLGVSGFTGKHLKGGLGDFLTAIEKGLVKAGDTLLIESLDRLSRQNVDRASELLRNILRSGVDVVTLSDGEHYTRESLKDPLALIKSILIMQRSHEESLRKSERIQAAWNRKKELISEGIKISKRCPAWLRLNDDRKSFSVIPEKVETVKRCFQLRLEGKSIWEIVRTLNDEGHQTLHQHRAGKFGQTSVQDLLKNRSVIGYFTPKGCEEISGYYPAIIDETTFYKVQQLSYARYGRKPASDKPMAVNLFKGVIRCSECGHALIITGFSDTRNGIYRCPLRNENRCSAKGLSRKQTDGTLLALLSRLDRFDSDMTNTIDTLKLHREHISSNIEKLVQLSLEIEDLSAITSKLRQLKNELSQVDADIEKETQRLKSIDVGCLSDCDLTTKAGRIEAQLIIKSAVKEVVLNTAKRRCKVTFHNGKAITLPITENPSEDVTEAIQSLSEVTEKGLIDVDEVII

SEQ ID NO: 53262 - DNA, 50 bp, Escherichia coli; identical to SEQ ID NO: 47642
  source 1..50: mol_type = genomic DNA

SEQ ID NO: 53263 - DNA, 40 bp, Escherichia coli; identical to SEQ ID NO: 5188
  source 1..40: mol_type = genomic DNA

SEQ ID NO: 53264 - DNA, 40 bp, Escherichia coli; identical to SEQ ID NO: 5188
  source 1..40: mol_type = genomic DNA

SEQ ID NO: 53265 - DNA, 50 bp, Escherichia coli; identical to SEQ ID NO: 21330
  source 1..50: mol_type = genomic DNA

SEQ ID NO: 53266 - protein, 507 aa, Escherichia coli
MKRVISYIRFSSEKQAKGDSLRRQSKMVTDWLKAHPEYYLDQDLSFRDLGVSGFTGKHLKGGLGDFLTAIEKGLVKAGDTLLIESLDRLSRQDIDIASELLRRILRAGVDIVTLSDGEHYTKESLKDPLSLIKSILIMQRAHEESLRKSERIQAAWNRKKELISEGIKVSRRCPAWLRLNDDRKSFSVIPDKVETVKRCFQLRLEGKSIWEIVRTLNAEGHRSMNQYKPGKFGQTSVQDLLKNRSVIGYFTPKGCEEIAGYYPSVIDETTFYKVQQLSHSRYGRRSVSGKPLSVNLFRGVIRCSECGHALIITGFSDTRSGIYRCPLRNENRCSAKGLSRKQTDGTLLALLSRLDRFDSDTTNTIDTLKLHREHISSNIEKLVQLSLEIEDLNAITSKLKQLKNELSQVDADIEKETQRLKSIDVGCLSDCDLTTKAGRIEAQLIIKSAVKEVVLNTAKRRCKVTFHNGRLIDLPITENPSEDVTEAIQSLSEVTERGLIDVDVVEI

SEQ ID NO: 53267 - DNA, 50 bp, Escherichia coli; identical to SEQ ID NO: 47642
  source 1..50: mol_type = genomic DNA

SEQ ID NO: 53268 - DNA, 40 bp, Escherichia coli; identical to SEQ ID NO: 5188
  source 1..40: mol_type = genomic DNA

SEQ ID NO: 53269 - DNA, 40 bp, Escherichia coli; identical to SEQ ID NO: 5188
  source 1..40: mol_type = genomic DNA

SEQ ID NO: 53270 - DNA, 50 bp, Escherichia coli; identical to SEQ ID NO: 21330
  source 1..50: mol_type = genomic DNA

SEQ ID NO: 53271 - protein, 507 aa, Escherichia coli
MKRAISYIRFSSEKQSRGDSLRRQSKMVNDWLKAHPEYYLDQDLSFRDLGVSGFTGKHLKGGLGDFLTAIEKGLVKAGDTLLIESLDRLSRQDVDQASELLRNILRSGVDVVTLSDGEHYTKESLKDPLALIKSILIMQRSHEESLRKSERIQAAWDAKKEAAKAGIKIYKRCPAWLKLNDDRKTFSVIPEKVETVKRCFQLRLEGKSIWEIVRTLNDEGHQTLNQYKADKFGQTSVQDLLKNRSVIGYFTPKGCEEIAGYFPPIIPETDFYKVQQLSYSRYGRKPASDKPLSVNLFKGVIRCSECGHALIITGFSDTRNGIYRCPLRNENRCSAKGLSRKQTDGTLLALLSRIDRFDSDMTNTIDTLKLHREHISSNIEKLVQLSLEIEDLSAITSKLKQLKGELSQVDADIEKETQRLKSIDVGCLSDCDLTTKAGRIEAQLIIKSAVKEVILNTAKRRCKVTFHNSKSITLPITETPSEDVTEAIQSLSEVTERGLIDVDEVII

SEQ ID NO: 53272 - DNA, 50 bp, Escherichia coli; identical to SEQ ID NO: 47642
  source 1..50: mol_type = genomic DNA

SEQ ID NO: 53273 - DNA, 40 bp, Escherichia coli; identical to SEQ ID NO: 5188
  source 1..40: mol_type = genomic DNA

SEQ ID NO: 53274 - DNA, 40 bp, Escherichia coli; identical to SEQ ID NO: 5188
  source 1..40: mol_type = genomic DNA

SEQ ID NO: 53275 - DNA, 50 bp, Escherichia coli; identical to SEQ ID NO: 21330
  source 1..50: mol_type = genomic DNA

SEQ ID NO: 53276 - protein, 507 aa, Escherichia coli
MKRVISYIRFSSERQAKGDSLRRQSKMVNDWLKAHPEYYLDQDLSFRDLGVSGFTGKHLKGGLGDFLTAIEKGLVKAGDTLLIESLDRLSRQAVDRASELLRNILRSGVDVVTLSDGEHYTSESLKDPLALIKSILIMQRAHEESLRKSERIQAAWDAKKEAAKAGIKVSKRCPAWLRLNDDRKSFSVIPEKVETVKRCFQLRLEGKSIWEIVRTLNDEGHQSMSQYKPGSFGQSSVQDLLKNRSVIGYFTPKGCEEIAGYYPAIIDETTFYKVQQLSYARHGRKPASAKPLSVNLFKGVIRCSECGHALIITGFSDTRNGIYRCPLRNENRCSAKGLSRKQTDGTLLTLLSRLDRFDSDTTNTVDMLRLHREHISSNIEKLVQLSLEIEDLSAITSKLKQLKNELSQVDADIEKETQRLKSIDVGCLSDCDLSTKAGRIEAQLIIRSAVKEVVLNTAKRRCKVTFHNGKSITLPITENPSEDVTEAIQSLSEVTERGLIDVDEVII

SEQ ID NO: 53277 - DNA, 50 bp, Escherichia coli; identical to SEQ ID NO: 47642
  source 1..50: mol_type = genomic DNA

SEQ ID NO: 53278 - DNA, 40 bp, Escherichia coli; identical to SEQ ID NO: 5188
  source 1..40: mol_type = genomic DNA

SEQ ID NO: 53279 - DNA, 40 bp, Escherichia coli; identical to SEQ ID NO: 5188
  source 1..40: mol_type = genomic DNA

SEQ ID NO: 53280 - DNA, 50 bp, Escherichia coli; identical to SEQ ID NO: 21330
  source 1..50: mol_type = genomic DNA

SEQ ID NO: 53281 - protein, 507 aa, Escherichia coli
MKRVISYIRFSSERQAKGDSLRRQSKMVTDWLKAHPEYYLDESLTFRDLGVSGFTGKHLKGGLGDFLTAIEKGLVKAGDTLLIESLDRLSRQAVDRASELLRNILRSGVDVVTLSDGEHYTSESLKDPLALIKSILIMQRAHEESLRKSERIQAAWNRKKELISEGIKISKRCPAWLRLNDDRKSFSVIPEKVETVKRCFQLRLEGKSIWEIVRTLNDEGHQSMSQYKPGKFGQTSVQDLLKNRSVIGYFTPKGCEEISGYFPSIIPETDFYKVQQLSYSRYGRKPASDKPLSVNLFKGVIRCSECGHALIITGFSDTRNGIYRCPLRNENRCSAKGLSRKQTDGTLLALLSRLDRFDSDTTNIIDTLKLHREHISSNIEKLVQLSLEIEDLSAITSKLKQLKGELSQVDADIEKETQRLKSIDVGCLSDCDLTTKAGRIEAQLIIKSAVKEVVLNTAKRRCKVTFHNGKIIDLPITENPSEDVTEAIQSLSEVTERGLIDVDEVII

SEQ ID NO: 53282 - DNA, 50 bp, Escherichia coli; identical to SEQ ID NO: 47642
  source 1..50: mol_type = genomic DNA

SEQ ID NO: 53283 - DNA, 40 bp, Escherichia coli; identical to SEQ ID NO: 21333
  source 1..40: mol_type = genomic DNA

SEQ ID NO: 53284 - DNA, 40 bp, Escherichia coli; identical to SEQ ID NO: 21333
  source 1..40: mol_type = genomic DNA

SEQ ID NO: 53285 - DNA, 50 bp, Escherichia coli; identical to SEQ ID NO: 21330
  source 1..50: mol_type = genomic DNA

SEQ ID NO: 53286 - protein, 507 aa, Escherichia coli
MKRVISYIRFSSERQAKGDSLRRQSKMVNDWLKAHPEYYLDQDLSFRDLGVSGFTGKHLKGGLGDFLTAIEKGLVKAGDTLLIESLDRLSRQAVDRASELLRNILRSGVDVVTLSDGEHYTSESLKDPLALIKSILIMQRAHEESLRKAERIQAAWDAKKEAAKAGIKVSKRCPAWLKLNDDRKSFSVIPEKVETVKRCFQLRLEGKSIWEIVRTMNAEGRQTLNQYKAGSFGQSSVQDLLKNRSVIGYFTPKGCEEISGYYPAIIDETTFYKVQQLSYARYGRKPASDKPLSVNLFKGVIRCSECGHALIITGFSDTRSGIYRCPLRNENRCSAKGLSRKQTDGTLLALLSRLDRFDSDTTNTIDTLKLHREHISSNIEKLVQLSLEIEDLNAITNKLKQLKNELSQVDADIEKETQRLKSIDVGCLSDCDLTTKAGRIEAQLIIKSAVKEVVLNTAKRRCKVTFHNGKVIDLPITENPSEDVTEAIQSLSEVTERGLIDVDEVII

SEQ ID NO: 53287 - DNA, 50 bp, Escherichia coli; identical to SEQ ID NO: 47642
  source 1..50: mol_type = genomic DNA

SEQ ID NO: 53288 - DNA, 40 bp, Escherichia coli; identical to SEQ ID NO: 5188
  source 1..40: mol_type = genomic DNA

SEQ ID NO: 53289 - DNA, 40 bp, Escherichia coli; identical to SEQ ID NO: 5188
  source 1..40: mol_type = genomic DNA

SEQ ID NO: 53290 - DNA, 50 bp, Escherichia coli; identical to SEQ ID NO: 21330
  source 1..50: mol_type = genomic DNA

SEQ ID NO: 53291 - protein, 507 aa, Escherichia coli
MKRVISYIRFSSERQAKGDSLRRQSKMVNDWLKAHPEYYLDQDLSFRDLGVSGFTGKHLKGGLGDFLTAIEKGLVKAGDTLLIESLDRLSRQAVDRASELLRNILRSGVDVVTLSDGEHYTSESLKDPLALIKSILIMQRAHEESLRKSERIQAAWNRKKELISEGIKISKRCPAWLRLNDDRKSFSVIPEKVETVKRCFQLRLEGKSIWEIVRTLNDEGHQSMSQYKPGKFGQTSVQDLLKNRSVIGYFTPKGCEEISGYYPAIIDETTFYKVQQLSHYRYGRKPVSDKPLSVNLFKGVIRCSECGHALIITGFSDTRNGIYRCPLRNENRCSAKGLSRKQTDGTLLALLSRLDRFDSDMTNTLDTLKLHREHISSNIEKLVQLSLEIEDLSAITIKLKQLKGELSQVDADIEKETQRLKSIDVGCLSDCDLTTKAGRIEAQLIIKSAVKEVVLNTAKRRCKVTFHNGRAITLPITENPSEDVTEAIQSLSEVTERGLIDVDVVAI

SEQ ID NO: 53292 - DNA, 50 bp, Escherichia coli; identical to SEQ ID NO: 47642
  source 1..50: mol_type = genomic DNA

SEQ ID NO: 53293 - DNA, 40 bp, Escherichia coli; identical to SEQ ID NO: 5188
  source 1..40: mol_type = genomic DNA

SEQ ID NO: 53294 - DNA, 40 bp, Escherichia coli; identical to SEQ ID NO: 5188
  source 1..40: mol_type = genomic DNA

SEQ ID NO: 53295 - DNA, 50 bp, Escherichia coli; identical to SEQ ID NO: 21330
  source 1..50: mol_type = genomic DNA

SEQ ID NO: 53296 - protein, 507 aa, Escherichia coli
MKRAISYIRFSSEKQSRGDSLRRQSKMVNDWLKAHPEYYLDQDLSFRDLGVSGFTGKHLKGGLGDFLTAIEKGLVKAGDTLLIESLDRLSRQDVDQASELLRNILRSGVDVVTLSDGEHYTKESLKDPLALIKSILIMQRAHEESLRKAERIQAAWDAKKEAAKAGIKISRRCPAWLKLNDDRKSFSVIPEKVETVKRCFQLRLEGKSIWEIVRTLNAEGHRSMNQYKPGKFGQTSVQDLLKNRSVIGYFTPKGCEEISGYYPAIIDETTFYKVQQLSHSRYGKRSVSDKPLSVNLFKGVIRCSECGHALIITGFSDTRNGIYRCPLRNENRCSAKGLSRKQTDGTLLTLLSRLDRFDSDTTNTIDTLKLHREHISNNIEKMVQLSLEIEDLSAITSKLKQLKGELSQVDADIEKETQRLKSIDVGCLSDCDLSTKAGRIEAQLIIRSAVKEVVLNTAKRRCKVTFHNGKVIDLPITENPSEDVTEAIQSLSEVTERGLIDVDVVEI

SEQ ID NO: 53297 - DNA, 50 bp, Escherichia coli; identical to SEQ ID NO: 47642
  source 1..50: mol_type = genomic DNA

SEQ ID NO: 53298 - DNA, 40 bp, Escherichia coli; identical to SEQ ID NO: 5188
  source 1..40: mol_type = genomic DNA

SEQ ID NO: 53299 - DNA, 40 bp, Escherichia coli; identical to SEQ ID NO: 5188
  source 1..40: mol_type = genomic DNA

SEQ ID NO: 53300 - DNA, 50 bp, Escherichia coli; identical to SEQ ID NO: 21330
  source 1..50: mol_type = genomic DNA

SEQ ID NO: 53301 - protein, 507 aa, Escherichia coli
MKRAISYIRFSSEKQSRGDSLRRQSKMVNDWLKAHPEYYLDQDLSFRDLGVSGFTGKHLKGGLGDFLTAIEKGLVKAGDTLLIESLDRLSRQAVDRASELLRNILRSGVDIVTLSDGEHYTRESLKDPLALIKSILIMQRAHEESLRKSERIQAAWDAKKEAAKAGIKVSRRCPAWLRLNDDRKSFSVIPEKVETVKRCFQLRLEGKSIWEIVRTLNAEGHRSMNQYKPGKFGQTSVQDLLKNRSVIGYFTPKGCEEISGYFPPIIPETDFYKVQQLSYSRYGKRSVSDKPLSVNLFKGVIRCSECGHALIITGFSDTRNGIYRCPLRNENRCSAKGLSRKQTDGTLLTLLSRLDRFDSNTTNTIDMLRLHREHISNNIEKLVQLSLEIEDLSAITIKLKQLKGELSQVDADIEKETQRLKSIDAGCLSDCDLTTKAGRIEAQLIIKSAVKEVVLNTAKRRCKVTFHNGRIIDLPITENPSEDVTEAIQSLSEVTEKGLIDVDVVEI

SEQ ID NO: 53302 - DNA, 50 bp, Escherichia coli; identical to SEQ ID NO: 47642
  source 1..50: mol_type = genomic DNA

SEQ ID NO: 53303 - DNA, 40 bp, Escherichia coli; identical to SEQ ID NO: 5188
  source 1..40: mol_type = genomic DNA

SEQ ID NO: 53304 - DNA, 40 bp, Escherichia coli; identical to SEQ ID NO: 5188
  source 1..40: mol_type = genomic DNA

SEQ ID NO: 53305 - DNA, 50 bp, Escherichia coli; identical to SEQ ID NO: 21330
  source 1..50: mol_type = genomic DNA

SEQ ID NO: 53306 - protein, 507 aa, Escherichia coli
MKRAISYIRFSSEKQSRGDSLRRQSKMVNDWLKAHPEYYLDQDLSFRDLGVSGFTGKHLKGGLGDFLTAIEKGLVKAGDTLLIESLDRLSRQAVDRASELLRNILRSGVDVVTLSDGEHYTSESLKDPLALIKSILIMQRAHEESLRKSERIQAAWDAKKEAAKAGIKISKRCPAWLKLNDDRKSFSVIPEKVETVKRCFQLRLEGKSIWEIVRTLNAEGHQTLNQYKAGKFGQTSVQDLLKNRSVIGYFTPKGCEEISGYYPAIIDETTFYKVQQLSHYRYGRKPVSDKPLSVNLFKGVIRCSECGHALIITGFSDTRNGIYRCPLRNENRCSAKGLSRKQTDGTLLTLLSRLDRFDSDTTNTIDTLKLHREHISSNIEKLVQLSLEIEDLNAITNKLKQLKNELSQVDADIEKETQRLKSIDTGSLSDCDLSTKAGRIEAQLIIKSAVKEVVLNTAKRRCKVTFHNGRAITLPITENPSEDVTEAIQSLSEVTERGLIDVDEVII

SEQ ID NO: 53307 - DNA, 50 bp, Escherichia coli; identical to SEQ ID NO: 47642
  source 1..50: mol_type = genomic DNA

SEQ ID NO: 53308 - DNA, 40 bp, Escherichia coli; identical to SEQ ID NO: 21333
  source 1..40: mol_type = genomic DNA

SEQ ID NO: 53309 - DNA, 40 bp, Escherichia coli; identical to SEQ ID NO: 21333
  source 1..40: mol_type = genomic DNA

SEQ ID NO: 53310 - DNA, 50 bp, Escherichia coli; identical to SEQ ID NO: 21330
  source 1..50: mol_type = genomic DNA

SEQ ID NO: 53311 - protein, 507 aa, Escherichia coli
MKRVISYIRFSSERQAKGDSLRRQSKMVNDWLKAHPEYYLDQDLSFRDLGVSGFTGKHLKGGLGDFLTAIEKGLVKAGDTLLIESLDRLSRQAVDRASELLRNILRSGVDVVTLSDGEHYTSESLKDPLALIKSILIMQRAHEESLRKSERIQAAWNRKKELISEGIKISKRCPAWLRLNDDRKSFSVIPDKVETVKRCFQLRLEGKSIWEIVRTLNDEGHQTLNQYKAGKFGQTSVQDLLKNRSVIGYFTPKGCEEISGYYPSIIHETDFYKVQQLSYSRYGRKPASDKPMAVNLFKGVIRCSECGHALIITGFSDTRSGIYRCPLRNENRCSAKGLSRKQTDGTLLALLSRLDRFDSDTTNIIDTLKLHREHISSNIEKLVQLSLEIEDLSAITSKLKQLKGELSQVDADIEKETQRLKSIDVGCLSDCDLTTKAGRIEAQLIIKSAVKEVVLNTAKRRCKVTFHNGKIIDLPITENPSEDVTEAIQSLSEVTERGLIDVDVVEI

SEQ ID NO: 53312 - DNA, 50 bp, Escherichia coli; identical to SEQ ID NO: 47642
  source 1..50: mol_type = genomic DNA

SEQ ID NO: 53313 - DNA, 40 bp, Escherichia coli; identical to SEQ ID NO: 5188
  source 1..40: mol_type = genomic DNA

SEQ ID NO: 53314 - DNA, 40 bp, Escherichia coli; identical to SEQ ID NO: 5188
  source 1..40: mol_type = genomic DNA

SEQ ID NO: 53315 - DNA, 50 bp, Escherichia coli; identical to SEQ ID NO: 21330
  source 1..50: mol_type = genomic DNA

SEQ ID NO: 53316 - protein, 507 aa, Escherichia coli
MKRVISYIRFSSEKQAKGDSLRRQSKMVTDWLKAHPEYYLDQDLSFRDLGVSGFTGKHLKGGLGDFLTAIEKGLVKAGDTLLIESLDRLSRQDVDQASELLRNILRSGVDVVTLSDGEHYTRESLKDPLALIKSILIMQRAHEESLRKAERIQAAWDAKKEAAKAGIKISRRCPAWLRLNDDRKTFSVIPEKVATVKRCFQLRLEGKSIWEIVRTLNAEGHQTLNQYKAGKFGQTSVQDLLKNRSVIGYFTPKGCEEISSYYPSVIDETTFYKVQQLSHYRYGRKPVSAKPLSVNLFKGVIRCSECGHALIITGFSDTRNGIYRCPLRNENRCSAKGLSRKQTDGTLLTLLSRLDRFDSDMTNTIDTLKLHREHISSNIEKLVQLSLEIEDLSAITIKLKQLKGELSQVDADIEKETQRLKSIDVGCLSDCDLTTKAGRIEAQLIIKSAVKEVVLNTAKRRCKVTFHNGKSITLPITETPSEDVTEAIQSLSEVTEMGLIDVDEVII

SEQ ID NO: 53317 - DNA, 50 bp, Escherichia coli; identical to SEQ ID NO: 47642
  source 1..50: mol_type = genomic DNA

SEQ ID NO: 53318 - DNA, 40 bp, Escherichia coli; identical to SEQ ID NO: 5188
  source 1..40: mol_type = genomic DNA

SEQ ID NO: 53319 - DNA, 40 bp, Escherichia coli; identical to SEQ ID NO: 5188
  source 1..40: mol_type = genomic DNA

SEQ ID NO: 53320 - DNA, 50 bp, Escherichia coli; identical to SEQ ID NO: 21330
  source 1..50: mol_type = genomic DNA

SEQ ID NO: 53321 - protein, 507 aa, Escherichia coli
MKRVISYFRFSSEKQAKGDSLRRQSKLVTDWLKAHPEYYLDESLTFRDLGVSGFTGKHLKGGLGDFLTAIEKGLVKAGDTLLIESLDRLSRQAIDIASELLRRILRAGVDVVTLSDGEHYTRESLKDPLALIKSILIMQRSHEESLRKSERIQAAWDAKKEAAKAGIKISRRCPAWLKLNDDRKSFSVIPEKVETVRRCFQLRLEGKSIWEIVRTLNDEGHQTLNQYKAGKFGQTSVQDLLKNRSVIGYFTPKGCEEISGYYPAIIDETTFYKVQQLSYSRYGRKPASDKPMAVNLFKGVIRCSECGHALIITGFSDTRNGIYRCPLRNENRCSAKGLSRKQTDGTLLTLLSRLDRFDSDTTNTIDTLKLHREHISSNIEKLVQLSLEIEDLSAITSKLKQLKGELSQVDADIEKETQRLKSIDVGCLSDCDLTTKAGRIEAQLIIKSAVKEVVLNTAKRRCKVTFHNGKSITLPITENPSEDVTEAIQSLSEVTERGLIDVDEVII

SEQ ID NO: 53322 - DNA, 50 bp, Escherichia coli; identical to SEQ ID NO: 47642
  source 1..50: mol_type = genomic DNA

SEQ ID NO: 53323 - DNA, 40 bp, Escherichia coli; identical to SEQ ID NO: 5188
  source 1..40: mol_type = genomic DNA

SEQ ID NO: 53324 - DNA, 40 bp, Escherichia coli; identical to SEQ ID NO: 5188
  source 1..40: mol_type = genomic DNA

SEQ ID NO: 53325 - DNA, 50 bp, Escherichia coli; identical to SEQ ID NO: 21330
  source 1..50: mol_type = genomic DNA

SEQ ID NO: 53326 - protein, 507 aa, Escherichia coli
MKRVISYIRFSSERQAKGDSLRRQSKMVNDWLKAHPEYYLDQDLSFRDLGVSGFTGKHLKGGLGDFLTAIEKGLVKAGDTLLIESLDRLSRQAVDRASELLRNILRSGVDVVTLSDGEHYTSESLKDPLALIKSILIMQRAHEESLRKSERIQAAWNRKKELISEGIKISKRCPAWLKLNDDRKSFSVIPEKVETVKRCFQLRLEGKSIWEIVRTLNDEGHQTLNQYKAGSFGQTSVQDLLKNRSVIGYFTPKGREEIAGYFPPIIPETDFYKVQQLSYSRYGRKPASDKPLSVNLFKGVIRCSECGHALIITGFSDTRSGIYRCPLRNENRCSAKGLSRKQTDGTLLTLLSRLDRFDSDTTNTIDTLKLHREHISSNIEKLVQLSLEIEELNAITNKLKQLKNELSQVDADIEKETQRLKSIDVGCLSDCDLSTKAGRIEAQLIIKSAVKEVVLNTAKRRCKVTFHNGRAITLPITENPSEDVTEAIQSLSEVTERGLIDVDVVEI

SEQ ID NO: 53327 - DNA, 50 bp, Escherichia coli; identical to SEQ ID NO: 47642
  source 1..50: mol_type = genomic DNA

SEQ ID NO: 53328 - DNA, 40 bp, Escherichia coli; identical to SEQ ID NO: 21333
  source 1..40: mol_type = genomic DNA

SEQ ID NO: 53329 - DNA, 40 bp, Escherichia coli; identical to SEQ ID NO: 21333
  source 1..40: mol_type = genomic DNA

SEQ ID NO: 53330 - DNA, 50 bp, Escherichia coli; identical to SEQ ID NO: 21330
  source 1..50: mol_type = genomic DNA

SEQ ID NO: 53331 - protein, 507 aa, Escherichia coli
MKRVISYIRFSSERQAKGDSLRRQSKMVNDWLKAHPEYYLDQDLSFRDLGVSGFTGKHLKGGLGDFLTAIEKGLVKAGDTLLIESLDRLSRQAIDIASELLRRILRAGVDIVTLSDGEHYTRESLKDPLSLIKSILIMQRSHEESLRKSERIQAAWNRKKELISEGIKISKRCPAWLKLNDDRKSFSVIPEKVETVKRCFQLRLEGKSIWEIVRTLNAEGRQTLNQHKAGSFGQTSVQDLLKNRSVIGYFTPKGCEEISGYYPAIIDETTFYKVQQLSYARYGRKPASDKPMAVNLFKGVIRCSECGHALIITGFSDTRNGIYRCPLRNENRCSAKGLSRKQTDGTLLALLSRLDRFDSDMTNVIDTLKLHREHISSNIEKLVQLSLEIEDLNAITNKLKQLKNELSQVDADIEKETQRLKSIDTGSLSDCDLSTKAGRIEAQLIIRSAVKEVVLNTAKRRCKVTFHNGKAITLPITENPSEDVTEAIQSLSEVTERGLIDVDEVII

SEQ ID NO: 53332 - DNA, 50 bp, Escherichia coli; identical to SEQ ID NO: 47642
  source 1..50: mol_type = genomic DNA

SEQ ID NO: 53333 - DNA, 40 bp, Escherichia coli; identical to SEQ ID NO: 5188
  source 1..40: mol_type = genomic DNA

SEQ ID NO: 53334 - DNA, 40 bp, Escherichia coli; identical to SEQ ID NO: 5188
  source 1..40: mol_type = genomic DNA

SEQ ID NO: 53335 - DNA, 50 bp, Escherichia coli; identical to SEQ ID NO: 21330
  source 1..50: mol_type = genomic DNA

SEQ ID NO: 53336 - protein, 507 aa, Escherichia coli
MKRVISYIRFSSERQAKGDSLRRQSKMVNDWLKAHPEYYLDQDLSFRDLGVSGFTGKHLKGGLGDFLTAIEKGLVKAGDTLLIESLDRLSRQDVDQASELLRNILRSGVDVVTLSDGEHYTRESLKDPLALIKSILIMQRAHEESLRKAERIQAAWNRKKELISEGIKISRRCPAWLKLNDDRKSFSVIPEKVETVRRCFQLRLEGKSIWEIVRILNDEGHQTLNQYKAGKFGQTSVQDLLKNRSVIGYFTPKGCEEIAGYFPPIIPETDFYKVQQLSYSRYGRKPASGKPLSVNLFKGVFRCSECGHALIITGFSDTRNGIYRCPLRNENRCNAKGLSRKQTDGTLLALLSRIDRFDSDMTNTIDTLKLHREHISSNIEKLVQLSLEIEDLSAITSKLKQLKGELSQVDADIEKETQRLKSIDVGCLSDCDLTTKAGRIEAQLIIKSAVKEVVLNTAKRRCKVTFHNGKVIDLPITEDPSEDVTEAIQSLSEVTERGLIDVDEVII

SEQ ID NO: 53337 - DNA, 50 bp, Escherichia coli; identical to SEQ ID NO: 47642
  source 1..50: mol_type = genomic DNA

SEQ ID NO: 53338 - DNA, 40 bp, Escherichia coli; identical to SEQ ID NO: 5188
  source 1..40: mol_type = genomic DNA

SEQ ID NO: 53339 - DNA, 40 bp, Escherichia coli; identical to SEQ ID NO: 5188
  source 1..40: mol_type = genomic DNA

SEQ ID NO: 53340 - DNA, 50 bp, Escherichia coli; identical to SEQ ID NO: 21330
  source 1..50: mol_type = genomic DNA

SEQ ID NO: 53341 - protein, 507 aa, Escherichia coli
MKRAISYIRFSSEKQSRGDSLRRQSKMVNDWLKAHPEYYLDQDLSFRDLGVSGFTGKHLKGGLGDFLTAIEKGLVKAGDTLLIESLDRLSRQDVDQASELLRNILRSGVDVVTLSDGEHYTKESLKDPLALIKSILIMQRAHEESLRKAERIQAAWDAKKEAAKAGIKISRRCPAWLKLNDDRKSFSVIPEKVETVKRCFQLRLEGKSIWEIVRTLNAEGHRSMNQYKPGKFGQTSVQDLLKNRSVIGYFTPKGCEEISGYYPAIIDETTFYKVQQLSHSRYGKRSVSDKPLSVNLFKGVIRCSECGHALIITGFSDTRNGIYRCPLRNENRCNAKGLSRKQTDGTLLALLSRLDRFDSDMTNVIDALKLHREHISNNIEKLVQLSLEIEDLSAITIKLKQLKGELSQVDADIEKETQRLKSIDVGCLSDCDLTTKAGRIEAQLIIKSAVKEVVLNAAKRRCKVTFHNSKSITLPITENPSEDVTEAIQSLSEVTERGLIDVDEVII

SEQ ID NO: 53342 - DNA, 50 bp, Escherichia coli; identical to SEQ ID NO: 47642
  source 1..50: mol_type = genomic DNA

SEQ ID NO: 53343 - DNA, 40 bp, Escherichia coli; identical to SEQ ID NO: 5188
  source 1..40: mol_type = genomic DNA

SEQ ID NO: 53344 - DNA, 40 bp, Escherichia coli; identical to SEQ ID NO: 5188
  source 1..40: mol_type = genomic DNA

SEQ ID NO: 53345 - DNA, 50 bp, Escherichia coli; identical to SEQ ID NO: 21330
  source 1..50: mol_type = genomic DNA

SEQ ID NO: 53346 - protein, 507 aa, Escherichia coli
MKRVISYIRFSSEKQAKGDSLRRQSKMVNDWLKAHPDYYLDQDLSFRDLGVSGFTGKHLKGGLGDFLTAIEKGLVKAGDTLLIESLDRLSRQAVDRASELLRNILRSGVDVVTLSDGEHYTSESLKDPLALIKSILIMQRAHEESLRKSERIQAAWDAKKEAAKAGIKVSKRCPAWLRLNDDRKSFSVIPEKVETVKRCFQLRLEGKSIWEIVRTLNDEGHQSMSQYKPGKFGQTSVQDLLKNRSVIGYFTPKGCEEIAGYYPAIIDETTFYKVQQLSHSRYGRKPVSAKPLSVNLFKGVIRCSECGHALIITGFSDTRNGIYRCPLRNENRCSAKGLSRKQTDGTLLALLSRLDRFDSDMTNTIDTLKLHREHISSNIEKLVQLSLEIEDLSAITSKLKQLKGELSQVDADIEKETQRLKSIDVGCLSDCDLTTKAGRIEAQLIIKSAVKEVVLNTAKRRCKVTFHNGKIIDLPITENPSEDVTEAIQSLSEVTERGLIDVDEVII

SEQ ID NO: 53347 - DNA, 50 bp, Escherichia coli; identical to SEQ ID NO: 47642
  source 1..50: mol_type = genomic DNA

SEQ ID NO: 53348 - DNA, 40 bp, Escherichia coli; identical to SEQ ID NO: 5188
  source 1..40: mol_type = genomic DNA

SEQ ID NO: 53349 - DNA, 40 bp, Escherichia coli; identical to SEQ ID NO: 5188
  source 1..40: mol_type = genomic DNA

SEQ ID NO: 53350 - DNA, 50 bp, Escherichia coli; identical to SEQ ID NO: 21330
  source 1..50: mol_type = genomic DNA

SEQ ID NO: 53351 - protein, 507 aa, Escherichia coli; identical to SEQ ID NO: 22741

SEQ ID NO: 53352 - DNA, 50 bp, Escherichia coli; identical to SEQ ID NO: 47642
  source 1..50: mol_type = genomic DNA

SEQ ID NO: 53353 - DNA, 40 bp, Escherichia coli; identical to SEQ ID NO: 5188
  source 1..40: mol_type = genomic DNA

SEQ ID NO: 53354 - DNA, 40 bp, Escherichia coli; identical to SEQ ID NO: 5188
  source 1..40: mol_type = genomic DNA

SEQ ID NO: 53355 - DNA, 50 bp, Escherichia coli; identical to SEQ ID NO: 21330
  source 1..50: mol_type = genomic DNA

SEQ ID NO: 53356 - protein, 507 aa, Escherichia coli
MKRVISYIRFSSEKQAKGDSLRRQSKMVTDWLKAHPEYYLDQDLSFRDLGVSGFTGKHLKGGLGDFLTAIEKGLVKAGDTLLIESLDRLSRQAVDRASELLRNILRSGVDVVTLSDGEHYTKESLKDPLALIKSILIMQRAHEESLRKSERIQAAWDAKKEAAKAGIKVSKRCPAWLKLNDDRKSFSVIPEKVATVKRCFQLRLEGKSIWEIVRTLNAEGHQTLNQYKAGKFGQTSVQDLLKNRSVIGYFTPKGCEEISGYYPAIIDETTFYKVQQLSYARYGRKPASDKPMAVNLFKGVIRCSECGHALIITGFSDTRNGIYRCPLRNENRCSAKGLSRKQTDGTLLALLSRLDRFDSDMTNVIDTLKLHREHISSNIEKLVQLSLEIEDLSAITSKLRQLKNELSQVDADIEKETQRLKSIDAGCLSDCDLTTKAGRIEAQLIIKSAVKEVVLNTAKRRCKVTFHNGKIIDLPITENPSEDVTEAIQSLSEVTERGLIDVDVVEI

SEQ ID NO: 53357 - DNA, 50 bp, Escherichia coli; identical to SEQ ID NO: 47642
  source 1..50: mol_type = genomic DNA

SEQ ID NO: 53358 - DNA, 40 bp, Escherichia coli; identical to SEQ ID NO: 5188
  source 1..40: mol_type = genomic DNA

SEQ ID NO: 53359 - DNA, 40 bp, Escherichia coli; identical to SEQ ID NO: 5188
  source 1..40: mol_type = genomic DNA

SEQ ID NO: 53360 - DNA, 50 bp, Escherichia coli; identical to SEQ ID NO: 21330
  source 1..50: mol_type = genomic DNA

SEQ ID NO: 53361 - protein, 507 aa, Escherichia coli
MKRAISYIRFSSEKQSRGDSLRRQSKMVTDWLKAHPEYYLDQDLSFRDLGVSGFTGKHLKGGLGDFLTAIEKGLVKAGDTLLIESLDRLSRQNVDRASELLRNILRSGVDVVTLSDGEHYTRESLKDPLALIKSILIMQRSHEESLRKSERIQAAWNRKKELISEGIKISKRCPAWLRLNDDRKSFSVIPDKVETVKRCFQLRLEGKSIWEIVRTLNAEGHRSMNQYKPGKFGQTSVQDLLKNRSVIGYFTPKGCEEIAGYYPSVIDETTFYKVQQLSYARHGRKPVSDKPLSVNLFKGVIRCSECGHALIITGFSDTRNGIYRCPLRNENRCSAKGLSRKQTDGTLLTLLSRLDRFDSDTTNVIDMLRLHREHISSNIEKLVQLSLEIEDLSAITIKLKQLKGELSQVDADIEKETQRLKSIDVGCLSDCDLTTKAGRIEAQLIIKSAVKEVVLNTAKRRCKVTFHNGKVIDLSITENPSEDVTEAIQSLSEVTEKGLIDVDEVII

SEQ ID NO: 53362 - DNA, 50 bp, Escherichia coli; identical to SEQ ID NO: 47642
  source 1..50: mol_type = genomic DNA

SEQ ID NO: 53363 - DNA, 40 bp, Escherichia coli; identical to SEQ ID NO: 5188
  source 1..40: mol_type = genomic DNA

SEQ ID NO: 53364 - DNA, 40 bp, Escherichia coli; identical to SEQ ID NO: 5188
  source 1..40: mol_type = genomic DNA

SEQ ID NO: 53365 - DNA, 50 bp, Escherichia coli; identical to SEQ ID NO: 21330
  source 1..50: mol_type = genomic DNA

SEQ ID NO: 53366 - protein, 507 aa, Escherichia coli
MKRAISYIRFSSEKQSRGDSLRRQAKMVTDWLKAHPEYYLDESLTFRDLGVSGFTGKHLKGGLGDFLTAIEKGLVKAGDTLLIESLDRLSRQDVDQASELLRNILRSGVDVVTLSDGEHYTRESLKDPLALIKSILIMQRAHEESLRKAERIQAAWNRKKELISEGIKISRRCPAWLKLNDDRKSFSVIPEKVETVKRCFQLRLEGKSIWEIVRTLNAEGHQTLNQYKAGKFGQTSVQDLLKNRSVIGYFTPKGCEEISGYYPAIIDETTFYKVQQLSHSRYGRKPVSDKPLSVNLFKGVIRCSECGHALIITGFSDTRSGIYRCPLRNENRCSAKGLSRKQTDGTLLTLLSRLDRFDSDTTNTIDMLRLHREHISSNIEKLVQLSLEIEDLSAITIKLKQLKGELSQVDADIEKETQRLKSIDVGCLSDCDLTTKAGRIEAQLIIKSAVKEVVLNTAKRRCKVTFHNSKSITLPITENPSEDVTEAIQSLSEVTERGLIDVDEVII

SEQ ID NO: 53367 - DNA, 50 bp, Escherichia coli; identical to SEQ ID NO: 47642
  source 1..50: mol_type = genomic DNA

SEQ ID NO: 53368 - DNA, 40 bp, Escherichia coli; identical to SEQ ID NO: 5188
  source 1..40: mol_type = genomic DNA

SEQ ID NO: 53369 - DNA, 40 bp, Escherichia coli; identical to SEQ ID NO: 5188
  source 1..40: mol_type = genomic DNA

SEQ ID NO: 53370 - DNA, 50 bp, Escherichia coli; identical to SEQ ID NO: 21330
  source 1..50: mol_type = genomic DNA

SEQ ID NO: 53371 - protein, 507 aa, Escherichia coli
MKRVISYIRFSSERQAKGDSLRRQSKMVNDWLKAHPEYYLDQDLSFRDLGVSGFTGKHLKGGLGDFLTAIEKGLVKAGDTLLIESLDRLSRQAVDRASELLRNILRSGVDIVTLSDGEHYTRESLRDPLALIKSILIMQRAHEESLRKSERIQAAWNRKKELISEGIKISKRCPAWLKLNDDRKSFSVIPDKVETVKRCFQLRLEGKSIWEIVRTLNAEGHRSMNQYKPGKFGQTSVQDLLKNRSVIGYFTPKGCEEIAGYYPSVIDETTFYKVQQLSYARHGRKPASAKPLSVNLFKGVIRCSECGHALIITGFSDTRSGIYRCPLRNENRCSAKGLSRKQTDGTLLTLLSRLDRFDSDTTNTIDTLKLHREHLSSNIEKLVQLSLEIEDLNAITNKLKQLKNELSQVDADIEKETQRLKSIDVGCLSDCDLTTKAGRIEAQLIIKSAVKEVVLNTAKRRCKVTFHNSKSITLPITENPSEDVTEAIQSLSEVTERGLIDVDEVII

SEQ ID NO: 53372 - DNA, 50 bp, Escherichia coli; identical to SEQ ID NO: 47642
  source 1..50: mol_type = genomic DNA

SEQ ID NO: 53373 - DNA, 40 bp, Escherichia coli; identical to SEQ ID NO: 5188
  source 1..40: mol_type = genomic DNA

SEQ ID NO: 53374 - DNA, 40 bp, Escherichia coli; identical to SEQ ID NO: 5188
  source 1..40: mol_type = genomic DNA

SEQ ID NO: 53375 - DNA, 50 bp, Escherichia coli; identical to SEQ ID NO: 21330
  source 1..50: mol_type = genomic DNA

SEQ ID NO: 53376 - protein, 507 aa, Escherichia coli
MKRVISYIRFSSEKQAKGDSLRRQSKMVTDWLKAHPEYYLDQDLSFRDLGVSGFTGKHLKGGLGDFLTAIEKGLVKAGDTLLIESLDRLSRQDVDRASELLRNILRSGVDVVTLSDGEHYTKESLKDPLALIKSILIMQRSHEESLRKSERIQAAWDAKKEAAKAGIKVSKRCPAWLKLNDDRKSFSVIPDKVETVKRCFQLRLEGKSIWEIVRTLNAEGHRSMNQYKPGKFGQTSVQDLLKNRSVIGYFTPKGCEAIAGYYPSVIDETTFYKVQQLSYSRYGRKPASDKPLSVNLFKGVIRCSECGHALIITGFSDTRNGIYRCPLRNENRCSAKGLSRKQTDGTLLALLSRIDRFDSDMTNTVDTLKLHREHISSNIEKLVQLSLEIEDLSAITIKLKQLKGELSQVDADIEKETQRLKSIDVGCLSDCDLTTKAGRIEAQLIIKSAVKEVVLNTAKRRCKVTFHNSKSITLSITENPSEDVTEAIQSLSEVTERGLIDVDEVII

SEQ ID NO: 53377 - DNA, 50 bp, Escherichia coli; identical to SEQ ID NO: 47642
  source 1..50: mol_type = genomic DNA

SEQ ID NO: 53378 - DNA, 40 bp, Escherichia coli; identical to SEQ ID NO: 5188
  source 1..40: mol_type = genomic DNA

SEQ ID NO: 53379 - DNA, 40 bp, Escherichia coli; identical to SEQ ID NO: 5188
  source 1..40: mol_type = genomic DNA

SEQ ID NO: 53380 - DNA, 50 bp, Escherichia coli; identical to SEQ ID NO: 21330
  source 1..50: mol_type = genomic DNA

SEQ ID NO: 53381 - protein, 507 aa, Escherichia coli
MKRVISYIRFSSERQAKGDSLRRQSKMVNDWLKAHPEYYLDQDLSFRDLGVSGFTGKHLKGGLGDFLTAIEKGLVKAGDTLLIESLDRLSRQAVDRASELLRNILRSGVDVVTLSDGEHYTKESLKDPLSLIKSILIMQRAHEESLRKAERIQAAWDAKKEAAKAGIKISRRCPAWLKLNDDRKSFSVIPEKVETVKRCFQLRLEGKSIWAIVKALNDEGHQTLNQYKAGKFGQTSVQDLLKNRSVIGYFTPKGCEEIAGYYPAIIDETTFYKVQQLSHSRYGKRSVSDKPLSVNLFKGVIRCSECGHALIITGFSDTRSGIYRCPLRNENRCSAKGLSRKQTDGTLLTLLSRLDRFDSDTTNTIDTLKLHREHISSNIEKLVQLSLEIEDLNAITNKLKQLKNELSQVDADIEKETQRLKSIDVGCLSDCDLTTKAGRIEAQLIIKSAVKEVVLNTAKRRCKVTFHNGKVIDLSITENPSEDVTEAIQSLSEVTERGLIDVDEVII

SEQ ID NO: 53382 - DNA, 50 bp, Escherichia coli; identical to SEQ ID NO: 47642
  source 1..50: mol_type = genomic DNA

SEQ ID NO: 53383 - DNA, 40 bp, Escherichia coli; identical to SEQ ID NO: 5188
  source 1..40: mol_type = genomic DNA

SEQ ID NO: 53384 - DNA, 40 bp, Escherichia coli; identical to SEQ ID NO: 5188
  source 1..40: mol_type = genomic DNA

SEQ ID NO: 53385 - DNA, 50 bp, Escherichia coli; identical to SEQ ID NO: 21330
  source 1..50: mol_type = genomic DNA

SEQ ID NO: 53386 - protein, 492 aa, Escherichia coli
MKRAISYIRFSSEKQSRGDSLRRQSKMVNDWLKAHPEYYLDQDLSFRDLGVSGFTGKHLKGGLGDFLTAIEKGLVKAGDTLLIESLDRLSRQNVDRASELLRNILRSGVDVVTLSDGEHYTRESLKDPLALIKSILIMQRSHEESLRKSERIQAAWNRKKELISEGIKISKRCPAWLRLNDDRKSFSVIPEKVETVKRCFQLRLEGKSIWEIVRTLNDEGHQTLNQYKAGKFGQTSVQDLLKNRSVIGYFTPKGCEEITGYFPSIIPETDFYKVQQLSYSRYGRKPVSDKPLSVNLFKGVIRCSECGHALIITGFSDTRSGIYRCPLRNENRCSAKGLSRKQTDGTLLTLLSRLDRFDSDMTNTIDMLRLHREHISSNIEKLVQLSLEIEDLSAITSKLKQLKGELSQVDADIEKETQRLKSIDVGCLSDCDLTTKAGRIEAQLIIKSAVKEVVLNTAKRRCKVTFHNSKSIHPTNNRKPLRQRYRGYTVAF

SEQ ID NO: 53387 - DNA, 50 bp, Escherichia coli; identical to SEQ ID NO: 47642
  source 1..50: mol_type = genomic DNA

SEQ ID NO: 53388 - DNA, 40 bp, Escherichia coli; identical to SEQ ID NO: 5188
  source 1..40: mol_type = genomic DNA

SEQ ID NO: 53389 - DNA, 40 bp, Escherichia coli; identical to SEQ ID NO: 5188
  source 1..40: mol_type = genomic DNA

SEQ ID NO: 53390 - DNA, 50 bp, Escherichia coli; identical to SEQ ID NO: 21330
  source 1..50: mol_type = genomic DNA

SEQ ID NO: 53391 - protein, 507 aa, Escherichia coli
MKRVISYIRFSSERQAKGDSLRRQSKMVNDWLKAHPEYYLDQDLSFRDLGVSGFTGKHLKGGLGDFLTAIEKGLVKAGDTLLIESLDRLSRQDIDIASELLRRILRAGVDVVTLSDGEHYTRESLKDPLSLIKSILIMQRSHEESLRKSERIQAAWDAKKEAAKAGIKISRRCPAWLRLNDDRKSFSVIPDKVETVKRCFQLRLEGKSIWEIVRTLNDEGHQSMSQYKPGKFGQTSVQDLLKNRSVIGYFTPKGCEEISGYFPTIIPETDFYKVQQLSYSRYGRKPASDKPLSVNLFKGVIRCSECGHALIITGFSDTRNGIYRCPLRNENRCSAKGLSRKQTDGTLLALLSRLDRFDSDTTNTVDMLRLHREHISSNIEKLVQLSLEIEDLSAITSKLKQLKGELSQVDADIEKETQRLKSIDVGCLSDCDLTTKAGRIEAQLIIKSAVKEVVLNTAKRRCKVTFHNSKSITLPITENPSEDVTEAIQSLSEVTERGLIDVDVVEI

SEQ ID NO: 53392 - DNA, 50 bp, Escherichia coli; identical to SEQ ID NO: 47642
  source 1..50: mol_type = genomic DNA

SEQ ID NO: 53393 - DNA, 40 bp, Escherichia coli; identical to SEQ ID NO: 5188
  source 1..40: mol_type = genomic DNA

SEQ ID NO: 53394 - DNA, 40 bp, Escherichia coli; identical to SEQ ID NO: 5188
  source 1..40: mol_type = genomic DNA

SEQ ID NO: 53395 - DNA, 50 bp, Escherichia coli; identical to SEQ ID NO: 21330
  source 1..50: mol_type = genomic DNA

SEQ ID NO: 53396 - protein, 507 aa, Escherichia coli
MKRAISYIRFSSEKQSRGDSLRRQSKMVTDWLKAHPEYYLDQDFSFRDLGVSGFTGKHLKGGLGDFLTAIEKGLVKAGDTLLIESLDRLSRQNVDRASELLRNILRSGVDVVTLSDGEHYTRESLKDPLALIKSILIMQRSHEESLRKSERIQAAWNRKKELISEGIKISKRCPAWLRLNDDRKSFSVIPEKVETVKRCFQLRLEGKSIWEIVRTLNAEGHQTLNQYKAGKFGQTSVQDLLKNRSVIGYFTPKGCCEIAGYYPSIIPESDFYKVQQLSHSRHGRKPVSDKPLSVNLFKGVIRCSECGHALIITGFSDTRNGIYRCPLRNENRCSAKGLSRKQTDGTLLTLLSRLDRFDSDTTNTIDMLRLHREHISSNIEKLVQLSLEIEDLSAITIKLKQLKGELSQVDADIEKETQRLKSIDTGSLSDCDLSTKAGRIEAQLIIKSAVKEVVLNTAKRRCKVTFHNGRSINLPITENPSEDVTEAIQSLSEVTERGLIAVDVVEI

SEQ ID NO: 53397 - DNA, 50 bp, Escherichia coli; identical to SEQ ID NO: 47642
  source 1..50: mol_type = genomic DNA

SEQ ID NO: 53398 - DNA, 40 bp, Escherichia coli; identical to SEQ ID NO: 5188
  source 1..40: mol_type = genomic DNA

SEQ ID NO: 53399 - DNA, 40 bp, Escherichia coli; identical to SEQ ID NO: 5188
  source 1..40: mol_type = genomic DNA

SEQ ID NO: 53400 - DNA, 50 bp, Escherichia coli; identical to SEQ ID NO: 21330
  source 1..50: mol_type = genomic DNA

SEQ ID NO: 53401 - protein, 507 aa, Escherichia coli
MKRAISYIRFSSEKQSRGDSLRRQSKMVNDWLKAHPEYYLDQDLSFRDLGVSGFTGKHLKGGLGDFLTAIEKGLVKAGDTLLIESLDRLSRQDIDIASELLRNILRSGVDVVTLSDGEHYTRESLKDPLALIKSILIMQRAHEESLRKSERIQAAWDAKKEAAKAGIKVSKRCPAWLRLNDDRKSFSVIPEKVETVKRCFQLRLEGKSIWEIVRTLNAEGHRSMNQYKPGKFGQTSVQDLLKNRSVIGYFTPKGCEEISGYYPAIIDETTFYKVQQLSHSRYGKRSVSDKPLSVNLFKGVIRCSECGHALIITGFSDTRNGIYRCPLRNENRCNAKGLSRKQTDGTLLALLSRLDRFDSDMTNVIDALKLHREHISNNIEKLVQLSLEIEDLSAITIKLKQLKGELSQVDADIEKETQRLKSIDVGCLSDCDLTTKAGRIEAQLIIKSAVKEVVLNAAKRRCKVTFHNSKSITLPITENPSEDVTEAIQSLSEVTERGLIDVDEVII

SEQ ID NO: 53402 - DNA, 50 bp, Escherichia coli; identical to SEQ ID NO: 47642
  source 1..50: mol_type = genomic DNA

SEQ ID NO: 53403 - DNA, 40 bp, Escherichia coli; identical to SEQ ID NO: 5188
  source 1..40: mol_type = genomic DNA

SEQ ID NO: 53404 - DNA, 40 bp, Escherichia coli; identical to SEQ ID NO: 5188
  source 1..40: mol_type = genomic DNA

SEQ ID NO: 53405 - DNA, 50 bp, Escherichia coli; identical to SEQ ID NO: 21330
  source 1..50: mol_type = genomic DNA

SEQ ID NO: 53406 - protein, 507 aa, Escherichia coli
MKRVISYIRFSSERQAKGDSLRRQSKMVNDWLKAHPEYYLDQDLSFRDLGVSGFTGKHLKGGLGDFLTAIEKGLVKAGDTLLIESLDRLSRQAVDRASELLRNILRSGVDVVTLSDGEHYTKESLKDPLSLIKSILIMQRAHEESLRKAERIQAAWDAKKEAAKAGIKISRRCPAWLKLNDDRKSFSVIPEKVETVKRCFQLRLEGKSIWEIVRTMNAEGHQTLHQHKPGSFGQSSVQDLLKNRSVIGYFTPKGCEEISGYYPAIIDETTFYKVQQLSHSRYGRKPASAKPLSVNLFKGVIRCSECGHALIITGFSDTRNGIYRCPLRNENRCSAKGLSRKQTDGTLLTLLSRLDRFDSDMTNTVDTLKLHREHISSNIEKLVQLSLEIEDLSAITIKLKQLKGELSQVDADIEKETQRLKSIDVGCLSDCDLTTKAGRIEAQLIIKSAVKEVVLNTAKRRCKVTFHNGKAITLPITENPSDNVTEAIQSLSEVTERGLIDVDEVII

SEQ ID NO: 53407 - DNA, 50 bp, Escherichia coli; identical to SEQ ID NO: 47642
  source 1..50: mol_type = genomic DNA

SEQ ID NO: 53408 - DNA, 40 bp, Escherichia coli; identical to SEQ ID NO: 5188
  source 1..40: mol_type = genomic DNA

SEQ ID NO: 53409 - DNA, 40 bp, Escherichia coli; identical to SEQ ID NO: 5188
  source 1..40: mol_type = genomic DNA

SEQ ID NO: 53410 - DNA, 50 bp, Escherichia coli; identical to SEQ ID NO: 21330
  source 1..50: mol_type = genomic DNA

SEQ ID NO: 53411 - protein, 507 aa, Escherichia coli
MKRVISYIRFSSEKQAKGDSLRRQSKMVTDWLKAHPEYYLDESLTFRDLGVSGFTGKHLKGGLGDFLTAIEKGLVKAGDTLLIESLDRLSRQAVDRASELLRNILRSGVDVVTLSDGEHYTSESLKDPLALIKSILIMQRAHEESLRKSERIQAAWDAKKEAAKAGIKVSKRCPAWLRLNDDRKSFSVIPEKVETVKRCFQLRLEGKSIWEIVRTLNDEGHQSMSQYKPGKFGQTSVQDLLKNRSVIGYFTPKGCEEIAGYYPAIIDETTFYKVQQLSHSRYGRKPVSAKPLSVNLFKGVIRCSECGHALIITGFSDTRSGIYRCPLRNENRCSAKGLSRKQTDGTLLTLLSRLDRFDSDTTNTIDTLKLHREHISSNIEKLVQLSLEIEDLNAITSKLKQLKGELSQVDADIEKETQRLKSIDVGCLSDCDLTTKAGRIEAQLIIKSAVKEVVLNTAKRRCKVTFHNGRAITLPITENPSEDVTEAIQSLSEVTERGLIDVDEVII

SEQ ID NO: 53412 - DNA, 50 bp, Escherichia coli; identical to SEQ ID NO: 47642
  source 1..50: mol_type = genomic DNA

SEQ ID NO: 53413 - DNA, 40 bp, Escherichia coli; identical to SEQ ID NO: 5188
  source 1..40: mol_type = genomic DNA

SEQ ID NO: 53414 - DNA, 40 bp, Escherichia coli; identical to SEQ ID NO: 5188
  source 1..40: mol_type = genomic DNA

SEQ ID NO: 53415 - DNA, 50 bp, Escherichia coli; identical to SEQ ID NO: 21330
  source 1..50: mol_type = genomic DNA

SEQ ID NO: 53416 - protein, 507 aa, Escherichia coli
MKRVISYIRFSSERQAKGDSLRRQSKMVTDWLKAHPEYYLDQDLSFRDLGVSGFTGKHLKGGLGDFLTAIEKGLVKAGDTLLIESLDRLSRQDVDQASELLRNILRSGVDVVTLSDGEHYTSESLKDPLALIKSILIMQRAHEESLRKSERIQAAWDAKKEAAKAGIKVSKRCPAWLKLNDDRKSFSVIPEKVATVKRCFQLRLEGKSIWEIVRTLNDEGHQTLNQYKPGKFGQTSVQDLLKNRSVIGYFTPKGREEIAGYFPPIIPETDFYKVQQLSYSRYGRKPASDKPLSVNLFKGVIRCSECGHALIITGFSDTRNGIYRCPLRNENRCNAKGLSRKQTDGTLLALLSRLDRFDSDTTNTIDTLKLHREHLSSNIEKLVQLSLEIEDLSAITSKLKQLKNELSQVDADIEKETQRLKSIDVGCLSDCDLTTKAGRIEAQLIIKSAVKEVVLNTAKRRCKVTFHNGKAITLPITETPSDNVTEAIQSLSEVTERGLIDVDEVII

SEQ ID NO: 53417 - DNA, 50 bp, Escherichia coli; identical to SEQ ID NO: 47642
  source 1..50: mol_type = genomic DNA

SEQ ID NO: 53418 - DNA, 40 bp, Escherichia coli; identical to SEQ ID NO: 5188
  source 1..40: mol_type = genomic DNA

SEQ ID NO: 53419 - DNA, 40 bp, Escherichia coli; identical to SEQ ID NO: 5188
  source 1..40: mol_type = genomic DNA

SEQ ID NO: 53420 - DNA, 50 bp, Escherichia coli; identical to SEQ ID NO: 21330
  source 1..50: mol_type = genomic DNA

SEQ ID NO: 53421 - protein, 507 aa, Escherichia coli
MKRVISYIRFSSERQAKGDSLRRQSKMVNDWLKAHPEYYLDQDLSFRDLGVSGFTGKHLKGGLGDFLTAIEKGLVKAGDTLLIESLDRLSRQAVDRASELLRNILRSGVDVVTLSDGEHYTSESLKDPLALIKSILIMQRAHEESLRKSERIQAAWDAKKEAAKAGIKVSKRCPAWLRLNDDRKSFSVIPEKVETVKRCFQLRLEGKSIWEIVRTLNDEGHQSMSQYKPGSFGQNSVQDLLKNRSVIGYFTPKGCEEIAGYYPAIIDETTFYKVQQLSYARHGRKPASAKPLSVNLFKGVIRCSECGHALIITGFSDTRNGIYRCPLRNENRCSAKGLSRKQTDGTLLTLLSRLDRFDSDTTNTVDMLRLHREHISSNIEKLVQLSLEIEDLSAITSKLKQLKNELSQVDADIEKETQRLKSIDVGCLSDCDLSTKAGRIEAQLIIRSAVKEVVLNTAKRRCKVTFHNGKSITLPITENPSEDVTEAIQSLSEVTERGLIDVDEVII

SEQ ID NO: 53422 - DNA, 50 bp, Escherichia coli; identical to SEQ ID NO: 47642
  source 1..50: mol_type = genomic DNA

SEQ ID NO: 53423 - DNA, 40 bp, Escherichia coli; identical to SEQ ID NO: 5188
  source 1..40: mol_type = genomic DNA

SEQ ID NO: 53424 - DNA, 40 bp, Escherichia coli; identical to SEQ ID NO: 5188
  source 1..40: mol_type = genomic DNA

SEQ ID NO: 53425 - DNA, 50 bp, Escherichia coli; identical to SEQ ID NO: 21330
  source 1..50: mol_type = genomic DNA

SEQ ID NO: 53426 - protein, 507 aa, Escherichia coli
MKRAISYIRFSSEKQSRGDSLRRQSKMVNDWLKAHPEYYLDQDLSFRDLGVSGFTGKHLKGGLGDFLTAIEKGLVKAGDTLLIESLDRLSRQAVDRASELLRNILRSGVDVVTLSDGEHYTSESLKDPLALIKSILIMQRAHEESLRKSERIQAAWDAKKEAAKAGIKVSKRCPAWLKLNDDRKSFSVIPEKVETVKRCFQLRLEGKSIWEIVRTLNDEGHQTLNQYKAGKFGQTSVQDLLKNRSVIGYFTPKGCEEISGYYPAIIDETTFYKVQQLSHYRYGRKPVSDKPLSVNLFKGVIRCSECGHALIITGFSDTRNGIYRCPLRNENRCSAKGLSRKQTDGTLLTLLSRLDRFDSDTTNTIDTLKLHREHISSNIEKLVQLSLEIEDLSAITIKLRQLKGELSQVDADIEKETQRLKSIDVGCLSDCDLTTKAGRIEAQLIIKSAVKEVVLNTAKRRCKVTFHNGKLIDLPITEDPSEDVTEAIQSLSEVTERGLIDVDEVII

SEQ ID NO: 53427 - DNA, 50 bp, Escherichia coli; identical to SEQ ID NO: 47642
  source 1..50: mol_type = genomic DNA

SEQ ID NO: 53428 - DNA, 40 bp, Escherichia coli; identical to SEQ ID NO: 5188
  source 1..40: mol_type = genomic DNA

SEQ ID NO: 53429 - DNA, 40 bp, Escherichia coli; identical to SEQ ID NO: 5188
  source 1..40: mol_type = genomic DNA

SEQ ID NO: 53430 - DNA, 50 bp, Escherichia coli; identical to SEQ ID NO: 21330
  source 1..50: mol_type = genomic DNA

SEQ ID NO: 53431 - protein, 507 aa, Escherichia coli
MKRAISYIRFSSEKQSRGDSLRRQSKMVNDWLKAHPEYYLDQDLSFRDLGVSGFTGKHLKGGLGDFLTAIEKGLVKAGDTLLIESLDRLSRQNVDRASELLRNILRSGVDVVTLSDGEHYTRESLKDPLALIKSILIMQRSHEESLRKSERIQAAWNRKKELISEGIKISKRCPAWLRLNDDRKSFSVIPEKVETVKRCFQLRLEGKSIWEIVRTLNDEGHQTLNQYKAGKFGQTSVQDLLKNRSVIGYFTPKGCEEISGYYPAIIDETTFYKVQQLSHYRYGRKPVSDKPLSVNLFKGVIRCSECGHALIITGFSDTRNGIYRCPLRNENRCSAKGLSRKQTDGTLLTLLSRLDRFDSDMTNTIDTLKLHREHISSNIEKLVQLSLEIEDLNAITNKLKQLKNELSQVDADIEKETQRLKSIDVGCLSDCDLSTKAGRIEAQLIIRSAVKEVVLNTAKRRCKVTFHNSKSITLSITENPSEDVTEAIQSLSEVTERGLIDVDVVEI

SEQ ID NO: 53432 - DNA, 50 bp, Escherichia coli; identical to SEQ ID NO: 47642
  source 1..50: mol_type = genomic DNA

SEQ ID NO: 53433 - DNA, 40 bp, Escherichia coli; identical to SEQ ID NO: 5188
  source 1..40: mol_type = genomic DNA

SEQ ID NO: 53434 - DNA, 40 bp, Escherichia coli; identical to SEQ ID NO: 5188
  source 1..40: mol_type = genomic DNA

SEQ ID NO: 53435 - DNA, 50 bp, Escherichia coli; identical to SEQ ID NO: 21330
  source 1..50: mol_type = genomic DNA

SEQ ID NO: 53436 - protein, 507 aa, Escherichia coli
MKRVISYIRFSSEKQAKGDSLRRQSKMVNDWLKAHPEYYLDQDLSFRDLGVSGFTGKHLKGGLGDFLTAIEKGLVKAGDTLLIESLDRLSRQDIDIASELLRNILRSGVDVVTLSDGEHYTRESLRDPLALIKSILIMQRAHEESLRKAERIQAAWDAKKEAAKAGIKVSKRCPAWLKLNDDRKSFSVIPEKVETVKRCFQLRLEGKSIWEIVRTLNDEGHQSMSQYKPGKFGQTSVQDLLKNRSVIGYFTPKGCEEIAGYYPAIIDETTFYKVQQLSHSRYGRKPVSAKPLSVNLFKGVIRCSECGHALIITGFSDTRNGIYRCPLRNENRCSAKGLSRKQTDGTLLALLSRLDRFDSDMTNVIDALKLHREHISNNIEKLVQLSLEIEDLSAITIKLKQLKGELSQVDADIEKETQRLKSIDVGCLSDCDLTTKAGRIEAQLIIKSAVKEVVLNTAKRRCKVTFHNGRAITLPITENPSEDVTEAIQSLSEVTERGLIDVDEVII

SEQ ID NO: 53437 - DNA, 50 bp, Escherichia coli; identical to SEQ ID NO: 47642
  source 1..50: mol_type = genomic DNA

SEQ ID NO: 53438 - DNA, 40 bp, Escherichia coli; identical to SEQ ID NO: 5188
  source 1..40: mol_type = genomic DNA

SEQ ID NO: 53439 - DNA, 40 bp, Escherichia coli; identical to SEQ ID NO: 5188
  source 1..40: mol_type = genomic DNA

SEQ ID NO: 53440 - DNA, 50 bp, Escherichia coli; identical to SEQ ID NO: 21330
  source 1..50: mol_type = genomic DNA

SEQ ID NO: 53441 - protein, 507 aa, Escherichia coli
MKRVISYIRFSSERQAKGDSLRRQSKMVNDWLKAHPEYYLDQDLSFRDLGVSGFTGKHLKGGLGDFLTAIEKGLVKAGDTLLIESLDRLSRQDVDQASELLRNILRSGVDVVTLSDGEHYTKESLKDPLALIKSILIMQRAHEESLRKAERIQAAWDAKKEAAKAGIKISRRCPAWLKLNDDRKSFSVIPEKVETVKRCFQLRLEGKSIWEIVRTLNAEGHRSMNQYKPGKFGQTSVQDLLKNRSVIGYFTPKGCEEISGYYPAIIDETTFYKVQQLSHSRYGKRSVSDKPLSVNLFKGVIRCSECGHALIITGFSDTRNGIYRCPLRNENRCSAKGLSRKQTDGTLLALLSRLDRFDSDMTNTIDMLRLHREHISSNIEKLVQLSLEIEDLSAITIKLKQLKGELSQVDADIEKETQRLKSIDVGCLSDCDLSTKAGRIEAQLIIKSAVKEVVLNTAKRRCKVTFHNSKSITLPITENPSEDVTEAIQSLSEVTERGLIDVDEVII

SEQ ID NO: 53442 - DNA, 50 bp, Escherichia coli; identical to SEQ ID NO: 47642
  source 1..50: mol_type = genomic DNA

SEQ ID NO: 53443 - DNA, 40 bp, Escherichia coli; identical to SEQ ID NO: 5188
  source 1..40: mol_type = genomic DNA

SEQ ID NO: 53444 - DNA, 40 bp, Escherichia coli; identical to SEQ ID NO: 5188
  source 1..40: mol_type = genomic DNA

SEQ ID NO: 53445 - DNA, 50 bp, Escherichia coli; identical to SEQ ID NO: 21330
  source 1..50: mol_type = genomic DNA

SEQ ID NO: 53446 - protein, 507 aa, Escherichia coli
MKRVISYIRFSSERQAKGDSLRRQSKMVNDWLKAHPEYYLDQDLSFRDLGVSGFTGKHLKGGLGDFLTAIEKGLVKAGDTLLIESLDRLSRQDVDQASELLRNILRSGVDVVTLSDGEHYTRESLKDPLALIKSILIMQRAHEESLRKAERIQAAWNRKKELISEGIKVSRRCPAWLRLNDDRKSFSVIPEKVETVKRCFQLRLEGKSIWEIVRTLNDEGHQTLNQYKAGKFGQTSVQDLLKNRSVIGYFTPKGCCEIAGYYPSIIPESDFYKVQQLSYARGGRKPASDKPLSVNLFKGVIRCSECGHALIITGFSDTRNGIYRCPLRNENRCNAKGLSRKQTDGTLLALLSRIDRFDSDMTNTIDTLKLHREHISSNIEKLVQLSLEIEDLSAITSKLKQLKGELSQVDADIEKETQRLKSIDVGCLSDCDLTTKAGRIEAQLIIKSAVKEVVLNTAKRRCKVTFHNGKVIDLPITEDPSEDVTEAIQSLSEVTERGLIDVDEVII

SEQ ID NO: 53447 - DNA, 50 bp, Escherichia coli; identical to SEQ ID NO: 47642
  source 1..50: mol_type = genomic DNA

SEQ ID NO: 53448 - DNA, 40 bp, Escherichia coli; identical to SEQ ID NO: 5188
  source 1..40: mol_type = genomic DNA

SEQ ID NO: 53449 - DNA, 40 bp, Escherichia coli; identical to SEQ ID NO: 5188
  source 1..40: mol_type = genomic DNA

SEQ ID NO: 53450 - DNA, 50 bp, Escherichia coli; identical to SEQ ID NO: 21330
  source 1..50: mol_type = genomic DNA

SEQ ID NO: 53451 - protein, 507 aa, Escherichia coli
MKRVISYIRFSSEKQSRGDSLRRQSKMVTDWLKAHPEYYLDQDLSFRDLGVSGFTGKHLKGGLGDFLTAIEKGLVKAGDTLLIESLDRLSRQDVDQASELLRNILRSGVDVVTLSDGEHYTKESLRDPLSLIKSILIMQRAHEESLRKAERIQAAWDAKKEAAKAGIKISRRCPAWLKLNDDRKSFSVIPEKVETVRRCFQLRLEGKSIWEIVRTLNDEGHQTLNQYKAGKFGQTSVQDLLKNRSVIGYFTPKGCEEIAGYFPPIIPETDFYKVQQLSYSRYGRKPASDKPLSVNLFKGVIRCSECGHALIITGFSDTRNGIYRCPLRNENRCSAKGLSRKQTDGTLLTLLSRLDRFDSDMTNTIDTLKLHREHISSNIEKLVQLSLEIEDLSAITSKLKQLKGELSQVDADIEKETQRLKSIDVGCLSDCDLSTKAGRIEAQLIIKSAVKEVVLNTAKRRCKVTFHNGKVIDLSITENPSEDVTEAIQSLSEVTEKGLIDVDVVEI

SEQ ID NO: 53452 - DNA, 50 bp, Escherichia coli; identical to SEQ ID NO: 47642
  source 1..50: mol_type = genomic DNA

SEQ ID NO: 53453 - DNA, 40 bp, Escherichia coli; identical to SEQ ID NO: 5188
  source 1..40: mol_type = genomic DNA

SEQ ID NO: 53454 - DNA, 40 bp, Escherichia coli; identical to SEQ ID NO: 5188
  source 1..40: mol_type = genomic DNA

SEQ ID NO: 53455 - DNA, 50 bp, Escherichia coli; identical to SEQ ID NO: 21330
  source 1..50: mol_type = genomic DNA

SEQ ID NO: 53456 - protein, 507 aa, Escherichia coli
MKRVISYIRFSSERQAKGDSLRRQSKMVNDWLKAHPEYYLDQDLSFRDLGVSGFTGKHLKGGLGDFLTAIEKGLVKAGDTLLIESLDRLSRQAVDRASELLRNILRSGVDVVTLSDGEHYTSESLKDPLALIKSILIMQRAHEESLRKSERIQAAWDAKKEAAKAGIKVSKRCPAWLRLNDDRKSFSVIPEKVETVKRCFQLRLEGKSIWEIVRTLNAEGHQTLNQYKAGSFGQTSVQDLLKNRSVIGYFTPKGCEEISGYYPSIIHETDFYKVQQLSYARYGRKPASDKPLSVNLFKGVIRCSECGHALIITGFSDTRSGIYRCPLRNENRCSAKGLSRKQTDGTLLTLLSRLDRFDSDTTNIIDMLRLHREHISSNIEKLVQLSLEIEDLNAITSKLKQLKGELSQVDADIEKETQRLKSIDMGCLSDCDLTTKAGRIEAQLIIKSAVKEVVLNTAKRRCKVTFHNGKAITLPITENPSEDVTEAIQSLSEVTERGLIDVDEVII

SEQ ID NO: 53457 - DNA, 50 bp, Escherichia coli; identical to SEQ ID NO: 47642
  source 1..50: mol_type = genomic DNA

SEQ ID NO: 53458 - DNA, 40 bp, Escherichia coli; identical to SEQ ID NO: 5188
  source 1..40: mol_type = genomic DNA

SEQ ID NO: 53459 - DNA, 40 bp, Escherichia coli; identical to SEQ ID NO: 5188
  source 1..40: mol_type = genomic DNA

SEQ ID NO: 53460 - DNA, 50 bp, Escherichia coli; identical to SEQ ID NO: 21330
  source 1..50: mol_type = genomic DNA

SEQ ID NO: 53461 - protein, 507 aa, Escherichia coli
MKRAISYIRFSSEKQSRGDSLRRQSKMVNDWLKAHPEYYLDQDLSFRDLGVSGFTGKHLKGGLGDFLTAIEKGLVKAGDTLLIESLDRLSRQAVDRASELLRNILRSGVDIVTLSDGEHYTSESLKDPLALIKSILIMQRAHEESLRKSERIQAAWDAKKEAAKAGIKVSKRCPAWLRLNDDRKSFSVIPEKVETVKRCFQLRLEGKSIWEIVRTLNAEGHRSMNQYKPGKFGQTSVQDLLKNRSVIGYFTPKGCEEISGYYPAIIDETTFYKVQQLSHSRYGKRSVSDKPLSVNLFKGVIRCSECGHALIITGFSDTRNGIYRCPLRNENRCNAKGLSRKQTDGTLLALLSRLDRFDSDMTNVIDALKLHREHISNNIEKLVQLSLEIEDLSAITIKLKQLKGELSQVDADIEKETQRLKSIDVGCLSDCDLTTKAGRIEAQLIIKSAVKEVVLNTAKRRCKVTFHNSKSITLPITENPSDNVTEAIQSLSEVTERGLIDVDVVEI

SEQ ID NO: 53462 - DNA, 50 bp, Escherichia coli; identical to SEQ ID NO: 47642
  source 1..50: mol_type = genomic DNA

SEQ ID NO: 53463 - DNA, 40 bp, Escherichia coli; identical to SEQ ID NO: 5188
  source 1..40: mol_type = genomic DNA

SEQ ID NO: 53464 - DNA, 40 bp, Escherichia coli; identical to SEQ ID NO: 5188
  source 1..40: mol_type = genomic DNA

SEQ ID NO: 53465 - DNA, 50 bp, Escherichia coli; identical to SEQ ID NO: 21330
  source 1..50: mol_type = genomic DNA

SEQ ID NO: 53466 - protein, 507 aa, Escherichia coli
MKRVISYIRFSSEKQAKGDSLRRQSKMVTDWLKAHPEYYLDQDLSFRDLGVSGFTGKHLKGGLGDFLTAIEKGLVKAGDTLLIESLDRLSRQAVDRASELLRNILRSGVDVVTLSDGEHYTSESLKDPLALIKSILIMQRAHEESLRKSERIQAAWDAKKEAAKAGIKVSKRCPAWLKLNDDRKSFSVIPEKVETVKRCFQLRLEGKSIWEIVRTLNDEGRQTLNQYKPGKFGQTSVQDLLKNRSVIGYFTPKGREEISGYYPAIIDETTFYKVQQLSHYRYGRKPVSDKPLSVNLFKGVIRCSECGHALIITGFSDTRSGIYRCPLRNENRCSAKGLSRKQTDGTLLALLSRLDRFDSDTTNTIDTLKLHREHISSNIEKLVQLSLEIEDLNAITNKLKQLKGELSQVDADIEKETQRLKSIDVGCLSDCDLTTKAGRIEAQLIIKSAVKEVVLNTAKRRCKVTFHNGKVIDLPITENPSEDVTEAIQSLSEVIERGLIDVDVVEI

SEQ ID NO: 53467 - DNA, 50 bp, Escherichia coli; identical to SEQ ID NO: 47642
  source 1..50: mol_type = genomic DNA

SEQ ID NO: 53468 - DNA, 40 bp, Escherichia coli; identical to SEQ ID NO: 5188
  source 1..40: mol_type = genomic DNA

SEQ ID NO: 53469 - DNA, 40 bp, Escherichia coli; identical to SEQ ID NO: 5188
  source 1..40: mol_type = genomic DNA

SEQ ID NO: 53470 - DNA, 50 bp, Escherichia coli; identical to SEQ ID NO: 21330
  source 1..50: mol_type = genomic DNA

SEQ ID NO: 53471 - protein, 507 aa, Escherichia coli
MKRAISYIRFSSEKQSRGDSLRRQSKMVNDWLKAHPEYYLDQDLSFRDLGVSGFTGKHLKGGLGDFLTAIEKGLVKAGDTLLIESLDRLSRQNVDRASELLRNILRSGVDVVTLSDGEHYTRESLKDPLALIKSILIMQRSHEESLRKSERIQAAWNRKKELISEGIKVSKRCPAWLKLNDDRKSFSVIPEKVETVKRCFQLRLEGKSIWEIVRTLNAEGHRSMNQYKPGKFGQTSVQDLLKNRSVIGYFTPKGCEEISGYYPAIIDETTFYKVQQLSHSRYGKRSVSDKPLSVNLFKGVIRCSECGHALIITGFSDTRNGIYRCPLRNENRCSAKGLSRKQTDGTLLTLLSRLDRFDSDTTNTIDMLRLHREHISSNIEKLVQLSLEIEDLSAITIKLKQLKGELSQVDADIEKETQRLKSIDVGCLSDCDLTTKAGRIEAQLIIKSAVKEVVLNTAKRRCKVTFHNGRAIDLSISENPSEDVTEAIQSLSEVTERGLIDVDEVII

SEQ ID NO: 53472 - DNA, 50 bp, Escherichia coli; identical to SEQ ID NO: 47642
  source 1..50: mol_type = genomic DNA

SEQ ID NO: 53473 - DNA, 40 bp, Escherichia coli; identical to SEQ ID NO: 5188
  source 1..40: mol_type = genomic DNA

SEQ ID NO: 53474 - DNA, 40 bp, Escherichia coli; identical to SEQ ID NO: 5188
  source 1..40: mol_type = genomic DNA

SEQ ID NO: 53475 - DNA, 50 bp, Escherichia coli; identical to SEQ ID NO: 21330
  source 1..50: mol_type = genomic DNA

SEQ ID NO: 53476 - protein, 507 aa, Escherichia coli
MKRAISYIRFSSEKQSRGDSLRRQAKMVTDWLKAHPEHYLDESLTFRDLGVSGFTGKHLKGGLGDFLTAIEKGLVKAGDTLLIESLDRLSRQNVDRASELLRNILRSGVDVVTLSDGEHYAKESLKDPLALIKSILIMQRSHEESLRKSERIQAAWDVKKEAAKAGIKISKRCPAWLKLNDDRKTFSVIPEKVETVRRCFQLRLEGKSIWEIVRTLNAEGHRSMNQYKPGKFGQTSVQDLLKNRSVIGYFTPKGCEEIAGYYPSVIDETTFYKVQQLSHSRYGRKPASAKPLSVNLFKGVIRCSECGHALIITGFSDTRNGIYRCPLRNENRCSAKGLSRKQTDGTLLTLLSRLDRFDSDTTNIIDMLRLHREHISSNIEKLVQLSLEIEDLNAITSKLKQLKGELSQVDADIEKETQRLKSIDVGCLSDCDLTTKAGRIEAQLIIKSAVKEVVLNTAKRRCKVTFHNGRAITLPITENPSEDVTEAIQSLSEVTERGLIDVDVVAI

SEQ ID NO: 53477 - DNA, 50 bp, Escherichia coli; identical to SEQ ID NO: 47642
  source 1..50: mol_type = genomic DNA

SEQ ID NO: 53478 - DNA, 40 bp, Escherichia coli; identical to SEQ ID NO: 5188
  source 1..40: mol_type = genomic DNA

SEQ ID NO: 53479 - DNA, 40 bp, Escherichia coli; identical to SEQ ID NO: 5188
  source 1..40: mol_type = genomic DNA

SEQ ID NO: 53480 - DNA, 50 bp, Escherichia coli; identical to SEQ ID NO: 21330
  source 1..50: mol_type = genomic DNA

SEQ ID NO: 53481 - protein, 507 aa, Escherichia coli
MKRAISYIRFSSEKQSRGDSLRRQSKMVTDWLKAHPEYYLDQDLSFRDLGVSGFTGKHLKGGLGDFLTAIEKGLVKAGDTLLIESLDRLSRQNVDRASELLRNILRSGVDVVTLSDGEHYTRESLKDPLALIKSILIMQRSHEESLRKSERIQAAWNRKKELISEGIKISKRCPAWLRLNDDRKSFSVIPEKVETVKRCFQLRLEGKSIWEIVRTLNAEGHQTLNQYKAGKFGQTSVQDLLKNRSVIGYFTPKGCCEIAGYYPSIIPESDFYKVQQLSHSRHGRKPVSDKPLSVNLFKGVIRCSECGHALIITGFSDTRNGIYRCPLRNENRCSAKGLSRKQTDGTLLTLLSRLDRFDSDTTNTIDMLRLHREHISSNIEKLVQLSLEIEDLSAITIKLKQLKGELSQVDADIEKETQRLKSIDTGSLSDCDLSTKAGRIEAQLIIKSAVKEVVLNTAKRRCKVTFHNGKVIDLPITENPSEDVTEAIQSLSEVTERGLIDVDVVAI

SEQ ID NO: 53482 - DNA, 50 bp, Escherichia coli; identical to SEQ ID NO: 47642
  source 1..50: mol_type = genomic DNA

SEQ ID NO: 53483 - DNA, 40 bp, Escherichia coli; identical to SEQ ID NO: 5188
  source 1..40: mol_type = genomic DNA

SEQ ID NO: 53484 - DNA, 40 bp, Escherichia coli; identical to SEQ ID NO: 5188
  source 1..40: mol_type = genomic DNA

SEQ ID NO: 53485 - DNA, 50 bp, Escherichia coli; identical to SEQ ID NO: 21330
  source 1..50: mol_type = genomic DNA

SEQ ID NO: 53486 - protein, 507 aa, Escherichia coli
MKRAISYIRFSSEKQSRGDSLRRQSKMVTDWLKAHPEYYLDQDLSFRDLGVSGFTGKHLKGGLGDFLTAIEKGLVKAGDTLLIESLDRLSRQAVDRASELLRNILRSGVDVVTLSDGEHYTRESLKDPLALIKSILIMQRAHEESLRKAERIQAAWDAKKEAAKAGIKISRRCPAWLRLNDDRKTFYVIPEKVATVKRCFQLRLEGKSIWEIVRTLNAEGHQTLNQYKAGSFGQSSVQDLLKNRSVIGYFTPKGCEEIAGYYPSVIDETTFYKVQQLSHYRYGRKPVSDKPLSVNLFKGVIRCSECGHALIITGFSDTRSGIYRCPLRNENRCSAKGLSRKQTDGTLLTLLSRLDRFDSDTTNTIDTLKLHREHISNNIEKLVQLSLEIEDLSAITSKLKQLKGELSQVDADIEKETQRLKSIDVGCLSDCDLTTKAGRIEAQLIIKSAVKEVVLNTAKRRCKVTFHNSKSITLPITENPSEDVTEAIQSLSEVTERGLIDVDVVAI

SEQ ID NO: 53487 - DNA, 50 bp, Escherichia coli; identical to SEQ ID NO: 47642
  source 1..50: mol_type = genomic DNA

SEQ ID NO: 53488 - DNA, 40 bp, Escherichia coli
  source 1..40: mol_type = genomic DNA
ccgcgttaatcgggtgattttagacagccgcccggttcat

SEQ ID NO: 53489 - DNA, 40 bp, Escherichia coli; identical to SEQ ID NO: 53488
  source 1..40: mol_type = genomic DNA

SEQ ID NO: 53490 - DNA, 50 bp, Escherichia coli; identical to SEQ ID NO: 21330
  source 1..50: mol_type = genomic DNA

SEQ ID NO: 53491 - protein, 507 aa, Escherichia coli
MKRAISYIRFSSEKQSRGDSLRRQSKMVTDWLKAHPEYYLDQDLSFRDLGVSGFTGKHLKGGLGDFLTAIEKGLVKAGDTLLIESLDRLSRQAVDRASELLRNILRSGVDVVTLSDGEHYTKESLRDPLSLIKSILIMQRAHEESLRKAERIQAAWDAKKEAAKAGIKISRRCPAWLKLNDDRKSFSVIPEKVETVKRCFQLRLEGKSIWEIVRTLNAEGHRSMNQYKPGKFGQTSVQDLLKNRSVIGYFTPKGCEEIAGYYPSVIDETTFYKVQQLSHSRYGRKPASDKPLSVNLFKGVIRCSECGHALIITGFSDTRSGIYRCPLRNENRCSAKGLSRKQTDGTLLTLLSRLDRFDSDTTNTIDTLKLHREHISNNIEKLVQLSLEIEDLSAITSKLKQLKGELSQVDADIEKETQRLKSIDVGCLSDCDLTTKAGRIEAQLIIKSAVKEVVLNTAKRRCKVTFHNGRAITLPITEDPSEDVTEAIQSLSEVTERGLIDVDVVEI

SEQ ID NO: 53492 - DNA, 50 bp, Escherichia coli; identical to SEQ ID NO: 47642
  source 1..50: mol_type = genomic DNA

SEQ ID NO: 53493 - DNA, 40 bp, Escherichia coli; identical to SEQ ID NO: 5188
  source 1..40: mol_type = genomic DNA

SEQ ID NO: 53494 - DNA, 40 bp, Escherichia coli; identical to SEQ ID NO: 5188
  source 1..40: mol_type = genomic DNA

SEQ ID NO: 53495 - DNA, 50 bp, Escherichia coli; identical to SEQ ID NO: 21330
  source 1..50: mol_type = genomic DNA

SEQ ID NO: 53496 - protein, 507 aa, Escherichia coli
MKRVISYIRFSSEKQAKGDSLRRQSKMVTDWLKAHPEYYLDQDLSFRDLGVSGFTGKHLKGGLGDFLTAIEKGLVKAGDTLLIESLDRLSRQDVDQASELLRNILRSGVDVVTLSDGEHYTRESLKDPLALIKSILIMQRAHEESLRKAERIQAAWDAKKEAAKAGIKISRRCPAWLKLNDDRKSFSVIPEKVETVKRCFQLRLEGKSIWEIVRTLNAEGHQTLNQYKAGKFGQTSVQDLLKNRSVIGYFTPKGCEEISGYFPPIIPETDFYKVQQLSHSRYGRKPASAKPLSVNLFKGVIRCSECGHALIITGFSDTRNGIYRCPLRNENRCSAKGLSRKQTDGTLLTLLSRLDRFDSDTTNTVDMLRLHREHISSNIEKLVQLSLEIEDLSAITSKLKQLKGELSQVDADIEKETQRLKSIDVGCLSDCDLSTKAGRIEAQLIIRSAVKEVVLNTAKRRCKVTFHNSKSITLSITENPSEDVTEAIQSLSEVTERGLIDVDVVEI

SEQ ID NO: 53497 - DNA, 50 bp, Escherichia coli; identical to SEQ ID NO: 47642
  source 1..50: mol_type = genomic DNA

SEQ ID NO: 53498 - DNA, 40 bp, Escherichia coli; identical to SEQ ID NO: 5188
  source 1..40: mol_type = genomic DNA

SEQ ID NO: 53499 - DNA, 40 bp, Escherichia coli; identical to SEQ ID NO: 5188
  source 1..40: mol_type = genomic DNA

SEQ ID NO: 53500 - DNA, 50 bp, Escherichia coli; identical to SEQ ID NO: 21330
  source 1..50: mol_type = genomic DNA

SEQ ID NO: 53501 - protein, 507 aa, Escherichia coli; identical to SEQ ID NO: 53486

SEQ ID NO: 53502 - DNA, 50 bp, Escherichia coli; identical to SEQ ID NO: 47642
  source 1..50: mol_type = genomic DNA

SEQ ID NO: 53503 - DNA, 40 bp, Escherichia coli
  source 1..40: mol_type = genomic DNA
ccgcgttaatcgagtgattttagacagccgcccggttcat

SEQ ID NO: 53504 - DNA, 40 bp, Escherichia coli; identical to SEQ ID NO: 53503
  source 1..40: mol_type = genomic DNA

SEQ ID NO: 53505 - DNA, 50 bp, Escherichia coli; identical to SEQ ID NO: 21330
  source 1..50: mol_type = genomic DNA

SEQ ID NO: 53506 - protein, 507 aa, Escherichia coli
MKRVISYIRFSSEKQAKGDSLRRQSKMVNDWLKAHPEYYLDQDLSFRDLGVSGFTGKHLKGGLGDFLTAIEKGLVKAGDTLLIESLDRLSRQDIDIASELLRRILRAGVDVVTLSDGEHYTSESLKDPLSLIKSILIMQRAHEESLRKAERIQAAWDAKKEAAKAGIKVSKRCPAWLKLNDDRKSFSVIPEKVETVKRCFQLRLEGKSIWEIVRTLNDEGHQSMSQYKPGKFGQTSVQDLLKNRSVIGYFTPKGCEEISGYFPPIIPETDFYKVQQLSYSRYGRKPASDKPLSVNLFKGVIRCSECGHALIITGFSDTRSGIYRCPLRNENRCSAKGLSRKQTDGTLLALLSRLDRFDSDTTNTIDTLKLHREHISSNIEKLVQLSLEIEDLNAITNKLKQLKNELSQVDADIEKETQRLKSIDVGCLSDCDLTTKAGRIEAQLIIKSAVKEVVLNTAKRRCKVTFHNGKVIDLPITENPSEDVTEAIQSLSEVTERGLIDVDEVII

SEQ ID NO: 53507 - DNA, 50 bp, Escherichia coli; identical to SEQ ID NO: 47642
  source 1..50: mol_type = genomic DNA

SEQ ID NO: 53508 - DNA, 40 bp, Escherichia coli; identical to SEQ ID NO: 5188
  source 1..40: mol_type = genomic DNA

SEQ ID NO: 53509 - DNA, 40 bp, Escherichia coli; identical to SEQ ID NO: 5188
  source 1..40: mol_type = genomic DNA

SEQ ID NO: 53510 - DNA, 50 bp, Escherichia coli; identical to SEQ ID NO: 21330
  source 1..50: mol_type = genomic DNA

SEQ ID NO: 53511 - protein, 507 aa, Escherichia coli
MKRVISYIRFSSERQAKGDSLRRQSKMVNDWLKAHPEYYLDQDLSFRDLGVSGFTGKHLKGGLGDFLTAIEKGLVKAGDTLLIESLDRLSRQNVDRASELLRNILRSGVDVVTLSDGEHYTRESLKDPLALIKSILIMQRSHEESLRKSERIQAAWNRKKELISEGIKISKRCPAWLKLNDDRKSFSVIPDKVETVKRCFQLRLEGKSIWEIVRTLNDEGHQTLNQYKAGKFGQTSVQDLLKNRSVIGYFTPKGCEEISGYYPAIIDETTFYKVQQLSHYRYGRKPVSDKPLSVNLFKGVIRCSECGHALIITGFSDTRNGIYRCPLRNENRCSAKGLSRKQTDGTLLALLSRLDRFDSDMTNTIDTLKLHREHISSNIEKLVQLSLEIEDLSAITSKLKQLKNELSQVDADIEKETQRLKSIDVGCLSDCDLTTKAGRIEAQLIIKSAVKEVILNTAKRRCKVTFHNGKVIDLPITENPSDNVTEAIQSLSEVTERGLIDVDEVII

SEQ ID NO: 53512 - DNA, 50 bp, Escherichia coli; identical to SEQ ID NO: 47642
  source 1..50: mol_type = genomic DNA

SEQ ID NO: 53513 - DNA, 40 bp, Escherichia coli; identical to SEQ ID NO: 5188
  source 1..40: mol_type = genomic DNA

SEQ ID NO: 53514 - DNA, 40 bp, Escherichia coli; identical to SEQ ID NO: 5188
  source 1..40: mol_type = genomic DNA

SEQ ID NO: 53515 - DNA, 50 bp, Escherichia coli; identical to SEQ ID NO: 21330
  source 1..50: mol_type = genomic DNA

SEQ ID NO: 53516 - protein, 507 aa, Escherichia coli
MKRAISYIRFSSEKQSRGDSLRRQSKMVNDWLKAHPEYYLDQDLSFRDLGVSGFTGKHLKGGLGDFLTAIEKGLVKAGDTLLIESLDRLSRQNVDRASELLRNILRSGVDVVTLSDGEHYTRESLKDPLALIKSILIMQRSHEESLRKSERIQAAWNRKKELISEGIKISKRCPAWLKLNDDRKSFSVIPEKVETVKRCFQLRLEGKSIWEIVRTLNAEGHQTLNQYKAGSFGQTSVQDLLKNRSVIGYFTPKGCEEISGYFPPIIPETDFYKVQQLSYSRYGRKPASDKPLSVNLFKGVIRCSECGHALIITGFSDTRNGIYRCPLRNENRCSAKGLSRKQTDGTLLALLSRLDRFDSDMTNTIDTLKLHREHISSNIEKLVQLSLEIEDLSAITSKLKQLKNELSQVDADIEKETQRLKSIDVGCLSDCDLTTKAGRIEAQLIIKSAVKEVILNTAKRRCKVTFHNGKVIDLPITETPSEDVTEAIQSLSEVTERGLIDVDEVII

SEQ ID NO: 53517 - DNA, 50 bp, Escherichia coli; identical to SEQ ID NO: 47642
  source 1..50: mol_type = genomic DNA

SEQ ID NO: 53518 - DNA, 40 bp, Escherichia coli; identical to SEQ ID NO: 5188
  source 1..40: mol_type = genomic DNA

SEQ ID NO: 53519 - DNA, 40 bp, Escherichia coli; identical to SEQ ID NO: 5188
  source 1..40: mol_type = genomic DNA

SEQ ID NO: 53520 - DNA, 50 bp, Escherichia coli; identical to SEQ ID NO: 21330
  source 1..50: mol_type = genomic DNA

SEQ ID NO: 53521 - protein, 507 aa, Escherichia coli
MKRAISYIRFSSEKQSRGDSLRRQSKMVNDWLKAQPEYYLDQDLSFRDLGVSGFTGKHLKGGLGDFLTAIEKGLVKAGDTLLIESLDRLSRQDIDIASELLRNILRSGVDVVTLSDGEHYTRESLKDPLALIKSILIMQRAHEESLRKAERIQAAWDAKKEAAKAGIKISKRCPAWLKLNDDRKSFSVIPEKVETVKRCFQLRLEGKSIWEIVRTLNAEGHQTMNQYKPGKFGQTSVQDLLKNRSVIGYFTPKGCGEIAGYYPSVIDETTFYKVQQLSHSRYGRKPVSAKPLSVNLFKGVIRCSECGHALIITGFSDTRNGIYRCPLRNENRCSAKGLSRKQTDGTLLTLLSRLDRFDSDTTNTIDMLRLHREHISSNIEKLVQLSLEIEDLSAITIKLKQLKGELSQVDADIEKETQRLKSIDVGCLSDCDLTTKSGRIEAQLIIKSAVKEVVLNTAKRRCKVTFHNGRIINLPITENPSEDVTEAIQSLSEVTERGLIDVDEVII

SEQ ID NO: 53522 - DNA, 50 bp, Escherichia coli; identical to SEQ ID NO: 47642
  source 1..50: mol_type = genomic DNA

SEQ ID NO: 53523 - DNA, 40 bp, Escherichia coli; identical to SEQ ID NO: 5188
  source 1..40: mol_type = genomic DNA

SEQ ID NO: 53524 - DNA, 40 bp, Escherichia coli; identical to SEQ ID NO: 5188
  source 1..40: mol_type = genomic DNA

SEQ ID NO: 53525 - DNA, 50 bp, Escherichia coli; identical to SEQ ID NO: 21330
  source 1..50: mol_type = genomic DNA

SEQ ID NO: 53526 - protein, 507 aa, Escherichia coli
MKRVISYIRFSSEKQAKGDSLRRQSKMVTDWLKAHPEYYLDESLTFRDLGVSGFTGKHLKGGLGDFLTAIEKGLVKAGDTLLIESLDRLSRQDVDRASELLRNILRSGVDVVTLSDGEHYTRESLKDPLSLIKSILIMQRAHEESLRKSERIQAAWDAKKEAAKAGIKISRRCPAWLRLNDDRKSFSVIPEKVETVKRCFQLRLEGKSIWEIVRTLNDEGHQSMSQYKPGKFGQTSVQDLLKNRSVIGYFTPKGCEEISGYYPAIIDETTFYKVQQLSHYRYGRKPVSDKPLSVNLFKGVIRCSECGHALIITGFSDTRNGIYRCPLRNENRCSAKGLSRKQTDGTLLALLSRLDRFDSDTTNIIDTLKLHREHISSNIEKLVQLSLEIEDLSAITSKLKQLKGELSQVDADIEKETQRLKSIDVGCLSDCDLTTKAGRIEAQLIIKSAVKEVVLNTAKRRCKVTFHNGKAITLPITENPSEDVTEAIQSLSEVTERGLIDVDEVII

SEQ ID NO: 53527 - DNA, 50 bp, Escherichia coli; identical to SEQ ID NO: 47642
  source 1..50: mol_type = genomic DNA

SEQ ID NO: 53528 - DNA, 40 bp, Escherichia coli; identical to SEQ ID NO: 5188
  source 1..40: mol_type = genomic DNA

SEQ ID NO: 53529 - DNA, 40 bp, Escherichia coli; identical to SEQ ID NO: 5188
  source 1..40: mol_type = genomic DNA

SEQ ID NO: 53530 - DNA, 50 bp, Escherichia coli; identical to SEQ ID NO: 21330
  source 1..50: mol_type = genomic DNA

SEQ ID NO: 53531 - protein, 507 aa, Escherichia coli
MKRAISYIRFSSEKQSRGDSLRRQSKMVNDWLKAHPEYYLDQDLSFRDLGVSGFTGKHLKGGLGDFLTAIEKGLVKAGDTLLIESLDRLSRQAVDRASELLRNILRSGVDIVTLSDGEHYTRESLKDPLALIKSILIMQRAHEESLRKSERIQAAWNRKKELISEGIKISKRCPAWLKLNDDRKSFSVIPEKVETVKRCFQLRLEGKSIWEIVRTLNAEGHQTLNQYKAGSFGQTSVQDLLKNRSVIGYFTPKGCEEISGYYPSIIHETDFYKVQQLSYARHGRKPASAKPLSVNLFKGVIRCSECGHALIITGFSDTRNGIYRCPLRNENRCSAKGLSRKQTDGTLLTLLSRLDRFDSDTTNTIDTLKLHREHISSNIEKLVQLSLEIEDLSAITSKLKQLKGELSQVDADIEKETQRLKSIDVGCLSDCDLTTKAGRIEAQLIIKSAVKEVVLNTAKRRCKVTFHNGKSITLPITENPSEDVTEAIQSLSEVTERGLIDVDEVII

SEQ ID NO: 53532 - DNA, 50 bp, Escherichia coli; identical to SEQ ID NO: 47642
  source 1..50: mol_type = genomic DNA

SEQ ID NO: 53533 - DNA, 40 bp, Escherichia coli; identical to SEQ ID NO: 5188
  source 1..40: mol_type = genomic DNA

SEQ ID NO: 53534 - DNA, 40 bp, Escherichia coli; identical to SEQ ID NO: 5188
  source 1..40: mol_type = genomic DNA

SEQ ID NO: 53535 - DNA, 50 bp, Escherichia coli; identical to SEQ ID NO: 21330
  source 1..50: mol_type = genomic DNA

SEQ ID NO: 53536 - protein, 507 aa, Escherichia coli
MKRVISYIRFSSERQAKGDSLRRQSKMVNDWLKAHPEYYLDQDLSFRDLGVSGFTGKHLKGGLGDFLTAIEKGLVKAGDTLLIESLDRLSRQAVDRASELLRNILRSGVDVVTLSDGEHYTKESLRDPLSLIKSILIMQRAHEESLRKSERIQAAWNRKKELISEGIKISKRCPAWLKLNDDRKSFSVIPEKVETVKRCFQLRLEGKSIWEIVRTLNAEGHQTLNQYKAGSFGQTSVQDLLKNRSVIGYFTPKGCEEISGYYPSIIHETDFYKVQQLSYARHGRKPASAKPLSVNLFKGVIRCSECGHALIITGFSDTRNGIYRCPLRNENRCSAKGLSRKQTDGTLLTLLSRLDRFDSDTTNTIDTLKLHREHISSNIEKLVQLSLEIEDLNAITSKLKQLKGELSQVDADIEKETQRLKSIDVGCLSDCDLTTKAGRIEAQLIIKSAVKEVVLNTAKRRCKVTFHNGRIIDLPITENPSEDVTEAIQSLSEVTERGLIDVDEVII

SEQ ID NO: 53537 - DNA, 50 bp, Escherichia coli; identical to SEQ ID NO: 47642
  source 1..50: mol_type = genomic DNA

SEQ ID NO: 53538 - DNA, 40 bp, Escherichia coli; identical to SEQ ID NO: 5188
  source 1..40: mol_type = genomic DNA

SEQ ID NO: 53539 - DNA, 40 bp, Escherichia coli; identical to SEQ ID NO: 5188
  source 1..40: mol_type = genomic DNA

SEQ ID NO: 53540 - DNA, 50 bp, Escherichia coli; identical to SEQ ID NO: 21330
  source 1..50: mol_type = genomic DNA

SEQ ID NO: 53541 - protein, 507 aa, Escherichia coli
MKRVISYIRFSSERQAKGDSLRRQSKMVNDWLKAHPEYYLDQDLSFRDLGVSGFTGKHLKGGLGDFLTAIEKGLVKAGDTLLIESLDRLSRQAVDRASELLRNILRSGVDVVTLSDGEHYTRESLKDPLSLIKSILIMQRAHEESLRKSERIQAAWNRKKELISEGIKVSRRCPAWLRLNDDRKSFSVIPDKVETVKRCFQLRLEGKSIWEIVRTLNAEGHQTLNQYKAGSFGQTSVQDLLKNRSVIGYFTPKGCEEISGYYPAIIDETTFYKVQQLSYAHYGRKPASDKPLSVNLFKGVIRCSECGHALIITGFSDTRSGIYRCPLRNENRCSAKGLSRKQTDGTLLTLLSRLDRFDSDTTNTIDTLKLHREHISSNIEKLVQLSLEIEDLNAITNKLKQLKNELSRVDADIEKETQRLKSIDVGCLSDCDLTTKAGRIEAQLIIKSAVKEVVLNTAKRRCKVTFHNGRIIDLPITENPSEDVTEAIQSLSEVTERGLIDVDEVII

SEQ ID NO: 53542 - DNA, 50 bp, Escherichia coli; identical to SEQ ID NO: 47642
  source 1..50: mol_type = genomic DNA

SEQ ID NO: 53543 - DNA, 40 bp, Escherichia coli; identical to SEQ ID NO: 5188
  source 1..40: mol_type = genomic DNA

SEQ ID NO: 53544 - DNA, 40 bp, Escherichia coli; identical to SEQ ID NO: 5188
  source 1..40: mol_type = genomic DNA

SEQ ID NO: 53545 - DNA, 50 bp, Escherichia coli; identical to SEQ ID NO: 21330
  source 1..50: mol_type = genomic DNA

SEQ ID NO: 53546 - protein, 507 aa, Escherichia coli
MKRAISYIRFSSEKQSRGDSLRRQSKMVNDWLKAHPEYYLDQDLSFRDLGVSGFTGKHLKGGLGDFLTAIEKGLVKAGDTLLIESLDRLSRQNVDRASELLRNILRSGVDVVTLSDGEHYTRESLKDPLALIKSILIMQRAHEESLRKSERIQAAWNRKKELISEGIKISKRCPAWLKLNDDRKSFSVIPEKVETVKRCFQLRLEGKSIWEIVRTMNAEGHQTLNQYKAGSFGQSSVQDLLKNRSVIGYFTPKGCEEIAGYYPAIIDETTFYKVQQLSYARHGRKPASAKPLSVNLFKGVIRCSECGHALIITGFSDTRSGIYRCPLRNENRCSAKGLSRKQTDGTLLTLLSRLDRFDSDTTNTIDTLKLHREHISSNIEKLVQLSLEIEDLSAITSKLKQLKNELSQVDADIEKETQRLKSIDVGCLSDCDLTTKAGRIEAQLIIRSAVKEVVLNTAKRRCKVTFHNGKVIGLSITETPSEDVTEAIQSLSEVTERGLIDVDEVII

SEQ ID NO: 53547 - DNA, 50 bp, Escherichia coli; identical to SEQ ID NO: 47642
  source 1..50: mol_type = genomic DNA

SEQ ID NO: 53548 - DNA, 40 bp, Escherichia coli; identical to SEQ ID NO: 5188
  source 1..40: mol_type = genomic DNA

SEQ ID NO: 53549 - DNA, 40 bp, Escherichia coli; identical to SEQ ID NO: 5188
  source 1..40: mol_type = genomic DNA

SEQ ID NO: 53550 - DNA, 50 bp, Escherichia coli; identical to SEQ ID NO: 21330
  source 1..50: mol_type = genomic DNA

SEQ ID NO: 53551 - protein, 508 aa, Escherichia coli
MKRVISYIRFSSERQAKGDSLRRQSKMVNDWLKAHPEYYLDQDLSFRDLGVSGFTGKHLKGGLGDFLTAIEKGLVKAGDTLLIESLDRLSRQDIDIASELLRNILRSGVDVVTLSDGEHYTRESLRDPLALIKSILIMQRAHEESLRKSERIQAAWDAKKEAAKAGIKVSKRCPAWLRLNDDRKSFSVIPEKVETVKRCFQLRLEGKSIWEIVRTLNAEGHRSMNQYKPGKFGQTSVQDLLKNRSVIGYFTPKGCEEISGYYPAIIDETTFYKVQQLSHSRYGKRSVSDKPLSVNLFKGVIRCSECGHALIITGFSDTRNGIYRCPLRNENRCNAKGLSRKQTDGTLLALLSRLDRFDSDTTNTIDTLKLHREHISSNIEKLVQLSLEIEDLNAITSKLKQLKGELSQVDADIEKETQRLKSIDVGCLSDCDLTTKAGRIEAQLIIKSAVKEVVLNTAKRRCKVTFHNGKVIDLSIAPPSFVVAVLPVADEISVCPTIERNSTPWKVI

SEQ ID NO: 53552 - DNA, 50 bp, Escherichia coli; identical to SEQ ID NO: 47642
  source 1..50: mol_type = genomic DNA

SEQ ID NO: 53553 - DNA, 40 bp, Escherichia coli; identical to SEQ ID NO: 5188
  source 1..40: mol_type = genomic DNA

SEQ ID NO: 53554 - DNA, 40 bp, Escherichia coli; identical to SEQ ID NO: 5188
  source 1..40: mol_type = genomic DNA

SEQ ID NO: 53555 - DNA, 50 bp, Escherichia coli; identical to SEQ ID NO: 21330
  source 1..50: mol_type = genomic DNA

SEQ ID NO: 53556 - protein, 507 aa, Escherichia coli
MKRAISYIRFSSEKQSRGDSLRRQSKMVTDWLKAHPEYYLDQDLSFRDLGVSGFTGKHLKGGLGDFLTAIEKGLVKAGDTLLIESLDRLSRQNVDRASELLRNILRSGVDVVTLSDGEHYTRESLKDPLALIKSILIMQRSHEESLRKSERIQAAWNRKKELISEGIKISKRCPAWLKLNDDRKSFSVIPDKVETVKRCFQLRLEGKSIWEIVRTLNAEGHRSMNQYKPGKFGQTSVQDLLKNRSVIGYFTPKGCEEIAGYYPSVIDETTFYKVQQLSYARHGRKPASAKPLSVNLFKGVIRCSECGHALIITGFSDTRSGIYRCPLRNENRCSAKGLSRKQTDGTLLTLLSRLDRFDSDMTNTIDTLKLHREHISSNIEKLVQLSLEIEDLSAITIKLKQLKGELSQVDADIEKETQRLKSIDVGCLSDCDLTTKAGRIEAQLIIKSAVKEVVLNTAKRRCKVTFHNGKVIDLPITENPSEDVTEAIQSLSEVTAKGLIDVDVVEI

SEQ ID NO: 53557 - DNA, 50 bp, Escherichia coli; identical to SEQ ID NO: 47642
  source 1..50: mol_type = genomic DNA

SEQ ID NO: 53558 - DNA, 40 bp, Escherichia coli; identical to SEQ ID NO: 5188
  source 1..40: mol_type = genomic DNA

SEQ ID NO: 53559 - DNA, 40 bp, Escherichia coli; identical to SEQ ID NO: 5188
  source 1..40: mol_type = genomic DNA

SEQ ID NO: 53560 - DNA, 50 bp, Escherichia coli; identical to SEQ ID NO: 21330
  source 1..50: mol_type = genomic DNA

SEQ ID NO: 53561 - protein, 507 aa, Escherichia coli
MKRVISYIRFSSERQAKGDSLRRQSKMVNDWLKAHPEYYLDQDLSFRDLGVSGFTGKHLKGGLGDFLTAIEKGLVKAGDTLLIESLDRLSRQDIDIASELLRRILRAGVDVVTLSDGEHYTKESLRDPLSLIKSILIMQRAHEESLRKAERIQAAWDAKKEAAKAGIKISRRCPAWLKLNDDRKSFSVIPEKVETVKRCFQLRLEGKSIWEIVRTLNAEGHQTLNQYKAGKFGQTSVQDLLKNRSVIGYFTPKGCEEISGYYPAIIDETTFYKVQQLSYARYGRKPASDKPLSVNLFKGVIRCSECGHALIITGFSDTRSGIYRCPLRNENRCSAKGLSRKQTDSTLLALLSRLDRFDSDMTNIVDTLKLHREHISSNIEKLVQLSLEIEDLSAITSKLKQLKGELSQVDADIEKETQRLKSIDVGCLSDCDLSTKAGRIEAQLIIRSAVKEVVLNTAKRRCKVTFHNSKSITLSITENPSEDVTEAIQSLSEVTERGLIDVDVVEI

SEQ ID NO: 53562 - DNA, 50 bp, Escherichia coli; identical to SEQ ID NO: 47642
  source 1..50: mol_type = genomic DNA

SEQ ID NO: 53563 - DNA, 40 bp, Escherichia coli; identical to SEQ ID NO: 5188
  source 1..40: mol_type = genomic DNA

SEQ ID NO: 53564 - DNA, 40 bp, Escherichia coli; identical to SEQ ID NO: 5188
  source 1..40: mol_type = genomic DNA

SEQ ID NO: 53565 - DNA, 50 bp, Escherichia coli; identical to SEQ ID NO: 21330
  source 1..50: mol_type = genomic DNA

SEQ ID NO: 53566 - protein, 507 aa, Escherichia coli
MKRAISYIRFSSEKQSRGDSLRRQSKMVNDWLKAHPEYYLDQDLSFRDLGVSGFTGKHLKGGLGDFLTAIEKGLVKAGDTLLIESLDRLSRQAVDRASELLRNILRSGVDVVTLSDGEHYTSESLKDPLALIKSILIMQRAHEESLRKSERIQAAWDAKKEAAKAGIKVSKRCPAWLRLNDDRKSFSVIPEKVETVKRCFQLRLEGKSIWEIVRTMNAEGHQTLHQHKAGSFGQSSVQDLLKNRSVIGYFTPKGCEEIAGYYPAIIDETTFYKVQQLSYARHGRKPVSDKPLSVNLFKGVIRCSECGHALIITGFSDTRNGIYRCPLRNENRCSAKGLSRKQTDGTLLALLSRLDRFDSDMTNVIDTLKLHREHISNNIEKLVQLSLEIEDLSAITIKLKQLKGELSQVDADIEKETQRLKSIDVGCLSDCDLTTKAGRIEAQLIIKSAVKEVVLNTAKRRCKVTFHNGKSIILSITENPSDNVTEAIQSLSEVTERGLIDVDVVEI

SEQ ID NO: 53567 - DNA, 50 bp, Escherichia coli; identical to SEQ ID NO: 47642
  source 1..50: mol_type = genomic DNA

SEQ ID NO: 53568 - DNA, 40 bp, Escherichia coli; identical to SEQ ID NO: 5188
  source 1..40: mol_type = genomic DNA

SEQ ID NO: 53569 - DNA, 40 bp, Escherichia coli; identical to SEQ ID NO: 5188
  source 1..40: mol_type = genomic DNA

SEQ ID NO: 53570 - DNA, 50 bp, Escherichia coli; identical to SEQ ID NO: 21330
  source 1..50: mol_type = genomic DNA

SEQ ID NO: 53571 - protein, 507 aa, Escherichia coli
MKRVISYIRFSSEKQSRGDSLRRQSKMVTDWLKAHPEYYLDQDLSFRDLGVSGFTGKHLKGGLGDFLTAIEKGLVKAGDTLLIESLDRLSRQDIDIASELLRNILRSGVDVVTLSDGEHYTRESLKDPLSLIKSILIMQRAHEESLRKSERIQAAWNRKKELISEGIKVSRRCPAWLRLNDDRKSFSVIPEKVETVKRCFQLRLEGKSIWAIVKALNDEGHQSMSQYKPGKFGQTSVQDLLKNRSVIGYFTPKGCEEISGYYPAIIDETTFYKVQQLSHYRYGRKPVSDKPLSVNLFKGVIRCSECGHALIITGFSDTRNGIYRCPLRNENRCSAKGLSRKQTDGTLLTLLSRLDRFDSDTTNIIDTLKLHREHISSNIEKLVQLSLEIEDLSAITSKLKQLKGELSQVDADIEKETQRLKSIDVGCLSDCDLTTKAGRIEAQLIIKSAVKEVVLNTAKRRCKVTFHNGKVIDLPITENPSEDVTEAIQSLSEVTERGLIDVDVVEI

SEQ ID NO: 53572 - DNA, 50 bp, Escherichia coli; identical to SEQ ID NO: 47642
  source 1..50: mol_type = genomic DNA

SEQ ID NO: 53573 - DNA, 40 bp, Escherichia coli; identical to SEQ ID NO: 5188
  source 1..40: mol_type = genomic DNA

SEQ ID NO: 53574 - DNA, 40 bp, Escherichia coli; identical to SEQ ID NO: 5188
  source 1..40: mol_type = genomic DNA

SEQ ID NO: 53575 - DNA, 50 bp, Escherichia coli; identical to SEQ ID NO: 21330
  source 1..50: mol_type = genomic DNA

SEQ ID NO: 53576 - protein, 507 aa, Escherichia coli
MKRVISYIRFSSERQAKGDSLRRQSKMVNDWLKAHPEYYLDQDLSFRDLGVSGFTGKHLKGGLGDFLTAIEKGLVKAGDTLLIESLDRLSRQAVDRASELLRNILRSGVDIVTLSDGEHYTSESLKDPLALIKSILIMQRAHEESLRKSERIQAAWDAKKEAAKAGIKVSRRCPAWLRLNDDRKSFSVIPEKVETVKRCFQLRLEGKSIWEIVRTLNAEGHRSMNQYKPGKFGQTSVQDLLKNRSVIGYFTPKGCEEIAGYFPPIIPETDFYKVQQLSYSRYGRKPASDKPLSVNLFKGVIRCSECGHALIITGFSDTRNGIYRCPLRNENRCSAKGLSRKQTDGTLLALLSRLDRFDSDMTNVIDTLKLHREHISNNIEKLVQLSLEIEDLSAITIKLKQLKGELSQVDADIEKETQRLKSIDAGCLSDCDLTTKAGRIEAQLIIKSAVKEVVLNTAKRRCKVTFHNGRIIDLPITENPSEDVTEAIQSLSEVTEKGLIDVDEVII

SEQ ID NO: 53577 - DNA, 50 bp, Escherichia coli; identical to SEQ ID NO: 47642
  source 1..50: mol_type = genomic DNA

SEQ ID NO: 53578 - DNA, 40 bp, Escherichia coli; identical to SEQ ID NO: 5188
  source 1..40: mol_type = genomic DNA

SEQ ID NO: 53579 - DNA, 40 bp, Escherichia coli; identical to SEQ ID NO: 5188
  source 1..40: mol_type = genomic DNA

SEQ ID NO: 53580 - DNA, 50 bp, Escherichia coli; identical to SEQ ID NO: 21330
  source 1..50: mol_type = genomic DNA

SEQ ID NO: 53581 - protein, 507 aa, Escherichia coli
MKRVISYIRFSSERQAKGDSLRRQSKMVNDWLKAHPEYYLDQDLSFRDLGVSGFTGKHLKGGLGDFLTAIEKGLVKAGDTLLIESLDRLSRQDVDQASELLRNILRSGVDVVTLSDGEHYTRESLKDPLALIKSILIMQRSHEESLRKSERIQAAWNRKKELISEGIKISKRCPAWLKLNDDRKSFSVIPEKVETVKRCFQLRLEGKSIWEIVRTLNDEGHQTLNQYKAGSFGQTSVQDLLKNRSVIGYFTPKGCEEISGYYPAIIDETTFYKVQQLSYARYGRKPASDKPMAVNLFKGVIRCSECGHALIITGFSDTRNGIYRCPLRNENRCSAKGLSRKQTDGTLLALLSRLDRFDSDMTNTIDTLKLHREHISSNIEKLVQLSLEIEDLSAITSKLKQLKGELSQVDADIEKETQRLKSIDVGCLSDCDLTTKAGRIEAQLIIKSAVKEVVLNTAKRRCKVTFHNGKAITLPITENPSDNVTEAIQSLSEVTERGLIDVDEVII

SEQ ID NO: 53582 - DNA, 50 bp, Escherichia coli; identical to SEQ ID NO: 47642
  source 1..50: mol_type = genomic DNA

SEQ ID NO: 53583 - DNA, 40 bp, Escherichia coli; identical to SEQ ID NO: 5188
  source 1..40: mol_type = genomic DNA

SEQ ID NO: 53584 - DNA, 40 bp, Escherichia coli; identical to SEQ ID NO: 5188
  source 1..40: mol_type = genomic DNA

SEQ ID NO: 53585 - DNA, 50 bp, Escherichia coli; identical to SEQ ID NO: 21330
  source 1..50: mol_type = genomic DNA

SEQ ID NO: 53586 - protein, 507 aa, Escherichia coli
MKRVISYIRFSSERQAKGDSLRRQSKMVNDWLKAHPDYYLDQDLSFRDLGVSGFTGKHLKGGLGDFLTAIEKGLVKAGDTLLIESLDRLSRQDIDIASELLRRILRAGVDVVTLSDGEHYTRESLKDPLSLIKSILIMQRSHEESLRKSERIQAAWDAKKEAAKAGIKISRRCPAWLKLNDDRKSFSVIPEKVETVKRCFQLRLEGKSIWEIVRTLNDEGHQSMSQYKPGKFGQTSVQDLLKNRSVIGYFTPKGCEEISGYYPAIIDETTFYKVQQLSHYRYGRKPVSDKPLSVNLFKGVIRCSECGHALIITGFSDTRNGIYRCPLRNENRCSAKGLSRKQTDGTLLTLLSRLDRFDSDMTNTIDTLKLHREHISSNIEKLVQLSLEIEDLSAITIKLKQLKNELSQVDADIEKETQRLKSIDVGCLSDCDLTTKAGRIEAQLIIKSAVKEVVLNTAKRRCKVTFHNGKVIDLSITENPSEDVTEAIQSLSEVTERGLIDVDEVII

SEQ ID NO: 53587 - DNA, 50 bp, Escherichia coli; identical to SEQ ID NO: 47642
  source 1..50: mol_type = genomic DNA

SEQ ID NO: 53588 - DNA, 40 bp, Escherichia coli; identical to SEQ ID NO: 5188
  source 1..40: mol_type = genomic DNA

SEQ ID NO: 53589 - DNA, 40 bp, Escherichia coli; identical to SEQ ID NO: 5188
  source 1..40: mol_type = genomic DNA

SEQ ID NO: 53590 - DNA, 50 bp, Escherichia coli; identical to SEQ ID NO: 21330
  source 1..50: mol_type = genomic DNA

SEQ ID NO: 53591 - protein, 507 aa, Escherichia coli
MKRVISYIRFSSERQAKGDSLRRQSKMVNDWLKAHPEYYLDQDLSFRDLGVSGFTGKHLKGGLGDFLTAIEKGLVKAGDTLLIESLDRLSRQDIDIASELLRNILRSGVDVVTLSDGEHYTRESLRDPLALIKSILIMQRAHEESLRKSERIQAAWDAKKEAAKAGIKVSKRCPAWLRLNDDRKSFSVIPEKVETVKRCFQLRLEGKSIWEIVRTLNAEGHRSMNQYKPGKFGQTSVQDLLKNRSVIGYFTPKGCEEISGYYPAIIDETTFYKVQQLSHSRYGKRSVSDKPLSVNLFKGVIRCSECGHALIITGFSDTRNGIYRCPLRNENRCNAKGLSRKQTDGTLLALLSRLDRFDSDTTNTIDTLKLHREHISSNIEKLVQLSLEIEDLNAITSKLKQLKGELSQVDADIEKETQRLKSIDVGCLSDCDLTTKAGRIEAQLIIKSAVKEVVLNTAKRRCKVTFHNGKVIDLSITENPSEDVTEAIQSLSEVTERGLIDVDVVEI

SEQ ID NO: 53592 - DNA, 50 bp, Escherichia coli; identical to SEQ ID NO: 47642
  source 1..50: mol_type = genomic DNA

SEQ ID NO: 53593 - DNA, 40 bp, Escherichia coli; identical to SEQ ID NO: 5188
  source 1..40: mol_type = genomic DNA

SEQ ID NO: 53594 - DNA, 40 bp, Escherichia coli; identical to SEQ ID NO: 5188
  source 1..40: mol_type = genomic DNA

SEQ ID NO: 53595 - DNA, 50 bp, Escherichia coli; identical to SEQ ID NO: 21330
  source 1..50: mol_type = genomic DNA

SEQ ID NO: 53596 - protein, 507 aa, Escherichia coli
MKRVISYIRFSSEKQAKGDSLRRQSKMVNDWLKAHPEYYLDQDLSFRDLGVSGFTGKHLKGGLGDFLTAIEKGLVKAGDTLLIESLDRLSRQAVDRASELLRNILRSGVDVVTLSDGEHYTRESLRDPLSLIKSILIMQRSHEESLRKSERIQAAWDAKKEAAKAGIKVSKRCPAWLRLNDDRKSFSVIPDKVETVKRCFQLRLEGKSIWEIVRTLNAEGHRSMNQYKPGKFGQTSVQDLLKNRSVIGYFTPKGCEEIAGYYPSVIDETTFYKVQQLSHSHYGRKPASAKPLSVNLFKGVIRCSECGHALIITGFSDTRNGIYRCPLRNENRCSAKGLSRKQTDGTLLTLLSRLDRFDSDMTNTIDTLKLHREHISSNIEKLVQLSLEIEDLNAITNKLKQLKNELSQVDADIEKETQRLKSIDTGSLSDCDLSTKAGRIEAQLIIKSAVKEVVLNTAKRRCKVTFHNGKSITLPITENPSEDVTEAIQSLSEVTERGLIDVDVVEI

SEQ ID NO: 53597 - DNA, 50 bp, Escherichia coli; identical to SEQ ID NO: 47642
  source 1..50: mol_type = genomic DNA

SEQ ID NO: 53598 - DNA, 40 bp, Escherichia coli
  source 1..40: mol_type = genomic DNA
cggcgttaatcgggtgattttagacagctgcccggttcat

SEQ ID NO: 53599 - DNA, 40 bp, Escherichia coli; identical to SEQ ID NO: 53598
  source 1..40: mol_type = genomic DNA

SEQ ID NO: 53600 - DNA, 50 bp, Escherichia coli; identical to SEQ ID NO: 21330
  source 1..50: mol_type = genomic DNA

SEQ ID NO: 53601 - protein, 507 aa, Escherichia coli
MKRVISYIRFSSERQAKGDSLRRQSKMVNDWLKAHPEYYLDQDLSFRDLGVSGFTGKHLKGGLGDFLTAIEKGLVKAGDTLLIESLDRLSRQDVDQASELLRNILRSGVDVVTLSDGEHYTKESLKDPLALIKSILIMQRAHEESLRKAERIQAAWDAKKEAAKAGIKISRRCPAWLKLNDDRKSFSVIPEKVETVKRCFQLRLEGKSIWEIVRTLNAEGHRSMNQYKPGKFGQTSVQDLLKNRSVIGYFTPKGCEEISGYYPAIIDETTFYKVQQLSHSRYGKRSVSDKPLSVNLFKGVIRCSECGHALIITGFSDTRNGIYRCPLRNENRCNAKGLSRKQTDGTLLALLSRLDRFDSDMTNVIDALKLHREHISNNIEKLVQLSLEIEDLSAITIKLKQLKGELSQVDADIEKETQRLKSIDVGCLSDCDLTTKAGRIEAQLIIKSAVKEVVLNTAKRRCKVTFHNSKSITLPITENPSEDVTEAIQSLSEVTERGLIDVDEVII

SEQ ID NO: 53602 - DNA, 50 bp, Escherichia coli; identical to SEQ ID NO: 47642
  source 1..50: mol_type = genomic DNA

SEQ ID NO: 53603 - DNA, 40 bp, Escherichia coli; identical to SEQ ID NO: 5188
  source 1..40: mol_type = genomic DNA

SEQ ID NO: 53604 - DNA, 40 bp, Escherichia coli; identical to SEQ ID NO: 5188
  source 1..40: mol_type = genomic DNA

SEQ ID NO: 53605 - DNA, 50 bp, Escherichia coli; identical to SEQ ID NO: 21330
  source 1..50: mol_type = genomic DNA

SEQ ID NO: 53606 - protein, 507 aa, Escherichia coli
MKRAISYIRFSSEKQSRGDSLRRQSKMVNDWLKAHPEYYLDQDLSFRDLGVSGFTGKHLKGGLGDFLTAIEKGLVKAGDTLLIESLDRLSRQAVDRASELLRNILRSGVDVVTLSDGEHYTSESLKDPLALIKSILIMQRAHEESLRKSERIQAAWDAKKEAAKAGIKVSKRCPAWLKLNDDRKSFSVIPEKVETVKRCFQLRLEGKSIWEIVRTLNDEGHQSMSQYKPGKFGQTSVQDLLKNRSVIGYFTPKGCEEISGYYPAIIDETTFYKVQQLSYARYGRKPASDKPLSVNLFKGVIRCSECGHALIITGFSDTRSGIYRCPLRNENRCSAKGLSRKQTDGTLLALLSRLDRFDSDMTNTIDTLKLHREHISSNIEKLVQLSLEIEDLSAITIKLKQLKGELSQVDADIEKETQRLKSIDVGCLSDCDLTTKAGRIEAQLIIKSAVKEVVLNTAKRRCKVTFHNGKVIDLSITENPSEDVTEAIQSLSEVTERGLIDVDGVII

SEQ ID NO: 53607 - DNA, 50 bp, Escherichia coli; identical to SEQ ID NO: 47642
  source 1..50: mol_type = genomic DNA

SEQ ID NO: 53608 - DNA, 40 bp, Escherichia coli; identical to SEQ ID NO: 22988
  source 1..40: mol_type = genomic DNA

SEQ ID NO: 53609 - DNA, 40 bp, Escherichia coli; identical to SEQ ID NO: 22988
  source 1..40: mol_type = genomic DNA

SEQ ID NO: 53610 - DNA, 50 bp, Escherichia coli; identical to SEQ ID NO: 21330
  source 1..50: mol_type = genomic DNA

SEQ ID NO: 53611 - protein, 507 aa, Escherichia coli
MKRAISYIRFSSEKQSRGDSLRRQSKMVNDWLKAHPEYYLDQDLSFRDLGVSGFTGKHLKGGLGDFLTAIEKGLVKAGDTLLIESLDRLSRQDVDQASELLRNILRSGVDVVTLSDGEHYTKESLKDPLALIKSILIMQRAHEESLRKAERIQAAWDAKKEAAKAGIKISRRCPAWLKLNDDRKSFSVIPEKVETVKRCFQLRLEGKSIWEIVRTLNAEGHRSMNQYKPGKFGQTSVQDLLKNRSVIGYFTPKGCEEISGYYPAIIDETTFYKVQQLSHSRYGKRSVSDKPLSVNLFKGVIRCSECGHALIITGFSDTRNGIYRCPLRNENRCSAKGLSRKQTDGTLLTLLSRLDRFDSDMTNVIDSLKIHREHISSNIEKLVQLSLEIEDLNAITNKLKQLKNELSQVDADIEKETQRLKSIDVGCLSDCDLTTKAGRIEAQLIIKSAVKEVVLNTAKRRCKVTFHNSKVIDLPITENPSDNVTEAIQSLSEVTERGLIDVDVVEI

SEQ ID NO: 53612 - DNA, 50 bp, Escherichia coli; identical to SEQ ID NO: 47642
  source 1..50: mol_type = genomic DNA

SEQ ID NO: 53613 - DNA, 40 bp, Escherichia coli; identical to SEQ ID NO: 5188
  source 1..40: mol_type = genomic DNA

SEQ ID NO: 53614 - DNA, 40 bp, Escherichia coli; identical to SEQ ID NO: 5188
  source 1..40: mol_type = genomic DNA

SEQ ID NO: 53615 - DNA, 50 bp, Escherichia coli; identical to SEQ ID NO: 21330
  source 1..50: mol_type = genomic DNA

SEQ ID NO: 53616 - protein, 507 aa, Escherichia coli
MKRAISYIRFSSEKQSRGDSLRRQSKMVNDWLKAHPEYYLDQDLSFRDLGVSGFTGKHLKGGLGDFLTAIEKGLVKAGDTLLIESLDRLSRQAVDRASELLRNILRSGVDVVTLSDGEHYTSESLKDPLALIKSILIMQRAHEESLRKSERIQAAWDAKKEAAKAGIKVSKRCPAWLRLNDDRKSFSVIPEKVETVKRCFQLRLEGKSIWEIVRTLNDEGHQTLNQYKAGKFGQSSVQDLLKNRSVIGYFTPKGCEEIAGYYPAIIDETTFYKVQQLSHSRYGKRSVSDKPLSVNLFKGVIRCSECGHALIITGFSDTRSGIYRCPLRNENRCSAKGLSRKQTDGTLLTLLSRLDRFDSDTTNIIDMLRLHREHISSNIEKLVQLSLEIEDLNAITSKLKQLKGELSQVDADIEKETQRLKSIDVGCLSDCDLTTKAGRIEAQLIIKSAVKEVVLNTAKRRCKVTFHNGKVIDLPITENPSEDVTEAIQSLSEVTERGLIDVDEVII

SEQ ID NO: 53617 - DNA, 50 bp, Escherichia coli; identical to SEQ ID NO: 47642
  source 1..50: mol_type = genomic DNA

SEQ ID NO: 53618 - DNA, 40 bp, Escherichia coli; identical to SEQ ID NO: 5188
  source 1..40: mol_type = genomic DNA

SEQ ID NO: 53619 - DNA, 40 bp, Escherichia coli; identical to SEQ ID NO: 5188
  source 1..40: mol_type = genomic DNA

SEQ ID NO: 53620 - DNA, 50 bp, Escherichia coli; identical to SEQ ID NO: 21330
  source 1..50: mol_type = genomic DNA

SEQ ID NO: 53621 - protein, 507 aa, Escherichia coli
MKRAISYIRFSSEKQSRGDSLRRQSKMVNDWLKAQPEYYLDQDLSFRDLGVSGFTGKHLKGGLGDFLTAIEKGLVKAGDTLLIESLDRLSRQAVDRASELLRNILRSGVDVVTLSDGEHYTSESLKDPLALIKSILIMQRAHEESLRKSERIQAAWNRKKELISEGIKVSKRCPAWLKLNDDRKSFSVIPEKVETVKRCFQLRLEGKSIWEIVRTLNDEGHQSMSQYKPGSFGQSSVQDLLKNRSVIGYFTPKGCEEIAGYYPAIIDETTFYKVQQLSYARYGRKPASDKPLSVNLFKGVIRCSECGHALIITGFSDTRSGIYRCPLRNENRCSAKGLSRKQTDGTLLALLSRLDRFDSDMTNTIDTLKLHREHISSNIEKLVQLSLEIEDLNAITNKLKQLKNELSQVDADIEKETQRLKSIDVGCLSDCDLTTKAGRIEAQLIIKSAVKEVVLNTAKRRCKVTFHNGKIIDLPITENPSEDVTEAIQSLSEVTERGLIDVDVVEI

SEQ ID NO: 53622 - DNA, 50 bp, Escherichia coli; identical to SEQ ID NO: 47642
  source 1..50: mol_type = genomic DNA

SEQ ID NO: 53623 - DNA, 40 bp, Escherichia coli; identical to SEQ ID NO: 5188
  source 1..40: mol_type = genomic DNA

SEQ ID NO: 53624 - DNA, 40 bp, Escherichia coli; identical to SEQ ID NO: 5188
  source 1..40: mol_type = genomic DNA

SEQ ID NO: 53625 - DNA, 50 bp, Escherichia coli; identical to SEQ ID NO: 21330
  source 1..50: mol_type = genomic DNA

SEQ ID NO: 53626 - protein, 507 aa, Escherichia coli
MKRVISYIRFSSERQAKGDSLRRQSKMVNDWLKAHPEYYLDQDLSFRDLGVSGFTGKHLKGGLGDFLTAIEKGLVKAGDTLLIESLDRLSRQNVDRASELLRNILRSGVDVVTLSDGEHYTKESLRDPLSLIKSILIMQRSHEESLRKSERIQAAWNRKKELISEGIKISKRCPAWLRLNDDRKSFSVIPDKVETVKRCFQLRLEGKSIWEIVRTMNAEGRQTLHQYKAGSFGQSSVQDLLKNRSVIGYFTPKGCEEISGYYPAIIDETTFYKVQQLSHYRYGRKPVSDKPLSVNLFKGVIRCSECGHALIITGFSDTRNGIYRCPLRNENRCSAKGLSRKQTDGTLLTLLSRLDRFDSDMTNTLDTLKLHREHISSNIEKLVQLSLEIEDLSAITIKLKQLKGELSQVDADIEKETQRLKSIDVGCLSDCDLTTKAGRIEAQLIIKSAVKEVVLNTAKRRCKVTFHNGRAITLPITENPSEDVTEAIQSLSEVTERGLIDVDEVII

SEQ ID NO: 53627 - DNA, 50 bp, Escherichia coli; identical to SEQ ID NO: 47642
  source 1..50: mol_type = genomic DNA

SEQ ID NO: 53628 - DNA, 40 bp, Escherichia coli; identical to SEQ ID NO: 5188
  source 1..40: mol_type = genomic DNA

SEQ ID NO: 53629 - DNA, 40 bp, Escherichia coli; identical to SEQ ID NO: 5188
  source 1..40: mol_type = genomic DNA

SEQ ID NO: 53630 - DNA, 50 bp, Escherichia coli; identical to SEQ ID NO: 21330
  source 1..50: mol_type = genomic DNA

SEQ ID NO: 53631 - protein, 507 aa, Escherichia coli
MKRAISYIRFSSEKQSRGDSLRRQSKMVTDWLKAHPEYYLDQDLSFRDLGVSGFTGKHLKGGLGDFLTAIEKGLVKAGDTLLIESLDRLSRQNVDRASELLRNILRSGVDVVTLSDGEHYTRESLKDPLALIKSILIMQRSHEESLRKSERIQAAWNRKKELISEGIKISKRCPAWLKLNDDRKSFSVIPEKVETVKRCFQLRLEGKSIWEIVRTLNAEGHRSMNQYKPGKFGQTSVQDLLKNRSVIGYFTPKGCEEIAGYYPSVIDETTFYKVQQLSHSRHGRKPVSDKPLSVNLFKGVIRCSECGHALIITGFSDTRNGIYRCPLRNENRCSAKGLSRKQTDGTLLTLLSRLDRFDSDTTNTIDMLRLHREHISSNIEKLVQLSLEIEDLNAITNKLKQLKNELSQVDADIEKETQRLKSIDTGSLSDCDLSTKAGRIEAQLIIKSAVKEVVLNTAKRRCKVTFHNGKSIILSITENPSEDVTEAIQSLSEVTERGLIDVDEVII

SEQ ID NO: 53632 - DNA, 50 bp, Escherichia coli; identical to SEQ ID NO: 47642
  source 1..50: mol_type = genomic DNA

SEQ ID NO: 53633 - DNA, 40 bp, Escherichia coli; identical to SEQ ID NO: 5188
  source 1..40: mol_type = genomic DNA

SEQ ID NO: 53634 - DNA, 40 bp, Escherichia coli; identical to SEQ ID NO: 5188
  source 1..40: mol_type = genomic DNA

SEQ ID NO: 53635 - DNA, 50 bp, Escherichia coli; identical to SEQ ID NO: 21330
  source 1..50: mol_type = genomic DNA

SEQ ID NO: 53636 - protein, 507 aa, Escherichia coli
MKRAISYIRFSSEKQSRGDSLRRQSKMVNDWLKAHPEYYLDQDLSFRDLGVSGFTGKHLKGGLGDFLTAIEKGLVKAGDTLLIESLDRLSRQAVDRASELLRNILRSGVDIVTLSDGEHYTSESLKDPLALIKSILIMQRAHEESLRKSERIQAAWDAKKEAAKAGIKVSKRCPAWLRLNDDRKSFSVIPEKVETVKRCFQLRLEGKSIWEIVRTLNAEGHRSMNQYKPGKFGQTSVQDLLKNRSVIGYFTPKGCEEISGYYPAIIDETTFYKVQQLSHSRYGKRSVSDKPLSVNLFKGVIRCSECGHALIITGFSDTRNGIYRCPLRNENRCNAKGLSRKQTDGTLLALLSRLDRFDSDMTNVIDALKLHREHISNNIEKLVQLSLEIEDLSAITIKLKQLKGELSQVDADIEKETQRLKSIDVGCLSDCDLTTKAGRIEAQLIIKSAVKEVVLNTAKRRCKVTFHNGRAITLPITENPSEDVTEAIQSLSEVTERGLIDVDVVEI

SEQ ID NO: 53637 - DNA, 50 bp, Escherichia coli; identical to SEQ ID NO: 47642
  source 1..50: mol_type = genomic DNA

SEQ ID NO: 53638 - DNA, 40 bp, Escherichia coli; identical to SEQ ID NO: 5188
  source 1..40: mol_type = genomic DNA

SEQ ID NO: 53639 - DNA, 40 bp, Escherichia coli; identical to SEQ ID NO: 5188
  source 1..40: mol_type = genomic DNA

SEQ ID NO: 53640 - DNA, 50 bp, Escherichia coli; identical to SEQ ID NO: 21330
  source 1..50: mol_type = genomic DNA

SEQ ID NO: 53641 - protein, 507 aa, Escherichia coli
MKRAISYIRFSSEKQSRGDSLRRQSKMVNDWLKAHPEYYLDQDLSFRDLGVSGFTGKHLKGGLGDFLTAIEKGLVKAGDTLLIESLDRLSRQAVDRASELLRNILRSGVDVVTLSDGEHYTSESLKDPLALIKSILIMQRAHEESLRKSERIQAAWDAKKEAAKAGIKVSKRCPAWLKLNDDRKSFSVIPEKVETVKRCFQLRLEGKSIWEIVRTLNDEGHQTLNQYKAGKFGQTSVQDLLKNRSVIGYFTPKGCEEISGYYPAIIDETTFYKVQQLSHYRYGRKPVSDKPLSVNLFKGVIRCSECGHALIITGFSDTRNGIYRCPLRNENRCSAKGLSRKQTDGTLLTLLSRLDRFDSDTTNTIDTLKLHREHISSNIEKLVQLSLEIEDLSAITIKLRQLKGELSQVDADIEKETQRLKSIDVGCLSDCDLTTKAGRIEAQLIIKSAVKEVVLNTAKRRCKVTFHNGKLIDLPITETPSDNVTEAIQSLSEVTERGLIDVDEVII

SEQ ID NO: 53642 - DNA, 50 bp, Escherichia coli; identical to SEQ ID NO: 47642
  source 1..50: mol_type = genomic DNA

SEQ ID NO: 53643 - DNA, 40 bp, Escherichia coli; identical to SEQ ID NO: 5188
  source 1..40: mol_type = genomic DNA

SEQ ID NO: 53644 - DNA, 40 bp, Escherichia coli; identical to SEQ ID NO: 5188
  source 1..40: mol_type = genomic DNA

SEQ ID NO: 53645 - DNA, 50 bp, Escherichia coli; identical to SEQ ID NO: 21330
  source 1..50: mol_type = genomic DNA

SEQ ID NO: 53646 - protein, 507 aa, Escherichia coli
MKRAISYIRFSSEKQSRGDSLRRQSKMVNDWLKAHPEYYLDQDLSFRDLGVSGFTGKHLKGGLGDFLTAIEKGLVKAGDTLLIESLDRLSRQAVDRASELLRNILRSGVDVVTLSDGEHYTKESLRDPLSLIKSILIMQRAHEESLRKSERIQAAWDAKKEAAKAGIKVSKRCPAWLKLNDDRKSFSVIPDKVETVKRCFQLRLEGKSIWEIVRTLNAEGHRSMNQYKPGKFGQTSVQDLLKNRSVIGYFTPKGCEEISGYFPPIIPETVFYKVQQLSHSRHGRKPVSDKPLSVNLFKGVIRCSECGHALIITGFSDTRNGIYRCPLRNENRCSAKGLSRKQTDGTLLALLSRLDRFDSDMTNTIDTLKLHREHISSNIEKLVQLSLEIEDLSAITSKLRQLKNELSQVDADIEKETQRLKSIDVGCLSDCDLTTKAGRIEAQLIIKSAVKEVVLNTAKRRCKVTFHNGRAITLPITENPSEDVTEAIQSLSEVTERGLIDVDEVII

SEQ ID NO: 53647 - DNA, 50 bp, Escherichia coli; identical to SEQ ID NO: 47642
  source 1..50: mol_type = genomic DNA

SEQ ID NO: 53648 - DNA, 40 bp, Escherichia coli; identical to SEQ ID NO: 5188
  source 1..40: mol_type = genomic DNA

SEQ ID NO: 53649 - DNA, 40 bp, Escherichia coli; identical to SEQ ID NO: 5188
  source 1..40: mol_type = genomic DNA

SEQ ID NO: 53650 - DNA, 50 bp, Escherichia coli; identical to SEQ ID NO: 21330
  source 1..50: mol_type = genomic DNA

SEQ ID NO: 53651 - protein, 507 aa, Escherichia coli
MKRAISYIRFSSEKQSRGDSLRRQSKMVNDWLKAHPEYYLDQDLSFRDLGVSGFTGKHLKGGLGDFLTAIEKGLVKAGDTLLIESLDRLSRQNVDRASELLRNILRSGVDVVTLSDGEHYTRESLKDPLALIKSILIMQRSHEESLRKSERIQAAWNRKKELISEGIKISKRCPAWLKLNDDRKSFSVIPEKVETVKRCFQLRLEGKSIWEIVRAMNAEGHQTLHQHKAGSFGQTSVQDLLKNRSVIGYFTPKGCEEISGYYPAIIDETTFYKVQQLSYARYGRKPASDKPLSVNLFKGVIRCSECGHALIITGFSDTRNGIYRCPLRNENRCSAKGLSRKQTDGTLLTLLSRLDRFDSDTTNTIDMLRLHREHISSNIEKLVQLSLEIEDLSAITIKLKQLKGELSQVDADIEKETQRLKSIDVGCLSDCDLTTKAGRIEAQLIIKSAVKEVVLNTAKRRCKVTFHNGKVIDLSITENPSEDVTEAIQSLSEVTERGLIDVDEVII

SEQ ID NO: 53652 - DNA, 50 bp, Escherichia coli; identical to SEQ ID NO: 47642
  source 1..50: mol_type = genomic DNA

SEQ ID NO: 53653 - DNA, 40 bp, Escherichia coli; identical to SEQ ID NO: 5188
  source 1..40: mol_type = genomic DNA

SEQ ID NO: 53654 - DNA, 40 bp, Escherichia coli; identical to SEQ ID NO: 5188
  source 1..40: mol_type = genomic DNA

SEQ ID NO: 53655 - DNA, 50 bp, Escherichia coli; identical to SEQ ID NO: 21330
  source 1..50: mol_type = genomic DNA

SEQ ID NO: 53656 - protein, 507 aa, Escherichia coli
MKRVISYIRFSSERQAKGDSLRRQSKMVNDWLKAHPEYYLDQDLSFRDLGVSGFTGKHLKGGLGDFLTAIEKGLVKAGDTLLIESLDRLSRQDVDQASELLRNILRSGVDVVTLSDGEHYTRESLKDPLALIKSILIMQRAHEESLRKAERIQAAWNRKKELISEGIKVSRRCPAWLRLNDDRKSFSVIPEKVETVKRCFQLRLEGKSIWEIVRTLNDEGHQTLNQYKAGKFGQTSVQDLLKNRSVIGYFTPKGCCEIAGYYPSIIPESDFYKVQQLSYARGGRKPASGKPLSVNLFKGVIRCSECGHALIITGFSDTRNGIYRCPLRNENRCNAKGLSRKQTDGTLLALLSRIDRFDSDMTNTIDTLKLHREHISSNIEKLVQLSLEIEDLSAITSKLKQLKGELSQVDADIEKETQRLKSIDVGCLSDCDLTTKAGRIEAQLIIKSAVKEVVLNTAKRRCKVTFHNGKVIDLPITEDPSEDVTEAIQSLSEVTERGLIDVDEVII

SEQ ID NO: 53657 - DNA, 50 bp, Escherichia coli; identical to SEQ ID NO: 47642
  source 1..50: mol_type = genomic DNA

SEQ ID NO: 53658 - DNA, 40 bp, Escherichia coli; identical to SEQ ID NO: 5188
  source 1..40: mol_type = genomic DNA

SEQ ID NO: 53659 - DNA, 40 bp, Escherichia coli; identical to SEQ ID NO: 5188
  source 1..40: mol_type = genomic DNA

SEQ ID NO: 53660 - DNA, 50 bp, Escherichia coli; identical to SEQ ID NO: 21330
  source 1..50: mol_type = genomic DNA

SEQ ID NO: 53661 - protein, 507 aa, Escherichia coli
MKRAISYIRFSSEKQSRGDSLRRQSKMVNDWLKAHPEYYLDQDLSFRDLGVSGFTGKHLKGGLGDFLTAIEKGLVKAGDTLLIESLDRLSRQAVDRASELLRNILRSGVDIVTLSDGEHYTSESLKDPLALIKSILIMQRAHEESLRKSERIQAAWDAKKEAAKAGIKVSKRCPAWLRLNDDRKSFSVIPEKVETVKRCFQLRLEGKSIWEIVRTLNAEGHRSMNQYKPGKFGQTSVQDLLKNRSVIGYFTPKGCEEISGYYPAIIDETTFYKVQQLSHSRYGKRSVSDKPLSVNLFKGVIRCSECGHALIITGFSDTRNGIYRCPLRNENRCNAKGLSRKQTDGTLLALLSRLDRFDSDMTNVIDALKLHREHISNNIEKLVQLSLEIEDLSAITIKLKQLKGELSQVDADIEKETQRLKSIDVGCLSDCDLTTKAGRIEAQLIIKSAVKEVVLNAAKRRCKVTFHNSKSITLPITENPSEDVTEAIQSLSEVTEKGLIDVDVVEI

SEQ ID NO: 53662 - DNA, 50 bp, Escherichia coli; identical to SEQ ID NO: 47642
  source 1..50: mol_type = genomic DNA

SEQ ID NO: 53663 - DNA, 40 bp, Escherichia coli; identical to SEQ ID NO: 5188
  source 1..40: mol_type = genomic DNA

SEQ ID NO: 53664 - DNA, 40 bp, Escherichia coli; identical to SEQ ID NO: 5188
  source 1..40: mol_type = genomic DNA

SEQ ID NO: 53665 - DNA, 50 bp, Escherichia coli; identical to SEQ ID NO: 21330
  source 1..50: mol_type = genomic DNA

SEQ ID NO: 53666 - protein, 507 aa, Escherichia coli
MKRVISYIRFSSERQAKGDSLRRQSKMVNDWLKAHPEYYLDESLTFRDLGVSGFTGKHLKGGLGDFLTAIEKGLVKAGDTLLIESLDRLSRQNVDRASELLRNILRSGVDVVTLSDGEHYTRESLKDPLALIKSILIMQRAHEESLRKAERIQAAWDAKKEAAKAGIKVSKRCPAWLKLNDDRKSFSVIPEKVETVKRCFQLRLEGKSIWEIVRTLNDEGHQSMSQYKPGSFGQSSVQDLLKNRSVIGYFTPKGREEIAGYFPPIIPETDFYKVQQLSYSRYGRKPASDKPLSVNLFKGVIRCSECGHALIITGFSDTRNGIYRCPLRNENRCSAKGLSRKQTDGTLLALLSRLDRFDSDTTNIIDMLRLHREHVSSNIEKLVQLSLEIEDLNAITSKLKQLKGELSQVDADIEKETQRLKSIDVGCLSDCDLTTKAGRIEAQLIIKSAVKEVVLNTAKRRCKVTFHNGKSITLPITENPSEDVTEAIQSLSEAIERGLIDVDVVEI

SEQ ID NO: 53667 - DNA, 50 bp, Escherichia coli; identical to SEQ ID NO: 47642
  source 1..50: mol_type = genomic DNA

SEQ ID NO: 53668 - DNA, 40 bp, Escherichia coli; identical to SEQ ID NO: 5188
  source 1..40: mol_type = genomic DNA

SEQ ID NO: 53669 - DNA, 40 bp, Escherichia coli; identical to SEQ ID NO: 5188
  source 1..40: mol_type = genomic DNA

SEQ ID NO: 53670 - DNA, 50 bp, Escherichia coli; identical to SEQ ID NO: 21330
  source 1..50: mol_type = genomic DNA

SEQ ID NO: 53671 - protein, 507 aa, Escherichia coli
MKRAISYIRFSSEKQSRGDSLRRQSKMVTDWLKAHPEYYLDQDLSFRDLGVSGFTGKHLKSGLGDFLTAIEKGLVKAGDTLLIESLDRLSRQNVDRASELLRNILRSGVDVVTLSDGEHYTRESLKDPLALIKSILIMQRAHEESLRKAERIQAAWDAKKEAAKAGIKISRRCPAWLKLNDDRKSFSVIPEKVETVKRCFQLRLEGKSIWEIVRTLNAEGHQTLNQYKAGKFGQTSVQDLLKNRSVIGYFTPKGCEEISGYYPAIIDETTFYKVQQLSHYRYGRKPVSDKPLSVNLFKGVIRCSECGHALIITGFSDTRNGIYRCPLRNENRCSAKGLSRKQTDGTLLTLLSRLDRFDSDMTNTLDTLKLHREHISSNIEKLVQLSLEIEDLSAITIKLKQLKGELSQVDADIEKETQRLKSIDVGCLSDCDLTTKAGRIEAQLIIKSAVKEVVLNTAKRRCKVTFHNGRAITLPITEDPSEDVTEAIQSLSEVTERGLIDVDEVII

SEQ ID NO: 53672 - DNA, 50 bp, Escherichia coli; identical to SEQ ID NO: 47642
  source 1..50: mol_type = genomic DNA

SEQ ID NO: 53673 - DNA, 40 bp, Escherichia coli; identical to SEQ ID NO: 5188
  source 1..40: mol_type = genomic DNA

SEQ ID NO: 53674 - DNA, 40 bp, Escherichia coli; identical to SEQ ID NO: 5188
  source 1..40: mol_type = genomic DNA

SEQ ID NO: 53675 - DNA, 50 bp, Escherichia coli; identical to SEQ ID NO: 21330
  source 1..50: mol_type = genomic DNA

SEQ ID NO: 53676 - protein, 507 aa, Escherichia coli
MKRVISYIRFSSERQAKGDSLRRQSKMVNDWLKAHPEYYLDQDLSFRDLGVSGFTGKHLKGGLGDFLTAIEKGLVKAGDTLLIESLDRLSRQDVDQASELLRNILRSGVDVVTLSDGEHYTKESLRDPLSLIKSILIMQRSHEESLRKSERIQAAWDAKKEAAKAGIKVSKRCPAWLKLNDDRKSFSVIPEKVETVKRCFQLRLEGKSIWEIVRTMNAEGHQTLHQHKAGSFGQSSVQDLLKNRSVIGYFTPKGCEEIAGYYPAIIDETTFYKVQQLSYARYGRKPASDKPLSVNLFKGVIRCSECGHALIITGFSDTRSGIYRCPLRNENRCNAKGLSRKQTDSTLLALLSRLDRFDSDMTNTIDTLKLHREHISSNIEKLVQLSLEIEDLSAITIKLKQLKGELSQVDADIEKETQRLKSIDVGCLSDCDLTTKAGRIEAQLIIKSAVKEVVLNTAKRRCKVTFHNGKVIDLSITENPSEDVTEAIQSLSEVTEMGLIDVDEVII

SEQ ID NO: 53677 - DNA, 50 bp, Escherichia coli; identical to SEQ ID NO: 47642
  source 1..50: mol_type = genomic DNA

SEQ ID NO: 53678 - DNA, 40 bp, Escherichia coli; identical to SEQ ID NO: 5188
  source 1..40: mol_type = genomic DNA

SEQ ID NO: 53679 - DNA, 40 bp, Escherichia coli; identical to SEQ ID NO: 5188
  source 1..40: mol_type = genomic DNA

SEQ ID NO: 53680 - DNA, 50 bp, Escherichia coli; identical to SEQ ID NO: 21330
  source 1..50: mol_type = genomic DNA

SEQ ID NO: 53681 - protein, 507 aa, Escherichia coli
MKRAISYIRFSSEKQSRGDSLRRQSKMVTDWLKAHPEYYLDQDLSFRDLGVSGFTGKHLKGGLGDFLTAIEKGLVKAGDTLLIESLDRLSRQDVDRASELLRNILRSGVDVVTLSDGEHYTRESLKDPLALIKSILIMQRSHEESLRKSERIQAAWNRKKELISEGIKISKRCPAWLKLNDDRKSFSVIPEKVETVKRCFQLRLEGKSIWEIVRTLNDEGHQTLNQYKAGKFGQTSVQDLLKNRSVIGYFTPKGCCEIAGYYPSIIPESDFYKVQQLSHSRHGRKPVSDKPLSVNLFKGVIRCSECGHALIITGFSDTRNGIYRCPLRNENRCSAKGLSRKQTDGTLLTLLSRLDRFDSDTTNTIDMLRLHREHISSNIEKLVQLSLEIEDLNAITNKLKQLKNELSQVDADIEKETQRLKSIDTGSLSDCDLSTKAGRIEAQLIIKSAVKEVVLNTAKRRCKVTFHNGRLIDLPITENPSEDVTEAIQSLSEVTESGLIDVDVVEI

SEQ ID NO: 53682 - DNA, 50 bp, Escherichia coli; identical to SEQ ID NO: 47642
  source 1..50: mol_type = genomic DNA

SEQ ID NO: 53683 - DNA, 40 bp, Escherichia coli; identical to SEQ ID NO: 5188
  source 1..40: mol_type = genomic DNA

SEQ ID NO: 53684 - DNA, 40 bp, Escherichia coli; identical to SEQ ID NO: 5188
  source 1..40: mol_type = genomic DNA

SEQ ID NO: 53685 - DNA, 50 bp, Escherichia coli; identical to SEQ ID NO: 21330
  source 1..50: mol_type = genomic DNA

SEQ ID NO: 53686 - protein, 507 aa, Escherichia coli
MKRVISYIRFSSEKQAKGDSLRRQSKMVTDWLKAHPEYYLDESLTFRDLGVSGFTGKHLKGGLGDFLTAIEKGLVKAGDTLLIESLDRLSRQAVDRASELLRNILRSGVDVVTLSDGEHYTSESLKDPLALIKSILIMQRAHEESLRKSERIQAAWDAKKEAAKAGIKVSKRCPAWLKLNDDRKSFSVIPEKVATVKRCFQLRLEGKSIWEIVRTLNAEGHQTLNQYKAGSFGQSSVQDLLKNRSVIGYFTPKGCEEISGYYPEVIDETTFYKVQQLSYSRYGRKPASDKPLSVNLFKGVIRCSECGHALIITGFSDTRSGIYRCPLRNENRCSAKGLSRKQTDGTLLALLSRLDRFDSDTTNTIDTLKLHREHISSNIEKLVQLSLEIEDLSAITSKLKQLKGELSQVDADIEKETQRLKSIDVGCLSDCDLTTKAGRIEAQLIIKSAVKEVVLNTAKRRCKVTFHNGKSITLPITENPSEDVTEAIQSLSEVTERGLIDVDVVEI

SEQ ID NO: 53687 - DNA, 50 bp, Escherichia coli; identical to SEQ ID NO: 47642
  source 1..50: mol_type = genomic DNA

SEQ ID NO: 53688 - DNA, 40 bp, Escherichia coli; identical to SEQ ID NO: 5188
  source 1..40: mol_type = genomic DNA

SEQ ID NO: 53689 - DNA, 40 bp, Escherichia coli; identical to SEQ ID NO: 5188
  source 1..40: mol_type = genomic DNA

SEQ ID NO: 53690 - DNA, 50 bp, Escherichia coli; identical to SEQ ID NO: 21330
  source 1..50: mol_type = genomic DNA

SEQ ID NO: 53691 - protein, 507 aa, Escherichia coli
MKRAISYIRFSSEKQSRGDSLRRQAKMVTDWLKAHPEHYLDESLTFRDLGVSGFTGKHLKGGLGDFLTAIEKGLVKAGDTLLIESLDRLSRQNVDRASELLRNILRSGVDVVTLSDGEHYTKESLKDPLALIKSILIMQRSHEESLRKSERIQAAWDVKKEAAKAGIKISKRCPAWLKLNDDRKTFSVIPEKVETVRRCFQLRLEGKSIWEIVRTLNAEGHRSMNQYKPGKFGQTSVQDLLKNRSVIGYFTPKGCEEIAGYYPSVIDETTFYKVQQLSHSRYGRKPASAKPLSVNLFKGVIRCSECGHALIITGFSDTRNGIYRCPLRNENRCSAKGLSRKQTDGTLLTLLSRLDRFDSDTTNIIDMLRLHREHISSNIEKLVQLSLEIEDLNAITSKLKQLKGELSQVDADIEKETQRLKSIDVGCLSDCDLTTKAGRIEAQLIIKSAVKEVVLNTAKRRCKVTFHNGRAITLPITENPSEDVTEAIQSLSEVTGRGLIDVDEVII

SEQ ID NO: 53692 - DNA, 50 bp, Escherichia coli; identical to SEQ ID NO: 47642
  source 1..50: mol_type = genomic DNA

SEQ ID NO: 53693 - DNA, 40 bp, Escherichia coli; identical to SEQ ID NO: 5188
  source 1..40: mol_type = genomic DNA

SEQ ID NO: 53694 - DNA, 40 bp, Escherichia coli; identical to SEQ ID NO: 5188
  source 1..40: mol_type = genomic DNA

SEQ ID NO: 53695 - DNA, 50 bp, Escherichia coli; identical to SEQ ID NO: 21330
  source 1..50: mol_type = genomic DNA

SEQ ID NO: 53696 - protein, 507 aa, Escherichia coli
MKRAISYIRFSSEKQAKGDSLRRQSKMVTDWLKAHPEYYLDESLTFRDLGVSGFTGKHLKGGLGDFLTAIEKGLVKAGDTLLIESLDRLSRQDVDQASELLRNILRSGVDVVTLSDGEHYTSESLKDPLALIKSILIMQRAHEESLRKSERIQAAWDAKKEAAKAGIKVSKRCPAWLRLNDDRKSFSVIPEKVETVKRCFQLRLEGKSIWEIVRTLNDEGHQSMSQYKPGKFGQTSVQDLLKNRSVIGYFTPKGCEEIAGYYPAIIDETTFYKVQQLSHYRYGRKPVSDKPLSVNLFKGVIRCSECGHALIITGFSDTRNGIYRCPLRNENRCSAKGLSRKQTDGTLLTLLSRLDRFDSDTTNIIDMLRLHREHVSSNIEKLVQLSLEIEDLNAITSKLKQLKGELSQVDADIEKETQRLKSIDVGCLSDCDLTTKAGRIEAQLIIKSAVKEVVLNTAKRRCKVTFHNGRAITLPITENPSEDVTEAIQSLSEVTERGLIDVDEVII

SEQ ID NO: 53697 - DNA, 50 bp, Escherichia coli; identical to SEQ ID NO: 47642
  source 1..50: mol_type = genomic DNA

SEQ ID NO: 53698 - DNA, 40 bp, Escherichia coli; identical to SEQ ID NO: 21333
  source 1..40: mol_type = genomic DNA

SEQ ID NO: 53699 - DNA, 40 bp, Escherichia coli; identical to SEQ ID NO: 21333
  source 1..40: mol_type = genomic DNA

SEQ ID NO: 53700 - DNA, 50 bp, Escherichia coli; identical to SEQ ID NO: 21330
  source 1..50: mol_type = genomic DNA

SEQ ID NO: 53701 - protein, 507 aa, Escherichia coli
MKRAISYIRFSSEKQSRGDSLRRQAKMVTDWLKAHPEYYLDESLTFRDLGVSGFTGKHLQGGLGDFLTAIEKGLVKAGDTLLIESLDRLSRQDVDQASELLRNILRSGVDVVTLSDGAHYTKESLKDPLALIKSILIMQRAHEESLRKSERIQAAWDVKKEAAKAGIKISKRCPAWLKLNDDRKTFSVIPEKVETVRRCFQLRLEGKSIWEIVRTLNDEGHQTLNQYKAGKFGQTSVQDLLKNRSVIGYFTPKGCEEIAGYYPAIIDETTFYKVQQLSHSRYGRKPASDKPLSVNLFKGVIRCSECGHALIITGFSDTRSGIYRCPLRNESRCNAKGLSRKQTDGTLLALLSRIDRFDSDMTNTIDTLKLHREHISNNIEKLVQLSLEIEDLSAITSKLKQLKGELSQVDADIEKETQRLKSIDVGCLSDCDLTTKAGRIEAQLIIRSAVKEVVLNTAKRRCKVTFHNGKAITLPITENPSEDVTDAIQSLSEVTERGLIDVDEVII

SEQ ID NO: 53702 - DNA, 50 bp, Escherichia coli
  source 1..50: mol_type = genomic DNA
cagtgcatttagaacttgatgatttttattagacacgtttaaatacacca

SEQ ID NO: 53703 - DNA, 40 bp, Escherichia coli; identical to SEQ ID NO: 5188
  source 1..40: mol_type = genomic DNA

SEQ ID NO: 53704 - DNA, 40 bp, Escherichia coli; identical to SEQ ID NO: 5188
  source 1..40: mol_type = genomic DNA

SEQ ID NO: 53705 - DNA, 50 bp, Escherichia coli; identical to SEQ ID NO: 21330
  source 1..50: mol_type = genomic DNA

SEQ ID NO: 53706 - protein, 507 aa, Escherichia coli
MKRVISYIRFSSEKQSRGDSLRRQSKMVTDWLKAHPEYYLDQDLSFRDLGVSGFTGKHLKGGLGDFLTAIEKGLVKAGDTLLIESLDRLSRQDVDQASELLRNILRSGVDVVTLSDGEHYTSESLKDPLALIKSILIMQRAHEESLRKSERIQAAWDAKKEAAKAGIKVSKRCPAWLKLNDDRKSFSVIPEKVATVKRCFQLRLEGKSIWEIVRTLNDEGHQTLNQYKPGKFGQTSVQDLLKNRSVIGYFTPKGREEISGYYPAIIDETTFYKVQQLSYARYGRKPASDKPMAVNLFKGVIRCSECGHALIITGFSDTRNGIYRCPLRNENRCSAKGLSRKQTDGTLLALLSRLDRFDSDMTNTLDTLKLHREHISSNIEKLVQLSLEIEDLNAITSKLKQLKGELSQVDADIEKETQRLKSIDVGCLSDCDLTTKAGRIEAQLIIKSAVKEVVLNTAKRRCKVTFHNSKSITLPITENPSDNVTEAIQSLSEVTERGLIDVDVVEI

SEQ ID NO: 53707 - DNA, 50 bp, Escherichia coli; identical to SEQ ID NO: 47642
  source 1..50: mol_type = genomic DNA

SEQ ID NO: 53708 - DNA, 40 bp, Escherichia coli; identical to SEQ ID NO: 5188
  source 1..40: mol_type = genomic DNA

SEQ ID NO: 53709 - DNA, 40 bp, Escherichia coli; identical to SEQ ID NO: 5188
  source 1..40: mol_type = genomic DNA

SEQ ID NO: 53710 - DNA, 50 bp, Escherichia coli; identical to SEQ ID NO: 21330
  source 1..50: mol_type = genomic DNA

SEQ ID NO: 53711 - protein, 507 aa, Escherichia coli
MKRVISYIRFSSEKQAKGDSLRRQSKLVTDWLKAHPEYYLDESLTFRDLGVSGFTGKHLKGGLGDFLTAIEKGLVKAGDTLLIESLDRLSRQNVDRASELLRNILRSGVDVVTLSDGEHYTRESLKDPLALIKSILIMQRSHEESLRKSERIQAAWNRKKELISEGIKISKRCPAWLRLNDDRKSFSVIPEKVETVKRCFQLRLEGKSIWEIVRTLNAEGHRSMNQYKPGKFGQTSVQDLLKNRSVIGYFTPKGCEEISGYYPAIIDETTFYKVQQLSHSRYGKRSVSDKPLSVNLFKGVIRCSECGHALIITGFSDTRNGIYRCPLRNENRCNAKGLSRKQTDGTLLALLSRLDRFDSDMTNVIDALKLHREHISNNIEKLVQLSLEIEDLSAITIKLKQLKGELSQVDADIEKETQRLKSIDVGCLSDCDLTTKAGRIEAQLIIKSAVKEVVLNAAKRRCKVTFHNSKSITLPITENPSEDVTEAIQSLSEVTEKGLIDVDVVEI

SEQ ID NO: 53712 - DNA, 50 bp, Escherichia coli; identical to SEQ ID NO: 47642
  source 1..50: mol_type = genomic DNA

SEQ ID NO: 53713 - DNA, 40 bp, Escherichia coli; identical to SEQ ID NO: 5188
  source 1..40: mol_type = genomic DNA

SEQ ID NO: 53714 - DNA, 40 bp, Escherichia coli; identical to SEQ ID NO: 5188
  source 1..40: mol_type = genomic DNA

SEQ ID NO: 53715 - DNA, 50 bp, Escherichia coli; identical to SEQ ID NO: 21330
  source 1..50: mol_type = genomic DNA

SEQ ID NO: 53716 - protein, 507 aa, Escherichia coli
MKRVISYIRFSSEKQAKGDSLRRQSKMVTDWLKAHPEYYLDQDLSFRDLGVSGFTGKHLKGGLGDFLTAIEKGLVKAGDTLLIESLDRLSRQDIDIASELLRRILRAGVDVVTLSDGEHYTSESLKDPLALIKSILIMQRAHEESLRKAERIQAAWDAKKEAAKAGIKVSKRCPAWLKLNDDRKTFSVIPEKVETVKRCFQLRLEGKSIWDIVRTLNDEGHLSLNQYKAGKFGQTSVQDLLKNRSVIGYFTPKGCEEISGYYPAIIDETTFYKVQQLSHYRYGRKPASAKPLSVNLFKGVIRCSECGHALIITGFSDTRNGIYRCPLRNENRCSAKGLSRKQTDGTLLALLSRLDRFDSDTTNTVDMLRLHREHISSNIEKLVQLSLEIEDLNAITSKLKQLKGELSQVDADIEKETQRLKSIDVGCLSDCDLTTKAGRIEAQLIIKSAVKEVVLNTAKRRCKVTFHNGRIIDLPITENPSEDVTEAIQSLSEVTERGLIDVDEVIV

SEQ ID NO: 53717 - DNA, 50 bp, Escherichia coli; identical to SEQ ID NO: 47642
  source 1..50: mol_type = genomic DNA

SEQ ID NO: 53718 - DNA, 40 bp, Escherichia coli; identical to SEQ ID NO: 5188
  source 1..40: mol_type = genomic DNA

SEQ ID NO: 53719 - DNA, 40 bp, Escherichia coli; identical to SEQ ID NO: 5188
  source 1..40: mol_type = genomic DNA

SEQ ID NO: 53720 - DNA, 50 bp, Escherichia coli; identical to SEQ ID NO: 21330
  source 1..50: mol_type = genomic DNA

SEQ ID NO: 53721 - protein, 507 aa, Escherichia coli
MKRVISYIRFSSEKQSRGDSLRRQSKMVNDWLKAHPEYYLDQDLSFRDLGVSGFTGKHLKGGLGDFLTAIEKGLVKAGDTLLIESLDRLSRQAVDRASELLRNILRSGVDVVTLSDGEHYTRESLKDPLALIKSILIMQRAHEESLRKSERIQAAWDAKKEAAKAGIKVSRRCPAWLRLNDDRKSFSVIPEKVETVKRCFQLRLEGKSIWEIVRTLNAEGHQTLNQYKAGKFGQTSVQDLLKNRSVIGYFTPKGCEEISGYFPPIIPETDFYKVQQLSYSRYGRKPASDKPLSVNLFKGVIRCSECGHALIITGFGDTRNGIYRCPLRNENRCSAKGLSRKQTDGTLLALLSRLDRFDSDMTNVIDMLRLHREHISSNIEKLVQLSLEIEDLSAITIKLKQLKGELSQVDADIEKETQRLKSIDVGCLSDCDLTTKAGRIEAQLIIKSAVKEVVLNAAKRRCKVTFHNGRIIDLPITENPSEDVTEAIQSLSEVTERGLIDVDVVEI

SEQ ID NO: 53722 - DNA, 50 bp, Escherichia coli; identical to SEQ ID NO: 47642
  source 1..50: mol_type = genomic DNA

SEQ ID NO: 53723 - DNA, 40 bp, Escherichia coli; identical to SEQ ID NO: 5188
  source 1..40: mol_type = genomic DNA

SEQ ID NO: 53724 - DNA, 40 bp, Escherichia coli; identical to SEQ ID NO: 5188
  source 1..40: mol_type = genomic DNA

SEQ ID NO: 53725 - DNA, 50 bp, Escherichia coli; identical to SEQ ID NO: 21330
  source 1..50: mol_type = genomic DNA

SEQ ID NO: 53726 - protein, 507 aa, Escherichia coli
MKRVISYIRFSSERQAKGDSLRRQSKMVNDWLKAHPEYYLDQDLSFRDLGVSGFTGKHLKGGLGDFLTAIEKGLVKAGDTLLIESLDRLSRQAVDRASELLRNILRSGVDVVTLSDGEHYTSESLKDPLALIKSILIMQRAHEESLRKSERIQAAWNRKKELISEGIKISKRCPAWLRLNDDRKSFSVIPEKVETVKRCFQLRLEGKSIWEIVRTMNAEGRQTLHQYKAGSFGQSSVQDLLKNRSVIGYFTPKGCEEISGYYPAIIDETTFYKVQQLSYARYGRKPASDKPLSVNLFKGVIRCSECGHALIITGFSDTRNGIYRCPLRNENRCSAKGLSRKQTDGTLLTLLSRLDRFDSDTTNIVDMLRLHREHISSNIEKLVQLSLEIEDLSAITIKLKQLKGELSQVDADIEKETQRLKSIDVGCLSDCDLTTKAGRIEAQLIIKSAVKEVVLNTAKRRCKVTFHNSKSITLPITENPSEDVTEAIQSLSEVTERGLIDVDVVAI

SEQ ID NO: 53727 - DNA, 50 bp, Escherichia coli; identical to SEQ ID NO: 47642
  source 1..50: mol_type = genomic DNA

SEQ ID NO: 53728 - DNA, 40 bp, Escherichia coli; identical to SEQ ID NO: 5188
  source 1..40: mol_type = genomic DNA

SEQ ID NO: 53729 - DNA, 40 bp, Escherichia coli; identical to SEQ ID NO: 5188
  source 1..40: mol_type = genomic DNA

SEQ ID NO: 53730 - DNA, 50 bp, Escherichia coli; identical to SEQ ID NO: 21330
  source 1..50: mol_type = genomic DNA

SEQ ID NO: 53731 - protein, 507 aa, Escherichia coli
MKRAISYIRFSSEKQSRGDSLRRQSKMVNDWLKAHPEYYLDQDLSFRDLGVSGFTGKHLKGGLGDFLTAIEKGLVKAGDTLLIESLDRLSRQDVDQASELLRNILRSGVDVVTLSDGEHYTKESLKDPLALIKSILIMQRAHEESLRKAERIQAAWDAKKEAAKAGIKVSKRCPAWLKLNDDRKSFSVIPEKVETVKRCFQLRLEGKSIWEIVRTLNDEGHQSMSQYKPGSFGQSSVQDLLKNRSVIGYFTPKGCEEIAGYYPAIIDETTFYKVQQLSYARYGRKPASDKPLSVNLFKGVIRCSECGHALIITGFSDTRSGIYRCPLRNENRCSAKGLSRKQTDGTLLALLSRLDRFDSDMTNTIDTLKLHREHISSNIEKLVQLSLEIEDLNAITNKLKQLKNELSQVDADIEKETQRLKSIDVGCLSDCDLTTKAGRIEAQLIIKSAVKEVVLNTAKRRCKVTFHNSKSITLSITENPSEDVTEAIQSLSEVTERGLIDVDEVII

SEQ ID NO: 53732 - DNA, 50 bp, Escherichia coli; identical to SEQ ID NO: 47642
  source 1..50: mol_type = genomic DNA

SEQ ID NO: 53733 - DNA, 40 bp, Escherichia coli; identical to SEQ ID NO: 5188
  source 1..40: mol_type = genomic DNA

SEQ ID NO: 53734 - DNA, 40 bp, Escherichia coli; identical to SEQ ID NO: 5188
  source 1..40: mol_type = genomic DNA

SEQ ID NO: 53735 - DNA, 50 bp, Escherichia coli; identical to SEQ ID NO: 21330
  source 1..50: mol_type = genomic DNA

SEQ ID NO: 53736 - protein, 507 aa, Escherichia coli
MKRVISYIRFSSEKQSRGDSLRRQSKMVNDWLKAHPEYYLDQDLSFRDLGVSGFTGKHLKGGLGDFLTAIEKGLVKAGDTLLIESLDRLSRQAVDRASELLRNILRSGVDVVTLSDGEHYTRESLKDPLALIKSILIMQRAHEESLRKSERIQAAWDAKKEAAKAGIKVSRRCPAWLRLNDDRKSFSVIPEKVETVKRCFQLRLEGKSIWEIVRTLNAEGHQTLNQYKAGKFGQTSVQDLLKNRSVIGYFTPKGCEEISGYFPPIIPETDFYKVQQLSYSRYGRKPASDKPLSVNLFKGVIRCSECGHALIITGFGDTRNGIYRCPLRNENRCSAKGLSRKQTDGTLLTLLSRLDRFDSDTTNVIDMLRLHREHISSNIEKLVQLSLEIEDLSAITIKLKQLKGELSQVDADIEKETQRLKSIDAGCLSDCDLTTKAGRIEAQLIIKSAVKEVVLNAAKRRCKVTFHNGKVIDLPITENPSEDVTEAIQSLSEVSERGLIDVDVVEI

SEQ ID NO: 53737 - DNA, 50 bp, Escherichia coli; identical to SEQ ID NO: 47642
  source 1..50: mol_type = genomic DNA

SEQ ID NO: 53738 - DNA, 40 bp, Escherichia coli; identical to SEQ ID NO: 5188
  source 1..40: mol_type = genomic DNA

SEQ ID NO: 53739 - DNA, 40 bp, Escherichia coli; identical to SEQ ID NO: 5188
  source 1..40: mol_type = genomic DNA

SEQ ID NO: 53740 - DNA, 50 bp, Escherichia coli; identical to SEQ ID NO: 21330
  source 1..50: mol_type = genomic DNA

SEQ ID NO: 53741 - protein, 507 aa, Escherichia coli
MKRVISYIRFSSERQAKGDSLRRQSKMVNDWLKAHPEYYLDQDLSFRDLGVSGFTGKHLKGGLGDFLTAIEKGLVKAGDTLLIESLDRLSRQDIDIASELLRNILRSGVDVVTLSDGEHYTRESLRDPLALIKSILIMQRAHEESLRKAERIQAAWDAKKEAAKAGIKVSKRCPAWLKLNDDRKSFSVIPEKVETVKRCFQLRLEGKSIWEIVRTLNDEGHQSMSQYKPGSFGQTSVQDLLKNRSVIGYFTPKGCEEIAGYYPAIIDETTFYKVQQLSHSRYGKRSVSDKPLSVNLFKGVIRCSECGHALIITGFSDTRNGIYRCPLRNENRCSAKGLSRKQTDGTLLALLSRLDRFDSDTTNTIDTLKLHREHLSSNIEKLVQLSLEIEDLNAITNKLKQLKNELSQVDADIEKETQRLKSIDVGCLSDCDLTTKSGRIEAQLIIKSAVKEVVLNTAKRRCKVTFHNGKVIDLPITENPSEDVTEAIQSLSEVTERGLIDVDEVII

SEQ ID NO: 53742 - DNA, 50 bp, Escherichia coli; identical to SEQ ID NO: 47642
  source 1..50: mol_type = genomic DNA

SEQ ID NO: 53743 - DNA, 40 bp, Escherichia coli; identical to SEQ ID NO: 5188
  source 1..40: mol_type = genomic DNA

SEQ ID NO: 53744 - DNA, 40 bp, Escherichia coli; identical to SEQ ID NO: 5188
  source 1..40: mol_type = genomic DNA

SEQ ID NO: 53745 - DNA, 50 bp, Escherichia coli; identical to SEQ ID NO: 21330
  source 1..50: mol_type = genomic DNA

SEQ ID NO: 53746 - protein, 507 aa, Escherichia coli
MKRVISYIRFSSERQAKGDSLRRQSKMVNDWLKAHPEYYLDQDLSFRDLGVSGFTGKHLKGGLGDFLTAIEKGLVKAGDTLLIESLDRLSRQDVDQASELLRNILRSGVDVVTLSDGEHYTKESLKDPLALIKSILIMQRSHEESLRKSERIQAAWNRKKELISEGIKVSKRCPAWLKLNDDRKSFSVIPDKVETVKRCFQLRLEGKSIWEIVRTLNDEGHQSMSQYKPGKFGQTSVQDLLKNRSVIGYFTPKGCEEISGYYPAIIDETTFYKVQQLSYARHGRKPASAKPLSVNLFKGVIRCSECGHALIITGFSDTRNGIYRCPLRNENRCSAKGLSRKQTDGTLLTLLSRLDRFDSDTTNTIDMLRLHREHISSNIEKLVQLSLEIEDLSAITSKLKQLKGELSQVDADIEKETQRLKSIDVGCLSDCDLTTKAGRIEAQLIIKSAVKEVVLNTAKRRCKVTFHNGKIIDLPITENPSEDVTEAIQSLSEVTERGLIDVDVVEI

SEQ ID NO: 53747 - DNA, 50 bp, Escherichia coli; identical to SEQ ID NO: 47642
  source 1..50: mol_type = genomic DNA

SEQ ID NO: 53748 - DNA, 40 bp, Escherichia coli; identical to SEQ ID NO: 5188
  source 1..40: mol_type = genomic DNA

SEQ ID NO: 53749 - DNA, 40 bp, Escherichia coli; identical to SEQ ID NO: 5188
  source 1..40: mol_type = genomic DNA

SEQ ID NO: 53750 - DNA, 50 bp, Escherichia coli; identical to SEQ ID NO: 21330
  source 1..50: mol_type = genomic DNA

SEQ ID NO: 53751 - protein, 507 aa, Escherichia coli
MKRAISYIRFSSEKQSRGDSLRRQSKMVTDWLKAHPEYYLDQDLSFRDLGVSGFTGKHLKGGLGDFLTAIEKGLVKAGDTLLIESLDRLSRQDVDQASELLRNILRSGVDVVTLSDGEHYTKESLRDPLSLIKSILIMQRAHEESLRKAERIQAAWDAKKEAAKAGIKISRRCPAWLKLNDDRKSFSVIPEKVETVKRCFQLRLEGKSIWEIVRTLNAEGHRSMNQHKPGSFGQSSVQDLLKNRSVIGYFTPKGCEEIAGYYPSVIDETTFYKVQQLSHSRYGRKPASAKPLSVNLFKGVIRCSECGHALIITGFSDTRNGIYRCPLRNENRCSAKGLSRKQTDGTLLTLLSRLDRFDSDMTNTIDTLKLHREHISSNIEKLVQLSLEIEDLSAITNKLKQLKNELSQVDADIEKETQRLKSIDTGSLSDCDLSTKAGRIEAQLIIKSAVKEVVLNTAKRRCKVTFHNGKAITLPITENPSEDVTEAIQSLSEVTERGLIDVDVVEI

SEQ ID NO: 53752 - DNA, 50 bp, Escherichia coli; identical to SEQ ID NO: 47642
  source 1..50: mol_type = genomic DNA

SEQ ID NO: 53753 - DNA, 40 bp, Escherichia coli; identical to SEQ ID NO: 5188
  source 1..40: mol_type = genomic DNA

SEQ ID NO: 53754 - DNA, 40 bp, Escherichia coli; identical to SEQ ID NO: 5188
  source 1..40: mol_type = genomic DNA

SEQ ID NO: 53755 - DNA, 50 bp, Escherichia coli; identical to SEQ ID NO: 21330
  source 1..50: mol_type = genomic DNA

SEQ ID NO: 53756 - protein, 507 aa, Escherichia coli
MKRVISYIRFSSERQAKGDSLRRQSKMVNDWLKAHPEYYLDQDLSFRDLGVSGFTGKHLKGGLGDFLTAIEKGLVKAGDTLLIESLDRLSRQDVDQASELLRNILRSGVDVVTLSDGEHYTRESLKDPLALIKSILIMQRSHEESLRKSERIQAAWNRKKELISEGIKISKRCPAWLKLNDDRKSFSVIPEKVETVKRCFQLRLEGKSIWEIVRTLNDEGHQSMSQYKPGKFGQTSVQDLLKNRSVIGYFTPKGCEEISGYYPAIIDETTFYKVQQLSYARYGRKPASDKPMAVNLFKGVIRCSECGHALIITGFSDTRNGIYRCPLRNENRCSAKGLSRKQTDGTLLALLSRLDRFDSDTTNTIDTLKLHREHISSNIEKLVQLSLEIEDLSAITSKLKQLKGDLSQVDADIEKETQRLKSIDVGCLSDCDLTTKAGRIEAQLIIKSAVKEVVLNTAKRRCKVTFHNGKTITLPITENPSDNVTEAIQSLSEVTERGLIDVDEVII

SEQ ID NO: 53757 - DNA, 50 bp, Escherichia coli; identical to SEQ ID NO: 47642
  source 1..50: mol_type = genomic DNA

SEQ ID NO: 53758 - DNA, 40 bp, Escherichia coli; identical to SEQ ID NO: 5188
  source 1..40: mol_type = genomic DNA

SEQ ID NO: 53759 - DNA, 40 bp, Escherichia coli; identical to SEQ ID NO: 5188
  source 1..40: mol_type = genomic DNA

SEQ ID NO: 53760 - DNA, 50 bp, Escherichia coli; identical to SEQ ID NO: 21330
  source 1..50: mol_type = genomic DNA

SEQ ID NO: 53761 - protein, 498 aa, Escherichia coli
MKRVISYIRFSSERQAKGDSLRRQSKMVNDWLKAHPEYYLDQDLSFRDLGVSGFTGKHLKGGLGDFLTAIEKGLVKAGDTLLIESLDRLSRQDVDQASELLRNILRSGVDVVTLSDGEHYTRESLKDPLALIKSILIMQRAHEESLRKAERIQAAWNRKKELISEGIKVSRRCPAWLRLNDDRKSFSVIPEKVETVKRCFQLRLEGKSIWEIVRTLNDEGHQTLNQYKAGKFGQTSVQDLLKNRSVIGYFTPKGCCEIAGYYPSIIPESDFYKVQQLSYARGGRKPASDKPLSVNLFKGVIRCSECGHALIITGFSDARNGIYRCPLRNENRCNAKGLSRKQTDGTLLALLSRIDRFDSDMTNTIDTLKLHREHISSNIEKLVQLSLEIEDLSAITSKLKQLKGELSQVDADIEKETQRLKSIDVGCLSDCDLTTKAGRIEAQLIIKSAVKEVVLNTAKRRCKVTFHNGKVIDLPITEAPRKMLQRLYSRFLKSLRGV

SEQ ID NO: 53762 - DNA, 50 bp, Escherichia coli; identical to SEQ ID NO: 47642
  source 1..50: mol_type = genomic DNA

SEQ ID NO: 53763 - DNA, 40 bp, Escherichia coli; identical to SEQ ID NO: 5188
  source 1..40: mol_type = genomic DNA

SEQ ID NO: 53764 - DNA, 40 bp, Escherichia coli; identical to SEQ ID NO: 5188
  source 1..40: mol_type = genomic DNA

SEQ ID NO: 53765 - DNA, 50 bp, Escherichia coli; identical to SEQ ID NO: 21330
  source 1..50: mol_type = genomic DNA

SEQ ID NO: 53766 - protein, 507 aa, Escherichia coli
MKRVISYIRFSSERQAKGDSLRRQSKMVNDWLKAHPEYYLDQDLSFRDLGVSGFTGKHLKGGLGDFLTAIEKGLVKAGDTLLIESLDRLSRQAVDRASELLRNILRSGVDVVTLSDGEHYTSESLKDPLALIKSILIMQRAHEESLRKSERIQAAWDAKKEAAKAGIKVSKRCPAWLKLNDDRKSFSVIPEKVETVKRCFQLRLEGKSIWEIVRTLNDEGHQTLNQYKAGKFGQTSVQDLLKNRSVIGYFTPKGREEIAGYFPSIIHETDFYKVQQLSYARHGRKPASAKPLSVNLFKGVIRCSECGHALIITGFSDTRSGIYRCPLRNENRCSAKGLSRKQTDGTLLALLSRLDRFDSDTTNTIDTLKLHREHISSNIEKLVQLSLEIEDLNAITNKLKQLKNELSQVDADIEKETQRLKSIDVGCLSDCDLTTKAGRIEAQLIIKSAVKEVVLNTAKRRCKVTFHNGKSITLPITENPSEDVTEAIQSLSEVTERGLIDVDVVAI

SEQ ID NO: 53767 - DNA, 50 bp, Escherichia coli; identical to SEQ ID NO: 47642
  source 1..50: mol_type = genomic DNA

SEQ ID NO: 53768 - DNA, 40 bp, Escherichia coli; identical to SEQ ID NO: 5188
  source 1..40: mol_type = genomic DNA

SEQ ID NO: 53769 - DNA, 40 bp, Escherichia coli; identical to SEQ ID NO: 5188
  source 1..40: mol_type = genomic DNA

SEQ ID NO: 53770 - DNA, 50 bp, Escherichia coli; identical to SEQ ID NO: 21330
  source 1..50: mol_type = genomic DNA

SEQ ID NO: 53771 - protein, 507 aa, Escherichia coli
MKRVISYIRFSSERQAKGDSLRRQSKMVTDWLKAHPEYYLDQDLSFRDLGVSGFTGKHLKGGLGDFLTAIEKGLVKAGDTLLIESLDRLSRQAVDRASELLRNILRSGVDIVTLSDGEHYTSESLKDPLALIKSILIMQRAHEESLRKSERIQAAWDAKKEAAKAGIKVSKRCPAWLRLNDDRKSFSVIPEKVETVKRCFQLRLEGKSIWEIVRTLNAEGHRSMNQYKPGKFGQTSVQDLLKNRSVIGYFTPKGCEEISGYYPAIIDETTFYKVQQLSHSRYGKRSVSDKPLSVNLFKGVIRCSECGHALIITGFSDTRNGIYRCPLRNENRCNAKGLSRKQTDGTLLALLSRLDRFDSDMTNVIDALKLHREHISNNIEKLVQLSLEIEDLSAITIKLKQLKGELSQVDADIEKETQRLKSIDVGCLSDCDLSTKAGRIEAQLIIKSAVKEVVLNTAKRRCKVTFHNGRAITLPITENPSEDVTEAIQSLSEVTERGLIDVDVVEI

SEQ ID NO: 53772 - DNA, 50 bp, Escherichia coli; identical to SEQ ID NO: 47642
  source 1..50: mol_type = genomic DNA

SEQ ID NO: 53773 - DNA, 40 bp, Escherichia coli; identical to SEQ ID NO: 5188
  source 1..40: mol_type = genomic DNA

SEQ ID NO: 53774 - DNA, 40 bp, Escherichia coli; identical to SEQ ID NO: 5188
  source 1..40: mol_type = genomic DNA

SEQ ID NO: 53775 - DNA, 50 bp, Escherichia coli; identical to SEQ ID NO: 21330
  source 1..50: mol_type = genomic DNA

SEQ ID NO: 53776 - protein, 507 aa, Escherichia coli
MKRVISYIRFSSEKQSRGDSLRRQSKMVTDWLKAHPEYYLDESLTFRDLGVSGFTGKHLKGGLGDFLTAIEKGLVKAGDTLLIESLDRLSRQAVDRASELLRNILRSGVDVVTLSDGEHYTSESLKDPLALIKSILIMQRAHEESLRKSERIQAAWDAKKEAAKAGIKISKRCPAWLKLNDDRKSFSVIPEKVETVKRCFQLRLEGKSIWEIVRTLNDEGHQSMSQYKPGKFGQTSVQDLLKNRSVIGYFTPKGCEEIAGYYPAIIDETTFYKVQQLSHSRYGRKPVSAKPLSVNLFKGVIRCSECGHALIITGFSDTRNGIYRCPLRNENRCSAKGLSRKQTDGTLLALLSRLDRFDSDTTNNIDTLKLHREHISSNIEKLVQLSLEIEDLSAITSKLKQLKGELSQVDADIEKETQRLKSIDVGCLSDCDLTTKAGRIEAQLIIKSAVKEVVLNTAKRRCKVTFHNGRAITLPITENPSEDVTEAIQSLSEVTERGLIDVDEVII

SEQ ID NO: 53777 - DNA, 50 bp, Escherichia coli; identical to SEQ ID NO: 47642
  source 1..50: mol_type = genomic DNA

SEQ ID NO: 53778 - DNA, 40 bp, Escherichia coli; identical to SEQ ID NO: 5188
  source 1..40: mol_type = genomic DNA

SEQ ID NO: 53779 - DNA, 40 bp, Escherichia coli; identical to SEQ ID NO: 5188
  source 1..40: mol_type = genomic DNA

SEQ ID NO: 53780 - DNA, 50 bp, Escherichia coli; identical to SEQ ID NO: 21330
  source 1..50: mol_type = genomic DNA

SEQ ID NO: 53781 - protein, 507 aa, Escherichia coli
MKRVISYIRFSSERQAKGDSLRRQSKMVTDWLKAHPEYYLDQDLSFRDLGVSGFTGKHLKGGLGDFLTAIEKGLVKAGDTLLIESLDRLSRQDVDQASELLRNILRSGVDVVTLSDGEHYTRESLRDPLALIKSILIMQRAHEESLRKAERIQAAWDAKKEAAKAGIKVSKRCPAWLKLNDDRKSFSVIPEKVETVKRCFQLRLEGKSIWEIVRTLNAEGHQTLNQYKAGKFGQTSVQDLLKNRSVIGYFTPKGCEEISGYYPAIIDETTFYKVQQLSYARYGRKPASDKPMAVNLFKGVIRCSECGHALIITGFSDTRNGIYRCPLRNENRCSAKGLSRKQTDGTLLALLSRLDRFDSDMTNTIDTLKLHREHISSNIEKLVQLSLEIEDLSAITSKLRQLKNELSQVDADIEKETQRLKSIDVGCLSDCDLTTKAGRIEAQLIIKSAVKEVVLNTAKRRCKVTFHNGKVIDLPITENPSDNVTEAIQSLSEVTERGLIDVDEVII

SEQ ID NO: 53782 - DNA, 50 bp, Escherichia coli; identical to SEQ ID NO: 47642
  source 1..50: mol_type = genomic DNA

SEQ ID NO: 53783 - DNA, 40 bp, Escherichia coli; identical to SEQ ID NO: 5188
  source 1..40: mol_type = genomic DNA

SEQ ID NO: 53784 - DNA, 40 bp, Escherichia coli; identical to SEQ ID NO: 5188
  source 1..40: mol_type = genomic DNA

SEQ ID NO: 53785 - DNA, 50 bp, Escherichia coli; identical to SEQ ID NO: 21330
  source 1..50: mol_type = genomic DNA

SEQ ID NO: 53786 - protein, 507 aa, Escherichia coli
MKRVISYIRFSSERQAKGDSLRRQSKMVNDWLKAHPEYYLDQDLSFRDLGVSGFTGKHLKGGLGDFLTAIEKGLVKAGDTLLIESLDRLSRQDVDQASELLRNILRSGVDVVTLSDGEHYTKESLRDPLSLIKSILIMQRAHEESLRKAERIQAAWDAKKEAAKAGIKISRRCPAWLKLNDDRKSFSVIPEKVETVKRCFQLRLEGKSIWEIVRTLNAEGHQTLNQYKAGKFGQTSVQDLLKNRSVIGYFTPKGCEEISGYYPAIIDETTFYKVQQLSHSRYGRKPASAKPLSVNLFKGVIRCSECGHALIITGFSDTRNGIYRCPLRNENRCSAKGLSRKQADGTLLTLLSRLDRFDSDTTNTVDTLKLHREHISSNIEKLVQLSLEIEDLSAITIKLKQLKGELSQVDADIEKETQRLKSIDVGCLSDCDLTTKAGRIEAQLIIKSAVKEVVLNTAKRRCKVTFHNGKAITLPITENPSDNVTEAIQSLSEVTERGLIDVDEVII

SEQ ID NO: 53787 - DNA, 50 bp, Escherichia coli; identical to SEQ ID NO: 47642
  source 1..50: mol_type = genomic DNA

SEQ ID NO: 53788 - DNA, 40 bp, Escherichia coli; identical to SEQ ID NO: 5188
  source 1..40: mol_type = genomic DNA

SEQ ID NO: 53789 - DNA, 40 bp, Escherichia coli; identical to SEQ ID NO: 5188
  source 1..40: mol_type = genomic DNA

SEQ ID NO: 53790 - DNA, 50 bp, Escherichia coli; identical to SEQ ID NO: 21330
  source 1..50: mol_type = genomic DNA

SEQ ID NO: 53791 - protein, 507 aa, Escherichia coli
MKRVISYIRFSSEKQAKGDSLRRQSKMVNDWLKAHPEYYLDQDLSFRDLGVSGFTGKHLKGGLGDFLTAIEKGLVKAGDTLLIESLDRLSRQDVDQASELLRNILRSGVDVVTLSDGEHYTSESLKDPLALIKSILIMQRAHEESLRKSERIQAAWDAKKEAAKAGIKVSKRCPAWLKLNDDRKSFSVIPEKVETVKRCFQLRLEGKSIWEIVRTLNDEGHQTLNQYKPGKFGQTSVQDLLKNRSVIGYFTPKGREEIAGYFPPIIPETDFYKVQQLSYSRYGRKPASDKPMAVNLFKGVIRCSECGHALIITGFSDTRNGIYRCPLRNENRCSAKGLSRKQTDGTLLALLSRLDRFDSDTTNTIDTLKLHREHISSNIEKLVQLSLEIEDLSAITIKLKQLKNELSQVDADIEKETQRLKSIDVGCLSDCDLTTKAGRIEAQLIIKSAVKEVVLNTAKRRCKVTFHNSKSITLSITENPSEDVTEAIQSLSEVTERGLIDVDEVII

SEQ ID NO: 53792 - DNA, 50 bp, Escherichia coli; identical to SEQ ID NO: 47642
  source 1..50: mol_type = genomic DNA

SEQ ID NO: 53793 - DNA, 40 bp, Escherichia coli; identical to SEQ ID NO: 5188
  source 1..40: mol_type = genomic DNA

SEQ ID NO: 53794 - DNA, 40 bp, Escherichia coli; identical to SEQ ID NO: 5188
  source 1..40: mol_type = genomic DNA

SEQ ID NO: 53795 - DNA, 50 bp, Escherichia coli; identical to SEQ ID NO: 21330
  source 1..50: mol_type = genomic DNA

SEQ ID NO: 53796 - protein, 507 aa, Escherichia coli
MKRVISYIRFSSEKQAKGDSLRRQSKLVTDWLKAHPEYHLDESLTFRDLGVSGFTGKHLKGGLGDFLTAIEKGLVKAGDTLLIESLDRLSRQDIDIASELLRNILRSGVDVVTLSDGEHYTRESLRDPLALIKSILIMQRAHEESLRKAERIQAAWDAKKEAAKAGIKVSKRCPAWLKLNDDRKSFSVIPEKVETVKRCFQLRLEGKSIWEIVRTLNDEGHQSMSQYKPGSFGQSSVQDLLKNRSVIGYFTPKGCEEIAGYYPAIIDETTFYKVQQLSYARYGRKPASDKPLSVNLFKGVIRCSECGHALIITGFSDTRSGIYRCPLRNENRCSAKGLSRKQTDGTLLALLSRLDRFDSDTTNTIDTLKLHREHISSNIEKLVQLSLEIEDLSAITSKLKQLKGELSQVDADIEKETQRLKSIDVGCLSDCDLTTKAGRIEAQLIIKSAVKEVVLNTAKRRCKVTFHNSKSITLSITENPSEDVTEAIQSLSEVTERGLIDVDEVII

SEQ ID NO: 53797 - DNA, 50 bp, Escherichia coli; identical to SEQ ID NO: 47642
  source 1..50: mol_type = genomic DNA

SEQ ID NO: 53798 - DNA, 40 bp, Escherichia coli; identical to SEQ ID NO: 5188
  source 1..40: mol_type = genomic DNA

SEQ ID NO: 53799 - DNA, 40 bp, Escherichia coli; identical to SEQ ID NO: 5188
  source 1..40: mol_type = genomic DNA

SEQ ID NO: 53800 - DNA, 50 bp, Escherichia coli; identical to SEQ ID NO: 21330
  source 1..50: mol_type = genomic DNA

SEQ ID NO: 53801 - protein, 507 aa, Escherichia coli
MKRAISYIRFSSEKQSRGDSLRRQSKMVTDWLKAHPEYYLDQDLSFRDLGVSGFTGKHLKGGLGDFLTAIEKGLVKAGDTLLIESLDRLSRQNVDRASELLRNILRSGVDVVTLSDGEHYTRESLKDPLALIKSILIMQRSHEESLRKSERIQAAWNRKKELISEGIKISKRCPAWLKLNDDRKSFSVIPDKVETVKRCFQLRLEGKSIWEIVRTLNAEGHRSMNQYKPGKFGQTSVQDLLKNRSVIGYFTPKGCEEISGYYPAIIDETTFYKVQQLSYARYGRKPASDKPMAVNLFKGVIRCSECGHALIITGFSDTRNGIYRCPLRNENRCSAKGLSRKQTDGTLLALLSRLDRFDSDMTNTIDTLKLHREHISSNIEKLVQLSLEIEDLSAITSKLRQLKNELSQVDADIEKETQRLKSIDVGCLSDCDLTTKAGRIEAQLIIKSAVKEVVLNTAKRRCKVTFHNGKAITLPITETPSEDVTEAIQSLSEVTERGLIDVDEVII

SEQ ID NO: 53802 - DNA, 50 bp, Escherichia coli; identical to SEQ ID NO: 47642
  source 1..50: mol_type = genomic DNA

SEQ ID NO: 53803 - DNA, 40 bp, Escherichia coli; identical to SEQ ID NO: 5188
  source 1..40: mol_type = genomic DNA

SEQ ID NO: 53804 - DNA, 40 bp, Escherichia coli; identical to SEQ ID NO: 5188
  source 1..40: mol_type = genomic DNA

SEQ ID NO: 53805 - DNA, 50 bp, Escherichia coli; identical to SEQ ID NO: 21330
  source 1..50: mol_type = genomic DNA

SEQ ID NO: 53806 - protein, 507 aa, Escherichia coli
MKRVISYIRFSSEKQSRGDSLRRQSKMVTDWLKAHPEYYLDQDLSFRDLGVSGFTGKHLKGGLGDFLTAIEKGLVKAGDTLLIESLDRLSRQDVDQASELLRNILRSGVDVVTLSDGEHYTKESLRDPLSLIKSILIMQRAHEESLRKAERIQAAWDAKKEAAKAGIKISKRCPAWLKLNDDRKSFSVIPEKVETVKRCFQLRLEGKSIWEIVRTLNDEGHQTLHQHRAGKFGQTSVQDLLKNRSVIGYFTPKGCEEISGYYPAIIDETTFYKVQQLSYSRYGRKPASDKPLSVNLFKGVIRCSECGHALIITGFSDTRNGIYRCPLRNENRCSAKGLSRKQTDGTLLTLLSRLDRFDSDTTNVIDTLKLHREHISSNIEKLVQLSLEIEDLSAITIKLKQLKGELSQVDADIEKETQRLKSIDVGCLSDCDLTTKAGRIEAQLIIKSAVKEVVLNTAKRRCKVTFHNGKVIDLSITENPSEDVTEAIQSLSEVTERGLIDVDEVII

SEQ ID NO: 53807 - DNA, 50 bp, Escherichia coli; identical to SEQ ID NO: 47642
  source 1..50: mol_type = genomic DNA

SEQ ID NO: 53808 - DNA, 40 bp, Escherichia coli; identical to SEQ ID NO: 5188
  source 1..40: mol_type = genomic DNA

SEQ ID NO: 53809 - DNA, 40 bp, Escherichia coli; identical to SEQ ID NO: 5188
  source 1..40: mol_type = genomic DNA

SEQ ID NO: 53810 - DNA, 50 bp, Escherichia coli; identical to SEQ ID NO: 21330
  source 1..50: mol_type = genomic DNA

SEQ ID NO: 53811 - protein, 507 aa, Escherichia coli
MKRVISYIRFSSERQAKGDSLRRQSKMVNDWLKAHPEYYLDQDLSFRDLGVSGFTGKHLKGGLGDFLTAIEKGLVKAGDTLLIESLDRLSRQDVDQASELLRNILRSGVDVVTLSDGEHYTKESLRDPLSLIKSILIMQRAHEESLRKAERIQAAWDAKKEAAKAGIKISRRCPAWLKLNDDRKSFSVIPEKVETVKRCFQLRLEGKSIWEIVRTLNAEGHQTLNQYKAGKFGQTSVQDLLKNRSVIGYFTPKGCEEISGYYPAIIDETTFYKVQQLSYARYGRKPASDKPMAVNLFKGVIRCSECGHALIITGFSDTRNGIYRCPLRNENRCSAKGLSRKQTDGTLLALLSRLDRFDSDMTNTIDTLKLHREHISSNIEKLVQLSLEIEDLSAITSKLRQLKNELSQVDADIEKETQRLKSIDVGCLSDCDLTTKAGRIEAQLIIKSAVKEVVLNTAKRRCKVTFHNSKSITLPITENPSDNVTEAIQSLSEVTERGLIDVDVVEI

SEQ ID NO: 53812 - DNA, 50 bp, Escherichia coli; identical to SEQ ID NO: 47642
  source 1..50: mol_type = genomic DNA

SEQ ID NO: 53813 - DNA, 40 bp, Escherichia coli; identical to SEQ ID NO: 5188
  source 1..40: mol_type = genomic DNA

SEQ ID NO: 53814 - DNA, 40 bp, Escherichia coli; identical to SEQ ID NO: 5188
  source 1..40: mol_type = genomic DNA

SEQ ID NO: 53815 - DNA, 50 bp, Escherichia coli; identical to SEQ ID NO: 21330
  source 1..50: mol_type = genomic DNA

SEQ ID NO: 53816 - protein, 507 aa, Escherichia coli
MKRVISYIRFSSERQAKGDSLRRQSKMVNDWLKAHPEYYLDQDLSFRDLGVSGFTGKHLKGGLGDFLTAIEKGLVKAGDTLLIESLDRLSRQDVDQASELLRNILRSGVDVVTLSDGEHYTKESLRDPLSLIKSILIMQRAHEESLRKAERIQAAWDAKKEAAKAGIKISRRCPAWLKLNDDRKSFSIIPEKVETVKRCFQLRLEGKSIWEIVRTLNDEGHQTLNQYKAGKFGQTSVQDLLKNRSVIGYFTPKGREEIAGYFPPIIPETDFYKVQQLSYSRYGRKPASDKPMAVNLFKGVIRCSECGHALIITGFSDTRNGIYRCPLRNENRCSAKGLSRKQTDGTLLALLSRLDRFDSDTTNTIDTLKLHREHISSNIEKLVQLSLEIEDLSAITSKLKQLKGELSQVDADIEKETQRLKSIDVGCLSDCDLTTKAGRIEAQLIIKSAVKEVVLNTAKRRCKVTFHNGKAITLPITENPSDNVTEAIQSLSEVTERGLIDVDEVII

SEQ ID NO: 53817 - DNA, 50 bp, Escherichia coli; identical to SEQ ID NO: 47642
  source 1..50: mol_type = genomic DNA

SEQ ID NO: 53818 - DNA, 40 bp, Escherichia coli; identical to SEQ ID NO: 5188
  source 1..40: mol_type = genomic DNA

SEQ ID NO: 53819 - DNA, 40 bp, Escherichia coli; identical to SEQ ID NO: 5188
  source 1..40: mol_type = genomic DNA

SEQ ID NO: 53820 - DNA, 50 bp, Escherichia coli; identical to SEQ ID NO: 21330
  source 1..50: mol_type = genomic DNA

SEQ ID NO: 53821 - protein, 507 aa, Escherichia coli
MKRAISYIRFSSEKQSRGDSLRRQSKMVTDWLKAHPEYYLDQDLSFRDLGVSGFTGKHLKGGLGDFLTAIEKGLVKAGDTLLIESLDRLSRQAVDRASELLRNILRSGVDVVTLSDGEHYTKESLRDPLSLIKSILIMQRSHEESLRKSERIQAAWDAKKEAAKAGIKVSKRCPAWLKLNDDRKSFSVIPDKVETVKRCFQLRLEGKSIWEIVRTLNAEGHRSMNQYKPGKFGQTSVQDLLKNRSVIGYFTPKGCEEIAGYYPSVIDETTFYKVQQLSHSRHGRKPVSDKPLSVNLFKGVIRCSECGHALIITGFSDTRNGIYRCPLRNENRCSAKGLSRKQTDGTLLTLLSRLDRFDSDTTNTIDMLRLHREHISSNIEKLVQLSLEIEDLSAITSKLKQLKGELSQVDADIEKETQRLKSIDVGCLSDCDLTTKAGRIEAQLIIKSAVKEVVLNTAKRRCKVTFHNGKVIDLSITENPSEDVTEAIQSLSEVTERGLIDVDEVII

SEQ ID NO: 53822 - DNA, 50 bp, Escherichia coli; identical to SEQ ID NO: 47642
  source 1..50: mol_type = genomic DNA

SEQ ID NO: 53823 - DNA, 40 bp, Escherichia coli; identical to SEQ ID NO: 5188
  source 1..40: mol_type = genomic DNA

SEQ ID NO: 53824 - DNA, 40 bp, Escherichia coli; identical to SEQ ID NO: 5188
  source 1..40: mol_type = genomic DNA

SEQ ID NO: 53825 - DNA, 50 bp, Escherichia coli; identical to SEQ ID NO: 21330
  source 1..50: mol_type = genomic DNA

SEQ ID NO: 53826 - protein, 507 aa, Escherichia coli
MKRAISYIRFSSEKQSRGDSLRRQSKMVTDWLKAHPEYYLDQDLSFRDLGVSGFTGKHLKGGLGDFLTAIEKGLVKAGDTLLIESLDRLSRQDVDQASELLRNILRSGVDVVTLSDGEHYTKESLRDPLSLIKSILIMQRSHEESLRKSERIQAAWDAKKEAAKAGIKVSKRCPAWLKLNDDRKSFSVIPEKVETVKRCFQLRLEGKSIWEIVRTMNAEGHQTLHQHKPGSFGQSSVQDLLKNRSVIGYFTPKGCEEISGYYPAIIDETTFYKVQQLSHYRYGRKPVSAKPLSVNLFKGVIRCSECGHALIITGFSDTRNGIYRCPLRNENRCSAKGLSRKQTDGTLLTLLSRLDRFDSDTTNTIDTLKLHREHISSNIEKLVQLSLEIEDLSAITSKLKQLKGELSQVDADIEKETQRLKSIDTGSLSDCDLSTKAGRIEAQLIIKSAVKEVVLNTAKRRCKVTFHNGKLIDLPITETPSDNVTEAIQSLSEVTERGLIDVDEVII

SEQ ID NO: 53827 - DNA, 50 bp, Escherichia coli; identical to SEQ ID NO: 47642
  source 1..50: mol_type = genomic DNA

SEQ ID NO: 53828 - DNA, 40 bp, Escherichia coli; identical to SEQ ID NO: 5188
  source 1..40: mol_type = genomic DNA

SEQ ID NO: 53829 - DNA, 40 bp, Escherichia coli; identical to SEQ ID NO: 5188
  source 1..40: mol_type = genomic DNA

SEQ ID NO: 53830 - DNA, 50 bp, Escherichia coli; identical to SEQ ID NO: 21330
  source 1..50: mol_type = genomic DNA

SEQ ID NO: 53831 - protein, 507 aa, Escherichia coli
MKRAISYIRFSSEKQSRGDSLRRQAKMVTDWLKAHPEYYLDESLTFRDLGVSGFTGKHLKGGLGDFLTAIEKGLVKAGDTLLIESLDRLSRQDVDQASELLRNILRSGVDVVTLSDGEHYTSESLKDPLALIKSILIMQRAHEESLRKSERIQAAWDAKKEAAKAGIKVSKRCPAWLKLNDDRKSFSVIPDKVETVKRCFQLRLEGKSIWEIVRTLNAEGHQTLNQYKAGKFGQTSVQDLLKNRSVIGYFTPKGCEEIAGYYPAIIDETTFYKVQQLSHSRYGRKPVSAKPLSVNLFKGVIRCSECGHALIITGFSDTRNGIYRCPLRNENRCSAKGLSRKQTDGTLLALLSRLDRFDSDTTNTIDTLKLHREHISSNIEKLVQLSLEIEDLNAITSKLKQLKGELSQVDADIEKETQRLKSIDVGCLSDCDLTTKVGRIEAQLIIKSAVKEVVLNTAKRRCKVTFHNGKVIDLPITENPSEDVTEAIQSLSEVTERGLIDVDVVEI

SEQ ID NO: 53832 - DNA, 50 bp, Escherichia coli; identical to SEQ ID NO: 47642
  source 1..50: mol_type = genomic DNA

SEQ ID NO: 53833 - DNA, 40 bp, Escherichia coli; identical to SEQ ID NO: 5188
  source 1..40: mol_type = genomic DNA

SEQ ID NO: 53834 - DNA, 40 bp, Escherichia coli; identical to SEQ ID NO: 5188
  source 1..40: mol_type = genomic DNA

SEQ ID NO: 53835 - DNA, 50 bp, Escherichia coli; identical to SEQ ID NO: 21330
  source 1..50: mol_type = genomic DNA

SEQ ID NO: 53836 - protein, 507 aa, Escherichia coli
MKRVISYIRFSSERQAKGDSLRRQSKMVNDWLKAHPEYYLDQDLSFRDLGVSGFTGKHLKGGLGDFLTAIEKGLVKAGDTLLIESLDRLSRQDVDQASELLRNILRSGVDVVTLSDGEHYTKESLRDPLSLIKSILIMQRAHEESLRKAERIQAAWDAKKEAAKAGIKISRRCPAWLKLNDDRKSFSVIPEKVETVKRCFQLRLEGKSIWEIVRTLNAEGHQTLNQYKAGKFGQTSVQDLLKNRSVIGYFTPKGCEEISGYYPAIIDETTFYKVQQLSYARYGRKPASDKPMAVNLFKGVIRCSECGHALIITGFSDTRNGIYRCPLRNENRCSAKGLSRKQTDGTLLALLSRLDRFDSDTTNTVDTLKLHREHISSNIEKLVQLSLEIEDLSAITIKLKQLKGELSQVDADIEKETQRLKSIDVGCLSDCDLTTKAGRIEAQLIIKSAVKEVVLNTAKRRCKVTFHNGKAITLPITENPSEDVTEAIQSLSEVTERGLIDVDEVII

SEQ ID NO: 53837 - DNA, 50 bp, Escherichia coli; identical to SEQ ID NO: 47642
  source 1..50: mol_type = genomic DNA

SEQ ID NO: 53838 - DNA, 40 bp, Escherichia coli; identical to SEQ ID NO: 5188
  source 1..40: mol_type = genomic DNA

SEQ ID NO: 53839 - DNA, 40 bp, Escherichia coli; identical to SEQ ID NO: 5188
  source 1..40: mol_type = genomic DNA

SEQ ID NO: 53840 - DNA, 50 bp, Escherichia coli; identical to SEQ ID NO: 21330
  source 1..50: mol_type = genomic DNA

SEQ ID NO: 53841 - protein, 507 aa, Escherichia coli
MKRAISYIRFSSEKQSRGDSLRRQSKMVTDWLKAHPEYYLDQDLSFRDLGVSGFTGKHLKGGLGDFLTAIEKGLVKAGDTLLIESLDRLSRQNVDRASELLRNILRSGVDVVTLSDGEHYTRESLKDPLALIKSILIMQRSHEESLRKSERIQAAWNRKKELISEGIKISKRCPAWLRLNDDRKSFSVIPEKVETVKRCFQLRLEGKSIWEIVRTLNDEGHQSMSQYKPGKFGQTSVQDLLKNRSVIGYFTPKGREEISGYYPAIIDETTFYKVQQLSHSRYGRKPVSDKPLSVNLFKGVIRCSECGHALIITGFSDTRNGIYRCPLRNENRCSAKGLSRKQTDGTLLTLLSRLDRFDSDTTNTIDMLRLHREHISSNIEKLVQLSLEIEDLSAITIKLKQLKGELSQVDADIEKETQRLKSIDTGSLSDCDLSTKAGRIEAQLIIKSAVKEVVLNTAKRRCKVTFHNGKSIDLPITENPSEDVTEAIQSLSEVTERGLIDVDVVEI

SEQ ID NO: 53842 - DNA, 50 bp, Escherichia coli; identical to SEQ ID NO: 47642
  source 1..50: mol_type = genomic DNA

SEQ ID NO: 53843 - DNA, 40 bp, Escherichia coli; identical to SEQ ID NO: 5188
  source 1..40: mol_type = genomic DNA

SEQ ID NO: 53844 - DNA, 40 bp, Escherichia coli; identical to SEQ ID NO: 5188
  source 1..40: mol_type = genomic DNA

SEQ ID NO: 53845 - DNA, 50 bp, Escherichia coli; identical to SEQ ID NO: 21330
  source 1..50: mol_type = genomic DNA

SEQ ID NO: 53846 - protein, 507 aa, Escherichia coli
MKRVISYIRFSSERQAKGDSLRRQSKMVTDWLKAHPEYYLDQDLSFRDLGVSGFTGKHLKGGLGDFLTAIEKGLVKAGDTLLIESLDRLSRQDVDQASELLRNILRSGVDVVTLSDGEHYTRESLRDSLALIKSILIMQRAHEESLRKSERIQAAWDAKKEAAKAGIKISRRCPAWLKLNDDRKSFSVIPEKVETVKRCFQLRLEGKSIWEIVRTLNAEGHQTLNQYKAGKFGQTSVQDLLKNRSVIGYFTPKGCEEISGYYPAIIDETTFYKVQQLSYARYGRKPASDKPLSVNLFKGVIRCSECGHALIITGFSDTRNGIYRCPLRNENRCSAKGLSRKQTDGTLLALLSRLDRFDSDTTNTIDTLKLHREHISSNIEKLVQLSLEIEDLSAITSKLRQLKNELSQVDADIEKETQRLKSIDVGCLSDCDLTTKAGRIEAQLIIKSAVKEVVLNTAKRRCKVTFHNGKVIDLPITENPSDNVTEAIQSLSEVTERGLIDVDEVII

SEQ ID NO: 53847 - DNA, 50 bp, Escherichia coli; identical to SEQ ID NO: 47642
  source 1..50: mol_type = genomic DNA

SEQ ID NO: 53848 - DNA, 40 bp, Escherichia coli; identical to SEQ ID NO: 5188
  source 1..40: mol_type = genomic DNA

SEQ ID NO: 53849 - DNA, 40 bp, Escherichia coli; identical to SEQ ID NO: 5188
  source 1..40: mol_type = genomic DNA

SEQ ID NO: 53850 - DNA, 50 bp, Escherichia coli; identical to SEQ ID NO: 21330
  source 1..50: mol_type = genomic DNA

SEQ ID NO: 53851 - protein, 507 aa, Escherichia coli
MKRAISYIRFSSEKQSRGDSLRRQSKMVNDWLKAHPEYYLDQDLSFRDLGVSGFTGKHLKGGLGDFLTAIEKGLVKAGDTLLIESLDRLSRQNVDRASELLRNILRSGVDVVTLSDGEHYTRESLKDPLALIKSILIMQRSHEESLRKSERIQAAWNRKKELISEGIKISKRCPAWLRLNDDRKSFSVIPEKVETVKRCFQLRLEGKSIWEIVRTLNDEGHQTLNQYKAGKFGQTSVQDLLKNRSVIGYFTPKGCEEITGYFPSIIPETDFYKVQQLSYSRYGRKPVSDKPLSVNLFKGVIRCSECGHALIITGFSDTRSGIYRCPLRNENRCSAKGLSRKQTDGTLLTLLSRLDRFDSDTTNTIDTLKLHREHISSNIEKLVQLSLEIEDLNAITNKLKQLKNELSQVDADIEKETQRLKSIDVGCLSDCDLTTKAGRIEAQLIIKSAVKEVVLNTAKRRCKVTFHNGRAITLPITENPSEDVTEAIQSLSEVTERGLIDVDVVEI

SEQ ID NO: 53852 - DNA, 50 bp, Escherichia coli; identical to SEQ ID NO: 47642
  source 1..50: mol_type = genomic DNA

SEQ ID NO: 53853 - DNA, 40 bp, Escherichia coli; identical to SEQ ID NO: 5188
  source 1..40: mol_type = genomic DNA

SEQ ID NO: 53854 - DNA, 40 bp, Escherichia coli; identical to SEQ ID NO: 5188
  source 1..40: mol_type = genomic DNA

SEQ ID NO: 53855 - DNA, 50 bp, Escherichia coli; identical to SEQ ID NO: 21330
  source 1..50: mol_type = genomic DNA

SEQ ID NO: 53856 - protein, 507 aa, Escherichia coli
MKRAISYIRFSSEKQSRGDSLRRQSKMVNDWLKAHPEYYLDQDLSFRDLGVSGFTGKHLKGGLGDFLTAIEKGLVKAGDTLLIESLDRLSRQDVDQASELLRNILRSGVDVVTLSDGEHYTKESLKDPLALIKSILIMQRAHEESLRKAERIQAAWDAKKEAAKAGIKVSKRCPAWLRLNDDRKSFSVIPEKVETVKRCFQLRLEGKSIWEIVRTLNDEGHRSMNQYKPGKFGQTSVQDLLKNRSVIGYFTPKGCEEISGYYPAIIDETTFYKVQQLSHSRYGKRSVSDKPLSVNLFKGVIRCSECGHALIITGFSDTRSGIYRCPLRNENRCSAKGLSRKQTDGTLLTLLSRLDRFDSDTTNTIDTLKLHREHISSNIEKLVQLSLEIEDLNAITSKLKQLKGELSQVDADIEKETQRLKSIDVGCLSDCDLTTKAGRIEAQLIIKSAVKEVVLNAAKRRCKVTFHNSKSITLPITENPSEDVTEAIQSLSEVTERGLIDVDEVII

SEQ ID NO: 53857 - DNA, 50 bp, Escherichia coli; identical to SEQ ID NO: 47642
  source 1..50: mol_type = genomic DNA

SEQ ID NO: 53858 - DNA, 40 bp, Escherichia coli; identical to SEQ ID NO: 5188
  source 1..40: mol_type = genomic DNA

SEQ ID NO: 53859 - DNA, 40 bp, Escherichia coli; identical to SEQ ID NO: 5188
  source 1..40: mol_type = genomic DNA

SEQ ID NO: 53860 - DNA, 50 bp, Escherichia coli; identical to SEQ ID NO: 21330
  source 1..50: mol_type = genomic DNA

SEQ ID NO: 53861 - protein, 507 aa, Escherichia coli
MKRVISYIRFSSERQAKGDSLRRQSKMVNDWLKAHPEYYLDESLTFRDLGVSGFTGKHLKGGLGDFLTAIEKGLVKAGDTLLIESLDRLSRQNVDRASELLRNILRSGVDVVTLSDGEHYTRESLKDPLALIKSILIMQRAHEESLRKAERIQAAWDAKKEAAKAGIKISKRCPAWLKLNDDRKSFSIIPEKVETVKRCFQLRLEGKSIWAIVKALNDEGHQTLNQYKAGKFGQTSVQDLLKNRSVIGYFTPKGCEEIAGYYPAIIDETTFYKVQQLSHSRYGKRSVSDKPLSVNLFKGVIRCSECGHALIITGFSDTRNGIYRCPLRNENRCSAKGLSRKQTDGTLLTLLSRLDRFDSDTTNTIDTLKLHREHISSNIEKLVQLSLEIEDLSAITSKLKQLKGELSQVDADIEKETQRLKSIDTGSLSDCDLSTKAGRIEAQLIIKSAVKEVVLNTAKRRCKVTFHNGKSITLPITENPSEDVTEAIQSLSEVTERGLIDVDEVII

SEQ ID NO: 53862 - DNA, 50 bp, Escherichia coli; identical to SEQ ID NO: 47642
  source 1..50: mol_type = genomic DNA

SEQ ID NO: 53863 - DNA, 40 bp, Escherichia coli; identical to SEQ ID NO: 5188
  source 1..40: mol_type = genomic DNA

SEQ ID NO: 53864 - DNA, 40 bp, Escherichia coli; identical to SEQ ID NO: 5188
  source 1..40: mol_type = genomic DNA

SEQ ID NO: 53865 - DNA, 50 bp, Escherichia coli; identical to SEQ ID NO: 21330
  source 1..50: mol_type = genomic DNA

SEQ ID NO: 53866 - protein, 507 aa, Escherichia coli
MKRVISYIRFSSEKQAKGDSLRRQSKMVTDWLKAHPEYYLDESLTFRDLGVSGFTGKHLKGGLGDFLTAIEKGLVKAGDTLLIESLDRLSRQDVDQASELLRNILRSGVDVVTLSDGEHYTRESLKDPLALIKSILIMQRSHEESLRKSERIQAAWDAKKEAAKAGIKVSKRCPAWLKLNDDRKSFSVIPEKVETVKRCFQLRLEGKSIWEIVRTLNDEGHQTLNQYKAGSFGQTSVQDLLKNRSVIGYFTPKGCEEIADYYPAIIDETTFYKVQQLSYARYGRKPASDKPMAVNLFKGVIRCSECGHALIITGFSDTRSGIYRCPLRNENRCSAKGLSRKQTDGTLLALLSRLDRFDSDTTNIIDTLKLHREHISSNIEKLVQLSLEIEDLNAITNKLKQLKNELSQVDADIEKETQRLKSIDVGCLSDCDLTTKAGRIEAQLIIKSAVKEVVLNTAKRRCKVTFHNSKVIDLPITENPSEDVTEAIQSLSEVTERGLIDVDEVII

SEQ ID NO: 53867 - DNA, 50 bp, Escherichia coli; identical to SEQ ID NO: 47642
  source 1..50: mol_type = genomic DNA

SEQ ID NO: 53868 - DNA, 40 bp, Escherichia coli; identical to SEQ ID NO: 5188
  source 1..40: mol_type = genomic DNA

SEQ ID NO: 53869 - DNA, 40 bp, Escherichia coli; identical to SEQ ID NO: 5188
  source 1..40: mol_type = genomic DNA

SEQ ID NO: 53870 - DNA, 50 bp, Escherichia coli; identical to SEQ ID NO: 21330
  source 1..50: mol_type = genomic DNA

SEQ ID NO: 53871 - protein, 507 aa, Escherichia coli
MKRAISYIRFSSEKQSRGDSLRRQSKMVNDWLKAHPEYYLDQDLSFRDLGVSGFTGKHLKGGLGDFLTAIEKGLVKAGDTLLIESLDRLSRQDVDQASELLRNILRSGVDVVTLSDGEHYTSESLKDPLALIKSILIMQRAHEESLRKSERIQAAWDAKKEAAKAGIKVSRRCPAWLRLNDDRKSFSVIPEKVETVKRCFQLRLEGKSIWEIVRTLNAEGHRSMNQYKPGKFGQTSVQDLLKNRSVIGYFTPKGCEEISGYFPPIIPETDFYKVQQLSYSRYGKRSVSDKPLSVNLFKGVIRCSECGHALIITGFSDTRNGIYRCPLRNENRCSAKGLSRKQTDGTLLTLLSRLDRFDSNTTNTIDMLRLHREHISNNIEKLVQLSLEIEDLSAITIKLKQLKGELSQVDADIEKETQRLKSIDAGCLSDCDLTTKAGRIEAQLIIKSAVKEVVLNTAKRRCKVTFHNGRAITLPITENPSEDVTEAIQSLSEVTERGLIDVDVVEI

SEQ ID NO: 53872 - DNA, 50 bp, Escherichia coli; identical to SEQ ID NO: 47642
  source 1..50: mol_type = genomic DNA

SEQ ID NO: 53873 - DNA, 40 bp, Escherichia coli; identical to SEQ ID NO: 5188
  source 1..40: mol_type = genomic DNA

SEQ ID NO: 53874 - DNA, 40 bp, Escherichia coli; identical to SEQ ID NO: 5188
  source 1..40: mol_type = genomic DNA

SEQ ID NO: 53875 - DNA, 50 bp, Escherichia coli; identical to SEQ ID NO: 21330
  source 1..50: mol_type = genomic DNA

SEQ ID NO: 53876 - protein, 507 aa, Escherichia coli
MKRAISYIRFSSEKQSRGDSLRRQSKMVNDWLKAHPEYYLDQDLSFRDLGVSGFTGKHLKGGLGDFLTAIEKGLVKAGDTLLIESLDRLSRQDVDQASELLRNILRSGVDVVTLSDGEHYTKESLKDPLALIKSILIMQRSHEESLRKSERIQAAWDAKKEAAKAGIKIYKRCPAWLKLNDDRKTFSVIPEKVETVKRCFQLRLEGKSIWEIVRTLNDEGHQTLNQYKAGKFGQTSVQDLLKNRSVIGYFTPKGCEEIAGYFPPIIPETDFYKVQQLSYSRYGRKPASDKPLSVNLFKGVIRCSECGHALIITGFSDTRNGIYRCPLRNENRCSAKGLSRKQTDGTLLALLSRIDRFDSDMTNTIDTLKLHREHISSNIEKLVQLSLEIEDLSAITSKLKQLKGELSQVDADIEKETQRLKSIDVGCLSDCDLTTKAGRIEAQLIIKSAVKEVILNTAKRRCKVTFHNSKSITLPITEPPSEDVTEAIQSLSEVTERGLIDVDEVII

SEQ ID NO: 53877 - DNA, 50 bp, Escherichia coli; identical to SEQ ID NO: 47642
  source 1..50: mol_type = genomic DNA

SEQ ID NO: 53878 - DNA, 40 bp, Escherichia coli; identical to SEQ ID NO: 5188
  source 1..40: mol_type = genomic DNA

SEQ ID NO: 53879 - DNA, 40 bp, Escherichia coli; identical to SEQ ID NO: 5188
  source 1..40: mol_type = genomic DNA

SEQ ID NO: 53880 - DNA, 50 bp, Escherichia coli; identical to SEQ ID NO: 21330
  source 1..50: mol_type = genomic DNA

SEQ ID NO: 53881 - protein, 507 aa, Escherichia coli
MKRVISYIRFSSERQAKGDSLRRQSKMVNDWLKAHPEYYLDQDLSFRDLGVSGFTGKHLKGGLGDFLTAIEKGLVKAGDTLLIESLDRLSRQDIDIASELLRNILRSGVDVVTLSDGEHYTRESLRDPLALIKSILIMQRAHEESLRKAERIQAAWDAKKEAAKAGIKVSKRCPAWLKLNDDRKSFSVIPDKVETVKRCFQLRLEGKSIWEIVRTLNDEGHQSMSQYKPGSFGQTSVQDLLKNRSVIGYFTPKGCEEISGYYPAIIDETTFYKVQQLSHYRYGRKPVSDKPLSVNLFKGVIRCSECGHALIITGFSDTRNGIYRCPLRNENRCSAKGLSRKQTDGTLLTLLSRLDRFDSDTTNTIDTLKLHREHISSNIEKLVQLSLEIEDLSAITSKLKQLKGELSQVDADIEKETQRLKSIDVGCLSDCDLTTKAGRIEAQLIIKSAVKEVVLNTAKRRCKVTFHNGKVIDLPITENPSEDVTEAIQSLSEVTERGLIDVDVVEI

SEQ ID NO: 53882 - DNA, 50 bp, Escherichia coli; identical to SEQ ID NO: 47642
  source 1..50: mol_type = genomic DNA

SEQ ID NO: 53883 - DNA, 40 bp, Escherichia coli; identical to SEQ ID NO: 5188
  source 1..40: mol_type = genomic DNA

SEQ ID NO: 53884 - DNA, 40 bp, Escherichia coli; identical to SEQ ID NO: 5188
  source 1..40: mol_type = genomic DNA

SEQ ID NO: 53885 - DNA, 50 bp, Escherichia coli; identical to SEQ ID NO: 21330
  source 1..50: mol_type = genomic DNA

SEQ ID NO: 53886 - protein, 507 aa, Escherichia coli
MKRVISYIRFSSEKQAKGDSLRRQSKMVNDWLKAHPEYYLDQDLSFRDLGVSGFTGKHLKGGLGDFLTAIEKGLVKAGDTLLIESLDRLSRQDIDIASELLRRILRAGVDVVTLSDGEHYTSESLKDPLALIKSILIMQRAHEESLRKAERIQAAWDAKKEAAKAGIKVSKRCPAWLKLNDDRKTFSVIPEKVETVRRCFQLRLEGKSIWAIVKALNDEGHRSMNQYKPGKFGQTSVQDLLKNRSVIGYFTPKGCEEISGYYPAIIDETTFYKVQQLSHYRYGRKPVSDKPLSVNLFKGVIRCSECGHALIITGFSDTRNGIYRCPLRNENRCSAKGLSRKQTDGTLLALLSRLDRFDSDTTNTIDTLKLHREHISSNIEKLVQLSLEIEDLSAITSKLKQLKGELSQVDADIEKETQRLKSIDVGCLSDCDLTTKAGRIEAQLIIKSAVKEVVLNTAKRRCKVTFHNGKVIDLPITENPSEDVTEAIQSLSEVIERGLIDADVVEI

SEQ ID NO: 53887 - DNA, 50 bp, Escherichia coli; identical to SEQ ID NO: 47642
  source 1..50: mol_type = genomic DNA

SEQ ID NO: 53888 - DNA, 40 bp, Escherichia coli; identical to SEQ ID NO: 5188
  source 1..40: mol_type = genomic DNA

SEQ ID NO: 53889 - DNA, 40 bp, Escherichia coli; identical to SEQ ID NO: 5188
  source 1..40: mol_type = genomic DNA

SEQ ID NO: 53890 - DNA, 50 bp, Escherichia coli; identical to SEQ ID NO: 21330
  source 1..50: mol_type = genomic DNA

SEQ ID NO: 53891 - protein, 507 aa, Escherichia coli
MKRVISYIRFSSERQAKGDSLRRQSKMVNDWLKAHPEYYLDQDLSFRDLGVSGFTGKHLKGGLGDFLTAIEKGLVKAGDTLLIESLDRLSRQDVDQASELLRNILRSGVDVVTLSDGEHYTKESLRDPLSLIKSILIMQRAHEESLRKAERIQAAWDAKKEAAKAGIKISRRCPAWLKLNDDRKSFSVIPEKVETVKRCFQLRLEGKSIWEIVRTLNDEGHQTLNQYKAGKFGQTSVQDLLKNRSVIGYFTPKGCEEISGYYPAIIDETTFYKVQQLSYARYGRKPASDKPMAVNLFKGVIRCSECGHALIITGFSDTRNGIYRCPLRNENRCSAKGLSRKQTDGTLLALLSRLDRFDSDMTNTIDTLKLHREHISSNIEKLVQLSLEIEDLSAITSKLRQLKNELSQVDADIEKETQRLKSIDVGCLSDCDLTTKAGRIEAQLIIKSAVKEVVLNTAKRRCKVTFHNGKVIDLSITEDPSEDVTEAIQSLSEVTERGLIDVDEVII

SEQ ID NO: 53892 - DNA, 50 bp, Escherichia coli; identical to SEQ ID NO: 47642
  source 1..50: mol_type = genomic DNA

SEQ ID NO: 53893 - DNA, 40 bp, Escherichia coli; identical to SEQ ID NO: 5188
  source 1..40: mol_type = genomic DNA

SEQ ID NO: 53894 - DNA, 40 bp, Escherichia coli; identical to SEQ ID NO: 5188
  source 1..40: mol_type = genomic DNA

SEQ ID NO: 53895 - DNA, 50 bp, Escherichia coli; identical to SEQ ID NO: 21330
  source 1..50: mol_type = genomic DNA

SEQ ID NO: 53896 - protein, 507 aa, Escherichia coli
MKRAISYIRFSSEKQSRGDSLRRQSKMVTDWLKAHPEYYLDQDLSFRDLGVSGFTGKHLKGGLGDFLTAIEKGLVKAGDTLLIESLDRLSRQNVDRASELLRNILRSGVDVVTLSDGEHYTRESLKDPLALIKSILIMQRAHEESLRKAERIQAAWDAKKEAAKAGIKISRRCPAWLKLNDDRKSFSVIPEKVETVKRCFQLRLEGKSIWEIVRTLNDEGHQTLNQYKAGKFGQTSVQDLLKNRSVIGYFTPKGCEEIAGYFPPIIPETDFYKVQQLSYSRYGRKPASDKPLSVNLFKGVIRCSECGHALIITGFSDTRSGIYRCPLRNENRCSAKGLSRKQTDGTLLTLLSRLDRFDSDMTNTIDTLKLHREHISSNIEKLVQLSLEIEDLSAITSKLKQLKGELSQVDADIEKETQRLKSIDVGCLSDCDLTTKAGRIEAQLIIKSAVKEVVLNTAKRRCKVTFHNGKVIDLPITEDPSEDVTEAIQSLSEVTERGLIDVDEVII

SEQ ID NO: 53897 - DNA, 50 bp, Escherichia coli; identical to SEQ ID NO: 47642
  source 1..50: mol_type = genomic DNA

SEQ ID NO: 53898 - DNA, 40 bp, Escherichia coli; identical to SEQ ID NO: 5188
  source 1..40: mol_type = genomic DNA

SEQ ID NO: 53899 - DNA, 40 bp, Escherichia coli; identical to SEQ ID NO: 5188
  source 1..40: mol_type = genomic DNA

SEQ ID NO: 53900 - DNA, 50 bp, Escherichia coli; identical to SEQ ID NO: 21330
  source 1..50: mol_type = genomic DNA

SEQ ID NO: 53901 - protein, 507 aa, Escherichia coli
MKRVISYIRFSSEKQAKGDSLRRQSKMVTDWLKAHPEYYLDQDLSFRDLGVSGFTGKHLKGGLGDFLTAIEKGLVKAGDTLLIESLDRLSRQAVDRASELLRNILRSGVDVVTLSDGEHYTKESLRDPLSLIKSILIMQRAHEESLRKAERIQAAWDAKKEAAKAGIKISRRCPAWLKLNDDRKSFSVIPEKVETVKRCFQLRLEGKSIWEIVRTLNAEGHQTLNQYKAGKFGQTSVQDLLKNRSVIGYFTPKGCEEISGYYPAIIDETTFYKVQQLSYARYGRKPASDKPMAVNLFKGVIRCSECGHALIITGFSDTRNGIYRCPLRNENRCSAKGLSRKQTDGTLLALLSRLDRFDSDMTNVIDTLKLHREHISSNIEKLVQLSLEIEDLSAITSKLRQLKNELSQVDADIEKETQRLKSIDAGCLSDCDLTTKAGRIEAQLIIKSAVKEVVLNTAKRRCKVTFHNGKIIDLPITENPSEDVTEAIQSLSEVTERGLIDVDVVEI

SEQ ID NO: 53902 - DNA, 50 bp, Escherichia coli; identical to SEQ ID NO: 47642
  source 1..50: mol_type = genomic DNA

SEQ ID NO: 53903 - DNA, 40 bp, Escherichia coli; identical to SEQ ID NO: 5188
  source 1..40: mol_type = genomic DNA

SEQ ID NO: 53904 - DNA, 40 bp, Escherichia coli; identical to SEQ ID NO: 5188
  source 1..40: mol_type = genomic DNA

SEQ ID NO: 53905 - DNA, 50 bp, Escherichia coli; identical to SEQ ID NO: 21330
  source 1..50: mol_type = genomic DNA

SEQ ID NO: 53906 - protein, 507 aa, Escherichia coli
MKRVISYIRFSSERQAKGDSLRRQSKMVNDWLKAHPEYYLDQDLSFRDLGVSGFTGKHLKGGLGDFLTAIEKGLVKAGDTLLIESLDRLSRQAVDRASELLRNILRSGVDVVTLSDGEHYTKESLRDPLSLIKSILIMQRSHEESLRKSERIQAAWDAKKEAAKAGIKVSKRCPAWLKLNDDRKSFSVIPDKVETVKRCFQLRLEGKSIWEIVRTLNAEGHQTLNQYKAGKFGQTSVQDLLKNRSVIGYFTPKGCEEISGYYPAIIDETTFYKVQQLSYARYGRKPASDKPMAVNLFKGVIRCSECGHALIITGFSDTRNGIYRCPLRNENRCSAKGLSRKQTDGTLLALLSRLDRFDSDMTNTIDTLKLHREHISSNIEKLVQLSLEIEDLSAITSKLRQLKNELSQVDADIEKETQRLKSIDVGCLSDCDLTTKAGRIEAQLIIKSAVKEVVLNTAKRRCKVTFHNGKAITLPITENPSDNVTEAIQSLSEVTERGLIDVDEVII

SEQ ID NO: 53907 - DNA, 50 bp, Escherichia coli; identical to SEQ ID NO: 47642
  source 1..50: mol_type = genomic DNA

SEQ ID NO: 53908 - DNA, 40 bp, Escherichia coli; identical to SEQ ID NO: 5188
  source 1..40: mol_type = genomic DNA

SEQ ID NO: 53909 - DNA, 40 bp, Escherichia coli; identical to SEQ ID NO: 5188
  source 1..40: mol_type = genomic DNA

SEQ ID NO: 53910 - DNA, 50 bp, Escherichia coli; identical to SEQ ID NO: 21330
  source 1..50: mol_type = genomic DNA

SEQ ID NO: 53911 - protein, 507 aa, Escherichia coli
MKRVISYIRFSSERQAKGDSLRRQSKMVNDWLKAHPEYYLDQDLSFRDLGVSGFTGKHLKGGLGDFLTAIEKGLVKAGDTLLIESLDRLSRQDVDQASELLRNILRSGVDVVTLSDGEHYTKESLRDPLSLIKSILIMQRAHEESLRKAERIQAAWDAKKEAAKAGIKVSKRCPAWLKLNDDRKSFSVIPEKVATVKRCFQLRLEGKSIWEIVRTLNDEGHQTLNQYKPGKFGQTSVQDLLKNRSVIGYFTPKGREEIAGYFPPIIPETDFYKVQQLSYSRYGRKPASDKPLSVNLFKGVIRCSECGHALIITGFSDTRNGIYRCPLRNENRCNAKGLSRKQTDGTLLALLSRLDRFDSDTTNTIDTLKLHREHLSSNIEKLVQLSLEIEDLNAITNKLKQLKNELSQVDADIEKETQRLKSIDVGCLSDCDLTTKSGRIEAQLIIKSAVKEVVLNTAKRRCKVTFHNGKVIDLPITENPSEDVTEAIQSLSEVTERGLIDVDEVII

SEQ ID NO: 53912 - DNA, 50 bp, Escherichia coli; identical to SEQ ID NO: 47642
  source 1..50: mol_type = genomic DNA

SEQ ID NO: 53913 - DNA, 40 bp, Escherichia coli; identical to SEQ ID NO: 5188
  source 1..40: mol_type = genomic DNA

SEQ ID NO: 53914 - DNA, 40 bp, Escherichia coli; identical to SEQ ID NO: 5188
  source 1..40: mol_type = genomic DNA

SEQ ID NO: 53915 - DNA, 50 bp, Escherichia coli; identical to SEQ ID NO: 21330
  source 1..50: mol_type = genomic DNA

SEQ ID NO: 53916 - protein, 507 aa, Escherichia coli
MKRVISYIRFSSERQAKGDSLRRQSKMVNDWLKAHPEYYLDQDLSFRDLGVSGFTGKHLKGGLGDFLTAIEKGLVKAGDTLLIESLDRLSRQDVDQASELLRNILRSGVDVVTLSDGEHYTRESLRDPLALIKSILIMQRSHEESLRKSERIQAAWNRKKELISEGIKISKRCPAWLKLNDDRKSFSVIPDKVETVKRCFQLRLEGKSIWEIVRTMNAEGHQTLHQHKPGSFGQSSVQDLLKNRSVIGYFTPKGCEEISSYYPSVIDETTFYKVQQLSHSRYGRKPVSDKPLSVNLFKGVIRCSECGHALIITGFSDTRSGIYRCPLRNENRCSAKGLSRKQTDGTLLTLLSRLDRFDSDMTNTIDMLRLHREHISSNIEKLVQLSLEIEDLSAITNKLKQLKNELSQVDADIEKETQRLKSIDVGCLSDCDLTTKAGRIEAQLIIKSAVKEVVLNTAKRRCKVTFHNGRAITLPITENPSEDVTEAIQSLSEVTERGLLDVDEVII

SEQ ID NO: 53917 - DNA, 50 bp, Escherichia coli; identical to SEQ ID NO: 47642
  source 1..50: mol_type = genomic DNA

SEQ ID NO: 53918 - DNA, 40 bp, Escherichia coli; identical to SEQ ID NO: 5188
  source 1..40: mol_type = genomic DNA

SEQ ID NO: 53919 - DNA, 40 bp, Escherichia coli; identical to SEQ ID NO: 5188
  source 1..40: mol_type = genomic DNA

SEQ ID NO: 53920 - DNA, 50 bp, Escherichia coli; identical to SEQ ID NO: 21330
  source 1..50: mol_type = genomic DNA

SEQ ID NO: 53921 - protein, 507 aa, Escherichia coli
MKRAISYIRFSSEKQSRGDSLRRQSKMVTDWLKAHPEYYLDQDLSFRDLGVSGFTGKHLKGGLGDFLTAIEKGLVKAGDTLLIESLDRLSRQDVDQASELLRNILRSGVDVVTLSDGEHYTRESLKDPLALIKSILIMQRAHEESLRKSERIQAAWDAKKEAAKAGIKVSKRCPAWLRLNDDRKSFSVIPEKVETVKRCFQLRLEGKSIWEIVRTLNAEGHRSMNQYKPGKFGQTSVQDLLKNRSVIGYFTPKGCEEISGYFPPIIPETDFYKVQQLSHSRYGKRSVSDKPLSVNLFKGVIRCSECGHALIITGFSDTRNGIYRCPLRNENRCSAKGLSRKQTDGTLLTLLSRLDRFDSNTTNTIDMLRLHREHISNNIEKLVQLSLEIEDLSAITIKLKQLKGELSQVDADIEKETQRLKSIDVGCLSDCDLTTKAGRIEAQLIIKSAVKEVVLNTAKRRCKVTFHNGRAITLPITENPSEDVTEAIQSLSEVTERGLIDVDEVII

SEQ ID NO: 53922 - DNA, 50 bp, Escherichia coli; identical to SEQ ID NO: 47642
  source 1..50: mol_type = genomic DNA

SEQ ID NO: 53923 - DNA, 40 bp, Escherichia coli; identical to SEQ ID NO: 5188
  source 1..40: mol_type = genomic DNA

SEQ ID NO: 53924 - DNA, 40 bp, Escherichia coli; identical to SEQ ID NO: 5188
  source 1..40: mol_type = genomic DNA

SEQ ID NO: 53925 - DNA, 50 bp, Escherichia coli; identical to SEQ ID NO: 21330
  source 1..50: mol_type = genomic DNA

SEQ ID NO: 53926 - protein, 507 aa, Escherichia coli
MKRAISYIRFSSEKQSRGDSLRRQSKMVNDWLKAHPDYYLDQDLSFRDLGVSGFTGKHLKGGLGDFLTAIEKGLVKAGDTLLIESLDRLSRQNVDRASELLRNILRSGVDVVTLSDGEHYTRESLKDPLALIKSILIMQRAHEESLRKAERIQAAWNRKKELISEGIKISKRCPAWLRLNDDRKSFSVIPDKVETVKRCFQLRLEGKSIWEIVRTLNDEGHQSMSQYKPGSFGQTSVQDLLKNRSVIGYFTPKGCEEISGYYPAIIDETTFYKVQQLSHYRYGRKPVSDKPLSVNLFKGVIRCSECGHALIITGFSDTRNGIYRCPLRNENRCSAKGLSRKQTDGTLLTLLSRLDRFDSDMTNVIDTLKLHREHISNNIEKLVQLSLEIEDLSAITIKLKQLKGELSQVDADIEKETQRLKSIDVGCLSDCDLTTKAGRIEAQLIIKSAVKEVVLNTAKRRCKVTFHNGRAITLPITENPSEDVTEAIQSLSEVTERGLIDVDVVAI

SEQ ID NO: 53927 - DNA, 50 bp, Escherichia coli; identical to SEQ ID NO: 47642
  source 1..50: mol_type = genomic DNA

SEQ ID NO: 53928 - DNA, 40 bp, Escherichia coli; identical to SEQ ID NO: 5188
  source 1..40: mol_type = genomic DNA

SEQ ID NO: 53929 - DNA, 40 bp, Escherichia coli; identical to SEQ ID NO: 5188
  source 1..40: mol_type = genomic DNA

SEQ ID NO: 53930 - DNA, 50 bp, Escherichia coli; identical to SEQ ID NO: 21330
  source 1..50: mol_type = genomic DNA

SEQ ID NO: 53931 - protein, 507 aa, Escherichia coli
MKRAISYIRFSSEKQSRGDSLRRQSKMVNDWLKAHPEYYLDQDLSFRDLGVSGFTGKHLKGGLGDFLTAIEKGLVKAGDTLLIESLDRLSRQDIDIASELLRRILRAGVDVVTLSDGEHYTSESLKDPLALIKSILIMQRAHEESLRKSERIQAAWDAKKEAAKAGIKVSKRCPAWLKLNDDRKSFSVIPEKVETVKRCFQLRLEGKSIWEIVRTLNDEGHQTLNQYKAGKFGQTSVQDLLKNRSVIGYFTPKGCCEIAGYYPSIIPESDFYKVQQLSHSRHGRKPVSAKPLSVNLFKGVIRCSECGHALIITGFSDTRNGIYRCPLRNENRCSAKGLSRKQTDGTLLALLSRLDRFDSDTTNTIDMLRLHREHISSNIEKLVQLSLEIEDLSAITSKLKQLKGELSQVDADIEKETQRLKSIDVGCLSDCDLTTKAGRIEAQLIIKSAVKEVVLNTAKRRCKVTFHNSKSITLPITENPSDNVTEAIQSLSEVTERGLIDVDEVII

SEQ ID NO: 53932 - DNA, 50 bp, Escherichia coli; identical to SEQ ID NO: 47642
  source 1..50: mol_type = genomic DNA

SEQ ID NO: 53933 - DNA, 40 bp, Escherichia coli; identical to SEQ ID NO: 5188
  source 1..40: mol_type = genomic DNA

SEQ ID NO: 53934 - DNA, 40 bp, Escherichia coli; identical to SEQ ID NO: 5188
  source 1..40: mol_type = genomic DNA

SEQ ID NO: 53935 - DNA, 50 bp, Escherichia coli; identical to SEQ ID NO: 21330
  source 1..50: mol_type = genomic DNA

SEQ ID NO: 53936 - protein, 507 aa, Escherichia coli
MKRVISYIRFSSERQAKGDSLRRQSKMVNDWLKAHPEYYLDESLTFRDLGVSGFTGKHLKGGLGDFLTAIEKGLVKAGDTLLIESLDRLSRQNVDRASELLRNILRSGVDVVTLSDGEHYTRESLKDPLALIKSILIMQRAHEESLRKAERIQAAWDAKKEAAKAGIKISRRCPAWLKLNDDRKSFSVIPEKVETVKRCFQLRLEGKSIWEIVRTLNDEGHQSMSQYKPGSFGQSSVQDLLKNRSVIGYFTPKGCEEIAGYYPAIIDETTFYKVQQLSHSRYGKRSVSAKPLSVNLFKGVIRCSECGHALIITGFSDTRNGIYRCPLRNENRCSAKGLSRKQTDGTLLALLSRLDRFDSDTTNTIDTLKLHREHISSNIEKLVQLSLEIEDLNAITSKLKQLKGELSQVDADIEKETQRLKSIDVGCLSDCDLTTKAGRIEAQLIIKSAVKEVVLNTAKRRCKVTFHNGKSITLSITENPSEDVTEAIQSLSEVTERGLIDVDEVII

SEQ ID NO: 53937 - DNA, 50 bp, Escherichia coli; identical to SEQ ID NO: 47642
  source 1..50: mol_type = genomic DNA

SEQ ID NO: 53938 - DNA, 40 bp, Escherichia coli; identical to SEQ ID NO: 5188
  source 1..40: mol_type = genomic DNA

SEQ ID NO: 53939 - DNA, 40 bp, Escherichia coli; identical to SEQ ID NO: 5188
  source 1..40: mol_type = genomic DNA

SEQ ID NO: 53940 - DNA, 50 bp, Escherichia coli; identical to SEQ ID NO: 21330
  source 1..50: mol_type = genomic DNA

SEQ ID NO: 53941 - protein, 507 aa, Escherichia coli
MKRAISYIRFSSEKQSRGDSLRRQSKMVNDWLKAHPEYYLDQDLSFRDLGVSGFTGKHLKGGLGDFLTAIEKGLVKAGDTLLIESLDRLSRQNVDRASELLRNILRSGVDVVTLSDGEHYTRESLKDPLALIKSILIMQRSHEESLRKSERIQAAWNRKKELISEGIKISKRCPAWLKLNDDRKSFSVIPEKVETVKRCFQLRLEGKSIWEIVRTMNAEGHQTLHQHKAGSFGQTSVQDLLKNRSVIGYFTPKGCEEISGYYPAIIDETTFYKVQQLSYARYGRKPASDKPLSVNLFKGVIRCSECGHALIITGFSDTRNGIYRCPLRNENRCSAKGLSRKQTDGTLLALLSRIDRFDSDMTNTIDTLKLHREHISSNIEKLVQLSLEIEDLSAITSKLKQLKGELSQVDADIEKETQRLKSIDVGCLSDCDLTTKAGRIEAQLIIKSAVKEVVLNTAKRRCKVTFHNGKVIDLPITEDPSEDVTEAIQSLSEVTERGLIDVDEVII

SEQ ID NO: 53942 - DNA, 50 bp, Escherichia coli; identical to SEQ ID NO: 47642
  source 1..50: mol_type = genomic DNA

SEQ ID NO: 53943 - DNA, 40 bp, Escherichia coli; identical to SEQ ID NO: 5188
  source 1..40: mol_type = genomic DNA

SEQ ID NO: 53944 - DNA, 40 bp, Escherichia coli; identical to SEQ ID NO: 5188
  source 1..40: mol_type = genomic DNA

SEQ ID NO: 53945 - DNA, 50 bp, Escherichia coli; identical to SEQ ID NO: 21330
  source 1..50: mol_type = genomic DNA

SEQ ID NO: 53946 - protein, 507 aa, Escherichia coli
MKRVISYIRFSSEKQAKGDSLRRQSKMVNDWLKAHPEYYLDQDLSFRDLGVSGFTGKHLKGGLGDFLTAIEKGLVKAGDTLLIESLDRLSRQDIDIASELLRRILRAGVDIVTLSDGEHYTRESLKDPLALIKSILIMQRAHEESLRKAERIQAAWDAKKEAAKAGIKISKRCPAWLKLNDDRKTFSVIPEKVETVKRCFQLRLEGKSIWEIVRTLNDEGHQTLNQYKAGKFGQTSVQDLLKNRSVIGYFTPKGCEEIAGYFPPIIPETDFYKVQQLSYSRYGRKPASDKPLSVNLFKGVIRCSECGHALIITGFSDTRNGIYRCPLRNENRCSAKGLSRKQTDGTLLALLSRLDRFDSDTTNTVDMLRLHREHISSNIEKLVQLSLEIEDLSAITIKLKQLKGELSQVDADIEKETQRLKSIDVGCLSDCDLTTKAGRIEAQLIIKSAVKEVVLNTAKRRCKVTFHNSKSITLSITENPSEDVTEAIQSLSEVTERGLIDVDVVAI

SEQ ID NO: 53947 - DNA, 50 bp, Escherichia coli; identical to SEQ ID NO: 47642
  source 1..50: mol_type = genomic DNA

SEQ ID NO: 53948 - DNA, 40 bp, Escherichia coli; identical to SEQ ID NO: 5188
  source 1..40: mol_type = genomic DNA

SEQ ID NO: 53949 - DNA, 40 bp, Escherichia coli; identical to SEQ ID NO: 5188
  source 1..40: mol_type = genomic DNA

SEQ ID NO: 53950 - DNA, 50 bp, Escherichia coli; identical to SEQ ID NO: 21330
  source 1..50: mol_type = genomic DNA

SEQ ID NO: 53951 - protein, 507 aa, Escherichia coli
MKRVISYIRFSSERQAKGDSLRRQSKMVTDWLKAHPEYYLDQDLSFRDLGVSGFTGKHLKGGLGDFLTAIEKGLVKAGDTLLIESLDRLSRQDVDQASELLRNILRSGVDVVTLSDGEHYTRESLKDPLALIKSILIMQRAHEESLRKAERIQAAWDAKKEAAKAGIKISRRCPAWLKLNDDRKSFSVIPEKVETVKRCFQLRLEGKSIWEIVRTLNAEGHQTLNQYKAGKFGQTSVQDLLKNRSVIGYFTPKGCEEISGYYPAIIDETTFYKVQQLSYARYGRKPASDKPMAVNLFKGVIRCSECGHALIITGFSDTRNGIYRCPLRNENRCSAKGLSRKQTDGTLLALLSRLDRFDSDMTNTIDTLKLHREHISSNIEKLVQLSLEIEDLSAITSKLRQLKNELSQVDADIEKETQRLKSIDVGCLSDCDLTTKAGRIEAQLIIKSAVKEVVLNTAKRRCKVTFHNGKSITLPITENPSEDVTEAIQSLSEVTERGLIDVDEVIV

SEQ ID NO: 53952 - DNA, 50 bp, Escherichia coli; identical to SEQ ID NO: 47642
  source 1..50: mol_type = genomic DNA

SEQ ID NO: 53953 - DNA, 40 bp, Escherichia coli; identical to SEQ ID NO: 5188
  source 1..40: mol_type = genomic DNA

SEQ ID NO: 53954 - DNA, 40 bp, Escherichia coli; identical to SEQ ID NO: 5188
  source 1..40: mol_type = genomic DNA

SEQ ID NO: 53955 - DNA, 50 bp, Escherichia coli; identical to SEQ ID NO: 21330
  source 1..50: mol_type = genomic DNA

SEQ ID NO: 53956 - protein, 507 aa, Escherichia coli
MKRAISYIRFSSEKQSRGDSLRRQSKMVTDWLKAHPEYYLDQDLSFRDLGVSGFTGKHLKGGLGDFLTAIEKGLVKAGDTLLIESLDRLSRQNVDQASELLRNILRSGVDVVTLSDGEHYTKESLRDPLSLIKSILIMQRAHEESLRKAERIQAAWDAKKEAAKAGIKISRRCPAWLKLNDDRKSFSVIPEKVETVKRCFQLRLEGKSIWEIVRTLNAEGHQTLNQYKAGKFGQTSVQDLLKNRSVIGYFTPKGCEEISGYYPAIIDETTFYKVQQLSYARYGRKPASDKPMAVNLFKGVIRCSECGHALIITGFSDTRNGIYRCPLRNENRCSAKGLSRKQTDGTLLALLSRLDRFDSDMTNTIDTLKLHREHISSNIEKLVQLSLEIEDLSAITSKLRQLKNELSQVDADIEKETQRLKSIDVGCLSDCDLTTKAGRIEAQLIIKSAVKEVVLNTAKRRCKVTFHNGKTITLPITENPSDNVTEAIQSLSEVTERGLIDVDEVII

SEQ ID NO: 53957 - DNA, 50 bp, Escherichia coli; identical to SEQ ID NO: 47642
  source 1..50: mol_type = genomic DNA

SEQ ID NO: 53958 - DNA, 40 bp, Escherichia coli; identical to SEQ ID NO: 5188
  source 1..40: mol_type = genomic DNA

SEQ ID NO: 53959 - DNA, 40 bp, Escherichia coli; identical to SEQ ID NO: 5188
  source 1..40: mol_type = genomic DNA

SEQ ID NO: 53960 - DNA, 50 bp, Escherichia coli; identical to SEQ ID NO: 21330
  source 1..50: mol_type = genomic DNA

SEQ ID NO: 53961 - protein, 507 aa, Escherichia coli
MKRAISYIRFSSEKQSRGDSLRRQSKMVNDWLKAHPEYYLDQDLSFRDLGVSGFTGKHLKGGLGDFLTAIEKGLVKAGDTLLIESLDRLSRQAVDRASELLRNILRSGVDIVTLSDGEHYTSESLKDPLALIKSILIMQRAHEESLRKSERIQAAWDAKKEAAKAGIKVSKRCPAWLRLNDDRKSFSVIPEKVETVKRCFQLRLEGKSIWEIVRTLNDEGHRSMNQYKPGKFGQTSVQDLLKNRSVIGYFTPKGCCEIADYYPSIIPESDFYKVQQLSHSRYGKRSVSDKPLSVNLFKGVIRCSECGHALIITGFSDTRNGIYRCPLRNENRCSAKGLSRKQTDGTLLTLLSRLDRFDSDTTNTIDTLKLHREHISNNIEKLVQLSLEIEDLSAITIKLKQLKGELSQVDADIEKETQRLKSIDVGCLSDCDLTTKAGRIEAQLIIKSAVKEVVLNAAKRRCKVTFHNSKSITLPITENPSEDVTEAIQSLSEVTEKGLIDVDVVEI

SEQ ID NO: 53962 - DNA, 50 bp, Escherichia coli
  source 1..50: mol_type = genomic DNA
tagtgtatttagatcttgatgatttttattagacacgtttaaatacacca

SEQ ID NO: 53963 - DNA, 40 bp, Escherichia coli; identical to SEQ ID NO: 5188
  source 1..40: mol_type = genomic DNA

SEQ ID NO: 53964 - DNA, 40 bp, Escherichia coli; identical to SEQ ID NO: 5188
  source 1..40: mol_type = genomic DNA

SEQ ID NO: 53965 - DNA, 50 bp, Escherichia coli; identical to SEQ ID NO: 21330
  source 1..50: mol_type = genomic DNA

SEQ ID NO: 53966 - protein, 507 aa, Escherichia coli
MKRVISYIRFSSERQAKGDSLRRQSKMVNDWLKAHPEYYLDQDLSFRDLGVSGFTGKHLKGGLGDFLTAIEKGLVKAGDTLLIESLDRLSRQDVDQASELLRNILRSGVDVVTLSDGEHYTRESLKDPLALIKSILIMQRSHEESLRKSERIQAAWNRKKELISEGIKISKRCPAWLKLNDDRKSFSVIPEKVETVKRCFQLRLEGKSIWEIVRTMNAEGHQTLNQYKAGSFGQTSVQDLLKNRSVIGYFTPKGCEEISGYYPSVIDETTFYKVQQLSHSRYGRKPVSDKPLSVNLFKGVIRCSECGHALIITGFSDTRSGIYRCPLRNENRCSAKGLSRKQTDGTLLTLLSRLDRFDSDTTNTIDMLRLHREHISSNIEKLVQLSLEIEDLNAITSKLKQLKGELSQVDADIEKETQRLKSIDVGCLSDCDLTTKAGRIEAQLIIKSAVKEVVLNTAKRRCKVTFHNGRAITLPITENPSEDVTEAIQSLSEVTERGLLDVDEVII

SEQ ID NO: 53967 - DNA, 50 bp, Escherichia coli; identical to SEQ ID NO: 47642
  source 1..50: mol_type = genomic DNA

SEQ ID NO: 53968 - DNA, 40 bp, Escherichia coli; identical to SEQ ID NO: 5188
  source 1..40: mol_type = genomic DNA

SEQ ID NO: 53969 - DNA, 40 bp, Escherichia coli; identical to SEQ ID NO: 5188
  source 1..40: mol_type = genomic DNA

SEQ ID NO: 53970 - DNA, 50 bp, Escherichia coli; identical to SEQ ID NO: 21330
  source 1..50: mol_type = genomic DNA

SEQ ID NO: 53971 - protein, 507 aa, Escherichia coli
MKRAISYIRFSSEKQSRGDSLRRQSKMVNDWLKAHPEYYLDQDLSFRDLGVSGFTGKHLKGGLGDFLTAIEKGLVKAGDTLLIESLDRLSRQAVDRASELLRNILRSGVDIVTLSDGEHYTSESLKDPLALIKSILIMQRAHEESLRKSERIQAAWDAKKEAAKAGIKVSRRCPAWLRLNDDRKSFSVIPEKVETVKRCFQLRLEGKSIWEIVRTLNAEGHQTLNQYKAGKFGQTSVQDLLKNRSVIGYFTPKGCEEISGYYPAIIDETTFYKVQQLSHSRYGKRSVSDKPLSVNLFKGVIRCSECGHALIITGFSDTRNGIYRCPLRNENRCNAKGLSRKQTDGTLLALLSRLDRFDSDMTNVIDALKLHREHISNNIEKLVQLSLEIEDLSAITIKLKQLKGELSQVDADIEKETQRLKSIDVGCLSDCDLTTKAGRIEAQLIIKSAVKEVVLNAAKRRCKVTFHNSKSITLPITENPSEDVTEAIQSLSEVTEKGLIDVDVVEI

SEQ ID NO: 53972 - DNA, 50 bp, Escherichia coli; identical to SEQ ID NO: 47642
  source 1..50: mol_type = genomic DNA

SEQ ID NO: 53973 - DNA, 40 bp, Escherichia coli; identical to SEQ ID NO: 5188
  source 1..40: mol_type = genomic DNA

SEQ ID NO: 53974 - DNA, 40 bp, Escherichia coli; identical to SEQ ID NO: 5188
  source 1..40: mol_type = genomic DNA

SEQ ID NO: 53975 - DNA, 50 bp, Escherichia coli; identical to SEQ ID NO: 21330
  source 1..50: mol_type = genomic DNA

SEQ ID NO: 53976 - protein, 507 aa, Escherichia coli
MKRVISYIRFSSERQAKGDSLRRQSKMVNDWLKAHPEYYLDQDLSFRDLGVSGFTGKHLKGGLGDFLTAIEKGLVKAGDTLLIESLDRLSRQDIDIASELLRNILRSGVDVVTLSDGEHYTRESLRDPLALIKSILIMQRAHEESLRKSERIQAAWDAKKEAAKAGIKVSKRCPAWLKLNDDRKSFSVIPEKVETVKRCFQLRLEGKSIWEIVRTLNDEGHQSMSQYKPGKFGQTSVQDLLKNRSVIGYFTPKGCEEIAGYYPAIIDETTFYKVQQLSHSRYGRKPVSGKPLSVNLFKGVIRCSECGHALIITGFSDTRNGIYRCPLRNENRCSAKGLSRKQTDGTLLTLLSRLDRFDSDTTNTIDMLRLHREHISSNIEKLVQLSLEIEDLSAITSKLKQLKNELSQVDADIEKETQRLKSIDVGCLSDCDLTTKAGRIEAQLIIKSAVKEVVLNTAKRRCKVTFHNGKLIDLPITETPSDNVTEAIQSLSEVTERGLIDVDEVII

SEQ ID NO: 53977 - DNA, 50 bp, Escherichia coli; identical to SEQ ID NO: 47642
  source 1..50: mol_type = genomic DNA

SEQ ID NO: 53978 - DNA, 40 bp, Escherichia coli; identical to SEQ ID NO: 21333
  source 1..40: mol_type = genomic DNA

SEQ ID NO: 53979 - DNA, 40 bp, Escherichia coli; identical to SEQ ID NO: 21333
  source 1..40: mol_type = genomic DNA

SEQ ID NO: 53980 - DNA, 50 bp, Escherichia coli; identical to SEQ ID NO: 21330
  source 1..50: mol_type = genomic DNA

SEQ ID NO: 53981 - protein, 507 aa, Escherichia coli
MKRVISYIRFSSEKQSRGDSLRRQSKMVNDWLKAHPEYYLDQDLSFRDLGVSGFTGKHLKGGLGDFLTAIEKGLVKAGDTLLIESLDRLSRQAVDRASELLRNILRSGVDVVTLSDGEHYTSESLKDPLALIKSILIMQRAHEESLRKSERIQAAWNRKKELISEGIKVSKRCPAWLRLNDDRKSFSVIPEKVETVKRCFQLRLEGKSIWEIVRTLNDEGHQSMSQYKPGKFGQTSVQDLLKNRSVIGYFTPKGCEEISGYYPAIIDETTFYKVQQLSHYRYGRKPVSDKPLSVNLFKGVIRCSECGHALIITGFSDTRNGIYRCPLRNENRCSAKGLSRKQTDGTLLTLLSRLDRFDSDTTNTIDTLKLHREHISSNIEKLVQLSLEIEDLSAITIKLRQLKGELSQVDADIEKETQRLKSIDVGCLSDCDLTTKAGRIEAQLIIKSAVKEVVLNTAKRRCKVTFHNGKVIDLPITENPSEDVTEAIQSLSEVTERGLIDVDVVEI

SEQ ID NO: 53982 - DNA, 50 bp, Escherichia coli; identical to SEQ ID NO: 47642
  source 1..50: mol_type = genomic DNA

SEQ ID NO: 53983 - DNA, 40 bp, Escherichia coli; identical to SEQ ID NO: 5188
  source 1..40: mol_type = genomic DNA

SEQ ID NO: 53984 - DNA, 40 bp, Escherichia coli; identical to SEQ ID NO: 5188
  source 1..40: mol_type = genomic DNA

SEQ ID NO: 53985 - DNA, 50 bp, Escherichia coli; identical to SEQ ID NO: 21330
  source 1..50: mol_type = genomic DNA

SEQ ID NO: 53986 - protein, 595 aa, Vibrio fluvialis
MTQPYIYSYSRISSKKQQRGRGLEIQRERESIERLKQEFGLQESPIVLSDSGKSAFHGLHVKDGKLGWFLKAVENGDVAPGSILVVQGFDRFSREDIISATNQLTNITARGVMIYSAMERIHLGHPDDGNQTRADKLKEAMGAFTRAYSESQAKSYRVNELTELAIAEFKQGVRDEKNGRVKAIKVVGNDVWWIDNSDGTIRKRDGYFQLAKEIIERRTRGESVHKLCQWLNDIDRPGYLPCPTNRSDKRGAKGRWAREIVHRMSEPRRSKVEGSSVTARPILGEKLIRDEVLVGYYPALVTEEQYYALMDTVKNRARPKRHDCRGESLLSGINVYCAHCNSRVTRTMETGGILNYRCGHSTCDSHWSKRGELLESALLKTCIDKVWRPERKKNYLDPCRVIEGELAIVNEKIKELERDLSEEGYSKVLARAVRDLEAKEQTLRGKLEEAKTLNAVTLRSQPTELAERWKQVTDDTLDMNNDLGRRNVRELIYQSCEYIKIGRPSVDAVCDDDLPEKRRFILDIDIKFKDGVHRFIRLGAKSIIHVSGTDFVSVKGRTAERLSDIEADNNMYQYEQYMDSGWLENEFSSFNPDEE

SEQ ID NO: 53987 - DNA, 50 bp, Vibrio fluvialis
  source 1..50: mol_type = genomic DNA
aacccgcatggtgtgattttgcgctgaccatatatcacaccatgctggtt

SEQ ID NO: 53988 - DNA, 40 bp, Vibrio fluvialis
  source 1..40: mol_type = genomic DNA
atcttctaatgctcccggttggccgtaagcaccattgtta

SEQ ID NO: 53989 - DNA, 40 bp, Vibrio fluvialis
  source 1..40: mol_type = genomic DNA
atcttctaatgctcccggtgggccgtaagcaccattgtta

SEQ ID NO: 53990 - DNA, 50 bp, Vibrio fluvialis
  source 1..50: mol_type = genomic DNA
tggcagcatatcaggattctgtgtggcacttatatcctttgatgctggtt

SEQ ID NO: 53991 - protein, 540 aa, Paenibacillus glucanolyticus
MAIVSTETLLSLGIEQIINYLRKSRADEDYEKKTGEDVLKAQKELMDRVLEPLGIPFDQRLEVGSGDKISTRPVFQTVIKDLEAKKYQLIAVKEISRMGRGSYKDMGLIYDLIVDNRIFILTPYKLYDPRNPADLRQIRFELFMSREEFETTRERLFGGRVGNAMEGRWVAGAAPFGYTYNKTTKRLEINEEQAKVIQAIFDFYVNGIIDDDGSRRDVSFRSLGTYLERKTAFTTPKGKRNWSPTYLRTLLTTDRFMGTLKFRTTKRVDGKRIDLPEDEHVVAENAIPAIIDRETWDRAQEKIRDSRHKPHNKMDFSPCELAGICRCSACGKKMVRQYSVQKYKTTSGAVSTYHKEFLWCTNPGCTFVKYRAVEESLLQALQRILDLNDKSFKKEVEALLAVSKKESSIDIDHTQYIEQRAKEIKNRMNFIYEKYESGRYSDEVFDERMAEVEKEMKQLEDLRGNLGQQTQNDAEINLDAVRLNIKNALEGYRNSVDKTDRNNILRKVFEDVEVHLIERGRGRIPAKFKLKIRIDQQLLT

SEQ ID NO: 53992 - DNA, 50 bp, Paenibacillus glucanolyticus
  source 1..50: mol_type = genomic DNA
tagtattatgagtacacaaccaattcataggtagtgtactcattaatcta

SEQ ID NO: 53993 - DNA, 40 bp, Paenibacillus glucanolyticus
  source 1..40: mol_type = genomic DNA
ggtatgggccacaatcagctcatccgcgctgatcagcgca

SEQ ID NO: 53994 - DNA, 40 bp, Paenibacillus glucanolyticus
  source 1..40: mol_type = genomic DNA
ggtatgggccacaatcagccaatccgcgctgatcagcgca

SEQ ID NO: 53995 - DNA, 50 bp, Paenibacillus glucanolyticus
  source 1..50: mol_type = genomic DNA
taaggttatatctgcacaaccactcaatgggtaatttttctatttactta

SEQ ID NO: 53996 - protein, 509 aa, Tritonibacter mobilis; identical to SEQ ID NO: 19781

SEQ ID NO: 53997 - DNA, 50 bp, Tritonibacter mobilis; identical to SEQ ID NO: 19782
  source 1..50: mol_type = genomic DNA

SEQ ID NO: 53998 - DNA, 40 bp, Tritonibacter mobilis
  source 1..40: mol_type = genomic DNA
gtgtttgcttggaaagcaaatggtgcggtcgagaagactc

SEQ ID NO: 53999 - DNA, 40 bp, Tritonibacter mobilis
  source 1..40: mol_type = genomic DNA
gtgtttgcttggaaagcaaaaggtgcggtcgagaagactc

SEQ ID NO: 54000 - DNA, 50 bp, Tritonibacter mobilis
  source 1..50: mol_type = genomic DNA
tgcttcatgtactaaattttaaaaaagttacacctgcagatttttatctg

SEQ ID NO: 54001 - protein, 510 aa, Eggerthella lenta
MSRKLIRVAIYARFSCDKQRDASIEDQLYECNKYAERHGYTVVMQYCDYAMSGRSDDRPNFLRMIEDAKTGMFEIILVWKMDRFARNIEEQYYYEHVLRKNGGVTFESVKENIAGTSIEATSTKALNALFAEVRSRQSAEDTMRGMLGKARKCQYLGYPLYGYSHDGDKITLDPEKAPIAKRIHVDFLSGVAPKQILDWLLSIGVKTARGKDPGYGFVVSMLKNVRYAGVYMWGVKKDEAGNDVLDDLGRPVPLVYIEDGMPAIVSMSQKLSCIEKLGFRRRLKTNADYLLSGKLICSKCKEPMHGETAIGGSGIEYWRYSCRGKRKACLGSFNKETVEQGVVSGVREMLRDAALVDYLIDRHIQFRDERQSKATIEAVRKDIRAVKKQRDNLLSAVAEGLDFNHVKPKIAALDAQERALEKRIEELKREQNSVSREELRAFFSDMSKGALSDEQITLTFVSKVWLYESTAVAVMNFDSCESTQYEIELALKKHERPDQQAVRETSKWCP

SEQ ID NO: 54002 - DNA, 50 bp, Eggerthella lenta
  source 1..50: mol_type = genomic DNA
ccgttcgtgaaacttccaaatggtgccccaatcgcatgtcaaaacgaacg

SEQ ID NO: 54003 - DNA, 40 bp, Eggerthella lenta
  source 1..40: mol_type = genomic DNA
cgttttgcgatcagatggtgcccccggcgcgattcgaacg

SEQ ID NO: 54004 - DNA, 40 bp, Eggerthella lenta
  source 1..40: mol_type = genomic DNA
cgttttgcgatcagatggtctccccggcgcgattcgaacg

SEQ ID NO: 54005 - DNA, 50 bp, Eggerthella lenta
  source 1..50: mol_type = genomic DNA
ccattagtggtcaatccaaattttctcccaaccccagatacctaccaacc

SEQ ID NO: 54006 - protein, 510 aa, Gordonibacter pamelaeae; identical to SEQ ID NO: 54001

SEQ ID NO: 54007 - DNA, 50 bp, Gordonibacter pamelaeae; identical to SEQ ID NO: 54002
  source 1..50: mol_type = genomic DNA

SEQ ID NO: 54008 - DNA, 40 bp, Gordonibacter pamelaeae
  source 1..40: mol_type = genomic DNA
gtcgcgagaaatcgatggtgcccccggcgcgattcgaacg

SEQ ID NO: 54009 - DNA, 40 bp, Gordonibacter pamelaeae
  source 1..40: mol_type = genomic DNA
gtcgcgagaaatcgatggtctccccggcgcgattcgaacg

SEQ ID NO: 54010 - DNA, 50 bp, Gordonibacter pamelaeae; identical to SEQ ID NO: 54005
  source 1..50: mol_type = genomic DNA

SEQ ID NO: 54011 - protein, 532 aa, Methylotenera mobilis
MHVALYARVSTVRQADNDLSIPDQLRQLNEWCKANGHLVVHEYIEPGASATDDKRPIFQQLINDALQKPQTFEAIIIHSFSRFFRDAIQFGVYERKLGKNKVKVFSITQQTSDDSAGEMMRRIINTFDEYNSKENSKHTSRAMKENARQGFFNGSKPPFGYIAASTETDGSHGRKKKKLEINEAEAGIVRIIYDLYLNGYQGKQMGCKEIAKHLTDKGLLMRGKSWRIQKVHKILSDPLYMGDYYFNVIDSKTKQKRPPTEWVKTNIPVIIDAEKFEQARTRRLLRAPAKTPPRITTSPTLLTGLLKCGVCGGSMTLVTGKSGRYKYYKCTTRQNKGNHACSSSNHPMEATDQQVLNKLAEKVFTPERVHSMMTALRKRIKSSKDTQQQRVNELNRQLKVVEERQHRLLDAIETGIVDLDETVQRRAQQLKSAREALLIEQAGVRREHSLPVDQLKASQVDAFAKTLKAKLLAKDSAIAKSYLNLLVDEIVVKDNTATIRGSYGALAHAVTIDDKKVGHLKQVPTSISVWCA

SEQ ID NO: 54012 - DNA, 50 bp, Methylotenera mobilis
  source 1..50: mol_type = genomic DNA
gtgcccacttctatatctgtttggtgcgcccaaggtaatgaagatgggca

SEQ ID NO: 54013 - DNA, 40 bp, Methylotenera mobilis
  source 1..40: mol_type = genomic DNA
gtaagacttttttatatggcgcgcccggcgggattcgaac

SEQ ID NO: 54014 - DNA, 40 bp, Methylotenera mobilis
  source 1..40: mol_type = genomic DNA
gtaagacttttttatatggtgcgcccggcgggattcgaac

SEQ ID NO: 54015 - DNA, 50 bp, Methylotenera mobilis
  source 1..50: mol_type = genomic DNA
gagcccatagtactatctgtttggtgtggccctggtgggtgagaaggggt

SEQ ID NO: 54016 - protein, 507 aa, Burkholderia cepacia
MELDASLSLRDEGLSAYHQRHVRQGALGVFLRAVEDGQVPAGSVLIVEGLDRLSRAEPLQAQAQLAQIVSAGITVVTASDGREYNRERLKAQPMDLVYSLLVMIRAHEESDTKSKRVKAAIRRQCQGWIAGTWRAPIRVGKDPHWVRETEAGGFELADDRAAAVRLVIEMFKQGHGAVRIVRELADRGLKITESGRSASSHIYRLLANRMLIGEKSVEVDGEIFRLEGYYPALLTATEFADLRYLAEQRGRRKGKGEIPGVVTGLGITYCGYCGAAIVAQNIMGRRRAADGRPYPGHRRLHCVTYSQSAGCKVSGSCSVVPVERALMLYCSDQINLTRLLEGDSGAASLSAQLASARQRVVELEAQVQRVTDALLLDDGEAPAAVLRRVRELESQLEDERRDVESFEHQLAASASNVTPAAADAWRELVHGVEHLDYDARMLARQLVADTFSKIVVFQSGFRPDDDDGTIGLLLIAKRGTIRMLHVDRKTGEWRAAEDIDVNKMLAD

SEQ ID NO: 54017 - DNA, 50 bp, Burkholderia cepacia
  source 1..50: mol_type = genomic DNA
gtgggtatatattccaccgctttcgggcacccgagggataccatacctat

SEQ ID NO: 54018 - DNA, 40 bp, Burkholderia cepacia
  source 1..40: mol_type = genomic DNA
ggaatcgacgagggctttcgggcacccgagggatacgaac

SEQ ID NO: 54019 - DNA, 40 bp, Burkholderia cepacia
  source 1..40: mol_type = genomic DNA
ggaatcgacgagggctttcctgcacccgagggatacgaac

SEQ ID NO: 54020 - DNA, 50 bp, Burkholderia cepacia
  source 1..50: mol_type = genomic DNA
gtgggaatgctattgacctctttcctgtagcccaggaaaggccttcctag

SEQ ID NO: 54021 - protein, 525 aa, Erysipelotrichaceae bacterium
MTDHRKTAVYIRLSAEDDNVDGRAKKESDSVTSQRILLKSFAIDELGVAESDILEYVDDGVSGTHFKRQGFQQLQDDMKSGEIGCVVVKDFSRFGRDYLEVGFYIEYIFPLLQIRFISINDSYDSAASSGMTGGMNVALQNLVYNMYSLDLSKKISSALQTRTRNGTRLPVNARYGYKKGKDGRLEVDPEAAKVVKMIFKMAAEGTSFADITRELNRQAIATCDEQKLSRGDQVQFQRFDTIKKKHWSPTTVAAIVRDEIYIGTRIWGKTRCSMHTGHKAILNDETEWVRLENHHTAIIDRALFEKANEMHPKKKRSVAESRTNFTLERRKKQPALLLCANCGHSLLKETEHLLKCSDARTNGDPVCRSLVIRREPLEENILGLVHQYAASMLEKEKKVSAKRQCDYKEINTSELQKQSRQLTSEKMKLYDDYKDGRIDRDLYKQRAEKISVQLDEIKRKIEDAENSKKLLEQNELSDKIKLKDFLGIQKFDTEKLREIIKVIRVHSQDEIEIEWNFDDIFSEQR

SEQ ID NO: 54022 - DNA, 50 bp, Erysipelotrichaceae bacterium; identical to SEQ ID NO: 18562
  source 1..50: mol_type = genomic DNA

SEQ ID NO: 54023 - DNA, 40 bp, Erysipelotrichaceae bacterium
  source 1..40: mol_type = genomic DNA
cttgccacatatcacaccacatacgctacgccatacgttc

SEQ ID NO: 54024 - DNA, 40 bp, Erysipelotrichaceae bacterium
  source 1..40: mol_type = genomic DNA
cttgccacatatcacaccatgtacgctacgccatacgttc

SEQ ID NO: 54025 - DNA, 50 bp, Erysipelotrichaceae bacterium
  source 1..50: mol_type = genomic DNA
tttaacacactaatgactcatgcatgtggtagagttcttccacttacaag

SEQ ID NO: 54026 - protein, 525 aa, Dorea formicigenerans; identical to SEQ ID NO: 48501

SEQ ID NO: 54027 - DNA, 50 bp, Dorea formicigenerans; identical to SEQ ID NO: 47427
  source 1..50: mol_type = genomic DNA

SEQ ID NO: 54028 - DNA, 40 bp, Dorea formicigenerans
  source 1..40: mol_type = genomic DNA
cttgccacatatcacatcgcatacgctacgccatacgttc

SEQ ID NO: 54029 - DNA, 40 bp, Dorea formicigenerans
  source 1..40: mol_type = genomic DNA
cttgccacatatcacatcgtgtacgctacgccatacgttc

SEQ ID NO: 54030 - DNA, 50 bp, Dorea formicigenerans; identical to SEQ ID NO: 54025
  source 1..50: mol_type = genomic DNA

SEQ ID NO: 54031 - protein, 525 aa, Roseburia faecis; identical to SEQ ID NO: 18561

SEQ ID NO: 54032 - DNA, 50 bp, Roseburia faecis; identical to SEQ ID NO: 47427
  source 1..50: mol_type = genomic DNA

SEQ ID NO: 54033 - DNA, 40 bp, Roseburia faecis
  source 1..40: mol_type = genomic DNA
gatgccaaacatcacacctcatgtatgccgacacacgtat

SEQ ID NO: 54034 - DNA, 40 bp, Roseburia faecis
  source 1..40: mol_type = genomic DNA
gatgccaaacatcacaccttgtgtatgccgacacacgtat

SEQ ID NO: 54035 - DNA, 50 bp, Roseburia faecis; identical to SEQ ID NO: 54025
  source 1..50: mol_type = genomic DNA

SEQ ID NO: 54036 - protein, 525 aa, Ruminococcus lactaris; identical to SEQ ID NO: 316

SEQ ID NO: 54037 - DNA, 50 bp, Ruminococcus lactaris; identical to SEQ ID NO: 47427
  source 1..50: mol_type = genomic DNA

SEQ ID NO: 54038 - DNA, 40 bp, Ruminococcus lactaris
  source 1..40: mol_type = genomic DNA
gatgccaaacattacacctcatgtatgccgacacacgtat

SEQ ID NO: 54039 - DNA, 40 bp, Ruminococcus lactaris
  source 1..40: mol_type = genomic DNA
gatgccaaacattacaccttgtgtatgccgacacacgtat

SEQ ID NO: 54040 - DNA, 50 bp, Ruminococcus lactaris; identical to SEQ ID NO: 54025
  source 1..50: mol_type = genomic DNA

SEQ ID NO: 54041 - protein, 525 aa, Ruminococcus gnavus
MTDLRKTAVYIRLSAEDDNVDGRAKKESDSVTSQRILLKSFVIDELGVAESDILEYVDDGVSGTHFKRQGFQQLQDDMKSGEIGCVVVKDFSRFGRDYLEVGFYIEYIFPLLQIRFISINDSYDSAASSGMTGGMNVALQNLVYNMYSLDLSKKISSALQTRTRNGTRLPVNARYGYKKGKDGRLEVDPEAAKVVKMIFRMAAEGTSFADITRELNRQAIATCDEQKLSRGDQVQFQRFDTIKKKHWSPTTVAAIVRDEIYIGTRIWGKTRCSMHTGHKAVLNDETEWVRLENHHTAIIDRALFEKANEMHPKKKRSVAESRTNFTLERRKKQPALLLCANCGHSLLKETEHLLKCSDARTNGDPVCRSLVIRREPLEENILGLVHQYVASMLEKEKKVSSNRQCDYKEINTAELQKQSRQLTSEKMKLYDDYKDGRIDCDSYKQRARKISVQLEEIKRKIEDAENSKKLLEQNELSDKIKLKDFLGIQKFDTEKLREIIKVIRVHSQDEIEIEWNFDYIFSEQR

SEQ ID NO: 54042 - DNA, 50 bp, Ruminococcus gnavus; identical to SEQ ID NO: 47427
  source 1..50: mol_type = genomic DNA

SEQ ID NO: 54043 - DNA, 40 bp, Ruminococcus gnavus
  source 1..40: mol_type = genomic DNA
gttaccaaagttttcagctcatgtcatgcgtcataccgcc

SEQ ID NO: 54044 - DNA, 40 bp, Ruminococcus gnavus
  source 1..40: mol_type = genomic DNA
gttaccaaagttttcagcttgtgtcatgcgtcataccgcc

SEQ ID NO: 54045 - DNA, 50 bp, Ruminococcus gnavus; identical to SEQ ID NO: 54025
  source 1..50: mol_type = genomic DNA

SEQ ID NO: 54046 - protein, 507 aa, Escherichia albertii
MKRAISYIRFSSEKQSRGDSLRRQSKLVTDWLKARPEYHLDESLTFRDLGKSAFSGKHLKGGLGDFLTAIEKGLVRAGDTLLIESLDRLSRQDVDRASELLRNILRSGVDVVTLSDNEHYTKESLKDPLALIKSILIMQRAHEESLRKSERIQAAWDAKKEAAKAGIKISKRCPAWLKLNNDRKSFSVIPEKVATVKRCFQLRLEGKSILEIVRTLNSEGHQTLNQYKAGKFSQTSVQDLLKNRSVIGYFTPKGCEEISNYYPSIIPETDFYKVQQLSYPRYGRKPASDKPLSVNLFKGVIRCSECGHALIITGFSDTRNGIYRCPLRNENRCSAKGLSRKQTDGTLLALLSRLDRFENGTTNAIDTLKLHREHISNNIEKLVQLSLEVEDLTAITSKLKQLKGELSQVDADIEKEAQRLKSIDVGCLSDCDLSTKAGRIEAQLIIRSAVKEVVLNTAKRRCRVTFHNGKVIDLSITENPAQDITEAEKSLTEIAEKGLLDVDAFQL

SEQ ID NO: 54047 - DNA, 50 bp, Escherichia albertii; identical to SEQ ID NO: 48307
  source 1..50: mol_type = genomic DNA

SEQ ID NO: 54048 - DNA, 40 bp, Escherichia albertii
  source 1..40: mol_type = genomic DNA
tggcgttaatagggtaatactggacagccgcccggttcat

SEQ ID NO: 54049 - DNA, 40 bp, Escherichia albertii
  source 1..40: mol_type = genomic DNA
tggcgttaatagggtaataaaggacagccgcccggttcat

SEQ ID NO: 54050 - DNA, 50 bp, Escherichia albertii
  source 1..50: mol_type = genomic DNA
ctttgcatagtagttgtgataataaaaatcacacacacacacacacacac

SEQ ID NO: 54051 - protein, 507 aa, Escherichia albertii
MKRAISYIRFSSEKQSRGDSLRRQSKLVTDWLKARPEYHLDESLTFRDLGVSGFTGKHLKGGLGDFLTAIEKGLVKAGDTLLIESLDRLSRQDVDRASELLRNILRSGVDVVTLSDNEHYTKESLKDPLALIKSILIMQRAHEESLRKSERIQAAWDAKKEAAKAGIKISKRCPAWLKLNNDRKSFSVIPEKVATVKRCFQLRLEGKSILEIVRTLNSEGHQTLNQYKAGKFSQTSVQDLLKNRSVIGYFTPKGCEEISNYYPSIIPETDFYKVQQLSYPRYGRKPASDKPLSVNLFKGVIRCSECGHALIITGFSDTRNGIYRCPLRNENRCSAKGLSRKQTDGTLLALLSRLDRFENGTTNAIDTLKLHREHISNNIEKLVQLSLEVEDLTAITSKLKQLKGELSQVDADIEKEAQRLKSIDTGSLSDCDLSTKAGRIEAQLIIRSAVKEVVLNTAKRRCRVTFHNGKVIDLSITENPAQDITEAEKSLTEIAEKGLLDVDAFQL

SEQ ID NO: 54052 - DNA, 50 bp, Escherichia albertii; identical to SEQ ID NO: 48307
  source 1..50: mol_type = genomic DNA

SEQ ID NO: 54053 - DNA, 40 bp, Escherichia albertii; identical to SEQ ID NO: 54048
  source 1..40: mol_type = genomic DNA

SEQ ID NO: 54054 - DNA, 40 bp, Escherichia albertii; identical to SEQ ID NO: 54049
  source 1..40: mol_type = genomic DNA

SEQ ID NO: 54055 - DNA, 50 bp, Escherichia albertii; identical to SEQ ID NO: 54050
  source 1..50: mol_type = genomic DNA

SEQ ID NO: 54056 - protein, 507 aa, Escherichia albertii
MKRAISYIRFSSEKQSRGDSLRRQSKLVTDWLKARPEYHLDESLTFRDLGVSGFTGKHLKGGLGDFLTAIEKGLVKAGDTLLIESLDRLSRQDVDRASELLRNILRSGVDVVTLSDNEHYTKESLKDPLSLIKSILIMQRAHEESLRKSERIQAAWDAKKEAAKAGIKISKRCPAWLKLNNDRKSFSVIPEKVATVKRCFQLRLEGKSILEIVRTLNSEGHQTLNQYKAGKFSQTSVQDLLKNRSVIGYFTPKGCEEISNYYPSIIPETDFYKVQQLSYPRYGRKPASDKPLSVNLFKGVIRCSECAHALIITGFSDTRNGIYRCPLRNENRCSAKGLSRKQTDGTLLALLSRLDRFENGTTNAIDTLKLHREHISNNIEKLVQLSLEVEDLTAITSKLKQLKGELSQVDADIEKEAQRLKSIDTGSLSDCDLSTKAGRIEAQLIIRSAVKEVVLNTAKRRCRVTFHNGKVIDLSIVENPAQDITEAEKSLTEIAEKGLLDVDAFQL

SEQ ID NO: 54057 - DNA, 50 bp, Escherichia albertii; identical to SEQ ID NO: 48307
  source 1..50: mol_type = genomic DNA

SEQ ID NO: 54058 - DNA, 40 bp, Escherichia albertii; identical to SEQ ID NO: 54048
  source 1..40: mol_type = genomic DNA

SEQ ID NO: 54059 - DNA, 40 bp, Escherichia albertii; identical to SEQ ID NO: 54049
  source 1..40: mol_type = genomic DNA

SEQ ID NO: 54060 - DNA, 50 bp, Escherichia albertii; identical to SEQ ID NO: 54050
  source 1..50: mol_type = genomic DNA

SEQ ID NO: 54061 - protein, 507 aa, Escherichia albertii; identical to SEQ ID NO: 48306

SEQ ID NO: 54062 - DNA, 50 bp, Escherichia albertii; identical to SEQ ID NO: 48307
  source 1..50: mol_type = genomic DNA

SEQ ID NO: 54063 - DNA, 40 bp, Escherichia albertii; identical to SEQ ID NO: 54048
  source 1..40: mol_type = genomic DNA

SEQ ID NO: 54064 - DNA, 40 bp, Escherichia albertii; identical to SEQ ID NO: 54049
  source 1..40: mol_type = genomic DNA

SEQ ID NO: 54065 - DNA, 50 bp, Escherichia albertii; identical to SEQ ID NO: 54050
  source 1..50: mol_type = genomic DNA

SEQ ID NO: 54066 - protein, 507 aa, Escherichia albertii; identical to SEQ ID NO: 48306

SEQ ID NO: 54067 - DNA, 50 bp, Escherichia albertii; identical to SEQ ID NO: 48307
  source 1..50: mol_type = genomic DNA

SEQ ID NO: 54068 - DNA, 40 bp, Escherichia albertii
  source 1..40: mol_type = genomic DNA
tggcattaatagggtaatactggacagccgcccggttcat

SEQ ID NO: 54069 - DNA, 40 bp, Escherichia albertii
  source 1..40: mol_type = genomic DNA
tggcattaatagggtaataaaggacagccgcccggttcat

SEQ ID NO: 54070 - DNA, 50 bp, Escherichia albertii; identical to SEQ ID NO: 54050
  source 1..50: mol_type = genomic DNA

SEQ ID NO: 54071 - protein, 599 aa, Phycicoccus sp
MTASSPLPAFGGYERMAEATPTNWRGAGSGDVSGSRGSQSPHQADRSPVALRAADSVTEGRHQGLVSRQVRIVTYARVSTAEQVEKGTSLSDQRRRLAAAVTSRAAELVEHFDDAGVSGVLDSRPGLDRLLARVEAGGVDAVMATKIDRISRSAVGLLNLVEKLREHGCHVVLIDEGLDTSTPAGDLTSGVLGVIGGWERRRISERTQQGRRAAAQNEGRFVSSTPPFGYRVVSAPARRGKLLVRDDAQAETIRTIFQRLIVDGSKANTVVAELNSAGMAPARASAWSATSLRRWALRQPPLRAASGIWIFDGISVSIPAILTQAESAQWFAWQQGRRGPQQQSRGPYLLSGVLRMPCGRGAMGRTAGTQRPTYSCRDHYLPIADPSRHGACLNVPVDVVDGAVIEHVRQVLAAPEVLQQAAERYLLGPTQPEGGSVALEAQLLDLDGQITADSAALRAEGLSGRALGAALVPLHRQQQDIVRELRSLHRRAATAAHVRNDVQLARFVATARQALSEDTVSTWRPLLSILHAIVTIDGYTACTHCHGTGFLGLGSGDGRRWPLRCPTCLKGQTPDLTVELDNVTAFVIADRIVKVTGPK

SEQ ID NO: 54072 - DNA, 50 bp, Phycicoccus sp
  source 1..50: mol_type = genomic DNA
gaagtatgctgcgaacatgacgcgagcgttccctgttagtcgcccactcg

SEQ ID NO: 54073 - DNA, 40 bp, Phycicoccus sp
  source 1..40: mol_type = genomic DNA
cgcgaaagcgcaggccgcgagggtgcccactgcatactcc

SEQ ID NO: 54074 - DNA, 40 bp, Phycicoccus sp
  source 1..40: mol_type = genomic DNA
cgcgaaagcgcaggccgcgcaggtgcccactgcatactcc

SEQ ID NO: 54075 - DNA, 50 bp, Phycicoccus sp
  source 1..50: mol_type = genomic DNA
gaagtaagaagctcaaatgaagcccaagttccctgtgcacctctctctct

SEQ ID NO: 54076 - protein, 506 aa, Streptococcus pneumoniae
MNRIATYLRLSEEDYDKADESVSIVNQRDYIRNYIENENSLKGCEIEEYIDDGYSATNTNRPSFLRLIDDIKAGRINTIIVKDMSRFSRDYILLGDYLSNIFPFLKIRFIAINDNYDSINEDGNGIDTDTQFKTLYYDLFSKELSEKVRNSVKQIKSQGKNTNWAAPFGYIKDPQDKYHIIIDEKTAFIVKEVFDLMLEGYSCIQIANIFNEKGYITRSERKEELKLSDYTKNLITGSKVKKRAWTSVCISQITRNELYTGDYVYNKYKETRIGGRKKILLPEEEWKVIHNTHEAIISREIFDEVKKIKEKRKFYVYTGKKNRSIFSDKIFCKECGRHMGFRSDSRQKKNTDKVYKYRNYYCYFCKSSRTPNNVKERKIIEFIKPKLERFKIKNGVNEERMIHPENSREDLLKEIDLLNSNLQIIYENYKKHILSKEKYLQEKALIQNKKEQQENKLEEVKSDKSYSHKEFNANSLDEDSLLKAYVDSCIDRIIVSRSGKIEIIEK

SEQ ID NO: 54077 - DNA, 50 bp, Streptococcus pneumoniae
  source 1..50: mol_type = genomic DNA
tatagcaattacttgacattgtagggggataatgctataatgatgacagt

SEQ ID NO: 54078 - DNA, 40 bp, Streptococcus pneumoniae
  source 1..40: mol_type = genomic DNA
aatcggaaagagtggaagcggaaagacgacgctgctgaat

SEQ ID NO: 54079 - DNA, 40 bp, Streptococcus pneumoniae
  source 1..40: mol_type = genomic DNA
aatcggaaagagtggaagcagaaagacgacgctgctgaat

SEQ ID NO: 54080 - DNA, 50 bp, Streptococcus pneumoniae
  source 1..50: mol_type = genomic DNA
tatagcatagtggggacagtgtagagggataatgtttgggggatagagta

SEQ ID NO: 54081 - protein, 506 aa, Fusobacterium necrophorum
MNRIAIYLRLSEEDYKKTDESISIVNQRDYIRSYIENENSLKDNEIEEYIDDGYSATNTNRPSFLRLIDDIKSGRVGTIIVKDMSRFSRDYILLGDYLSNILPFLKIRFIAINDNYDSINENGNGIDTDTQFKTLYYDLFSKELSEKVRGAVKQIKSQGKNTNWAAPFGYIKDPEDKYHIIIDKKTAFIVKEAFDLLLKGYSCIQVANIFNEKGYITRSERKEELKLSDYTGNLVTGSKVKKRVWTNPSISQITSNELYTGDYVYNKYKETKIGGRKRILLPEEEWKIIPNTHEAIVSREVFDKVKKIKEKRSFGGYTGNKNRSIFSDKIFCKECGRHMSFRSDSRQKKNSDKIYKYRSYYCNLCKAEKTPNNIREKDIIELIKPKLKDFKIQNTLKEDKVIDNEKVKEDILNEISMLNSNLQIIYENHKKKIILKEVYLKEKSLIQDKKILLESKLEELKSEKIDSKKETDIDVLDEEGLLKAYVRSLIDKIIVSRSGEIEIVEK

SEQ ID NO: 54082 - DNA, 50 bp, Fusobacterium necrophorum
  source 1..50: mol_type = genomic DNA
tatagcaattgcttgacattgtagggggataatgctataatgatgatagt

SEQ ID NO: 54083 - DNA, 40 bp, Fusobacterium necrophorum
  source 1..40: mol_type = genomic DNA
tgttggagaaagcggtagtggaaaatctaccgttctccgt

SEQ ID NO: 54084 - DNA, 40 bp, Fusobacterium necrophorum
  source 1..40: mol_type = genomic DNA
tgttggagaaagcggtagtagaaaatctaccgttctccgt

SEQ ID NO: 54085 - DNA, 50 bp, Fusobacterium necrophorum; identical to SEQ ID NO: 54080
  source 1..50: mol_type = genomic DNA

SEQ ID NO: 54086 - protein, 468 aa, Mycobacteroides abscessus; identical to SEQ ID NO: 51296

SEQ ID NO: 54087 - DNA, 50 bp, Mycobacteroides abscessus; identical to SEQ ID NO: 51297
  source 1..50: mol_type = genomic DNA

SEQ ID NO: 54088 - DNA, 40 bp, Mycobacteroides abscessus; identical to SEQ ID NO: 51888
  source 1..40: mol_type = genomic DNA

SEQ ID NO: 54089 - DNA, 40 bp, Mycobacteroides abscessus; identical to SEQ ID NO: 51888
  source 1..40: mol_type = genomic DNA

SEQ ID NO: 54090 - DNA, 50 bp, Mycobacteroides abscessus
  source 1..50: mol_type = genomic DNA
atgtccctatccagcgaggtctttcccaagaccctgctctgtagctgcca

SEQ ID NO: 54091 - protein, 503 aa, Flavonifractor plautii
MNNRIDAIYARQSVDKKDSISIESQIEFCKYELKGGNCKEYTDKGYSGKNTDRPKFQELVRDIKRGLIAKVVVYKLDRISRSILDFANMMELFQQYNVEFVSSTEKFDTSTPMGRAMLNICIVFAQLERETIQKRVTDAYYSRSQRGFKMGGKAPYGFHTEPIKMDGINTKKLVVNPDEAANIRLMFEMYAQPTTSYGDITRYFAEQGILFNGKELIRPTLAQMLRNPVYVQADLDVYEFFKSQGTVIVNDAADFTGMNGCYLYQGRDVKPSKKNDLKDQMLVLAPHEGIVPSDIWLTCRKKLMNNMKIQSARKATHTWLAGKIKCGNCGYALMSIFNPSGKQYLRCTKRLDNKSCPGCGKIITSELEAVVYQQMIKKLASYKTLTGRKKAAKANPKIAALQVELLHVDSEIEKLVDSLTGANNVLLSYVNVKIAELDGRKQELVKQIAELTVEAISPEQVNQISGYLDTWDNVSFDDKRRVVDLMITTVAATSDSLNITWKI

SEQ ID NO: 54092 - DNA, 50 bp, Flavonifractor plautii; identical to SEQ ID NO: 12
  source 1..50: mol_type = genomic DNA

SEQ ID NO: 54093 - DNA, 40 bp, Flavonifractor plautii
  source 1..40: mol_type = genomic DNA
taatttgtggtacaggagcttcccgtgctggaaatacctt

SEQ ID NO: 54094 - DNA, 40 bp, Flavonifractor plautii
  source 1..40: mol_type = genomic DNA
taatttgtggtacaggagctacccgtgctggaaatacctt

SEQ ID NO: 54095 - DNA, 50 bp, Flavonifractor plautii
  source 1..50: mol_type = genomic DNA
gtgaagtctaagtttaagtgtccttaagtgaagttttattggaacaccac

SEQ ID NO: 54096 - protein, 548 aa, Rhodococcus opacus
MSTSADPSRVLGRLRISRATEESTSIERQREIITRWADAHGHTVVGWAVDEDVSGSVDPFDTPALGPWLTDPSKAHEWDILAAWKLDRLGRNAIQLNKLFGWTLEHGKTLVSCSESMDLSTTTGRMLAAIIAGIAEGELEAIRERTLASRAKLREVARWPGGKPPFGYTAVKRTDGQGWRLEVDLLARSVVRRIVDSVLDDQPFTATARQLNDEGILTPGDYYRTVRAGTPSLYRVDGIEPRSKWAPTTIRQLLRSKALRGHVHHNGETVRGDDGQPLQMAEPLVTTDEWELIQAYLDRRAESRKGIKRSESSPLSGVAVCLVCGNPLHHSRHTTKGHQYRYYRCPDKHTTQIPAEYLEELVEESFLRDVADLEVRERVWVPGDSRDADLKDAQSALDELAKALGGMRSAQAVQRIHEQLRAVDARITELESTPAREARWEYRATGGTYLDAWEAADTDGRRELLLRSGITVAINLNTGGVRRSKFHDGNWSVDIRTPEGFYEALGVEMPEHVRQRLAVDPLTKVLTEEEWRAAERELEAELGKTEGA

SEQ ID NO: 54097 - DNA, 50 bp, Rhodococcus opacus
  source 1..50: mol_type = genomic DNA
ttgggtggatgctgtggagctactccacaaacatcacgttgaacacaaca

SEQ ID NO: 54098 - DNA, 40 bp, Rhodococcus opacus
  source 1..40: mol_type = genomic DNA
ttgggtgggattcggggttcgtggaacatcactcggaaca

SEQ ID NO: 54099 - DNA, 40 bp, Rhodococcus opacus
  source 1..40: mol_type = genomic DNA
ttgggtgggattcggggtttctggaacatcactcggaaca

SEQ ID NO: 54100 - DNA, 50 bp, Rhodococcus opacus
  source 1..50: mol_type = genomic DNA
ttgggtggagatgaaaatgttccttcacaaacagctgctccaacaaatca

SEQ ID NO: 54101 - protein, 541 aa, Klebsiella quasipneumoniae
MPKAISYIRFSTKIQSVGDSTKRQSKYINDWLKRNPDYYLDESLRFQDLGISGFSGANAKSGAFGEFLAAVESGYIEAGSVLLVESLDRVSRQDIDTAGEQLRKILRSGVEVVTLVDNEWYTKESLKDSLSMIKAMLVMERAHEESAMKSTRLRSMWAGKRERAAKGEIMSKRCAAWLKVSEDRSHFEFIPENVKAVQRVFQLRLEGLSHIKIAKQMNDEGFYTLNQHKSVKGGWSQSSVTELLSNRSVIGFKVPSKSMAVKGVSEIPNYYPSIITDEQFYAVQQLKQGSGRKPSSDLPLLTNLFKGVLRCSECGFIVVVAGVSAKRSGIYKCSMKSEGRCNSVGFSRLQTDRALVQGLLYNTNRLSLNRDNGSAIGSLQSELEQLQKQRERLIKLAMLADDTESMAKDLKALNSQIKDAEKAVSEVHQREQSSQLETVSHLDLTVKKDRIEAQIITKRIVKEIRLNTAQKKCDVFLHNGLKLLNFPLDRVVDGAQWIEILPLIDGDEFDFGGFTTKPRHIALEEAPEWVKEMEEQSNYLL

SEQ ID NO: 54102 - DNA, 50 bp, Klebsiella quasipneumoniae
  source 1..50: mol_type = genomic DNA
gtgtatcaatagaaaggcctcttcaggattacacctttcttatgatacac

SEQ ID NO: 54103 - DNA, 40 bp, Klebsiella quasipneumoniae
  source 1..40: mol_type = genomic DNA
atggaccgggcggctgtcgaggatcacgcggttgacgttg

SEQ ID NO: 54104 - DNA, 40 bp, Klebsiella quasipneumoniae
  source 1..40: mol_type = genomic DNA
atggaccgggcggctgtcgctgatcacgcggttgacgttg

SEQ ID NO: 54105 - DNA, 50 bp, Klebsiella quasipneumoniae
  source 1..50: mol_type = genomic DNA
ctgagtcaagccagtgcccttttcctgattacgcctttctcatcatccag

SEQ ID NO: 54106 - protein, 543 aa, Pseudomonas aeruginosa
MGKNGARVYSYLRFSDPRQATGSSADRQLAYASAWASKHGMELDATLTLRDEGLSAYHETHVKQGALGAFLRAVDEGRIPAGSVLIVEGLDRLSRAEPLLAQAQLGQIVNAGITVVTASDGREYNREGLKAEPMNLVYSLLVMIRAHEESDTKSKRVKAAVRRQCEAWVTGSYRGRIVSGKDPQWLAWDGDSWQFIPERVEAVRFALDAYRSGIGAARLVRLMHEKGMVLSDWGIAAQQVYRLVRLPALRGAKRISIDGEDFMLEDYYPRLLSDEEFSELETLVGQRYRRRGKDEIVGIVTGIGITRCGYCGTALVAQNLMQRVKADGSLEDGHRRLHCVSYSKNGGCNGGSCSSVPIERAVLAYCSDQMNLQRLLEPSSAGEDLRPRLVEAQKGVAEIERQLERVTDALLADDSGAAPLAFVRKARELEEDLERRRSAVQALEQELVAKSASAPAAGASKWAELAERAKSMADAEAREQARQLVMDTFETLVVYMRGVIPNPKGRYIDVMMKSRAGQTRWIRVDRRTGVWKEGADRPTTRRP

SEQ ID NO: 54107 - DNA, 50 bp, Pseudomonas aeruginosa
  source 1..50: mol_type = genomic DNA
agtatattttcctattcgcaggggcaccctaacgaaacccatcctatact

SEQ ID NO: 54108 - DNA, 40 bp, Pseudomonas aeruginosa
  source 1..40: mol_type = genomic DNA
gtcgaccagcgccttggggcatccaagactgacgaagccg

SEQ ID NO: 54109 - DNA, 40 bp, Pseudomonas aeruginosa
  source 1..40: mol_type = genomic DNA
gtcgaccagcgccttggggtttccaagactgacgaagccg

SEQ ID NO: 54110 - DNA, 50 bp, Pseudomonas aeruginosa
  source 1..50: mol_type = genomic DNA
agtatgtttttatcctcacaggagttccacaaagtaggttttcttattct

SEQ ID NO: 54111 - protein, 515 aa, Bacillus pseudomycoides
MKTAIYLRKSRADLEAEARGEGETLAKHRSTLLKIAKEMNLNVLSVREEIVSGESLVKRPEMLALLEEIEDNKYDVVLCMDMDRLGRGGMKEQGIILETFKRSNTKIMTPRKTYDLNDEWDEEYSEFEAFMARKELKIITRRMQRGRIASVEAGNYLGTHAPYGYDIHRLNKRERTLTINLEEASVVRMIFEWYANEDMGANAIMRKLNELGYKSKLGNDWNPYSILDMLKNNVYIGKVTWQKRKEVKRPDATKRSCTRQDKSEWIIADGKHDPIIPESLFEKAQEKLNTRYHVPYNTNGLKNPLAGIIRCGKCGYSMVQRYPKNRKHTMDCKHRGCENKSSYTELIEKRLLEALKEWYINYKADFEKNKQDESTKETQIIQMNETALRKLEKELVDVQKQKNNLHDLLERGVYTVDMFLERSNVVSNRINEITETMENLRKEIKTEITKEKVKKDTIPQVEHVLDLYFKTDDPQKKNSLLKSVLEKAVYTKEKWQRLDDFKLVLYPKLPQDDDK

SEQ ID NO: 54112 - DNA, 50 bp, Bacillus pseudomycoides
  source 1..50: mol_type = genomic DNA
tgtcgtcatcttgttggtgtaattaggtttacaccaacatgatgacaaca

SEQ ID NO: 54113 - DNA, 40 bp, Bacillus pseudomycoides
  source 1..40: mol_type = genomic DNA
tgtcgccattaaacgcataaggtttacaccattaaggcca

SEQ ID NO: 54114 - DNA, 40 bp, Bacillus pseudomycoides
  source 1..40: mol_type = genomic DNA
tgtcgccattaaacgcatattgtttacaccattaaggcca

SEQ ID NO: 54115 - DNA, 50 bp, Bacillus pseudomycoides
  source 1..50: mol_type = genomic DNA
tttcattattttcataatgaaatgttattaacacaattttcatgacaaca

SEQ ID NO: 54116 - protein, 515 aa, Bacillus pseudomycoides
MKTAIYLRKSRADLEAEARGEGETLAKHRSTLLKIAKEKNLNVLAVREEIVSGESLVKRPEMLALLEEIEDNKYDIVLCMDMDRLGRGGMKEQGIILETFKRSNTKIMTPRKTYDLNDEWDEEYSEFEAFMARKELKIITRRMQRGRIASVEAGNYLGTHAPYGYDIHRLNKRERTLTINLEEASVVRMIFEWYANEDMGANAIMRKLNELGYKSKLGNDWNPYSILDMLKNNVYIGKVTWQKRKEVKRPDATKRSCTRQDKSEWIIADGKHDPIIPESLFEKAQEKLNTRYHVPYNTNGLKNPLAGIIRCGKCGYSMVQRYPKNRKHTMDCKHRGCENKSSYTELIEKRLLEALKEWYINYKADFEKNKQDESTKETQIIQMNETALRKLEKELVDVQKQKNNLHDLLERGVYTVDMFLERSNVVSNRINEITETMENLRKEIKTEITKEKVKKDTIPQVEHVLDLYFKTDDPQKKNSLLKSVLEKAVYTKEKWQRLDDFKLVLYPKLPQDDDK

SEQ ID NO: 54117 - DNA, 50 bp, Bacillus pseudomycoides; identical to SEQ ID NO: 54112
  source 1..50: mol_type = genomic DNA

SEQ ID NO: 54118 - DNA, 40 bp, Bacillus pseudomycoides; identical to SEQ ID NO: 54113
  source 1..40: mol_type = genomic DNA

SEQ ID NO: 54119 - DNA, 40 bp, Bacillus pseudomycoides; identical to SEQ ID NO: 54114
  source 1..40: mol_type = genomic DNA

SEQ ID NO: 54120 - DNA, 50 bp, Bacillus pseudomycoides; identical to SEQ ID NO: 54115
  source 1..50: mol_type = genomic DNA

SEQ ID NO: 54121 - protein, 484 aa, Bacillus cereus
MKTLKYAVYVRVSTDRDEQVSSVENQIDICRYWLEKNGYEWDPNAVYFDDGISGTAWLERHAMQLILEKARRNELDTVVFKSIHRLARDLRDALEIKEILIGHGIRLVTIEENYDSLYEGGNDIKFEMFAMFAAQLPKTLSVSISAAMQAKARRGEVIGKPGLGYDVIDKRLVINEKEAEVVREIFDLSKKGFGYKKIASILNDKGIYTKSGQLWSDTTIAKVLKNQKYKGDLVLNRYKTVKVDGRKKRIYTPKDRLTIIEDHYPAIVSKELWNEVNNNRVSQKKVKQNMRNEFRGMIFCNHCGGSITVKYSGKCSKKNKKEWVYLKCSNFLRFNQCVNFNPIYYDEIREIIIYRLKQKEKELEIHFNPKIHEKREAKSIEIKKDIKLLKAKKEKLIDLYVEGLIDKDVFSKRDLNFENEIKEQELELLKLMDQNKRVNEEQQIKKAFSMLDEEKDMHEVFKILIKKITLSKDKYVEIEYTFSL

SEQ ID NO: 54122 - DNA, 50 bp, Bacillus cereus
  source 1..50: mol_type = genomic DNA
agttggttattggttaccgtaagatttgttacagtaaccaataaccaact

SEQ ID NO: 54123 - DNA, 40 bp, Bacillus cereus
  source 1..40: mol_type = genomic DNA
ggttgggggattggtatcgttatacacggtttaacaactt

SEQ ID NO: 54124 - DNA, 40 bp, Bacillus cereus
  source 1..40: mol_type = genomic DNA
ggttgggggattggtatcgtaatacacggtttaacaactt

SEQ ID NO: 54125 - DNA, 50 bp, Bacillus cereus
  source 1..50: mol_type = genomic DNA
aggtggctacagtctacagtaagttattgtacattttaaaataactaaca

SEQ ID NO: 54126 - protein, 481 aa, Bacillus mycoides
MKYAVYVRVSTDRDEQISSVQNQIDICRYWLEKNGYEWDSNAVYFDDGISGTAWLERHAMQLILEKARRNELDTVVFKSIHRLARDLRDALEIKEILIGHGIRLVTIEENYDSLYEGGNDIKFEMFAMFAAQLPKTLSVSISAAMQAKARRGEAIGKPGLGYDVIDKRLVINEKEAEVVRGIFDLSKKGFGYKKIASILNDKGIYTKFGKLWSDTTIAKVLKNQKYKGDLVSNRYKTVKMDGRKKRIHTPKDRLTIIEDHYPAIVSKELWNAVNNNRISQKKTKQDMRNEFRGMIFCNHCGGSITVKYSGRYSKKNKKEWVYLKCSNFLRYNQCVNFNPIYYDEIREVIIYRLKQKEKELEIHFNPKIHEKREAKSMEIKKHIKLLKAKKEKLIDLYVDGLIDKDVFSKRDLNFENEIKEQELELLKLMDQNKRMKEDQQIKKAFSMLDEEKDMHEIFKILIKKITLSKDKYIEIEYTFSL

SEQ ID NO: 54127 - DNA, 50 bp, Bacillus mycoides; identical to SEQ ID NO: 54122
  source 1..50: mol_type = genomic DNA

SEQ ID NO: 54128 - DNA, 40 bp, Bacillus mycoides
  source 1..40: mol_type = genomic DNA
ggttgggggattggtatcgttatacacggattgacaactt

SEQ ID NO: 54129 - DNA, 40 bp, Bacillus mycoides
  source 1..40: mol_type = genomic DNA
ggttgggggattggtatcgtaatacacggattgacaactt

SEQ ID NO: 54130 - DNA, 50 bp, Bacillus mycoides; identical to SEQ ID NO: 54125
  source 1..50: mol_type = genomic DNA

SEQ ID NO: 54131 - protein, 582 aa, Clostridioides difficile; identical to SEQ ID NO: 7596

SEQ ID NO: 54132 - DNA, 50 bp, Clostridioides difficile; identical to SEQ ID NO: 44242
  source 1..50: mol_type = genomic DNA

SEQ ID NO: 54133 - DNA, 40 bp, Clostridioides difficile
  source 1..40: mol_type = genomic DNA
tgtcgtcttacccgcaccgtttcttcctagcaatccgtaa

SEQ ID NO: 54134 - DNA, 40 bp, Clostridioides difficile
  source 1..40: mol_type = genomic DNA
tgtcgtcttacccgcaccgactcttcctagcaatccgtaa

SEQ ID NO: 54135 - DNA, 50 bp, Clostridioides difficile
  source 1..50: mol_type = genomic DNA
ttttttctagcctcctatccattcaccggttcattcacttttaaacaatc

SEQ ID NO: 54136 - protein, 655 aa, Vibrio diabolicus
MKPTIITYLRYSSKQQADGLSEFRQSEINRKFVEKFCAEHDVDLNEVISLKDLGVSAYRGLNLTLGSFSQTIKKFKSGEIKKRFNEDGEINTYLIVESLDRITRTGPFKSTQIFTELLEYTNIVVLADGEKKIYSKKSIDSTHGMMDLFMALISLQRSHTESLMKEYRSRKSWEKKREDLLNYFTLPEEGRVGLERPKNATAMCPFWLTAKKDGRGYDFIPENKKVMDFLIEKLLDGNGMTRAVRLLNDEIDAGNLKPKLKKANRQTRHFRAAAYSGLFNSEISTVKGDYLLTESYYPTEDDVEQGKYPEKHLGKRVRKEVAVLKNYYPALMTESQAAYIRKMMDERRSAGTKPNKSIKNLAQGILRCPLCNSTYIKSKDRRNIYLRCNLSREGLCKAKVIKHGVFEHNLLQFCKGLNINKIISNQASDQALDSSLKELEQKMIPLKVRKSELEDDIEQIVKNISSIKIPSLLEKVQDDYLAKENELKKVVQEIDLIETSIMKLQQQIAMSDGDNSLQELIDLTLDENADDEIRQRFNVELKKVVKSMTVLYRDTEDNPFGYHMISIQFLDGVHRLIPVHEKMTDKIHNILPYQDAVKVDSVDFSETVILPTDYLEGLESGKYPHLDGMAKYYQENPAKYLKLKYQIDQSQEIYE

SEQ ID NO: 54137 - DNA, 50 bp, Vibrio diabolicus; identical to SEQ ID NO: 46347
  source 1..50: mol_type = genomic DNA

SEQ ID NO: 54138 - DNA, 40 bp, Vibrio diabolicus; identical to SEQ ID NO: 51908
  source 1..40: mol_type = genomic DNA

SEQ ID NO: 54139 - DNA, 40 bp, Vibrio diabolicus
  source 1..40: mol_type = genomic DNA
aacggcaccaagcccaatgaaaatggtactaatggccgct

SEQ ID NO: 54140 - DNA, 50 bp, Vibrio diabolicus
  source 1..50: mol_type = genomic DNA
cacagaactgcatgctcaccaagtaagaattttcaagcagctttgaagta

SEQ ID NO: 54141 - protein, 512 aa, Brevibacterium casei
METQSLAQPSASTVRALIYTRASMDRHYLMRSTDDQETDCRTWCDQEKWSVAKVITDANRSASRWRTREREGFEEALRLIASKEYDAFVTWEPSRAGRELLAYVQLRAACQEAGVLYLTKGRVYDFSRHDDAFMMGLEFLSAEKDAAVIRDRQLRTVRLNAQKGRPHGRLPYGYRRVYDEKTRALIRQEIDPEKAAIIVAAVDEILDGGAINQIVTRLNRAGVPTPMKATSEHSRGWTTATIRQIIKSPTIAGLRMYQGEVIGEADWPAIIPVKKWEKVNHLLDDRARRTRFVPDDNPSHPRWLLTFVARCGYCQHPLVRIHASKVRARTGLRSDNYACGRPGCRKISIDMRNTDAYVTGALLGWLSKPESLAVIVGPEEDWSERVREAEEQVAALRGRLDEAANEYAEGRISMSMLTSIERRLMPEIERAAKAAVPPVADKRLLSFMQESDLEAAWEALELVEKRRLLKMLLDIRVEKATQVGPFFNPDRIKITPRFSVPETYQWKRPESS

SEQ ID NO: 54142 - DNA, 50 bp, Brevibacterium casei
  source 1..50: mol_type = genomic DNA
gaacaacccatcgaattgttgggttcacccagcaattcgatggcagatgc

SEQ ID NO: 54143 - DNA, 40 bp, Brevibacterium casei
  source 1..40: mol_type = genomic DNA
gtcgaggtggttcgttggttcgtcgaaggcaatgaggtcc

SEQ ID NO: 54144 - DNA, 40 bp, Brevibacterium casei
  source 1..40: mol_type = genomic DNA
gtcgaggtggttcgttggtgagtcgaaggcaatgaggtcc

SEQ ID NO: 54145 - DNA, 50 bp, Brevibacterium casei
  source 1..50: mol_type = genomic DNA
ggacaagcagtttcattggtaggtgatcccaggaatggaaaggcatctac

SEQ ID NO: 54146 - protein, 459 aa, Listeria seeligeri
MYERGTRMKAAIYIRVSTQEQVENYSIQAQTEKLTALCRSKDWDVYDTFIDGGYSGSNMNRPALNEMLSKLHEIDAVVVYRLDRLSRSQKDTITLIEEYFLKNNVEFVSLSETLDTSSPFGRAMIGILSVFAQLERETIRDRMVMGKIKRVESGLPLTTAKGRTYGYNVVDTKLYVNKEEAQHLQLIYDIFEEEKSITFLQKRLKKLGFKVKSYSSYNKWLMNDLYIGYVSYGDKVHVKGVHEAIISEEQFYRVQEIFSRMGKNPNMNKESSSLLNNLIVCEKCGLNFVHRVKDTVSRGKKYHYRYYSCKTYKHTHELEKCGNKIWRADKLEKIIIDRVKNYSFTTRNLDKEDELDSLNAKLQVEHSKKKRLFDLYINGSYEVAELDKMMADIDAQINYYNSQIEANEELKRDKKVQESLAELATVDFDALEFREKQIYLKSIINKIYIDGEQVTIEWI

SEQ ID NO: 54147 - DNA, 50 bp, Listeria seeligeri
  source 1..50: mol_type = genomic DNA
tttagtacctcgatttctctcactggacggagaataaatgagatactaaa

SEQ ID NO: 54148 - DNA, 40 bp, Listeria seeligeri; identical to SEQ ID NO: 21013
  source 1..40: mol_type = genomic DNA

SEQ ID NO: 54149 - DNA, 40 bp, Listeria seeligeri
  source 1..40: mol_type = genomic DNA
ttttggttcaagctacgatgcacggaaagagggaaccaag

SEQ ID NO: 54150 - DNA, 50 bp, Listeria seeligeri
  source 1..50: mol_type = genomic DNA
attagtaaagcatcttctctcattgctatgagaatattctaatttctaaa

SEQ ID NO: 54151 - protein, 502 aa, Bacillus amyloliquefaciens
MELQNRIQRVAIYLRKSRNKEGEETEETLRKHRKRLIDIANKNKWDYELFQEVGNSMNENRPEYQKLLSKLSEGIFDAVLSVNLARVTRDDAETPKFMSLLRQEDILFITDSERIYDLEVQEDWQALKFTGFVNNWEYENIKAQLRKGKKDSAKMGRWSNGVPNYGLVYNRFDRSLEIDQQKADAVKLAFQLVIDGLGVDRVAKELNRLGYKTNRGRYFSGNAINRMIRAEIYKSVLISNRLKGRNLHEGKLRPKDQWIIAENAAPPIIDEETWKMANEALDQRKLLSPRGKQKKHPLSNLIKCGFCGRTQTVSRRRDRNDALAIQPCNKTDPLGKSKCNNRGIKHDTMISLVIEAINEKYQEISSELIKFEEDTEANDIKSIKINKLQEQINKSKKALNILQIQLEEELINISSFKERRKIRQVELNNLEKELTELLEETKEDALKSKKSFANKLDFFLENWHTIDGADLNHELMSFINKIIWYAPRDSELPPQLKFEWRV

SEQ ID NO: 54152 - DNA, 50 bp, Bacillus amyloliquefaciens
  source 1..50: mol_type = genomic DNA
tgggtagcttagcgaacatgtcactggtgccatgtccactaaactaacca

SEQ ID NO: 54153 - DNA, 40 bp, Bacillus amyloliquefaciens
  source 1..40: mol_type = genomic DNA
cggctattcgacatgtcactggtgccacgtaatggcccac

SEQ ID NO: 54154 - DNA, 40 bp, Bacillus amyloliquefaciens
  source 1..40: mol_type = genomic DNA
cggctattcgacatgtcactagtgccacgtaatggcccac

SEQ ID NO: 54155 - DNA, 50 bp, Bacillus amyloliquefaciens
  source 1..50: mol_type = genomic DNA
tgagtagctaggtctacaggttcatactgccatgtcaaagtaactttcta

SEQ ID NO: 54156 - protein, 526 aa, Roseburia intestinalis
MTDSRKIAIYLRLSIEDDALDGKASTEQRESNSISNQRKMLLDYIRNDAELMGQEVAEFCDDGFSGTNMDRPGLQEMLKQVKQSKISCILVKDMSRFARDYIELGDYLNQIFPFMGVRFIAVNDHYDSREHEGSTTPLDTAFQTLLYDLYSKDISVKVKTSFQNKCANGEYVFGQVPFGYAKSEIEKNTVIVNEKEAEIVRHIFSLAEKGMSSTQIAKELIAKQTPTVTQMRHPERKMEREHHTWSNTAVRRILNNRFYLGEMAYGKSVRKSVGSKNGIAVPKEEWKVITDHHEPLVTPEVFALASAYRPEQSTKRKREKHPLTGKIYCGGCGYAINYKPQRNNGKMPNHFWCRKHSLLQIPDCCTYFRADILEEIVLTELYRELMRRGDLIKQRESLEQFQKVELSRLNKELGNYRMQYRSLQTEKDTLYENYAVKQIEAGEYCSRADGIALQMEELSCKIEEAELAFGRFTEEYNRPKQDIKEIIRFSQMEKLTQEAVDVFIKKVIIYRDKRVEIEWNYAFGEE

SEQ ID NO: 54157 - DNA, 50 bp, Roseburia intestinalis
  source 1..50: mol_type = genomic DNA
gttgacattaacttgacataagagggggataatggtattatagtgtcaag

SEQ ID NO: 54158 - DNA, 40 bp, Roseburia intestinalis
  source 1..40: mol_type = genomic DNA
ctatccgaatccggtgtttggctggggtgcactctgcgta

SEQ ID NO: 54159 - DNA, 40 bp, Roseburia intestinalis
  source 1..40: mol_type = genomic DNA
ctatccgaatccggtgtttctctggggtgcactctgcgta

SEQ ID NO: 54160 - DNA, 50 bp, Roseburia intestinalis
  source 1..50: mol_type = genomic DNA
tttgacatttatttgagcaaagtgctggagaatggagatacagtgaagag

SEQ ID NO: 54161 - protein, 657 aa, Vibrio parahaemolyticus
MRTPKIHVYARVSTLGQVESGLSLGLQTDDDMINEYCERYGAELGKVYSDHGRSAFHQKNLAGKLGDFLTDMADKNNLDVQAGDYLLVRALDRISRAKLDDAFWLYLQIMRSGVSILTTMDNREYKPNDSVSQILATLSFDLAGEESRKKQAITLAAMRKRIKQFQTGERAPCGNPYNVSTGLPFYAYAKDNVCYIDEQKFQLAKDICQMALDGKGNVTCRDYLRKHGVDLNVDSVASVFKSECLYGDRKVTLLDLDATNRHPEKKKVYSTFILKDYFPEACTKDEFHRIRAIKDSYKIHDNRRVSYSILGGISRLYCKDTVAIGSRENGGIYKCSSPECACGFYARQQLLDHIVLSCLSEHQIVPVEPDKKTIESIQQQIGAYQHQLSTLKKIMFDNPLAFDLADQDRLSELSAKIQELNAQLTIEEENQAHSNSFISLDDVKNWREKKESYINGSDEDKLEAREVVQRLVKEIRIVEDTVTIKTIDNKVHWYYIPTPSNRRKKAYVKLLISDHAQDMRSINEALDKVCFTEEDIKNRKHHYPLEAYSPDLVTEAIKAPSREKDEFELLLDTVTEPFVFKRRVLLSMGLSANQYQRHASVEKAIENGFHAVSVEYTSKNYKYPTDIIVSPREITTDDIQLLLSIREISKIVHLNGS

SEQ ID NO: 54162 - DNA, 50 bp, Vibrio parahaemolyticus
  source 1..50: mol_type = genomic DNA
ataatgattaaaactcagttagtgttcaccaattaaagtctaatcatgat

SEQ ID NO: 54163 - DNA, 40 bp, Vibrio parahaemolyticus
  source 1..40: mol_type = genomic DNA
tttagcagcgcgctcaacgttaacagcgcttccttcttcg

SEQ ID NO: 54164 - DNA, 40 bp, Vibrio parahaemolyticus
  source 1..40: mol_type = genomic DNA
tttagcagcgcgctcaacgccaacagcgcttccttcttcg

SEQ ID NO: 54165 - DNA, 50 bp, Vibrio parahaemolyticus
  source 1..50: mol_type = genomic DNA
atactctacatgcccaagctggtgcccaccacttaatgctcaatcatgat

SEQ ID NO: 54166 - protein, 491 aa, Corynebacterium aurimucosum
MATTTTQRAAIYARISLDKQEEAGIKRQIHLATKQAEADEAEIVATYVDNNISAFSGEYRPEYDKLIHAIENREIDVVYVYALDRLTRRTKDTLALFELCEKHDVTVKANRGYNIDPSDPASRLTIVILGLIAEQESIDRAARVRAAYEDRARTGRPKTGGRRMFGYESDAVTVIDEEAQAILDAAAMIIAGKTLRETVREIFDARGLTATTGRPMTAPTLRDILLNPRVRGISTFNPTDPKTRKRLIKNRQIVGKGNWPAIIDEATGEKLDAVLRDPSRRRSHSGNAPHYFLASVLTCTCGDPMYARSRRNKAGEPRRYYTCKRSEPGGTHVSIGAEVDDLIEAVILKRMAQPDAVDALRNALAPEDDGLTEQLQELAGQRNALLARREQIEEAIIAADVDMSTFARVSKKIEDQISTIDEKMRELTTSREADPLAVELANGPDFAEWWGSASVEDKRRLTRLLMEIHILPGKAGAKKFDPHRVKITWRQ

SEQ ID NO: 54167 - DNA, 50 bp, Corynebacterium aurimucosum
  source 1..50: mol_type = genomic DNA
cgtacccacaacccatgttcgtttaatcctgaatgtggctttgggctacg

SEQ ID NO: 54168 - DNA, 40 bp, Corynebacterium aurimucosum
  source 1..40: mol_type = genomic DNA
tggtgctactggcagcggaaagtcggaattacttcgaacg

SEQ ID NO: 54169 - DNA, 40 bp, Corynebacterium aurimucosum
  source 1..40: mol_type = genomic DNA
tggtgctactggcagcggaccgtcggaattacttcgaacg

SEQ ID NO: 54170 - DNA, 50 bp, Corynebacterium aurimucosum
  source 1..50: mol_type = genomic DNA
agtccccaatccagatgttgggttcctcttgaatgttggtttgtgcttat

SEQ ID NO: 54171 - protein, 545 aa, Lachnospiraceae bacterium MD335
MKRAKLNNDKITALYCRLSKDDGTNNESMSISTQKTMLKDYAKRNGFLNCQFYVDDGYSGTNYDRPAFRQLIEDIQDGEVSTLITKDLSRLGRNYLETGTYIEVFFPNHNVRYIAINDGVDSIDNAQMDITPFRNIINEMYAKDTSRKIKSALHARRMQGKYMATTAPFGYQKDEKDHNHLVIDEVTAPVVELIFSIAEEGVGLHTICNRLRKAKVLKPSFYKKELFERFMDEEKMYDWDTAYVSQILHNPVYAGNLTVADKPTKTIRSKKRQYIPFAEREVIYGTHEPIIEQNRWNNVQKILQSRPPVIGESSSGYDNIFRGIIKCADCGSAMLAKVEQKRKRNNVLDKTFYCCTKYRKFGKESCSSHNIEARTVHEVVLADIQKHAGQALTDRKAMVTEIAERLNLQMSADREQQKKELRQCKQRVSEIENLYAKLYEDLTRELLTEKRFQMLSARYDSEQEELTAKIKELEKSAIADREQLSSIEQFAEQISGYAGITELNFKIINQLIEKILVSEPVEVDGQKIQRLTIHYKFIGALETLE

SEQ ID NO: 54172 - DNA, 50 bp, Lachnospiraceae bacterium MD335
  source 1..50: mol_type = genomic DNA
gtcacctattccaactattcaacagatgttggatagtgcggaggggtgac

SEQ ID NO: 54173 - DNA, 40 bp, Lachnospiraceae bacterium MD335
  source 1..40: mol_type = genomic DNA
ttacctgattaatgccggcgatgccggacgcgaaggactg

SEQ ID NO: 54174 - DNA, 40 bp, Lachnospiraceae bacterium MD335
  source 1..40: mol_type = genomic DNA
ttacctgattaatgccggcaatgccggacgcgaaggactg

SEQ ID NO: 54175 - DNA, 50 bp, Lachnospiraceae bacterium MD335
  source 1..50: mol_type = genomic DNA
ggcagatagttaaattattcaacaaatattggatagtactaaccgattac

SEQ ID NO: 54176 - protein, 480 aa, Glutamicibacter soli
MTTIAAVYARQSLDVTEGIDRQLERCRRLIEARGWTVGPEYQDNDTSAAKQRGPGTAWYSMLEDLTAKKADVVVAVDLDRLLRSTRDLIAITDTGARVLTVDGEIDLTTADGEFRATMLAGIARFEVRRKGERQKRANEARAAKGIPGPGRRRYGYESDGITPREAEAQHVRRAFQHVADGGSLRSLLLWFLDNKIDPAPGKLWDQRRLRDMLLNPWYSGSMIHRGKVIPSEVIVPIVAPELAEEVRAILSDPSRTTSPGPAPRHLLSHLLYCGECGSPMYYMRGYMCKVAPNHVHIAKHIIEPFIVDQVALAFASSGSSIAPASPGALNLSALVDAHARNAEAVTAVLADRDEGLVPASVARTRLLELKTAREKIEADLERARSEKSASSVLATVAEELLVGTSASMAEFSSAKRTIAERFLALDLDRQRSVIGSLMYIEVTKPQGGTPAERAPQRRVIVSHTTATKLNPETPPETYDD

SEQ ID NO: 54177 - DNA, 50 bp, Glutamicibacter soli
  source 1..50: mol_type = genomic DNA
tgcacatataatccatgtttctgtttgcggaaacgtacaatgcatgtatg

SEQ ID NO: 54178 - DNA, 40 bp, Glutamicibacter soli
  source 1..40: mol_type = genomic DNA
ggcaatcaaccggttgcggttcaggaacctgaaacgcgtc

SEQ ID NO: 54179 - DNA, 40 bp, Glutamicibacter soli
  source 1..40: mol_type = genomic DNA
ggcaatcaaccggttgcggggcaggaacctgaaacgcgtc

SEQ ID NO: 54180 - DNA, 50 bp, Glutamicibacter soli
  source 1..50: mol_type = genomic DNA
tgtacatagcatgtatgatactgtgggtacacatatatatagcatgtatg

SEQ ID NO: 54181 - protein, 515 aa, Bacillus wiedmannii
MKTAIYLRKSRADLEAEARGEGETLAKHRTTLLKIAKEMNLNVLAVREEIVSGESLVKRPEMLALLEEIEDNKYDVVLCMDMDRLGRGGMKEQGIILETFKRSNTKIMTPRKTYDLNDEWDEEYSEFEAFMARKELKIITRRMQRGRVASVEAGNYLGTHAPFGYDIHRLNKRERTLTINPEEASVVRMIFDWYANEDMGANAIRSKLNDLGYKSKLGNEWNPYSILDILKNNVYIGKVTWQKRKEVKQPDAVKRSCARQDKSDWIIADGKHEPIIPESLFEQVQEKLNSRYHVPYNTNGIKNPLAGIIKCSKCGYSMVQRYPKNRKETMDCKHRGCENKSSYTELIEKRLLEALKEWYINYKADFEKHKQDDKLKETQVIQMNEAALRKLEKELVDVQKQKSNLHDLLERGVYTVDMFLERSNVVSNRITEITSTMENLKKEIKTEIKKEKVKKDTIPQVEHVLDLYFKTDDPKKKNSLLKSVLEKAVYKKEKWQRLDDFELVLYPKLPQDGDI

SEQ ID NO: 54182 - DNA, 50 bp, Bacillus wiedmannii
  source 1..50: mol_type = genomic DNA
tgtcgtcaccttgttgatgtaattaggttgacgccaacagggtgatgaca

SEQ ID NO: 54183 - DNA, 40 bp, Bacillus wiedmannii; identical to SEQ ID NO: 52323
  source 1..40: mol_type = genomic DNA

SEQ ID NO: 54184 - DNA, 40 bp, Bacillus wiedmannii
  source 1..40: mol_type = genomic DNA
tgtagccattaggcgcatggtatttactccattcagccct

SEQ ID NO: 54185 - DNA, 50 bp, Bacillus wiedmannii
  source 1..50: mol_type = genomic DNA
tgtcttcaaacgggacatgttatagtgatgaagccaggcaagtgatgaag

SEQ ID NO: 54186 - protein, 538 aa, Pseudomonas soli
MSTSEQLKGFSLERQRNLIADFARKNGLSLEDSHILEDIGRSSFSDDTEQKELTKFFEDLGNDKFQKGDVFALENIDRLTRRGPIDALMKVNQIISKGLKLAIISDKEQRILEVIDVFSIITLSIDASRANKESQVKSDKGLQNWAFKRELAATHKIAMTAQAPAWIDTETYYIMDETKNKQVKRRRYVLNEDKAKTVRLIFELFQNGNGSLKIKNILNEQNIPTFKGIEYWEPSTISKIIRNPATYGMYQPKKQNTGKRDLVAIGEPIENYFPAVIGKEVFDQCQQITATNTTRKGRRGKLFTNLFTGLLKCADCDGPIHLLNPGIDKRAKNPKPVNYLICKKGKFTKECITKRLRYEDFENVMLKAIQEINLADVLHENNPLENLIKQQRNLQADIEKKKKLLENFERNFVENDGDLPSFMIAQAKQAEIDIKSLDSEIKSIRLEISQLNVYNSNIDNAIDELKVNGTYEARSKINLILHEIIKHIVIDFELDDYGVMFKNGAKRFINNGIIQNVFRTENTKQRDDEINEILNHKN

SEQ ID NO: 54187 - DNA, 50 bp, Pseudomonas soli; identical to SEQ ID NO: 18907
  source 1..50: mol_type = genomic DNA

SEQ ID NO: 54188 - DNA, 40 bp, Pseudomonas soli
  source 1..40: mol_type = genomic DNA
cccgggcaacgcggtgctgatcaagtccgcctacccctgg

SEQ ID NO: 54189 - DNA, 40 bp, Pseudomonas soli
  source 1..40: mol_type = genomic DNA
cccgggcaacgcggtgctggccaagtccgcctacccctgg

SEQ ID NO: 54190 - DNA, 50 bp, Pseudomonas soli; identical to SEQ ID NO: 4680
  source 1..50: mol_type = genomic DNA

SEQ ID NO: 54191 - protein, 538 aa, Pseudomonas aeruginosa
MSTSEQLKGFSLERQRNLIADFARKNGLSLEDSHILEDIGRSSFSDDTEQKELTKFFEDLGNDKFQKGDVFALENIDRLTRRGPIDALMKVNQIISKGLKLAIISDKEQRILEEIDVFSIITLSIDASRANKESQVKSDKGLQNWAFKRELAATHKIAMTAQAPAWIDTETYYIMDETKNKQVKRRRYVLNEDRAKTVKLIFELFQNGNGSLKIKNILNEQNIPTFKGIEYWEPSTISKIIRNPATYGMYQPKKQNTGKRDLVAIGEPIENYFPAVIGKEVFDQCQQITATNTTRKGRRGKLFTNLFTGLLKCADCDGPIHLLNPGIDKRAKNPKPVNYLICKKGKFTKECITKRLRYEDFENAMLKAIQEINLADVLHENNPLENLIKKQRNLQADIDKKKKLLENFERNFVENDGDLPSFMIAQAKQAEIDIKALDIEIKSTQFEISQLNVYNSNIDNAIDELKTNGTYEARSKINLILHEIIKYIVIDFELDDYGVMFKNGAKRFINNGIVQNVFRTESNKQRDDEINEILNHKI

SEQ ID NO: 54192 - DNA, 50 bp, Pseudomonas aeruginosa; identical to SEQ ID NO: 18907
  source 1..50: mol_type = genomic DNA

SEQ ID NO: 54193 - DNA, 40 bp, Pseudomonas aeruginosa; identical to SEQ ID NO: 4683
  source 1..40: mol_type = genomic DNA

SEQ ID NO: 54194 - DNA, 40 bp, Pseudomonas aeruginosa; identical to SEQ ID NO: 4684
  source 1..40: mol_type = genomic DNA

SEQ ID NO: 54195 - DNA, 50 bp, Pseudomonas aeruginosa; identical to SEQ ID NO: 4680
  source 1..50: mol_type = genomic DNA

SEQ ID NO: 54196 - protein, 576 aa, Serratia marcescens
MKLYSYQRWSSAVQEAGTTKVRQEDAARAYALRNGLEYCEIVDSGVSAYRGANKQGALGKFIDAVQQGVIERGVTLYVESLDRISREGINNALRLFQDILELDITIVTGMDGKVFTKQSIDDNPFDLMLSILVFIRANEESTKKSLRTNGNALALVERAKAGLPTNIKSMGGCPFWIDNSMSQYEAVKKDPKYWPIAEEIVQQFLDGKSVFQVVKYLNATYPEGCYGKPWNYANVRKVRLSKAIYGVKEITINGDKKIIENYYPALCTEGEFLRLQVIKDNNKYIGKVGDQKNNINLLCGMKLFRCGHCGSTMMAMKHKNTIRYMCEKGRMDSNGCRLWSFGSLGIEHCLMLVLTYAYIDTNRKGVQNKTDYSTRIASKNEAIDEITKRITNTVELVSMGLSNIEEVKVHLQDLDKQRTVLKTELDVLMTQQALSNSIDFETLMHDFFTHAQYAVLQSVDHEYREELRKVVFAMMDSVIAWKYGKNLYFSFKIKDHDEYFNFVPGSTKNTYRLFIGGLPFNDNEQDEPMHVEGVERLTGLYTQLVEGQVKVIKMAEEMLEVVGYPVLDGKYFWTKK

SEQ ID NO: 54197 - DNA, 50 bp, Serratia marcescens
  source 1..50: mol_type = genomic DNA
aatgtggtagaaatttctttcggcaacccgaaaagaatttctgcgtatta

SEQ ID NO: 54198 - DNA, 40 bp, Serratia marcescens
  source 1..40: mol_type = genomic DNA
tatcatcagccaccccggcaacccgcgctacccgatcgac

SEQ ID NO: 54199 - DNA, 40 bp, Serratia marcescens
  source 1..40: mol_type = genomic DNA
tatcatcagccaccccggcttcccgcgctacccgatcgac

SEQ ID NO: 54200 - DNA, 50 bp, Serratia marcescens
  source 1..50: mol_type = genomic DNA
aatgtggcagagaattttgtcagcttccccaaaagatatcacccctcttc

SEQ ID NO: 54201 - protein, 548 aa, Vibrio cholerae
MQKIIYPYVRFSSEKQSAGHSHERQIEKIKEYASVNGYEVNDTLNLRDLGVSAFKGKNAEKGALAAFLKMIEEGTIPTDGSSYLCIEQFDRLSRQTVDEAYSLFRKILISNVNIITLMDEKVYKKKSLNEMVSIISSLLLMEQANVESEKKSKRVSAVFKKKLEKLRSGEKVQFAYMLPGWIDNIGTKENPNFIINDQVKTVRMIIDMYLNGETMGHIARILNEKQIPQFARKKTKNKISSWNSGKISHLLVNRCLIGELKIKKTNEIIKDYYPSVISKDEWDIIQSTKRTNANIKIAGRRSINIFQGRLFCADCGNKYYFETDDKTGKNGKKYIYHMLKCSGRRFHSCDSKSIKYDDLTSGNLFFFEKIQDQESKEYYDKIKLEISNYEKQIEELKKEQDEINLLLDNKTINFTAHAIANSKILDQIEALEKDIALDKQHIAFTMNTNMIDKFDKNDPVSVAKAKKFIKDNYAGILISSKYGTIISLMKSGQFIINPIPNRFDDSIPKASLQLFEIKEQIQNQDKKGLLDGKLKELLNAFNFLDRFE

SEQ ID NO: 54202 - DNA, 50 bp, Vibrio cholerae
  source 1..50: mol_type = genomic DNA
tcccctttaatactaaagttaatagtgataaacttgagctttaacgggaa

SEQ ID NO: 54203 - DNA, 40 bp, Vibrio cholerae
  source 1..40: mol_type = genomic DNA
ggctggggctaaattgaccgtaatgcgcttcgctggaaac

SEQ ID NO: 54204 - DNA, 40 bp, Vibrio cholerae
  source 1..40: mol_type = genomic DNA
ggctggggctaaattgaccagaatgcgcttcgctggaaac

SEQ ID NO: 54205 - DNA, 50 bp, Vibrio cholerae
  source 1..50: mol_type = genomic DNA
gacactttaaatcatcagttattaaggataaacttgctttctaatacaaa

SEQ ID NO: 54206 - protein, 486 aa, Rhodococcus erythropolis
MIVFYRMDRIVRRLMDLAKLIDWAEKHRVTLVSATEAFLDLSQPFGKIVALLVANVAEMELNAITERNANAFKHNYETGKWRGGVPPWGFLPEKGAAGEWRLVQDPVQVEVIDEVVERVLVGEPLRAIAHDLTDRGILTPKDRFAQSRGREPAGYEWHSGPLKRGLTSPTLLGRIVTREPRVDELGEALRDPNGKKVFGPETVVVGADGSPLVRAKPIVTRETFDRLAAELSGRENRTEPTVRSTGLLLRVIYCGVCGRPAYRLKGGTGRKSRYRCASAQYKDQCDNRTVTADYAEGQVEEHLLRTLGEMERRVRTWMPGSDVSTELAEVGEILSDLTDQIGTGSFRRGTPQRERLNARIAALTERQTALEAQPTETAGWRYEGTGQCFNDWWASSTSEARNAWLRDNVRVTWRSHSVGTRTVVDALDVEMLAPALTSGVLLGPVGALAEYKAAGAWAHAGLGALPDSLAAVYMRQGMSRPGVVEE

SEQ ID NO: 54207 - DNA, 50 bp, Rhodococcus erythropolis
  source 1..50: mol_type = genomic DNA
tgggtgtaaaaccttgcaatggagtactctgccgtcattgtttacaccca

SEQ ID NO: 54208 - DNA, 40 bp, Rhodococcus erythropolis
  source 1..40: mol_type = genomic DNA
cggtatgtccaccgcggagtatgcgatcggcacgattgcg

SEQ ID NO: 54209 - DNA, 40 bp, Rhodococcus erythropolis
  source 1..40: mol_type = genomic DNA
cggtatgtccaccgcggagcatgcgatcggcacgattgcg

SEQ ID NO: 54210 - DNA, 50 bp, Rhodococcus erythropolis
  source 1..50: mol_type = genomic DNA
tgtgtgtgcacacgtgcatgcgtgcacactgctgtcctccattgcaccca

SEQ ID NO: 54211 - protein, 535 aa, Ruminococcus gnavus
MNRAAFAIHHNKIKTAPAPTETVYISEDMRLKSTNIVSSSGQSRKRNICFALAVIFVPILNIFYKRRVMQMPEKILRCAIYIRVSTFEQSVHGKSLQAQKECLEQYATDNNMSIVGVYADEGKTARKELKKRKAIHALVEDVKRDKIDVIIFWRLDRWFRNLSDFYKVQDVLDEHGVRWISVSEPGINMETRDGRLQLNVVLSIGQNEVDTTSERIKFVNEASIRQKKLIFGDANMPFGYKTGVVDGKKCMVKDSETEHMVEDFFEYFRNHNSKKGAIRYMQETYGIDFSYGMLRTMLSSEFYKGTYRGYPYCPAYLSEKEWDEMQTISKRNIKNTPSGRIYLFTGLMRCPVCGQKLVGTGCSSIINRKTGEKRTYCYYRCNRALIDHICTYRHRVSQNLIEKYLLENLEREYEKYKVRTNQISEELKKQKKAKDPKKLRKEMERLNLLFQKGRISFEYYDTEYNRLEEEYVHSSNPCQQKEEARNTRYIEELLQTDFRQMYNSLSLENRRSFWRSTIQEIYLNDDNTIKAVDFL

SEQ ID NO: 54212 - DNA, 50 bp, Ruminococcus gnavus
  source 1..50: mol_type = genomic DNA
ttttgtactaagtgtttagccccatttggggatgtatacttagtacaaag

SEQ ID NO: 54213 - DNA, 40 bp, Ruminococcus gnavus
  source 1..40: mol_type = genomic DNA
actggaactcgtcacaggatttggagccgacaaaacgatg

SEQ ID NO: 54214 - DNA, 40 bp, Ruminococcus gnavus
  source 1..40: mol_type = genomic DNA
actggaactcgtcacaggagatggagccgacaaaacgatg

SEQ ID NO: 54215 - DNA, 50 bp, Ruminococcus gnavus
  source 1..50: mol_type = genomic DNA
atttgcactttgatcttccccccagaggtggatatcttcccaggacaaag

SEQ ID NO: 54216 - protein, 502 aa, Pseudomonas fluorescens
MLDRWAEANPAFTLNRELSFKDLGISGRSGRHLKSGFGKLLEAIEQGAIGAGDVVLVEAIDRAGRMEPGIMSGVLINILNAGVSLVTLDDNQVYTQESLRGGSFYILVGKVQAAFNYSETLSVRMKASYKSRNTLALAGVTPKRHTPVWLTSEGELIPEIAPLVKQAFEDYASGLGERRIFERIFEGNTNPLLARMAPSTVKRWMTNRTVLGEWQGIPNVYPVVVEPELFYRVQKRMEAKFVPRSAPIKHKYTGLVVCGDCGKNFNTKSYSKRTKGAIPPAVMECSSRARRGSVACSNSKGIPESVIAYAFQLSCWKHIKDALEGQILTDSQKREVVIDGELKDLSVKITKVARAVAEVDDVEELIVSLNDLKAQRRSLESEKKSLQHGSVTVKDQITNMTDIMLDPLKANALLQSVGYKIVCNVNRTIDTPAGTFIYEGWGRSEDVHKVVNPQGQMLKLPVVRQEPRKTAKKSEPIDVMSGLAGKLERVKLVNFKGVSPSS

SEQ ID NO: 54217 - DNA, 50 bp, Pseudomonas fluorescens
  source 1..50: mol_type = genomic DNA
catccccacattgccgtttgttgtgtgaagtaagcggcactgtggggttc

SEQ ID NO: 54218 - DNA, 40 bp, Pseudomonas fluorescens
  source 1..40: mol_type = genomic DNA
ctcgtagtacaccggctgggtgaagatcatgtcgtaaatc

SEQ ID NO: 54219 - DNA, 40 bp, Pseudomonas fluorescens
  source 1..40: mol_type = genomic DNA
ctcgtagtacaccggctgggagaagatcatgtcgtaaatc

SEQ ID NO: 54220 - DNA, 50 bp, Pseudomonas fluorescens
  source 1..50: mol_type = genomic DNA
gatccccaaataagtgtttggtgtgaggagagagaggcagtgtgggcctc

SEQ ID NO: 54221 - protein, 520 aa, Anaerobutyricum hallii
MSDQKLIIGYYRLSMEDDSEGESNSIINQRKLVKDYISNIPELASMPFQEFYDDGYSGSSMDRPAIKQVLEFARENKVQCIVVKDFSRFARNYIEMGTYLEQIFPFLGVRFISISDRYDSKDYKGKSSDIEVQFKGLIADFYVKDQSVKVKAAVSTRRGKGEYCCGSAPYGYRINPENKKELVIVEDEAEVIRRVFELTNQRYSKMEICKLFNEEGVLTPLQSMSRRQKSDSKKAASRGLQWTSDMIRKIVDDKTYIGCMVYGKTKIPDPGTGKEVPVPRNQWKVMENHHEPIVSKEVFEKAQSLQIRYTKKSKFDRETTLLGGYVKCGNCRRSLTSSSPVHGHILYSCAYSKGKEDTGCFAGKADNKMLEYIVLAEIKAYLRQNISQEQMQQSMRKQHEDSIEAYKTENADCEKRQEQIKIQNRQNYEKYHEGQMNQKQFMESRKQLEEERERLQKRVQELEELINGEKEILMKKNVPVEQMLKYLGYEKLTREMLEEYVQGIYVYDDGRVEVEWKSLT

SEQ ID NO: 54222 - DNA, 50 bp, Anaerobutyricum hallii
  source 1..50: mol_type = genomic DNA
tgtggcaatgacttgacatcctcgggggaggacgttataataaggttaca

SEQ ID NO: 54223 - DNA, 40 bp, Anaerobutyricum hallii
  source 1..40: mol_type = genomic DNA
ggatgatatggttgggtggggagcattatgtacagcgcaa

SEQ ID NO: 54224 - DNA, 40 bp, Anaerobutyricum hallii
  source 1..40: mol_type = genomic DNA
ggatgatatggttgggtggatagcattatgtacagcgcaa

SEQ ID NO: 54225 - DNA, 50 bp, Anaerobutyricum hallii; identical to SEQ ID NO: 21500
  source 1..50: mol_type = genomic DNA

SEQ ID NO: 54226 - protein, 490 aa, Mycobacteroides abscessus
MKEQAKRALVVIRLSRVTDATTSPERQREACLELCKQRGYEVVGTAEDLDVSAGKTTPFDRPQLGDWLTNRHHEFDVLVVFRMDRIVRRLLDLADLIRWGQNHSVALVSATEAFLDLTAPFGDVIALLVAKVAEMELAAISERNKSAAQHNMRAGKYRGGPPPWGYMPEKIDGEWRFVQDDEQVKVINEVVRRVLDSEPLRQVAADLTDRAVPTPRDRVNQLKGREAKGYRWHSAKLREMLTSKSLLGHAVTANGSIRNEDGTPVIRATPILERDVFEQVQVELVGRENRKEPTKRSSSLLLRVIFCGVCGKPAYKLKGGKGRQDRYRCASAQYKATCGNRTMPVADAGEALTDAVMFELGDKYRMDRVWDAGSDHAAELAELEETLSDLTDQLGVGVFRKGTPQRKRLDVRIAELSHRHSELAAQSTKPAGWIWVPTEEPFVDWWKSQTVEQLNVWLRSMEVRMTWDHLGTHVEMLHLEKMAEQWDNLD

SEQ ID NO: 54227 - DNA, 50 bp, Mycobacteroides abscessus
  source 1..50: mol_type = genomic DNA
tggtagtaaaactggacattgggatattcgatgggttatctttacaccca

SEQ ID NO: 54228 - DNA, 40 bp, Mycobacteroides abscessus; identical to SEQ ID NO: 29263
  source 1..40: mol_type = genomic DNA

SEQ ID NO: 54229 - DNA, 40 bp, Mycobacteroides abscessus
  source 1..40: mol_type = genomic DNA
cgcgatagtcccgatcgcgagctcgaccgtggacatgcca

SEQ ID NO: 54230 - DNA, 50 bp, Mycobacteroides abscessus
  source 1..50: mol_type = genomic DNA
tggtattaatatgtgaagttgggaagtcaggttgggggaccttactgcca

SEQ ID NO: 54231 - protein, 516 aa, Clostridium sporogenes
MKRIAIYSRKSRETDTGESIKNQIDMCKTYFNRADQDCSFEIFQDEGFSGGNINRPSFQRMLELAKHKQFDIIAVYKVDRIARNIVDFVNIYDELENHDVKLVSITEGFDPSTPIGKMMMMLLASFAEMERMNIAERVRDNMKGLAKIGRWSGGTPPTGYKNKTIINDNGKKESYLELIPEKKQLIISIFRKAADGYTTYQIGKMFNMSPKTVSNILCNPTYVKSDELSANYLKSIGYSVFGELNGNGYLSYNRRPKKKGKKLFNAKGMFTAVSNHEAPIDSKTWIKANNNLKDRATEAKPRISSNSFLAHLVKCSCGSGMYIHTGHAKKDGTKNLYFVCSKKKGGSKCTSKWLRVDGVEKKVLNVFKKISLNPKLLESYLKQKNKHVDYTESIKNIKKQINKNDEKINSLTDKIIFLKGTAIDIVSKKINNLADENSRLNEQLLALEREKMFSEVDGENIKLLTVNINQFLQNFDKIDTTERQIFIKSIIKKIVWNSNANNNKGKKGKISIEFLE

SEQ ID NO: 54232 - DNA, 50 bp, Clostridium sporogenes
  source 1..50: mol_type = genomic DNA
agacataatttcgactgtattgcatgtgcaatacatctgaaattgatgct

SEQ ID NO: 54233 - DNA, 40 bp, Clostridium sporogenes; identical to SEQ ID NO: 1438
  source 1..40: mol_type = genomic DNA

SEQ ID NO: 54234 - DNA, 40 bp, Clostridium sporogenes
  source 1..40: mol_type = genomic DNA
cggcggcggttgggccggatatgcagcagctataagcgct

SEQ ID NO: 54235 - DNA, 50 bp, Clostridium sporogenes
  source 1..50: mol_type = genomic DNA
tgacttaataagttctgggatacatatgcaaaacatgcaggtttgttgca

SEQ ID NO: 54236 - protein, 560 aa, Burkholderia multivorans
MAKKPKAKVYSYLRFSDPKQAAGSSADRQMEYAARWATEHDMQLDATLTLRDEGLSAFHQRHIKQGALGVFLRAIEDGRIQPGSVLIVEGLDRLSRAEPIQAQAQLAQIINAGITVVTASDGREYNRERLKAQPMDLVYSLLVMIRAHEESDTKSKRVKAAIRRQCEGWVAGTWRGIIRNGKDPHWVRLGEHGKFEHVPERVLAVRTMIDLFLEGHGAIEITRRLTEQNLYVSNAGNYSVHMYRIVRNQALIGEKRISVDGEEFRLDGYYPPILTREEFAELQQTMSERGRRKGKGEIPNIITGLSITVCGYCGRAMTTQNSKARAPKGKSVVRRLSCPMNSFNEGCPIGGSCESEIVERALMRYCSDQFNLSRLLEGDDGTARRTAQLAVARQRASDIEAQIQRVTDALLSDDGKAPAAFTRRARELETQLEEQRREIEALEHQIAASSAHGIPAAAEAWAQLVDGVLALDYDARMKARQLVADTFRKIVVYQRGFAPIDDAAADRWKRSGTIGLMLVTKRGGMRLLNVDRRTGCWQAEDDLDPSLIPSDGLPMLPLDA

SEQ ID NO: 54237 - DNA, 50 bp, Burkholderia multivorans
  source 1..50: mol_type = genomic DNA
aatatattttcggacacgctcggcaacccgaacgagagtcaaaatacatt

SEQ ID NO: 54238 - DNA, 40 bp, Burkholderia multivorans
  source 1..40: mol_type = genomic DNA
cacgctggtcacgctcggcaatcccaagatcatgctgttc

SEQ ID NO: 54239 - DNA, 40 bp, Burkholderia multivorans; identical to SEQ ID NO: 54238
  source 1..40: mol_type = genomic DNA

SEQ ID NO: 54240 - DNA, 50 bp, Burkholderia multivorans
  source 1..50: mol_type = genomic DNA
catagatttttggacacgcgagtcaacccataatagctattcaatacatt

SEQ ID NO: 54241 - protein, 594 aa, Pseudomonas putida
MLFSHFQNRRRTPGMPTAYAYIRYSSKAQGEAGRDSVDRQMSSIQAITKQQGIELLPENIFSDTGISGFDGSNKNKGKLKDLIDLIISQTVHEGDFIFVESIDRLSRQKMRLSKELVYSILDRGVTLVTTIDGQMYSRNKDGMEQDIMLSVISTRAHEESKTKSVRRKSAWNRAKKLADDEKAIFNGHNPPYGISYNKEENRFEIVEDEAQEIRDIFESLKYVGVSLTIRKINAYAKRKWTNKNIHLLLQTKYVLGSYMAQRRDENKNKVFERFIENYYPQIVSYELFNEALEAMKLRAHRKHYGNQTVGSLNIFRHSIKCDCCNASMLFEKQTNPKGVCYGYFHCFTRKELKTNCNQPRFRFDLAYGLFLELVYQATTKEDFDVHPWQSMELEKEKRDRDYVTIGESTRLYMATPEDNEIEEKIESFRELLVSLLSNKQRQATDNKKLVELRNALLEQKSYKDNLMKSFAGFTNGIIPQEFLAVVSSTELKINEIEGELSKLQAEMNTRKTSINIYSENDVIELYSTEEGRLKINQFFIANDIVFRFSFEKETRTLYCKINYQGMMIDRIAKQFDLHNPLKEFGINNLNEYFN

SEQ ID NO: 54242 - DNA, 50 bp, Pseudomonas putida
  source 1..50: mol_type = genomic DNA
gtttaacaattacccctaccattcgagacagggagatgttattctcacac

SEQ ID NO: 54243 - DNA, 40 bp, Pseudomonas putida
  source 1..40: mol_type = genomic DNA
ggtgctgcgcgagccgctggagtcgggcgagatcgtgatt

SEQ ID NO: 54244 - DNA, 40 bp, Pseudomonas putida
  source 1..40: mol_type = genomic DNA
ggtgctgcgcgagccgctgacgtcgggcgagatcgtgatt

SEQ ID NO: 54245 - DNA, 50 bp, Pseudomonas putida
  source 1..50: mol_type = genomic DNA
ctttcacaacttcatctctcattcacctcaaggagagatttttctcgcat

SEQ ID NO: 54246 - protein, 638 aa, Raoultella ornithinolytica; identical to SEQ ID NO: 13566

SEQ ID NO: 54247 - DNA, 50 bp, Raoultella ornithinolytica; identical to SEQ ID NO: 13567
  source 1..50: mol_type = genomic DNA

SEQ ID NO: 54248 - DNA, 40 bp, Raoultella ornithinolytica
  source 1..40: mol_type = genomic DNA
gcagcgcgtattagcaggcttgccgtcaggcattccgggg

SEQ ID NO: 54249 - DNA, 40 bp, Raoultella ornithinolytica
  source 1..40: mol_type = genomic DNA
gcagcgcgtattagcaggccagccgtcaggcattccgggg

SEQ ID NO: 54250 - DNA, 50 bp, Raoultella ornithinolytica; identical to SEQ ID NO: 4740
  source 1..50: mol_type = genomic DNA

SEQ ID NO: 54251 - protein, 638 aa, Raoultella ornithinolytica; identical to SEQ ID NO: 13566

SEQ ID NO: 54252 - DNA, 50 bp, Raoultella ornithinolytica; identical to SEQ ID NO: 13567
  source 1..50: mol_type = genomic DNA

SEQ ID NO: 54253 - DNA, 40 bp, Raoultella ornithinolytica; identical to SEQ ID NO: 23993
  source 1..40: mol_type = genomic DNA

SEQ ID NO: 54254 - DNA, 40 bp, Raoultella ornithinolytica
  source 1..40: mol_type = genomic DNA
gcagcgcgtgttagcaggccagccgtcaggcattccgggg

SEQ ID NO: 54255 - DNA, 50 bp, Raoultella ornithinolytica; identical to SEQ ID NO: 4740
  source 1..50: mol_type = genomic DNA

SEQ ID NO: 54256 - protein, 638 aa, Citrobacter freundii; identical to SEQ ID NO: 13566

SEQ ID NO: 54257 - DNA, 50 bp, Citrobacter freundii; identical to SEQ ID NO: 13567
  source 1..50: mol_type = genomic DNA

SEQ ID NO: 54258 - DNA, 40 bp, Citrobacter freundii; identical to SEQ ID NO: 20458
  source 1..40: mol_type = genomic DNA

SEQ ID NO: 54259 - DNA, 40 bp, Citrobacter freundii
  source 1..40: mol_type = genomic DNA
gcatggcgtattagcaggtcagccatcaggcatgccaggg

SEQ ID NO: 54260 - DNA, 50 bp, Citrobacter freundii; identical to SEQ ID NO: 4740
  source 1..50: mol_type = genomic DNA

SEQ ID NO: 54261 - protein, 484 aa, Microbacterium hominis
MAAREARRSVPAGRRAIALVRVSMESDKLTSPEIQRHAIQQHSDRRGDEIVEWIEGIDESGSRKKSAWWAKLDYAVERVERGEVDVIYVWKFSRTARQRLKWALALDRVDSAGGSIESATEQTDPTPSGRFTRGMIGEMNAYQAELIGEVWRETHERRRRNGVPPTGGPRFGYQRVDGRYEPDPVTGPILADLYRWYLSGMGSAQLTRKLNELGVEDRRWTYQGVMGLLDSGFAAGLLGRTRPKLLPAWEREYTEGIHPPLIDMETWHAYVARRQQRYRKQTRTPRRYLLTGLVRCGDCGSPMSGKVFDGRPTYVCSRSTTTDLVKRVTMVAWRVEKLVDEWLAVSADKYARAQAVEATRRKSTRTQTVANSIRRDIEKQNDRLVRLSDLLIDKIMTAEEYRIKADEIQARKDALERRLSLAVVNPVQAAAPADLPDEIMQLWPTMTVEQKAGTLRPLIDRIVIYPAARRGAVDRHVKIIGTWE

SEQ ID NO: 54262 - DNA, 50 bp, Microbacterium hominis
  source 1..50: mol_type = genomic DNA
gactgctatttcgacaggtcgttgtcgaaagagctatccatacttcagtg

SEQ ID NO: 54263 - DNA, 40 bp, Microbacterium hominis
  source 1..40: mol_type = genomic DNA
atcgatcttggagacgatgtcgaaagagctgtcagccatg

SEQ ID NO: 54264 - DNA, 40 bp, Microbacterium hominis
  source 1..40: mol_type = genomic DNA
atcgatcttggagacgatgctgaaagagctgtcagccatg

SEQ ID NO: 54265 - DNA, 50 bp, Microbacterium hominis
  source 1..50: mol_type = genomic DNA
gacttccccaaggtcacatggtggctgacagagctagggacacttcattg

SEQ ID NO: 54266 - protein, 519 aa, Streptococcus dysgalactiae; identical to SEQ ID NO: 51061

SEQ ID NO: 54267 - DNA, 50 bp, Streptococcus dysgalactiae
  source 1..50: mol_type = genomic DNA
aggtttggacaatgatgaacaagttgagactatagcgttgatacaaaaga

SEQ ID NO: 54268 - DNA, 40 bp, Streptococcus dysgalactiae
  source 1..40: mol_type = genomic DNA
ttccacagacgcatcacgtggagtgcgtagtgttgctaca

SEQ ID NO: 54269 - DNA, 40 bp, Streptococcus dysgalactiae
  source 1..40: mol_type = genomic DNA
ttccacagacgcatcacgtacagtgcgtagtgttgctaca

SEQ ID NO: 54270 - DNA, 50 bp, Streptococcus dysgalactiae
  source 1..50: mol_type = genomic DNA
atgctttgaaggatttaaacaagtacataatattgcaattttacaactga

SEQ ID NO: 54271 - protein, 575 aa, Vibrio parahaemolyticus
MTKIAYSYTRLSTEKQIKGHGFTRQREAIEKVCCQHGWQLSDQTFNDLGVSAWKGANVTTGALSHFIELTKKGAIKPDSVLIVESVDRLSRQQVDKSLRLMLELLDVGISIFTLSDSKLYTTNSDNVMLDLMMWLMTAQRAHEESEMKSLRIRAAKRKNKELIRQGVIVSRKCPEWLSVSDDKSCFIVNEERAEIVRKVFIWYSQGFSTKPIALKLNELGVPYWGKSSTWSYRHIRSLLKHRAVIGDIQPLIRVNGKDVPDGDAVSDYYPAIVDKGLWATCQQIKSSKTTARGRTVEIGMANLFRGLLKCECGSGLAINSSTVKGRTYRFLRCSQLKTTGCQAKNWHYEKTERILLIALRHSLSSFSEEDHAVSLRESQHYLARINEELKEKERQAENAINYLLDKPSRLLEARLQTLEDDIARLKAIQEQAEHRVEAVHYEKSTALDKVEELQRVLEDIANDDDSRHKANGLLRRLIDTVTLGSISNPRSKEFMELSGNDYHGLIVIKRRDGLEVRVEVLKNYELSISWEGDEFTVIECSPTQQPNSQHEHQKFINVGEQTVDLWDDEGWVASS

SEQ ID NO: 54272 - DNA, 50 bp, Vibrio parahaemolyticus
  source 1..50: mol_type = genomic DNA
gtttggttaattgaataagtaattaaggtgctgtatcgtattccctgaac

SEQ ID NO: 54273 - DNA, 40 bp, Vibrio parahaemolyticus; identical to SEQ ID NO: 4428
  source 1..40: mol_type = genomic DNA

SEQ ID NO: 54274 - DNA, 40 bp, Vibrio parahaemolyticus
  source 1..40: mol_type = genomic DNA
atttggctggcatgtggtcctggttctctacagaacatag

SEQ ID NO: 54275 - DNA, 50 bp, Vibrio parahaemolyticus
  source 1..50: mol_type = genomic DNA
gtatggttattaatgttggaaattctgctgtggtatttcagtctctgaaa

SEQ ID NO: 54276 - protein, 575 aa, Vibrio parahaemolyticus
MTKIAYSYTRLSTEKQIKGHGFTRQREAIEKVCCQHGWQLSDQTFNDLGVSAWKGANVTTGALSHFIELTKKGAIKPDSVLIVESVDRLSRQQVDKSLRLMLELLDVGISIFTLSDSKLYTTNSDNVMLDLMMWLMTAQRAHEESEMKSLRIRAAKRKNKELIRQGVIVSRKCPEWLSVSDDKSCFIVNEERAEIVRKVFIWYSQGFSTKPIALKLNELGVPYWGKSSTWSYRHIRSLLKHRAVIGDIQPLIRVNGKDVPDGDVVSDYYPAIVDKGLWATCQQIKSSKTTARGRTVEIGMANLFRGLLKCECGSGLAINSSTVKGRTYRFLRCSQLKTTGCQAKNWHYEKTERILLIALRHSLSSFSEEDHAVALRESQHYLARINEELKEKERQAENAINYLLDKPSRLLEARLQTLEDDIARLKAIQEQAEHRVEAVHYEKSTALDKVEELQRVLEDIANDDDSRHKANGLLRRLIDTVTLGSISNPRSKEFMELSGNDYHGLIVIKRRDGLEVRVEVLKNYELSISWEGDEFTVIECSPTQQPNSQHEHQKFINVGEQTVDLWDDEGWVASS

SEQ ID NO: 54277 - DNA, 50 bp, Vibrio parahaemolyticus; identical to SEQ ID NO: 54272
  source 1..50: mol_type = genomic DNA

SEQ ID NO: 54278 - DNA, 40 bp, Vibrio parahaemolyticus; identical to SEQ ID NO: 4428
  source 1..40: mol_type = genomic DNA

SEQ ID NO: 54279 - DNA, 40 bp, Vibrio parahaemolyticus; identical to SEQ ID NO: 54274
  source 1..40: mol_type = genomic DNA

SEQ ID NO: 54280 - DNA, 50 bp, Vibrio parahaemolyticus; identical to SEQ ID NO: 54275
  source 1..50: mol_type = genomic DNA

SEQ ID NO: 54281 - protein, 575 aa, Vibrio parahaemolyticus
MTKIAYSYTRLSTEKQIKGHGFTRQREAIEKVCCQHGWQLSDQTFNDLGVSAWKGANVTTGALSHFIELTKKGAIKPDSVLIVESVDRLSRQQVDKSLRLMLELLDVGISIFTLSDSKLYTTNSDNVMLDLMMWLMTAQRAHEESEMKSLRIRAAKRKNKELIRQGVIVSRKCPEWLSVSDDKSCFIVNEERAEIVRKVFIWYSQGFSTKPIALKLNELGVPYWGKSSTWSYRHIRSLLKHRAVIGDIQPLIRVNGKDVPDGDAVSDYYPAIVDKGLWATCQQIKSSKTTARGRTVEIGMANLFRGLLKCECGSGLAINSSTVKGRTYRFLRCSQLKTTGCQAKNWHYEKTERILLIALRHSLSSFSEEDHAVALRESQHYLARINEELKEKERQAENAINYLLDKPSRLLEARLQTLEDDIARLKAIQEQAEHRVEAVHYEKSTALDKVEELQRVLEDIANDDDSRHKANGLLRRLIDTVTLGSISNPRSKEFMELSGNDYHGLIVIKRRDGLEVRVEVLKNYELSISWEGDEFTVIECSPTQQPNSQHEHQKFINVGEQTVDLWDDEGWVASS

SEQ ID NO: 54282 - DNA, 50 bp, Vibrio parahaemolyticus; identical to SEQ ID NO: 54272
  source 1..50: mol_type = genomic DNA

SEQ ID NO: 54283 - DNA, 40 bp, Vibrio parahaemolyticus; identical to SEQ ID NO: 4428
  source 1..40: mol_type = genomic DNA

SEQ ID NO: 54284 - DNA, 40 bp, Vibrio parahaemolyticus; identical to SEQ ID NO: 54274
  source 1..40: mol_type = genomic DNA

SEQ ID NO: 54285 - DNA, 50 bp, Vibrio parahaemolyticus; identical to SEQ ID NO: 54275
  source 1..50: mol_type = genomic DNA

SEQ ID NO: 54286 - protein, 540 aa, Bittarella massiliensis
MKQPYNTTIYNTALYLRLSRDDELQGESGSIQTQRMMLRQYAAEHGLTVVDEYIDDGWSGTNFDRPSFQRMIDDIEDGKINCVVTKDLSRLGRNYILTGQYTEIYFPSKGVRYIAINDNVDTLNGESELAPFLNILNEMHARQTSKKVKAAMRTRFANGAHYGAYAPLGYIKDPDKTGHLLVDTETRWIIEKIFDLAVHGRGAASITRILVEEKVPAPGWLNFQRYGTFANIYAGAPEEKAYAWTIAQVKSILKEETYIGHSVHNKQSNISFKNKKKVRKPKEEWYRVENTHEAIISEDVFRQVQEQIASRRRRQKDGTTQIFSGLVKCADCGWSLAYGENKQNKTPYGYYHCSKNGQGLRQCSMHYIRYDVLYAYVLSRLQYWSQQAQQDEDKLLKRLLNASDKERSSAKKKQASELKKAEKRKAEVDGLFAKMYEDWSAGRITEYNFNMLSEKYQGEQKELDEKIQQLHEAMESAAQTAVDAEKWVGLMNQYVNPTELTAELLNTLIEKILVHEAVKGEDGSREQEVEIFYRFIGKID

SEQ ID NO: 54287 - DNA, 50 bp, Bittarella massiliensis
  source 1..50: mol_type = genomic DNA
caatatctttaattaagggaaacgggaatttcccatagttaaagatacca

SEQ ID NO: 54288 - DNA, 40 bp, Bittarella massiliensis
  source 1..40: mol_type = genomic DNA
ggtctccaagtgggagctgggggaggcggtccccgggacc

SEQ ID NO: 54289 - DNA, 40 bp, Bittarella massiliensis
  source 1..40: mol_type = genomic DNA
ggtctccaagtgggagctgatggaggcggtccccgggacc

SEQ ID NO: 54290 - DNA, 50 bp, Bittarella massiliensis
  source 1..50: mol_type = genomic DNA
atatttattaaataaatggaatcaataactttccaaaacagaagatacca

SEQ ID NO: 54291 - protein, 547 aa, Pseudomonas sp p99-361
MPIAVPYSRFSSGRQSYGSSLHRQEALIANWLAHHPEYTLYERKYEDLGVSGSSGKHIDAGELGELLAAIEDGQLPTGTAVLVEAMDRFSRLEPMDTLNHLRTIVKAGIEFVTLDDWQRYDAKSLKGNGLLYLALKAQTAHEFAVRLSEFAVGSYKRRAEKAKLNEPIKRRNPFWLTSEGKLKDDGSSDAIKQVFQAFANGVPLRALAIQYSQYFANRQSLKHALRNPAAIGYWQRTTTIEVDGGQKRVPGELIKGVFDPAVTEELFYQVQRMLDDLADQPVTVARKFPLAGLMECGDCGANMVLLRQNARQQTDAVRCYRRMQSTEKCTNQKTIPVPVIGWFYEATRKPHAFKAYQRTKLPENTRQRIKLEGQIEQLSKQQARLRKLVLLDENDESAVADYQQLVNEKKLREQELASLPLVTDSPVVGMPEFWRFMHSDPFAISNLLQQDGYRIICRNDGTLEIKESADDHPAESAQYVGYARKYRMWKVKPRGEDTMFVDSTGQIQFPQTVTITTSEQWQQRIEGTDLSAYMDGDDLADYLESQG

SEQ ID NO: 54292 - DNA, 50 bp, Pseudomonas sp p99-361
  source 1..50: mol_type = genomic DNA
acactgcataaatagaaattcagcctgcggaagtgtaagctatgcagtga

SEQ ID NO: 54293 - DNA, 40 bp, Pseudomonas sp p99-361
  source 1..40: mol_type = genomic DNA
cccgatggacaagttccgcctgctgcacgaccacctggtc

SEQ ID NO: 54294 - DNA, 40 bp, Pseudomonas sp p99-361
  source 1..40: mol_type = genomic DNA
cccgatggacaagttccgcgtgctgcacgaccacctggtc

SEQ ID NO: 54295 - DNA, 50 bp, Pseudomonas sp p99-361
  source 1..50: mol_type = genomic DNA
actctgcctgccatgtaatataatgtgctcaagtgttatagatgccgtga

SEQ ID NO: 54296 - protein, 517 aa, Burkholderia cenocepacia
MKPTKPRAYSYLRFSTPEQLKGDSYRRQTTMALEYAARHGLALDQDLTFEDLGVSAYRGANAEAGRLGEFLEAVRVGLVPRGSYLLVEALDRLSRLVPRKAVRVLEDIVEEGITVVTLNDGREYTSENLDADPTSLLIAIVLFMRANEESATKSRRLKAAWEGKRQNIEHRPLTAVTPAWVSLSEETGKLELVEDRAAIVRRIFDMYVAGIGYASIAETFNREGIVCFGRAQHWHRTYVRKILTNDAVVGVFTPHRIVHEGGKKVRVPLEKVPGYFPVVIPEEVFARAQAQLSGGSGAAPKHRGAVVSNLIAGLARCPLCGSTMTRVMKGAAPKGGRPKLICTKAKAGAGCQYHAVPLENVETAIAENASYITGNVPSGREGLDTELESVEVRIGATRDEIENLIQALAAAPSTAIAERVRDLEVSLEALQSERDSLADQLVSANGPLLAKRVDDLRVTLETDPMDRAKANAALRLLLSSVTVDYGRGKLRLEWKHGGETEVVYAMPLERKVNSPSA

SEQ ID NO: 54297 - DNA, 50 bp, Burkholderia cenocepacia
  source 1..50: mol_type = genomic DNA
attaggtcttgtgaagataccatcagcatggtattttcaaaagacctctt

SEQ ID NO: 54298 - DNA, 40 bp, Burkholderia cenocepacia
  source 1..40: mol_type = genomic DNA
cccgggtgggccgaccatcagcatgtgatgcccgcccgcg

SEQ ID NO: 54299 - DNA, 40 bp, Burkholderia cenocepacia; identical to SEQ ID NO: 54298
  source 1..40: mol_type = genomic DNA

SEQ ID NO: 54300 - DNA, 50 bp, Burkholderia cenocepacia
  source 1..50: mol_type = genomic DNA
ataagttctcatttagctgccatcagccttgtaattataggagactttat

SEQ ID NO: 54301 - protein, 466 aa, Staphylococcus nepalensis
MIKKVAIYTRVSTLEQANEGYSIEGQEQRLKAYCKVHDWDNFEFFVDAGQSASNTDRAGLQNLLNRLDEFDLVLVYKLDRLTRSVRDLMSLLDTFEEKDVKFRSATEVFDTTSAIGKLFITLVGAMAEWERSTITERTTQGRRVATEKGIYTTTPPFFYDKIEGKLYPNDKKEIVDYIVSRAKAGVSIRGITEELNNSVYNPPKGKRWDKSLVSYVLTAPVSRGHTHIGDVFVENTHEPVISEDDYNIYMQSISQRTHSRGIKHTAIFRGKLTCPNCGHSLTLNTSKRTNKNGSVDYDERYVCDRCRSDKSAENITIQSKEVERAFIDFIQHGEIEVNVEDTEEQEEQSVIDVDKIKRQRKKYQQAWAMDLMSDDEFQALIKETDDLLDQHNRQQLRKKENKNNHEQIEATHDLILNVWDKMASKDKEDLINASISNIQYNFYRGHGYGKNRTPNSINVTHIDYKL

SEQ ID NO: 54302 - DNA, 50 bp, Staphylococcus nepalensis
  source 1..50: mol_type = genomic DNA
gatggggtttgtgggtacaggctcccgaataatacaccaaaacccccaca

SEQ ID NO: 54303 - DNA, 40 bp, Staphylococcus nepalensis
  source 1..40: mol_type = genomic DNA
tgccgtaggtgtccaattcccgaatgtaccaccacccatt

SEQ ID NO: 54304 - DNA, 40 bp, Staphylococcus nepalensis
  source 1..40: mol_type = genomic DNA
tgccgtaggtgtccaattctggaatgtaccaccacccatt

SEQ ID NO: 54305 - DNA, 50 bp, Staphylococcus nepalensis
  source 1..50: mol_type = genomic DNA
gatgggttcatgaaggtcaggctctgggagaaaagagggcggcccccaga

SEQ ID NO: 54306 - protein, 466 aa, Staphylococcus cohnii
MIKKVAIYTRVSTLEQANEGYSIEGQEQRLKAYCKVHDWDNFEFFVDAGQSASNTDRAGLQNLLNRLDEFDLVLVYKLDRLTRSVRDLMSLLDTFEEKDVKFRSATEVFDTTSAIGKLFITLVGAMAEWERSTITERTTQGRRVATEKGIYTTTPPFFYDKIEGKLYPNDKKEIVDYIVSRAKAGVSIRGITEELNNSVYNPPKGKRWDKSLVSYVLTAPVSRGHTHIGDVFVENTHEPVISEDDYNIYMQSISQRTHSRGIKHTAIFRGKLTCPNCGRSLTLNTSKRTNKNGSVDYDERYVCDRCRSDKSAENITIQSKEVERAFIDFIQHGEIEVNVEDTEEQEEQSVIDVDKIKRQRKKYQQAWAMDLMSDDEFQALIKETDDLLDQHNRQQLRKKENKNNHEQIEATHDLILNVWDKMASKDKEDLINASISNIQYNFYRGHGYGKNRTPNSINVTHIDYKL

SEQ ID NO: 54307 - DNA, 50 bp, Staphylococcus cohnii
  source 1..50: mol_type = genomic DNA
gatggggtttgtgggtacaggctcccgaacaacacaccaaaacccccaca

SEQ ID NO: 54308 - DNA, 40 bp, Staphylococcus cohnii
  source 1..40: mol_type = genomic DNA
agcggtaggcgtccaattcccgaaagtaccgcctcccata

SEQ ID NO: 54309 - DNA, 40 bp, Staphylococcus cohnii
  source 1..40: mol_type = genomic DNA
agcggtaggcgtccaattctggaaagtaccgcctcccata

SEQ ID NO: 54310 - DNA, 50 bp, Staphylococcus cohnii; identical to SEQ ID NO: 54305
  source 1..50: mol_type = genomic DNA

SEQ ID NO: 54311 - protein, 525 aa, Paenibacillus amylolyticus
MQASEGTSLEGQLELCYKKARSLNISKEEIREYIEYGFTGEDIDRPALNELMQDVKDKKIKRLIVTHPDRLTRDLTDKLILCRELEKNDVELTFVDTEYLTTPEGQLFFNMMSSIAQYELQLIKKRTVRGRIRAVEKEGKVMPMRVAPFGYDFKDGKLTINEEESKFVHLIYQWYVREGRTLREIGEELLMLGALPKRAESKVWNASSISKILTSEIYVGRYFYNRRETKKLKGQKTVSGKAKKTYKIRDRSEWIELSVPAIISESLFSLAQLQRDKNLTRKGGNVKHNYLLKSLIRCSHCGRRWECTTYNSKKQGEKVTYPLYRCSGKYPRRFGESVHKCRVPTLRTDVLDDFVWSIVVKFLDNPEEVLSRLEETSKSPDDNLKELADEYSRQLKSKEDERTKIKLMFRKGIIDEKELDDDITQLNKEASKIKNEYDKIQDKLNSRNNKEATKEQLMELANAFKKYASAKLTDEDKRWIIEKLIDEIVITHNEEEDRFSISCIGYLGAKKDTYSFNLVSSTHRQ

SEQ ID NO: 54312 - DNA, 50 bp, Paenibacillus amylolyticus
  source 1..50: mol_type = genomic DNA
accttgtttcgagtacacatcgtcaagataatgtaaacacaaaacaaggt

SEQ ID NO: 54313 - DNA, 40 bp, Paenibacillus amylolyticus
  source 1..40: mol_type = genomic DNA
cctcgtcgcgcatatcgtcaaaaagttcgacaatacgggt

SEQ ID NO: 54314 - DNA, 40 bp, Paenibacillus amylolyticus
  source 1..40: mol_type = genomic DNA
cctcgtcgcgcatatcgtcataaagttcgacaatacgggt

SEQ ID NO: 54315 - DNA, 50 bp, Paenibacillus amylolyticus
  source 1..50: mol_type = genomic DNA
atttttttctgataatacatggtcattataaagaaaagcagaaacaatgt

SEQ ID NO: 54316 - protein, 589 aa, Listeria seeligeri
MKEIEIIKANRTITDRNKTYSLQLLRVGAYCRVSTDSEDQLNSYKSQVTYYTNLIKKNKDWIFTDIYADEAITGTQVDKRTDFQRLINDCMNGELDMVITKSISRFARNTLDTLKYVRMLKERNIAVYFEDEKINTLTMDGELLLVVLSSVAQQEVENISANVKKGLKMKMSRGELVGFQGCLGYDYHPEDKSISVNEEEAVIVKYIFNRYIEGAGGSVIGRELENLGYKTKRGSSNWAESTVLGIIKNEKYKGDILLGKTFTVDPISKRRLANYGEEDQFYLRNHHEPIITEEVFEKAQEILKKRSIPRGLHASNDGTVKRQKYSRKYAFSCMLECGFCDGTLTRRKWHSGSQYKKDIWQCVVSTKKGKKHCPHSKGIPEEAVEKAFVESYRQLCNGNKDIMEDFLKKLNETLNESSVEKQFTKIQKKIATLDKKKSNLVDMRLDEKIDEDTYEMKFTEISLKLDELLNERTSLENSLDNEHIMKKRLAEFRKTLQNNQVLDEFDRYVFESIVEKVIVGGVEEDGTIDPHKLVFIYKTGLTDSQDGGKFKPKRKNAKKSKGVDITNPDLCSQASDEDSKMCSLASDHT

SEQ ID NO: 54317 - DNA, 50 bp, Listeria seeligeri
  source 1..50: mol_type = genomic DNA
tgtgttcacttgctagtgaccacacacgtggagacgataacgttgctaca

SEQ ID NO: 54318 - DNA, 40 bp, Listeria seeligeri
  source 1..40: mol_type = genomic DNA
tatgtttccaatgacgacacatatcgaagctgtaaccgta

SEQ ID NO: 54319 - DNA, 40 bp, Listeria seeligeri
  source 1..40: mol_type = genomic DNA
tatgtttccaatgacgacaactatcgaagctgtaaccgta

SEQ ID NO: 54320 - DNA, 50 bp, Listeria seeligeri
  source 1..50: mol_type = genomic DNA
tgtgttcagtgataagtgaatataactgaggagatagggctattgttaca

SEQ ID NO: 54321 - protein, 583 aa, Streptococcus pasteurianus
MKEVEVIKARNDLQTRTRGKKIEFMRVGAYCRVSTDSADQLNSYKSQVAYYTDMIKKNKEWVLADIYADEAITGTQVAKREDFQRMINDCMNGEIDMVITKSISRFARNTLDTLKYVRMLKERNIAVYFEDEKINTLTMDGELLLVVLSSVAQQEVENISANVKKGLKMKMKRGELVGFQGCLGYDYHKDTKTITVNEEEAEIVRYIFNRYIEGAGGSVIAHELENLGYKTKYGSSTWVQSTVIGIIKNEKYKGDLLLGKTFTVDPISKRRLENFGEEDKFYIRNHHEPIISEEVFEKAQEILSRRNVNRGKIGEGNTKREKYSRKYAFSCMLECGFCGGTLTRRNWHSSSQYSKVIWQCVTATKKGKKFCKHSKGIPETAIEEAFVESYRLLCDDNKDVLEEFLQRMDDTLSSSAVSKQLAKAEKEIDALEKKKSKLVDMRLEEIIDKETYESKYADLVSKQEQLVEERQKLQETSDNEKDIKKRLKEFKKTLEQNEVLDKFDRYVFESIVEKVIVGGLDENGNVDPAQLTFVYKTGLKNSVDGAKFKPQRKNARGRHRTDELCSHDSNEVDKMCSDSSNDT

SEQ ID NO: 54322 - DNA, 50 bp, Streptococcus pasteurianus
  source 1..50: mol_type = genomic DNA
tgtgttctgatagtagtaacgacacatgtggagacttgtgtgttgctaca

SEQ ID NO: 54323 - DNA, 40 bp, Streptococcus pasteurianus
  source 1..40: mol_type = genomic DNA
tttgttcccgaatacgcatcacgttgaggcaatatcactg

SEQ ID NO: 54324 - DNA, 40 bp, Streptococcus pasteurianus
  source 1..40: mol_type = genomic DNA
tttgttcccgaatacgcataccgttgaggcaatatcactg

SEQ ID NO: 54325 - DNA, 50 bp, Streptococcus pasteurianus; identical to SEQ ID NO: 54320
  source 1..50: mol_type = genomic DNA

SEQ ID NO: 54326 - protein, 533 aa, Bacteroides fragilis
MENFELKGFAKGKKQQKEQVGGNAIIYTRVSSSEQVDGQSLEVQIDKCREYANMHSYNIVGEFGGTYESAKSDKERKEFSRMLTFIKQSNKKGSNQIVKTVIVFSTSRFSRTGSTTIIEEVEARGAYVVSATSNYDPRTPVGKYMQLMELANARFQNDEKRATTVENSVKALLKGRWIGKAPRGYDQKTTKKEQIITINEEGKLIRKAFLWKANNKLSNEEIRHRLAAEGFHICKQKLSELFKNPFYCGYMAHKFLQGDIVQGNHPPLIPKEIFLKVNGELSKNHNGYEQKIDKEYAPLLGSIKCPCCGNNLSASISTKMRKKFGRTDIGYYVCSRKGCKYNSSTKNVHEAFEEEVNKYSLSDKVSELLKLQLTITFDNMNKENKERAQSIKSNIKAKEKELEQVETNYALCSDAKKQEICIKVMTRLETEIRGLQVEYSKVNTEILNLDKFIDYAFTMRSNLFNLWELQGLEGRRRLQKLVFPDGFIYDKNNEHIEPKTVNQFFLLNYSFPTNNGDKKRETNSENHRSSLQV

SEQ ID NO: 54327 - DNA, 50 bp, Bacteroides fragilis
  source 1..50: mol_type = genomic DNA
aaatcaccgttcgtcccttcaagtacccttaacggatgaaatattgaacc

SEQ ID NO: 54328 - DNA, 40 bp, Bacteroides fragilis
  source 1..40: mol_type = genomic DNA
cttctggctagacgctcgtactcgaagcgggacttgaacc

SEQ ID NO: 54329 - DNA, 40 bp, Bacteroides fragilis
  source 1..40: mol_type = genomic DNA
cttctggctagacgctcgtcttcgaagcgggacttgaacc

SEQ ID NO: 54330 - DNA, 50 bp, Bacteroides fragilis
  source 1..50: mol_type = genomic DNA
atgtcccagcctttccctttaagtctccttttcggacaatatatagaaag

SEQ ID NO: 54331 - protein, 533 aa, Bacteroides fragilis; identical to SEQ ID NO: 54326

SEQ ID NO: 54332 - DNA, 50 bp, Bacteroides fragilis; identical to SEQ ID NO: 54327
  source 1..50: mol_type = genomic DNA

SEQ ID NO: 54333 - DNA, 40 bp, Bacteroides fragilis
  source 1..40: mol_type = genomic DNA
cttctgactagacgctcgtactcgaagcgggacttgaacc

SEQ ID NO: 54334 - DNA, 40 bp, Bacteroides fragilis
  source 1..40: mol_type = genomic DNA
cttctgactagacgctcgtcttcgaagcgggacttgaacc

SEQ ID NO: 54335 - DNA, 50 bp, Bacteroides fragilis; identical to SEQ ID NO: 54330
  source 1..50: mol_type = genomic DNA

SEQ ID NO: 54336 - protein, 533 aa, Bacteroides fragilis
MENFELKGFAKGKKQQKEQVGGNAIIYTRVSSSEQVDGQSLEVQIDKCREYANMHSYNIVGEFGGTYESAKSDKERKEFSRMLTFIKQSNKKGSNQIVKTVIVFSTSRFSRTGSTTIIEEVEARGAYVVSATSNYDPRTPVGKYMQLMELANARFQNDEKRATTVENSVKALLKGRWIGKAPRGYDQKTTKKEQIITINEEGKLIRKAFLWKANNKLSNEEIRHRLAAEGFHICKQKLSELFKNPFYCGYMAHKFLQGDIVQGNHPPLIPKEIFLKVNGELSKNHSGYEQKIDKEYAPLLGSIKCPCCGNNLSASISTKMRKKFGRTDIGYYVCSRKGCKYNSSTKNVHEAFEEEANKYVLSDKVSELLKLQLTITFENMNKENKERAQSIKSNIKAKEKELEQVETNYALCSDTKKQEICVKVMTRLEEEIRGLQAEYSKVNTEILNLDKFIDYAFAMRSNLFNLWELQGLEGRRRLQKLVFPDGFIYDKNNEHIEPKTVNQFFLLNYSFPTNNGDKKRETNSENHRSSLQV

SEQ ID NO: 54337 - DNA, 50 bp, Bacteroides fragilis; identical to SEQ ID NO: 54327
  source 1..50: mol_type = genomic DNA

SEQ ID NO: 54338 - DNA, 40 bp, Bacteroides fragilis; identical to SEQ ID NO: 54328
  source 1..40: mol_type = genomic DNA

SEQ ID NO: 54339 - DNA, 40 bp, Bacteroides fragilis; identical to SEQ ID NO: 54329
  source 1..40: mol_type = genomic DNA

SEQ ID NO: 54340 - DNA, 50 bp, Bacteroides fragilis; identical to SEQ ID NO: 54330
  source 1..50: mol_type = genomic DNA

SEQ ID NO: 54341 - protein, 533 aa, Bacteroides fragilis
MENFELKGFAKGKKQQKEQVGGNAIIYTRVSSSEQVDGQSLEVQIDKCREYANMHSYNIVGEFGGTYESAKSDKERKEFSRMLAFIKQSNKKGSSQVIKTVIVFSTSRFSRTGSTTIIEEVEARGAYVVSATSNYDPRTPVGKYMQLMELANARFQNDEKRATTVENSVKALLKGRWIGKAPRGYDQKTTKKEQIITINEEGKLIRKAFLWKANNKLSNEEIRHRLAAEGFHICKQKLSELFKNPFYCGYMAHKFLQGDIVQGNHPPLIPKEIFLKVNGELSKNHSGYEQKIDKEYAPLLGSIKCPCCGNNLSASISTKMRKKFGRTDIGYYVCSRKGCKYNSSTKNVHEAFEEEANKYVLSDKVSELLKLQLTITFENMNKENKERAQSIKSNIKAKEKELEQVETNYALCSDTKKQEICVKVMTRLEAEIRGLQVEYSKVNTEILNLDKFIDYAFAMRSNLFNLWELQGLEGRRRLQKLVFPDGFIYDKNNEHIEPKTVNQFFMLNYSFPTNNRDKKRETNSENHRSSLQV

SEQ ID NO: 54342 - DNA, 50 bp, Bacteroides fragilis; identical to SEQ ID NO: 54327
  source 1..50: mol_type = genomic DNA

SEQ ID NO: 54343 - DNA, 40 bp, Bacteroides fragilis; identical to SEQ ID NO: 54333
  source 1..40: mol_type = genomic DNA

SEQ ID NO: 54344 - DNA, 40 bp, Bacteroides fragilis; identical to SEQ ID NO: 54334
  source 1..40: mol_type = genomic DNA

SEQ ID NO: 54345 - DNA, 50 bp, Bacteroides fragilis; identical to SEQ ID NO: 54330
  source 1..50: mol_type = genomic DNA

SEQ ID NO: 54346 - protein, 533 aa, Bacteroides fragilis
MENFELKGFAKGKKQQKEQVGGNAIIYTRVSSSEQVDGQSLEVQIDKCREYANMHSYNIVGEFGGTYESAKSDKERKEFSRMLTFIKQSNKKGSNQIVKTVIVFSTSRFSRTGSTTIIEEVEDRGAYVVSATSNYDPRTPVGKYMQLMELANARFQNDEKRATTVENSVKALLKGRWIGKAPRGYDQKTTKKEQIITINEEGKLIRKAFLWKANNKLSNEEIRHRLAAEGFHICKQKLSELFKNPFYCGFMAHKFLQGDIVQGNHPPLIPKEIFLKVNGELSKNHSGYEQKIDKEYAPLLGSIKCPCCGNNLSASISTKMRKKFGRTDIGYYVCGRKGCKYNSSTKNVHEAFEEEVNKYSLSDKVSELLKLQLTITFDNMNKENKERAQSIKSNIKAKEKELEQVETNYALCSDTKKQEICVKVMTRLEAEIRGLQVEYSKVNTEILNLDKFIDYAFAMRSNLFNLWELQGLEGRRRLQKLVFPDGFIYDKNNEHIEPKTVNQFFLLNYSFRTNNGDKKRETNSENHRSSLQV

SEQ ID NO: 54347 - DNA, 50 bp, Bacteroides fragilis
  source 1..50: mol_type = genomic DNA
aaatcaccgttcgtcccttcaagtacccttaacggataaaatattgaacc

SEQ ID NO: 54348 - DNA, 40 bp, Bacteroides fragilis
  source 1..40: mol_type = genomic DNA
tttaggatgcaactatagtactcgaagcgggacttgaacc

SEQ ID NO: 54349 - DNA, 40 bp, Bacteroides fragilis
  source 1..40: mol_type = genomic DNA
tttaggatgcaactatagtcttcgaagcgggacttgaacc

SEQ ID NO: 54350 - DNA, 50 bp, Bacteroides fragilis; identical to SEQ ID NO: 54330
  source 1..50: mol_type = genomic DNA

SEQ ID NO: 54351 - protein, 478 aa, Mycolicibacterium fortuitum
MNTPRERVALYARISQDTTGQAIGVADQLEHARTFAAARGYLVVAEHADNDISAFRGAARPEYQRVLTLARERRIDRVIVYHLTRMTRNRMERAEFIDAFHACRVNVSEAQGGDYDLSTAAGRTWVDIQGALATWESEIKSERVTAAAARRARSGRPSGSLGYGWIKHGVGASATWTEHPHEAAVVREVVDRLLAGETLRGVTESLNGRGEPAPNSERWGKTSVKKLAIRESNAAQRIHHRGQPDEERFEGCWPPIVDRAKHEKIVALLTQPARRTNVTVTRPGARRHLLSWGIGECGVCGEMLRASTKRGRYGRPLDLYVCDGKGCVGRSEPAVDDLVKEVVIERLSQPDALDWLLGDDDEARRWSERVDELSRRLGEAADAFAEGAITTEQLRRITERVRPDLDEAEGRRAECVVSLDLDALRSLAGPTARENWDDMEVSQRRAVLEALGIKVIVDRTRRGPGFDPESVRFVWARP

SEQ ID NO: 54352 - DNA, 50 bp, Mycolicibacterium fortuitum
  source 1..50: mol_type = genomic DNA
gttgtccttccaggaccgccgggaaacaccgtagggtctgaaccgtgaat

SEQ ID NO: 54353 - DNA, 40 bp, Mycolicibacterium fortuitum
  source 1..40: mol_type = genomic DNA
tttgccgactccgccggggaacaggcagtcgccggtgaac

SEQ ID NO: 54354 - DNA, 40 bp, Mycolicibacterium fortuitum
  source 1..40: mol_type = genomic DNA
tttgccgactccgccggggggcaggcagtcgccggtgaac

SEQ ID NO: 54355 - DNA, 50 bp, Mycolicibacterium fortuitum
  source 1..50: mol_type = genomic DNA
cttgtccttggtccacctccaggaggggccggagagagaaaacctggaac

SEQ ID NO: 54356 - protein, 493 aa, Corynebacterium kefirresidentii
MTTKTTTTTTLPAGIYVRISLDKHDGAGVERQEEMCRKLAAEHGLEVSRVYSDNSISAYSGKDRPGFINLLADVKARKIGAVLSFAPDRISRNVGEYELFKATLKNTHCRLIYVNGGEQALDDPNADLISTMLSGVSQWESAIKSTRVAAAFAQHRSRGDYPTKPNRLFGYTRSGEPHPTEAALVRDAATRILAGESLRRIAREWEEKGVTTTSGGRPNAQNLRKSLLTPTMGGFTHYGLKKKDYTAAEWEKLSAWDKLGIIGRGNWEPVLDPEVWQALWAHLTNPARTTNRVGNAPQHLLSGIALCGKCGAPMSCRKKWYKKKGEGQPKRVYWCKGRGGGHPTRIAEPLERYITDLVLARLYQADIIGDLAAGVDTDRRAELTATRDMVRGRMADLEQQATLGNVSMDQFGRMNKALTDQLEAIDAELVELAGAGGVLSEVAGVTDVRAWWATATLELKRELIRALMTITIEHTGGPQSKFNPEYVTVDWKV

SEQ ID NO: 54357 - DNA, 50 bp, Corynebacterium kefirresidentii
  source 1..50: mol_type = genomic DNA
gtttacaccaatccaccaattagcaagctcatgggtgaattggtgtacaa

SEQ ID NO: 54358 - DNA, 40 bp, Corynebacterium kefirresidentii
  source 1..40: mol_type = genomic DNA
cggtgagactaacgctgcgaacctcgcgacttgttgtccc

SEQ ID NO: 54359 - DNA, 40 bp, Corynebacterium kefirresidentii
  source 1..40: mol_type = genomic DNA
cggtgagactaacgctgcgtgcctcgcgacttgttgtccc

SEQ ID NO: 54360 - DNA, 50 bp, Corynebacterium kefirresidentii
  source 1..50: mol_type = genomic DNA
atttataaagaaaagagatttaactggctcatggttttgcaggtgtacaa

SEQ ID NO: 54361 - protein, 698 aa, Faecalibacterium prausnitzii
MPKEPKITALYERLSRDDDLAGESNSITNQKKYLEDYAQKNGFKNIRHFTDDGFSGVNFNRPGFQSLIKEVEAGNVETLIVKDMSRLGRNYLQVGFYTEVLFPQKNVRFLAINNSIDSNNASDNDFAPFLNIMNEWYAKDTSNKIKAVFDARMKDGKRCSGSIPYGYNRLPNDKQTLVVDPVASEVVKRIFLLTNEGKSPRTIAELLTEEKVLIPAAYAKKYHPEQYNGTKFSNPYLWGTSSVRTILGRQEYLGHTVLRKSVSTNFKLHKRKETDEDEQYVFQNTHEPIISQELWDSVQKRRCRVNRASAWGTHTNRLSGYLYCADCGRRLTLQTHYSKKDGSTQYSYRCGGYASRVNGCTAHSISADNVEALILASVKRFSRFVLKDEETFALELQSLWKEKREEKPKQNQSELKRCQKRYDELSALIRSLYENLMAGLLPERQYKQLMAQYDSEQAELESKMETMKSEIAEDKSSSADIRHFISLIRKCKNPTEISDSMFNELVDKIVVYEAEGTGNARTQKVDIYFNYVGQVDIAYTEEELAELKAQKEQEERQRMEKQRKREKAYREKRKAKKITENGGEIIKTKTCPHCGKVFTPTSNRQLFCSRECWNQARQEQKKADREAERGTHYYRQRACAVCGHSYWPTHSQQEFCSEECRRINHNRKTLEFYHKKKGNPKPDPEAVPTPKPKEDNAA

SEQ ID NO: 54362 - DNA, 50 bp, Faecalibacterium prausnitzii
  source 1..50: mol_type = genomic DNA
aaacctcttgacgaagtccagcccgagggctatactttaataggacgata

SEQ ID NO: 54363 - DNA, 40 bp, Faecalibacterium prausnitzii
  source 1..40: mol_type = genomic DNA
ggccattgaacttgcgcccgaaggcaccggataccgtgca

SEQ ID NO: 54364 - DNA, 40 bp, Faecalibacterium prausnitzii
  source 1..40: mol_type = genomic DNA
ggccattgaacttgcgcccctaggcaccggataccgtgca

SEQ ID NO: 54365 - DNA, 50 bp, Faecalibacterium prausnitzii
  source 1..50: mol_type = genomic DNA
aactttcttaatttactccagcccctggtcagtactggagagggcagata

SEQ ID NO: 54366 - protein, 487 aa, Mycobacteroides abscessus
MKQQAKRALVVIRLSRVTDATTSPERQREACLDLCKQRGYEVVGTAEDLDVSAGKTTPFTRPQLGDWLTNRHNEFDVLVVFRMDRIVRRLLDLADLIRWCQTHSVALVSATEAFLDLTMEFGDVVALLVAKVAEMELAAISERNRSAAQHNMREGKYRGGPPPWGYRPEKIDGDWRFVQDDEQVGVINEVVRRVLDGEPLRQVAADLTDRAVLTPRDRVNQLKGREIRGYSWHSAKLREMLTSKSLLGHAVTASGSIRNDDGSPVIRATPILERDVFEQVQVELAGRENRKEPTKRSSSLLLRVLYCGVCGKPAYKLKGGKGRQDRYRCASAQYKSTCGNGMVLVADANEVLTDAVMFELGDKYRRDRMWDAGSDHAAELAEIDDTLADLTDQLGTGAFRKGTRQRERLDARIADLAERQAQLAAQATRPAGWTWVPTTELFRDWWGSQTIEQQNLWLRQMEVRMTWDHQGPHIDMRQLDKMAEQWE

SEQ ID NO: 54367 - DNA, 50 bp, Mycobacteroides abscessus
  source 1..50: mol_type = genomic DNA
tggtagtaaaactggacaatcgcttagcccacaagctatatttacaacca

SEQ ID NO: 54368 - DNA, 40 bp, Mycobacteroides abscessus; identical to SEQ ID NO: 29268
  source 1..40: mol_type = genomic DNA

SEQ ID NO: 54369 - DNA, 40 bp, Mycobacteroides abscessus
  source 1..40: mol_type = genomic DNA
tggcatgtccacggtcgagtgcgcgatcgggactatcgcg

SEQ ID NO: 54370 - DNA, 50 bp, Mycobacteroides abscessus
  source 1..50: mol_type = genomic DNA
ttttagtaattgtttagtatcccttggtacacaggccttatttacaaaca

SEQ ID NO: 54371 - protein, 507 aa, Bacillus altitudinis
MHFRKESVEEIIKYDDYPYKVYTRVSTDRDEQISSKENQIDVCRYWIEQHNYEWDDRSVLLDDGISGTVLEDRAAMKYIFSLAEKKEIKMVIFKSITRLARDLKDALYIREILVSNGVRVVTLEEDYDSLYESKASMKFEMSALFAEQLPKSMSVNISGVLAAKARRGEHSGRIPYGYMKEGKYLVINENEADVIRLIFHLYNNEGLGQKRVTYALQEKCKAGEIPPPRKRSNWQLTTVQTILKNPIYCGVHIANRHTTIKVDGRKKFIRNPPEKWTVYEDFCPPIVSREDWEKANNKQTVNKKRKFTPWNELRKLITCGKCGSKMVIIQTHREKKNGERTYWKYLKCSNFRRSGRDGCVNHVPIKYEELRDFVVENLITFSEGISHDFKKNALEQKEKQIKAIKAELKSLETQNKRLLELYLEDQMITKAEFQSKRNDIQAKITNLEQSLFSLQHVQNEKNSIIEMKAVIQELEDREKDLKHVFEKLIDRIVIDPNGKINIYYRFK

SEQ ID NO: 54372 - DNA, 50 bp, Bacillus altitudinis
  source 1..50: mol_type = genomic DNA
gatttgcaaaaggtgcgcttagcaaatgctaagcataccttttacaaatt

SEQ ID NO: 54373 - DNA, 40 bp, Bacillus altitudinis; identical to SEQ ID NO: 20513
  source 1..40: mol_type = genomic DNA

SEQ ID NO: 54374 - DNA, 40 bp, Bacillus altitudinis
  source 1..40: mol_type = genomic DNA
tgttcgaaatcatatttcgcatgccatgcaaaagctagga

SEQ ID NO: 54375 - DNA, 50 bp, Bacillus altitudinis
  source 1..50: mol_type = genomic DNA
gagaagcaaaaactgctctgagcacatgctgagtttgacccttacaatat

SEQ ID NO: 54376 - protein, 494 aa, Mycobacteroides chelonae
MGARVSVLSGPQKVSHEAQIDTATKWATAHDYPVVGSFEDLGVSASVPPDERPELGPWIRERSHEWEVIIWSKLDRGFRSMRHCSDFIKWAETNRKIVVFAEDGLTLNYLNPASVVESTLSELFVSMAAAFAQIELNRFKSRAEDMHRAIRPTTRWAAGLPPLGYQVVDHPSGRGKGLAIDPDAASLVREMADRLVDGWSFVRITEWLNESGKLTSQGRSRKARGFEPKGRWTTTNVIEILTGYRTLGIKTHKGQPVLDNDGEPIRLAPPLFTPERWDEVQRAAQLRKGKPRTPSETANPMLEVGFCAVCGSSLAQQFSKTRPRKSDGHVTYYRYYRCSRTPINCKAVFVVADDLDELLSEQFLLERGDRRVTERVFIPGEDNSYELDFIKDRIERLREDRVSGLFPSGEDELVFRNQMKQLLARREELASVPVRQPGYENVELEKTYREVWPAATPEEKRKMLIDAEISIRLGASPGKSLRAELVIGTPYGCG

SEQ ID NO: 54377 - DNA, 50 bp, Mycobacteroides chelonae
  source 1..50: mol_type = genomic DNA
cttctcataggtgtacttctcgatcaacagtagcatacactattgaaaca

SEQ ID NO: 54378 - DNA, 40 bp, Mycobacteroides chelonae; identical to SEQ ID NO: 20143
  source 1..40: mol_type = genomic DNA

SEQ ID NO: 54379 - DNA, 40 bp, Mycobacteroides chelonae
  source 1..40: mol_type = genomic DNA
gatcgccatgctcctcgattaacagatcccgatggaagtg

SEQ ID NO: 54380 - DNA, 50 bp, Mycobacteroides chelonae
  source 1..50: mol_type = genomic DNA
cttctaataagcagccctgtggaataacagtttcctattttagtgaaaca

SEQ ID NO: 54381 - protein, 494 aa, Mycobacteroides chelonae
MGARVSVLSGPQKVSHEAQIDTATKWATAHDYPVVGSFEDLGVSASVPPDERPELGPWIRERSHEWEVIIWSKLDRGFRSMRHCSDFIKWAETNRKIVVFAEDGLTLNYLNPASVVESTLSELFVSMAAAFAQIELNRFKSRAEDMHRAIRPTTRWAAGLPPLGYQVVDHPSGRGKGLAIDPDAASLVREMADRLVDGWSFVRITEWLNESGKLTSQGRSRKARGLEPKGRWTTTNVIEILTGYRTLGIKTHKGQPVLDNDGEPIRLAPPLFTPERWDEVQRAAQLRKGKPRTPSETANPMLEVGFCAVCGSSLAQQFSKTRPRKSDGHVTYYRYYRCSRTPINCKAVFVVADDLDELLSEQFLLERGDRRVTERVFIPGEDNSYELDFIKDRIERLREDRVSGLFPSGEDELVFRNQMKQLLARREELASVPVRQPGYENVELEKTYREVWPAATPEEKRKMLIDAEISIRLGASPGKSLRAELVIGTPYGCG

SEQ ID NO: 54382 - DNA, 50 bp, Mycobacteroides chelonae; identical to SEQ ID NO: 54377
  source 1..50: mol_type = genomic DNA

SEQ ID NO: 54383 - DNA, 40 bp, Mycobacteroides chelonae; identical to SEQ ID NO: 20143
  source 1..40: mol_type = genomic DNA

SEQ ID NO: 54384 - DNA, 40 bp, Mycobacteroides chelonae; identical to SEQ ID NO: 54379
  source 1..40: mol_type = genomic DNA

SEQ ID NO: 54385 - DNA, 50 bp, Mycobacteroides chelonae; identical to SEQ ID NO: 54380
  source 1..50: mol_type = genomic DNA

SEQ ID NO: 54386 - protein, 581 aa, Escherichia coli
MPQLYSYIRWSSDRQDKGTTKSRQVAAAKAYAEEAGLELVEIIDPGVSAFRGKNRAGKLGDFIDAVKNNAIPSDSWLYCENLDRLSRDQVDEALRLFLELIGLGLTIVTGMDRKVYNRESIRQNPTDLMISILMFIRGNEESETKSHRTIGNVVALVERHKNGLPVNIKSVGRHPFWIDDSGSQYEAVKKHPVYWSIAREALDMFISGHGVYSVKRALDKKYPNGLRGKEWDYQVLKKMRDNRALIGERTIKVDGQSYKLCNYYPALCKDETEFLILAEKKKQNKFISKKCTTDKIRLLSGFSILRCSKCGGTMHSFMNKNVHRYICTNGTHKQKNCSGWSVIGSLVEHCTMIALLIGYINQSRKNGCDTTSIDEDIINKQSVIEGLNSKITNLTLAISIAKDVNELATLLQSLNTQREKLLVEIEKLKERSVSLKAKGSFEIEITDFLILIQYATFKNLEDENRNKIRKVIHSIIEFIVIDKTDSCITIYIKCYGIDEVFIFGGVQRKPYWRFDIGIINDSKLQMISSYDKNIGRTKERKNKEYLDGLRESYQGLYESAVLMLNEMGYPDINGALFWPNR

SEQ ID NO: 54387 - DNA, 50 bp, Escherichia coli; identical to SEQ ID NO: 42327
  source 1..50: mol_type = genomic DNA

SEQ ID NO: 54388 - DNA, 40 bp, Escherichia coli
  source 1..40: mol_type = genomic DNA
tcgacaaggtttttcggacagccaagggaaacaaagccga

SEQ ID NO: 54389 - DNA, 40 bp, Escherichia coli
  source 1..40: mol_type = genomic DNA
tcgacaaggtttttcggacttccaagggaaacaaagccga

SEQ ID NO: 54390 - DNA, 50 bp, Escherichia coli
  source 1..50: mol_type = genomic DNA
aatattttttagaattttttgtacttcctaaatataaggaaccatacaaa

SEQ ID NO: 54391 - protein, 581 aa, Escherichia coli; identical to SEQ ID NO: 1621

SEQ ID NO: 54392 - DNA, 50 bp, Escherichia coli; identical to SEQ ID NO: 42327
  source 1..50: mol_type = genomic DNA

SEQ ID NO: 54393 - DNA, 40 bp, Escherichia coli; identical to SEQ ID NO: 54388
  source 1..40: mol_type = genomic DNA

SEQ ID NO: 54394 - DNA, 40 bp, Escherichia coli; identical to SEQ ID NO: 54389
  source 1..40: mol_type = genomic DNA

SEQ ID NO: 54395 - DNA, 50 bp, Escherichia coli; identical to SEQ ID NO: 54390
  source 1..50: mol_type = genomic DNA

SEQ ID NO: 54396 - protein, 581 aa, Escherichia coli; identical to SEQ ID NO: 36686

SEQ ID NO: 54397 - DNA, 50 bp, Escherichia coli; identical to SEQ ID NO: 42327
  source 1..50: mol_type = genomic DNA

SEQ ID NO: 54398 - DNA, 40 bp, Escherichia coli; identical to SEQ ID NO: 54388
  source 1..40: mol_type = genomic DNA

SEQ ID NO: 54399 - DNA, 40 bp, Escherichia coli; identical to SEQ ID NO: 54389
  source 1..40: mol_type = genomic DNA

SEQ ID NO: 54400 - DNA, 50 bp, Escherichia coli; identical to SEQ ID NO: 54390
  source 1..50: mol_type = genomic DNA

SEQ ID NO: 54401 - protein, 581 aa, Escherichia coli
MPQLYSYIRWSSDRQDKGTTKSRQVAAAKAYAEEAGLELVEIIDPGVSAFRGKNRAGKLGDFIDAVKNNAIPSDSWLYCENLDRLSRDQVDEALRLFLELIGLGLTIVTGMDRKVYNRESIRQNPTDLMISILMFIRGNEESETKSHRTIGNVVALVERHKNGLPVNIKTVGRHPFWIDDSGSQYEAVKKHPVYWSIAREALDMFISGHGVYSVKRALDKKYPNGLRGKEWDYQVLKKMRDNRALIGERTIKVDGQSYKLCNYYPALCKDETEFLILAEKKKQNKFISKKCTTDKIRLLSGFSILRCSKCGGTMHSFMNKNVHRYICTNGTHKQKNCSGWSVIGSLVEHCTMIALLIGYINQSRKNGCDTTSIDEDIINKQSVIEGLNSKITNLTLAISIAKDVNELATLLQSLNTQREKLLVEIEKLKERSVSLKAKGSFEIEITDFLILIQYATFKNLEDENRNKIRKVIHSIIEFIVIDKTDSCITIYIKCYGIDEVFIFGGVQRKPYWRFDIGIINDSKLQMISNYDKNIGRTKERKNKEYLDGLRESYQGLYESAVLMLNEMGYPDINGALFWPNR

SEQ ID NO: 54402 - DNA, 50 bp, Escherichia coli; identical to SEQ ID NO: 42327
  source 1..50: mol_type = genomic DNA

SEQ ID NO: 54403 - DNA, 40 bp, Escherichia coli; identical to SEQ ID NO: 54388
  source 1..40: mol_type = genomic DNA

SEQ ID NO: 54404 - DNA, 40 bp, Escherichia coli; identical to SEQ ID NO: 54389
  source 1..40: mol_type = genomic DNA

SEQ ID NO: 54405 - DNA, 50 bp, Escherichia coli; identical to SEQ ID NO: 54390
  source 1..50: mol_type = genomic DNA

SEQ ID NO: 54406 - protein, 533 aa, Bacteroides stercoris
MENFDLKGFAKGKKQQKEQIGGNAIIYTRVSSSEQVDGQSLEVQIDKCREYAKVRSYTVVGEFGGTYESAKSDKERKEFNRMLAFIKQSNKKGSSQPVKTVIVFSTSRFSRTGSTTIIEEVEARGAYVVSATSNYDPRTPVGKYMQLMELANARFQNDEKRATTIENSVKALLKGRWIGKAPRGYDQKTTKKEQIITINEEGKLIRKAFLWKANNKLSNEEIRHRLEAEGLHICKQKLSELFKNPFYCGYMAHKFLQGDIVQGNHPPLISKEIFLKVNGELSKNHSGYEQKIDKEYAPLLGSIKCPCCGKNLSASISTKMRKRFGRTDIGYYVCSRKGCKYNSSTKKVHEAFEEEVNRYALSDKVSELLKMQLTITFEYMNQENRERAKSIKANIKAKEKELEQVETNYALCTDAKKQSICEKVMTKLEKEVRDLKTEFSKVNTEILNLDKFIDFAFKMRSNLFELWELQGLEGRRRLQKLVFPDGFIYDKNNEHIEPKKVNQFFLLKYSYPTGNGDKKKETNREKHDSSLRV

SEQ ID NO: 54407 - DNA, 50 bp, Bacteroides stercoris; identical to SEQ ID NO: 45552
  source 1..50: mol_type = genomic DNA

SEQ ID NO: 54408 - DNA, 40 bp, Bacteroides stercoris
  source 1..40: mol_type = genomic DNA
tacaaagccttagatgagtactcgaagcgggacttgaacc

SEQ ID NO: 54409 - DNA, 40 bp, Bacteroides stercoris
  source 1..40: mol_type = genomic DNA
tacaaagccttagatgagtattcgaagcgggacttgaacc

SEQ ID NO: 54410 - DNA, 50 bp, Bacteroides stercoris
  source 1..50: mol_type = genomic DNA
aaaatacaagcttacccttaaaatatccttcacagaatgactgtagcaga

SEQ ID NO: 54411 - protein, 557 aa, Anaerotruncus rubiinfantis; identical to SEQ ID NO: 11171

SEQ ID NO: 54412 - DNA, 50 bp, Anaerotruncus rubiinfantis
  source 1..50: mol_type = genomic DNA
aaagtttccttaaccggctcccgcttagctggtgccgattaaggaaacta

SEQ ID NO: 54413 - DNA, 40 bp, Anaerotruncus rubiinfantis
  source 1..40: mol_type = genomic DNA
aaaagccgtcccgcgcgtatttcgcgcgggacggcttttt

SEQ ID NO: 54414 - DNA, 40 bp, Anaerotruncus rubiinfantis
  source 1..40: mol_type = genomic DNA
aaaagccgtcccgcgcgtatgtcgcgcgggacggcttttt

SEQ ID NO: 54415 - DNA, 50 bp, Anaerotruncus rubiinfantis
  source 1..50: mol_type = genomic DNA
acagttaccctatcctgctgcggctgagctggtatccaaaatgtaaaata

SEQ ID NO: 54416 - protein, 585 aa, Mycobacteroides abscessus
MEYDTSKLTNLLIADRQINTQAAAKIAVSYPRVSSKKQAEKDGDPDGYSLPAQREANRRKAATLGAVVVEEFVERAESAKSADRPKLQEMLTYIREHKVDYVIVHKIDRLARNRADDVEISLAIKQAGAELVSATENIDETPNGMLLHGIMSAIAEYYSRNLAVEVTKGMTQKAKIGGTPGKAPLGYLNVRKINAHGADVRTVDVDPVRAPLITWAFHAYASGDWTLKALAAELEQRGLTTRPTPKTPARPIKYNSLHKILTTPYYKGIVVFSKAAYPGKHKPLIDEVTWAKVQEVLSSHATGEKQREHPHYLKSSVFCGNCDSRLVITNAKNPSGTVYPYFICLGRHQKTTDCEQKAVLIAKVEQQVADYYRAVQLDPESRNQIETMLRDEMASYRTTAETQHKQLSLQKDRLERERTSLLQAHYAGAVPLDLLKAEQDRIARSLAEITDRLTATNMEFEQFERALTSALDYATNCHRAYIGAAHVHGGNQIRRLLNQAIFTEIYIDDEDIHGELAEPFRTLLSGELANAAQQHAANKGRGMADAGKNRPTSDNGSRTSLTEVLEKTNEKPDDSVASLKLTTLV

SEQ ID NO: 54417 - DNA, 50 bp, Mycobacteroides abscessus
  source 1..50: mol_type = genomic DNA
gagtttgaaactgactactttggtgcgcctgcgtgaatcgctttcaagcg

SEQ ID NO: 54418 - DNA, 40 bp, Mycobacteroides abscessus
  source 1..40: mol_type = genomic DNA
atgagcgctgcgtaaaagtgccctcggcaggattcgaacc

SEQ ID NO: 54419 - DNA, 40 bp, Mycobacteroides abscessus
  source 1..40: mol_type = genomic DNA
atgagcgctgcgtaaaagtagcctcggcaggattcgaacc

SEQ ID NO: 54420 - DNA, 50 bp, Mycobacteroides abscessus
  source 1..50: mol_type = genomic DNA
gagtttcctgcttccttctttggcaggactgtatcaaaccttttcaagag

SEQ ID NO: 54421 - protein, 555 aa, Thermoclostridium stercorarium
MKRAAIYARVSTEDQTDNTSFDTQVTDCRREAERRGYLTTEADVYLEDVSGAYGIDRRPVLRTVWEKYQTGFYDAIIVWHTDRLSRNLTVFTALVNSAREKRQCGTKGDGFIFARVPTEDTAEGRLLLNQLASFAEYERERIRLRTLTGKHSRAKEGAFFGGGELLGYRWNREKRRWEVVEEEANIVRLIYQMYVYGMDGEGPMGTMRIAERLQQLGIPTPNQMKGTRLGRPSKNGKVGEVWSETTVLRILTNTAYVGEHYFWRESKPITPESIKEEWIPVEFPAIVDRDLFEKAQEKRRNARGGFNRKKPRPLLAGRIRCGLCGHAYGVCVNGKKEAYKCNGRLKKNHLDGSPRCTSPILLQEPFEQAVKELLLNALSSPESARKAVEEYLSSLERKKVELETILGPANEQLSTVQEKMRRLAKVYLSGVLSDEEYHREQEALREQEQAIRQRFERYGTEFDTLTNVQRHIEDVKAVLESGLFDVRYSGDEHVVEEVAFVRVKDEKHLTVGFPQRTVKWEELLDLFQVTCWVYEDRIEVRGLFPLKNLPIHKAL

SEQ ID NO: 54422 - DNA, 50 bp, Thermoclostridium stercorarium
  source 1..50: mol_type = genomic DNA
aaatctaccaattcataaagcattaacacactttatgaattggtcaaatt

SEQ ID NO: 54423 - DNA, 40 bp, Thermoclostridium stercorarium
  source 1..40: mol_type = genomic DNA
gagcaggacgaaccgtgtcaatacgctttgcgttttattc

SEQ ID NO: 54424 - DNA, 40 bp, Thermoclostridium stercorarium
  source 1..40: mol_type = genomic DNA
gagcaggacgaaccgtgtctatacgctttgcgttttattc

SEQ ID NO: 54425 - DNA, 50 bp, Thermoclostridium stercorarium
  source 1..50: mol_type = genomic DNA
aaagattccaacaaataaagaatttaaacactttatttgtcatccatgtt

SEQ ID NO: 54426 - protein, 557 aa, Coprococcus comes; identical to SEQ ID NO: 48921

SEQ ID NO: 54427 - DNA, 50 bp, Coprococcus comes; identical to SEQ ID NO: 12922
  source 1..50: mol_type = genomic DNA

SEQ ID NO: 54428 - DNA, 40 bp, Coprococcus comes
  source 1..40: mol_type = genomic DNA
tggactctccggttgcaagaagtttatcccggagttccgg

SEQ ID NO: 54429 - DNA, 40 bp, Coprococcus comes
  source 1..40: mol_type = genomic DNA
tggactctccggttgcaagttgtttatcccggagttccgg

SEQ ID NO: 54430 - DNA, 50 bp, Coprococcus comes
  source 1..50: mol_type = genomic DNA
aaatatcgccctgtaatctcagcattttgagaggtgaggcaggccaatcg

SEQ ID NO: 54431 - protein, 554 aa, Vibrio campbellii
MNNRYSGGGKEMIADILQRVSTKKQSTDEKTGLKRQDENINNWLNQNPECTVRNEIVLKGQSAFSGKHVSNTLRLITAKHGDSVDINAKSISEFDKYLLEVYYGNMPAPDFLIVDEFSRLSRLKPSESNDLIRWFARMGISIVIAQEDKVYAPEAHDQFEDVMILHLRIKLAYEESKKKSQLIRTAKKHNLLKAMKEGGILKFGNMPKWLEVQNDQYVLVPHRAEAIRFMFDCVVSGMSKGATARELNKKGFKGWDRNGNDTENKWDATKIARIIDSKSVTGTHVSRTWKSDTERSSSYMGKAQSMEQGLEIPNAYPRIISDEVFHNAQLKRGSAITKQKKNCKTHNDGTCIIRNAVCSLCGSSMLYKHASRGEQYSEFLCSKRKYGGSCSNSSINYQKAEKAVLTLLFEHVNLSLLFEQDDSRDLLRAQQQAVQDEIDVLNARIKEKKHKHQKVSIEVALLLDDKETELEDIKQQLRAKQGEDFSDVIRTWEEIEKGEPQQRVKCSTLIEVVTSKIEIESIARGKKVVRVFGEFGCIFAMIEGGEINYFKGNW

SEQ ID NO: 54432 - DNA, 50 bp, Vibrio campbellii
  source 1..50: mol_type = genomic DNA
ttcccccaatcagtcgctatgctttaatgtaagtctcaaaaaggcggttt

SEQ ID NO: 54433 - DNA, 40 bp, Vibrio campbellii; identical to SEQ ID NO: 21628
  source 1..40: mol_type = genomic DNA

SEQ ID NO: 54434 - DNA, 40 bp, Vibrio campbellii; identical to SEQ ID NO: 21629
  source 1..40: mol_type = genomic DNA

SEQ ID NO: 54435 - DNA, 50 bp, Vibrio campbellii; identical to SEQ ID NO: 21630
  source 1..50: mol_type = genomic DNA

SEQ ID NO: 54436 - protein, 534 aa, Bradyrhizobium frederickii
MDTQRLPRAYSYVRFSTPEQAKGHSLQRQTDAARAWAAAAKVTLDDELTFQDKGVSGFTGANRETGELGVFLERVKDGTIPHGSWLLVESLDRISRQAARRAVRVIEDIIEHGITVVDLSDGGREYSAETLEKDPFLFMMMVLKFIRANEESATKGVRVAKAHAARREKFRGQEKLTKPYTLKLPAWIRWNTETASYELIEHRAKLLRWMFEMSDDGTGAHSIAAHLNDTKEDTWGAGKWKAKYWHRSYIRKLLTNKAAIGVFVPHTVRKIDGKRSKERTPQESIAHRFPAAVDRDLYERVNARLSTTAPRGKNAKEPIRSIFAGLMKCQHCGGTVTRVNKGQHVYLVCAAAHGKSGTCKYESVPYAEAVSAFKLRLLGTLEDAPTGSNTADMDAKIEQLKGTVDAGEDFVNELLELRITDKSRAASQRLRDAERELDEHREALRELLERRDALRSTNVNMRMSAVEKALTREPIDTEEANKALRGAVSKMVMRPQNARLDIWWHHAETPQETLFMTSRFDWDANSIENMTEED

SEQ ID NO: 54437 - DNA, 50 bp, Bradyrhizobium frederickii
  source 1..50: mol_type = genomic DNA
aattgtcattgacgaaatcacctgctcatgtgatcttcccaatgcccata

SEQ ID NO: 54438 - DNA, 40 bp, Bradyrhizobium frederickii
  source 1..40: mol_type = genomic DNA
cgccggcgggcatcatctgctcatgatcggcgcgcccggc

SEQ ID NO: 54439 - DNA, 40 bp, Bradyrhizobium frederickii
  source 1..40: mol_type = genomic DNA
cgccggcgggcatcatctggccatgatcggcgcgcccggc

SEQ ID NO: 54440 - DNA, 50 bp, Bradyrhizobium frederickii
  source 1..50: mol_type = genomic DNA
aattgacatccatcaactgacttggccagtttttcttagtcttgtccata

SEQ ID NO: 54441 - protein, 513 aa, Chryseobacterium indologenes
MGKIADLYIRVSTDEQADKGYSLRDQEDRLRRYCELKEISVRNVYIEDYSAKTFNRPEWKKLITALRKQKNIKNVTLLLFTKWDRFSRNTSQAYQTIDILRSLRSEPQAIEQPLDMSIPESKIMLSHYLTIPEVENERRALNVFYGMRRARKEGRWMGTAPLGYVNKITEDHKKYIAIKEVEAEILIWAFDKILENSFNTNQIWKMVREKAKGMSRFSKNNFWTAIRNPIYCGKIFIPAFKDEEAYFVKGLHEPIISELKFREVQDVLDGRKRDFTKPKIVSMDNLPLRGFLKCPKCERMLTGSASKGKLGRYYYYYHCSSQCGVRFRAPEVNAAFERQLSELLPRPGMSEVFIETVLEDFQSKTKKENIERKQMLKQVEDLNARLQKALIQKVDGTLDDDDYNFIKKDTYAKIERLEFDLSHLSDQNTEISRLLKSELAKIINLYKYYVEGDMEQKRQIISSMFPEKLVFDGEKHRTPRINSAVQLIYSKEREIRGNKKGTNLSFLDLSQQV

SEQ ID NO: 54442 - DNA, 50 bp, Chryseobacterium indologenes
  source 1..50: mol_type = genomic DNA
ttttttagatttgtcccaacaagtagacccagaagttcaaagttcgaact

SEQ ID NO: 54443 - DNA, 40 bp, Chryseobacterium indologenes
  source 1..40: mol_type = genomic DNA
tatgtaaaaggaagtttgtagccccaccaggaatcgaacc

SEQ ID NO: 54444 - DNA, 40 bp, Chryseobacterium indologenes
  source 1..40: mol_type = genomic DNA
tatgtaaaaggaagtttgtaaccccaccaggaatcgaacc

SEQ ID NO: 54445 - DNA, 50 bp, Chryseobacterium indologenes
  source 1..50: mol_type = genomic DNA
ttatctagagctttcccaacaattaatcacagcatcttgaagttggaaat

SEQ ID NO: 54446 - protein, 598 aa, Rhodococcus corynebacterioides
MTNAVGIKPLAVHYLRVSTRDQAERGGEAEGFSIPAQREACLRKAQSLDAVTVAEFVDAGESARSANRPELKKMLDYVKTHKIQYVIVHKIDRLARNRADDVEINLALTAVGAQLVSCSENIDETPSGMLLHGIMSSIAEFYSQNLATESRKGMLQKAKGGGTPGMAPFGYTNSRRRLDDGREVKIVEVDPDRGHWVTWAYEQYATGEWTAGMIKEEFDKYGVMTRPRPNRPSRPIALSNINMMLKNRYYTGKVSFEGVEYDGSHPPLVSESLFAEVQRVKQARHQSREKPRIHNHYLKGSVFCGECGEPLTYERTRNRAGNSYEYFYCLGRQRLKNGCSFRAIQADHLSDLVQSHWKTITMKESHVKRARSVVLEHVHEILPATAVARHSATERLKQLEQDSRKVLDAFYADAIDTPELRKEQARIATERAEAETQLSQFTISEERLVAKLNGCLDLLGHAHEYYSASGAKDRRELNQSVFIHIYVHDDDIIASDLTPAYQMLMNDNLAAEVESERKREQNIDVRTKDLVHATEVAGEDDRGQEWILRDLPTKARRIDPDARIPGFLAVERPRGQMPWERKNHGPLEDRGSNISYLV

SEQ ID NO: 54447 - DNA, 50 bp, Rhodococcus corynebacterioides
  source 1..50: mol_type = genomic DNA
gaccgtggttctaacatttcctatttggtagtcctggctagcgccaaggc

SEQ ID NO: 54448 - DNA, 40 bp, Rhodococcus corynebacterioides
  source 1..40: mol_type = genomic DNA
cggatgccggctttcgcacgtggtagcggggacaggattt

SEQ ID NO: 54449 - DNA, 40 bp, Rhodococcus corynebacterioides
  source 1..40: mol_type = genomic DNA
cggatgccggctttcgcacatggtagcggggacaggattt

SEQ ID NO: 54450 - DNA, 50 bp, Rhodococcus corynebacterioides
  source 1..50: mol_type = genomic DNA
gacagtggtgtgtttctctcccatatgctagtctagatgcactccagggc

SEQ ID NO: 54451 - protein, 495 aa, Mycobacteroides abscessus; identical to SEQ ID NO: 48556

SEQ ID NO: 54452 - DNA, 50 bp, Mycobacteroides abscessus; identical to SEQ ID NO: 48557
  source 1..50: mol_type = genomic DNA

SEQ ID NO: 54453 - DNA, 40 bp, Mycobacteroides abscessus
  source 1..40: mol_type = genomic DNA
gatagcgatgctcctggatcaacagattccgatggaggtt

SEQ ID NO: 54454 - DNA, 40 bp, Mycobacteroides abscessus
  source 1..40: mol_type = genomic DNA
gatagcgatgctcctggatttacagattccgatggaggtt

SEQ ID NO: 54455 - DNA, 50 bp, Mycobacteroides abscessus
  source 1..50: mol_type = genomic DNA
ctgccactatgacactgtcttgatttaccatagcattaagtcttgaaata

SEQ ID NO: 54456 - protein, 533 aa, Mycobacteroides abscessus
MGARVSVLSGPQKVSHEAQIDTATKWAKAHDYPVVGAFEDLGVSASVPPDERPDLGPWIRERSHEWEVIIWSKLDRAFRSMRHCSDFIKWAETNRKVVVFAEDSMTLNYLNPSTGIDSILGELFVQIAAAFAQIELNRFKSRAEDMHRAIRPTTRWAAGLPPLGYQVVDHPSGRGKGLAIDADAASLVREMADKLVDGWSFVRITEWLNESGKLTSQGRSRKARGLDPKGRWTTTNVIEILTGYRSLGIKTHKGQPVLDDDGEPVRLAPPLFTPERWDEVQRAAQLRKGKPRTPSETANPMLEVGFCAVCGSSLAQQFSKTRPRKSDGHVTFYRYYRCSRTPINCKAVFVVADDLDELLSEQFLLERGDRRVTERVFIPGEDNSYELEFINQRIELLRGDRASGLFPSGEDEVVYRNQMKQLLARREELASVPVRQPGYENVELEMTYREVWPAATPEAKRKMLIDAEISILLGESPGKSLRAELVVNCTPGRTSGRTPKKSRPDQGRIAWVPEVPRLRAGPSPPPQNVCNDA

SEQ ID NO: 54457 - DNA, 50 bp, Mycobacteroides abscessus; identical to SEQ ID NO: 48557
  source 1..50: mol_type = genomic DNA

SEQ ID NO: 54458 - DNA, 40 bp, Mycobacteroides abscessus; identical to SEQ ID NO: 54453
  source 1..40: mol_type = genomic DNA

SEQ ID NO: 54459 - DNA, 40 bp, Mycobacteroides abscessus; identical to SEQ ID NO: 54454
  source 1..40: mol_type = genomic DNA

SEQ ID NO: 54460 - DNA, 50 bp, Mycobacteroides abscessus; identical to SEQ ID NO: 54455
  source 1..50: mol_type = genomic DNA

SEQ ID NO: 54461 - protein, 483 aa, Corynebacterium xerosis
MTKPIRAAIYTRISLDRHDEAGVERQEDLCRKLAAAHDAEIVDVFIDNSISAYAGGRRPEYERLKAAIAAGTVDRVYAYASDRIARRVRDLIDYLDICTPGGVTTHTVTGEVLDPASSSGRFLTTIMGAVAEQESALKGERVRAARRQAAERGLPRVHRRSFGFTADMEHVETEAQAIRDGVDAVIAGQSLSAIARDWNGRGLTTVRGAEHTRGSVREILMKPSIAGLSSYLPTRPDGHKYRADRQIVADGQWTPIVDRDAWEKAMVILSDPNRRHAGVGGAEVRSPLAGVVICPCGDAMYRRTRKSQRKGSPRRAFYSCRRSTPGRTHATIGAEIENIIAAAILDRLEKPNAADVLAAALAPGDAAATLITERHDLIQRRDDLEEEAVAGRLAASVFSRLSSRIEADLADLDQRISDAATGPAPAVLDAARAPDVRAWWANADARARRDVTAGAITRIDISPGRPGAKKFDPERVSITWRTD

SEQ ID NO: 54462 - DNA, 50 bp, Corynebacterium xerosis
  source 1..50: mol_type = genomic DNA
cgtacccactaccgtgatccgatgcatctcagtccactatactgggtacc

SEQ ID NO: 54463 - DNA, 40 bp, Corynebacterium xerosis
  source 1..40: mol_type = genomic DNA
cgaagccggcgatcccgtgcaggtcaaccccatccgcacc

SEQ ID NO: 54464 - DNA, 40 bp, Corynebacterium xerosis
  source 1..40: mol_type = genomic DNA
cgaagccggcgatcccgtggcggtcaaccccatccgcacc

SEQ ID NO: 54465 - DNA, 50 bp, Corynebacterium xerosis
  source 1..50: mol_type = genomic DNA
ctttccaacagatttgatcagatggctctctcactactgtactgggcccc

SEQ ID NO: 54466 - protein, 554 aa, Erysipelotrichaceae bacterium I46
MVAVKKKLDLFLKICDFRIDNVCFLNWDNTTGSLLSQIESFGAHDFIALTAADLSTDRKHLNTLLELLIIKKIRVISVLDRIIIHPNLPYLSKFEKMLFVGAAITRDKKITQKITQRKSVYPIQNTRHKKEYIGIYCRVSTREQTLGYSIENQKVKNLMYLELFDYSPKHIELYIDDGQSAANLERRDMKRMLEDVKDGKLDEIIIYKLDRLTRNVVDTYELVQLFLNLEVNLISVMDNLDIHSANGRMILGLLAIFAQWERETIIERTNDGQLQMAAEGKYPKPGCPLGYTKDKENYLSVDESTAKIIKDIFKWARSYTFVEIKNRIKKVYSMEIRVDRIRRIIFEDGYYGEFLYKGFVFPDIVPALIAKDEALEARKMLGKRAVMYGKEQNKFYYRNKVKCGCCGDITIGIPTYKNNKRYYYYYCKVCNKRINQDIIINETLYEVIRRIDETAVESVIMESMKKIERLEAKLKRITRKYAEDLINDDAYLLLTQELDIKIKKEKGYLGSMKIVKGAAWSDLSDEEKRKLIESVILTMTVDLDKKRIIDIEYE

SEQ ID NO: 54467 - DNA, 50 bp, Erysipelotrichaceae bacterium I46
  source 1..50: mol_type = genomic DNA
tgttcgttgtattccttaaagaggtaccatttaagagtacacgaactatt

SEQ ID NO: 54468 - DNA, 40 bp, Erysipelotrichaceae bacterium I46
  source 1..40: mol_type = genomic DNA
gttcgaatcccgtacgcgataccatatgaaaatcgtggac

SEQ ID NO: 54469 - DNA, 40 bp, Erysipelotrichaceae bacterium I46
  source 1..40: mol_type = genomic DNA
gttcgaatcccgtacgcgatgccatatgaaaatcgtggac

SEQ ID NO: 54470 - DNA, 50 bp, Erysipelotrichaceae bacterium I46
  source 1..50: mol_type = genomic DNA
tgttcctttggaaatttaaagggatgcagttgaagagaatattaactatt

SEQ ID NO: 54471 - protein, 455 aa, Enterococcus faecalis
MANEIKQVALYIRVSTDQQAKHGDSLDEQQHTLNEYVRQQGNMRVFKTYIDDGISGQKLYRDEFQKLLDDVKKGKIDTILFTKLDRWFRNLRHYLNIQEILDKNNVTWLAVTQPFFNTETAMGRSFVNQSMGFAELEAQMTSERIRAVFDNKIRKGEVVSGKVPLGYDIKDKHLVPNEKAKIVKEIFQYYLETGSMRATVRHLENHFSMTRDYQSVRQMLTNRKYIGELRDNKNFCEPIIDRDVFERVQLQLSKNIRMNKKRDYMFTGLLVCSECGCNYSATAVISRYVRKDGTTNPNERHLYRCTKNRNNVKKCSNKKGIYETTLENFLLENIEKQAEELSVKMQQEPEVKKTKNTNDKIKKKIDRLKKAYLNEVITLEEYKKDREELEALLIPERDNKIAKIDLNSLHNYSTAEFRDGYKQLTISEKSSLWRQVIKNIVVYPDGNLKINFLGY

SEQ ID NO: 54472 - DNA, 50 bp, Enterococcus faecalis
  source 1..50: mol_type = genomic DNA
atttgcactaataaatactaaccagatggatgatatattttagtgcaaat

SEQ ID NO: 54473 - DNA, 40 bp, Enterococcus faecalis
  source 1..40: mol_type = genomic DNA
tgacggtgtcggattgccagatggatgattatgagctaat

SEQ ID NO: 54474 - DNA, 40 bp, Enterococcus faecalis
  source 1..40: mol_type = genomic DNA
tgacggtgtcggattgccagttggatgattatgagctaat

SEQ ID NO: 54475 - DNA, 50 bp, Enterococcus faecalis
  source 1..50: mol_type = genomic DNA
atttgaacaatacctgactagcctgttggatgatatgaaactatgagaat

SEQ ID NO: 54476 - protein, 455 aa, Enterococcus faecalis
MANEIKQVALYIRVSTDQQAKHGDSLDEQQHTLNEYVRQQGNMRVFKTYIDDGISGQKLYRDEFQKLLDDVKKGRIDTILFTKLDRWFRNLRHYLNIQEILDKNNVTWLAVTQPFFNTETAMGRSFVNQSMGFAELEAQLTSERIRAVFDNKIRKGEVVSGKVPLGYEIKDKHLVPNEKAEIVKEIFQYYLETGSMRATVRHLENHFNMTRDYQSVRQMLTNRKYIGELRDNKNFCEPIIDRDVFERVQLQLSKNIRMNKKRDYMFTGLLVCSECGCNYSATAVISRYVRKDGTTNPNERHLYRCTKNRNNVKKCSNKKGIYETTLENFLLENIEKQAKDLSVKMQREPEVKKTKNTNDKIKKKIDRLKKAYLNEVITLEEYKKDRKELEALLIPEMDNKIAKIDLNSLHNYSTAEFRDGYKQLTISEKSSLWRQVIKNIVVYPDGNLKINFIGY

SEQ ID NO: 54477 - DNA, 50 bp, Enterococcus faecalis
  source 1..50: mol_type = genomic DNA
atttgcactaacaaatactaaccagatggatgatatgttttagtgcaaat

SEQ ID NO: 54478 - DNA, 40 bp, Enterococcus faecalis; identical to SEQ ID NO: 33858
  source 1..40: mol_type = genomic DNA

SEQ ID NO: 54479 - DNA, 40 bp, Enterococcus faecalis
  source 1..40: mol_type = genomic DNA
agacggtgtcggattgccagttggatgattatgagctaat

SEQ ID NO: 54480 - DNA, 50 bp, Enterococcus faecalis; identical to SEQ ID NO: 54475
  source 1..50: mol_type = genomic DNA

SEQ ID NO: 54481 - protein, 455 aa, Enterococcus faecalis
MANEIKQVALYIRVSTDQQAKHGDSLDEQQHTLNEYVRQQGNMRVFKTYIDDGISGQKLYRDEFQKLLDDVKKGKIDTILFTKLDRWFRNLRHYLNIQEILDNNNVTWLAVTQPFFNTETAMGRSFVNQSMGFAELEAQMTSERIRAVFDNKIRKGEVVSGKVPLGYDIKDKHLVPNEKAEIVKEIFQYYLETGSMRATVRHLENHFSMTRDYQSVRQMLTNRKYIGELRDNKNFCEPIIDRDVFERVQFQLSKNIRMNKKRDYMFTGLLVCSECGCNYSATAVISRYVRKDGTTNPNERHLYRCTKNRNNVKKCSNKKGIYETTLENFLLENIEKQAEELSVRMQKEPEVKKTKNTNDKIKKKIDRLKKAYLNEVITLEEYKKDREELEALLIPEQDNKIAKIDLNSLHNYSTAEFRDGYKQLTISEKSSLWRQVIKNIVVYPDGNLKINFLGY

SEQ ID NO: 54482 - DNA, 50 bp, Enterococcus faecalis
  source 1..50: mol_type = genomic DNA
atttgcactaacaaatactaaccagatggatgatatattttagtgcaaat

SEQ ID NO: 54483 - DNA, 40 bp, Enterococcus faecalis; identical to SEQ ID NO: 54473
  source 1..40: mol_type = genomic DNA

SEQ ID NO: 54484 - DNA, 40 bp, Enterococcus faecalis; identical to SEQ ID NO: 54474
  source 1..40: mol_type = genomic DNA

SEQ ID NO: 54485 - DNA, 50 bp, Enterococcus faecalis; identical to SEQ ID NO: 54475
  source 1..50: mol_type = genomic DNA

SEQ ID NO: 54486 - protein, 452 aa, Listeria seeligeri; identical to SEQ ID NO: 39221

SEQ ID NO: 54487 - DNA, 50 bp, Listeria seeligeri
  source 1..50: mol_type = genomic DNA
tttagtacctcgatttctctcactggacggagaataaatgagatactaat

SEQ ID NO: 54488 - DNA, 40 bp, Listeria seeligeri; identical to SEQ ID NO: 21013
  source 1..40: mol_type = genomic DNA

SEQ ID NO: 54489 - DNA, 40 bp, Listeria seeligeri
  source 1..40: mol_type = genomic DNA
ttttggttcaagctacgatcaacggaaagagggaaccaag

SEQ ID NO: 54490 - DNA, 50 bp, Listeria seeligeri; identical to SEQ ID NO: 21685
  source 1..50: mol_type = genomic DNA

SEQ ID NO: 54491 - protein, 516 aa, Sphingomonas koreensis
MPRYETRRTKAPKVLSHKAVLYARVSSKEQDREGFSIDAQMKLLRNYAAENDIRIAEEFIDVETAKVAGRTQFNAMLGYLRRHPSVDTILVEKTDRLYRNLRDWVTIDDIEIDVHLVKEGTVISQESRSSEKFMHGIKVLMAKNYVDNLSEETRKGMLEKAEQGIWPTVAPIGYRNTIGTSGKKIIGVDPDMAPLVQRLFEWYGTGLYSLKEASRKAVLDGMVYRKSGKPIGTSTVHKMLRSRIYTGEFEWLGKRYQGTHEPLISVELWSRVQGILDGRHTKRVQGVEKDFLFTGLVHCGHCGCLLVGDIKKQKYIYYRCSHAKRKCPDPYVREEALVELFREQLAPVDIDAKILGWLKRALKEASDSQVKDHELGMRRLEAEQLDIRERMKSVARQNAEGVIDDHVLAALMADYKDEERKIARDLEMRLDADLSFIDEGMTILTVAKGAMCLFDSEDLYVKKRVLATLLSNSSFKGGDLTVSYRKPFDLIVKKLPRAALAGEAFRAEKPKTKKWL

SEQ ID NO: 54492 - DNA, 50 bp, Sphingomonas koreensis
  source 1..50: mol_type = genomic DNA
gaaaagcccaaaaccaagaaatggctccccttcgtggacgaagtccgaaa

SEQ ID NO: 54493 - DNA, 40 bp, Sphingomonas koreensis
  source 1..40: mol_type = genomic DNA
tttccgatggtgtcgctggctccctgagtaggattcgaac

SEQ ID NO: 54494 - DNA, 40 bp, Sphingomonas koreensis
  source 1..40: mol_type = genomic DNA
tttccgatggtgtcgctggcaccctgagtaggattcgaac

SEQ ID NO: 54495 - DNA, 50 bp, Sphingomonas koreensis
  source 1..50: mol_type = genomic DNA
gaaaaagcaattgacaagatatagcactctttcttgataaaagtcctcaa

SEQ ID NO: 54496 - protein, 468 aa, Mycobacterium asiaticum; identical to SEQ ID NO: 20791

SEQ ID NO: 54497 - DNA, 50 bp, Mycobacterium asiaticum
  source 1..50: mol_type = genomic DNA
ttaggccctatgagctgaaccagatcattggttggtggcttaggatacat

SEQ ID NO: 54498 - DNA, 40 bp, Mycobacterium asiaticum
  source 1..40: mol_type = genomic DNA
ataggtctcctgcaccaggtcctcggcgtcgtgcaccgat

SEQ ID NO: 54499 - DNA, 40 bp, Mycobacterium asiaticum
  source 1..40: mol_type = genomic DNA
ataggtctcctgcaccaggtgctcggcgtcgtgcaccgat

SEQ ID NO: 54500 - DNA, 50 bp, Mycobacterium asiaticum
  source 1..50: mol_type = genomic DNA
taaggccctgtaggctgaattacatgtttggtttttactcaaagaaaaat

SEQ ID NO: 54501 - protein, 599 aa, Rahnella aquatilis
MNNKPRLYSYVRWSSDRQATGTTLARQTESARLFAAEHDLVYVEILDAGVSAFKGKNSKQGALADFIAAVESGAIPSDSWLYVENLDRLSRADATTANELFLKLLRLGLTLVTGMDGKTFTLDSVNLNPTDLMLSILLFMRANEESRTKQKRVFGNVAALVERHNQGLPVNIKSAGSSPWWIDDRGSQYESVKPHPVHWSAGKKIVELLLEGWGCYRVATYLNERPEIYPPPRGNKGKGMKRKQSWVVANLTKMRRNRAMIGQKVITVNEMTYRLNNYFPSLCTETEFALMQDISQKNRIPQGAEKKVITLLSGLGVLRCGHCNGSMTFFSKLGKIRYVCQTGRNQNSDCGVWSVQGALVEALAIRAIIYGHSMQVMSGGTQAPSLEPQIEECKQRLISFEDRISNLTQAITMGGNLPSLVTVLAGLEDEKTKTLLEIDRLAQQEALKGSDADVDERIQEVIGLMTVNLLNDSSHPDRMKIREIVRAVLPAVTISKNADKAIKVDFRFPDGSHLTFEGHMDDIEKAYRATWTMPDGTPTDEFYSRLTGLLKKTFTKVLGGTMELEQTLVLEDRRLASIERLAEIHGLPALNGKHFFGKR

SEQ ID NO: 54502 - DNA, 50 bp, Rahnella aquatilis
  source 1..50: mol_type = genomic DNA
attggcattaaaaaatatttcggcaacccaaagtttatttagatgccaat

SEQ ID NO: 54503 - DNA, 40 bp, Rahnella aquatilis
  source 1..40: mol_type = genomic DNA
tattatttcgcacccgggcaacccgaaatacccgattgat

SEQ ID NO: 54504 - DNA, 40 bp, Rahnella aquatilis
  source 1..40: mol_type = genomic DNA
tattatttcgcacccgggcgtcccgaaatacccgattgat

SEQ ID NO: 54505 - DNA, 50 bp, Rahnella aquatilis
  source 1..50: mol_type = genomic DNA
tctggccttactttctattttggtgtctccaaatttcaggggatgtcaat

SEQ ID NO: 54506 - protein, 541 aa, Anaerobutyricum hallii; identical to SEQ ID NO: 21726

SEQ ID NO: 54507 - DNA, 50 bp, Anaerobutyricum hallii
  source 1..50: mol_type = genomic DNA
ttacttctttatcacacataagcgaatgctcatgtgcggtaaagtaataa

SEQ ID NO: 54508 - DNA, 40 bp, Anaerobutyricum hallii
  source 1..40: mol_type = genomic DNA
taacgatgatcctgcaaccaaatatctggatatgcagtat

SEQ ID NO: 54509 - DNA, 40 bp, Anaerobutyricum hallii
  source 1..40: mol_type = genomic DNA
taacgatgatcctgcaaccacatatctggatatgcagtat

SEQ ID NO: 54510 - DNA, 50 bp, Anaerobutyricum hallii; identical to SEQ ID NO: 21730
  source 1..50: mol_type = genomic DNA

SEQ ID NO: 54511 - protein, 556 aa, Pseudomonas helleri
MPTAFSYVRFSSDKQKHGASLKRQNDMAGTWLLNHPEYQRSELEFEDLGISGYKGKHLDNAFGRLLAAIENGTIAKGDCVLIEAIDRAGRLAPSVMLNLLTEIVNAGVSLVSLDDGVVYDDNPARSNNLFLLVAKVQQAHQYSDALSRRVKDAYARKRVKAAEGGGATRRTPLWLDADGKLIEDVAPIITRIFQDYADGIGERRILARVRGEHPLLDSLNPTTIKKWLKNPTAVGRWQPRPVDGVEQPAIDDVYPAVVSKELWYRVQKRLASGSRIKSASAVYLMSGLVKCGRCGRNFGVNNTKKSPALMLCMGRQRLGKAGCDNSRSIPMTVLDFIRSRTMQSAMLRAASNQKMTIGERRLIEIDGELSELNKQVERLVDAIAEFGTVPSIRTKMESVKGGIAELEKERAFLTVAPRQETISDMVDIENILMDDDQQKLNAMLQEAGYVIVCDGTTMTVEEENLYDTESGNHQVFEYKGANRATETYRLIENNRIEHHLDMPNSSIVEAQIEEDLRDEAEMQKLVDEGKLTRLVYHVTETGMTLKRAKEFNLSKP

SEQ ID NO: 54512 - DNA, 50 bp, Pseudomonas helleri
  source 1..50: mol_type = genomic DNA
aatatgtacattgccgatcttttcgggatataatcggcagtgttaagatg

SEQ ID NO: 54513 - DNA, 40 bp, Pseudomonas helleri
  source 1..40: mol_type = genomic DNA
aatcaatacgcccatcagcggcgtggtcgcattaaagatg

SEQ ID NO: 54514 - DNA, 40 bp, Pseudomonas helleri
  source 1..40: mol_type = genomic DNA
aatcaatacgcccatcagctgcgtggtcgcattaaagatg

SEQ ID NO: 54515 - DNA, 50 bp, Pseudomonas helleri
  source 1..50: mol_type = genomic DNA
aatacctacttcaaagaacttttgtgaatataaaaggaaattttaaaatg

SEQ ID NO: 54516 - protein, 535 aa, Faecalibacterium prausnitzii
MLRQTTQKITALYPRLSHEDELQGESNSISNQKRILETYAKQNGFSNLRWYTDDGYSGANFQRPGFQSMLADIEAGKVATVIVKDMSRLGRNYLQVGMYTEMIFPQKGVRFIAINDGVDSAQGDNDFAPLRNIFNEWLVRDTSKKIKAVKRSKGMSGKPVTSKPVYGYLMDEDENFIIDEEAAPVVKQIYRLCLAGNGPTKIARMLTEQEIPTPGTLEYRRTGSTRRYHPGYECKWATNTVVHILENREYMGCLVNFKTEKPSYKTKHSIENPIEKQAIFENHHEPIIDTQTWERVQELRKQRKRPNRYDEVGLFSGMLFCADCGSVMYQQRYQTDKRKQDCYICGNYKKRTHDCTAHFIRTDLLTAGVLSNLRKVTSYAAKHEARFMKLLIEQNEDGGKRRNAAKKKELEAAEKRIGELSAIFKRLYEDSVGGRISDERFTELSADYEAEQQELKERVARIQAELSKAQEATVNAEKFMNIVRKHMNFEELTHTLLREFGEKIVVHECSYDENGTRRQDIEIYYSFVGKVDLPE

SEQ ID NO: 54517 - DNA, 50 bp, Faecalibacterium prausnitzii; identical to SEQ ID NO: 38282
  source 1..50: mol_type = genomic DNA

SEQ ID NO: 54518 - DNA, 40 bp, Faecalibacterium prausnitzii
  source 1..40: mol_type = genomic DNA
ccgctgtatgccgcgcgcaaaaacggcaggtttgcaatgg

SEQ ID NO: 54519 - DNA, 40 bp, Faecalibacterium prausnitzii
  source 1..40: mol_type = genomic DNA
ccgctgtatgccgcgcgcaccaacggcaggtttgcaatgg

SEQ ID NO: 54520 - DNA, 50 bp, Faecalibacterium prausnitzii
  source 1..50: mol_type = genomic DNA
tttatacctctaagtacataatcacctgctcatgtctatctgataaatac

SEQ ID NO: 54521 - protein, 574 aa, Afipia felis
MDRSPPDRPKAFSYVRMSTDIQLKGDSLRRQQERSQKYALAHDLQLDQEFDLHDIGKSGFTGQNIASGNFGRFLEAVRRGEIPQGSYLLVESFDRLSRQEPIVALGPFLELVKAGINLVTLDDERVFSGNISFEDLIISIAKMSRANEESARKSDRLSQAWLNKRRHGSERKLTAQCPNWLKLSADRSTFTVVEEQAGKVRRIYADALAGLGAYSIVQHLNQEGVSTFLGKGGWQPSTVNKLLSNKAVVGEFQPHKRLNGKRLPEGAPIKDYFPAIIPDETFDAVQLARLSRKTMPTAEKKGSGGRKGLNYPNLFSKLAVCAYCKNPMSYVQKGKPPKTNSYLACSSAMRRSGCDHKTWWRYDDFEKAFLSLVEKLDLASLVSSATHAGKRADTVAKLEATEGKQKYLERELEVLFETGVQLGRSSEFLARKIEEIEPAIEKVKTDINEIRAEIAQLDSNALLYYGDKNQIADLVEKVRSTKGESVYRIRSQIASRLQSLLKSLELLIENDESEQQFEVNFCDGAHLMVFVNPKKPAEILKIIRKKDDLFILTDPDGNELDRYTMDEESEVEGY

SEQ ID NO: 54522 - DNA, 50 bp, Afipia felis
  source 1..50: mol_type = genomic DNA
atgggctcaattatccattccattaagatattgtggacaattaccaacaa

SEQ ID NO: 54523 - DNA, 40 bp, Afipia felis
  source 1..40: mol_type = genomic DNA
cttatccggcccgacattgaagatcgtgacaccgccctcg

SEQ ID NO: 54524 - DNA, 40 bp, Afipia felis
  source 1..40: mol_type = genomic DNA
cttatccggcccgacattgttgatcgtgacaccgccctcg

SEQ ID NO: 54525 - DNA, 50 bp, Afipia felis
  source 1..50: mol_type = genomic DNA
atgtcctcattttccctctacactttaatattgttgcttggtaacaacca

SEQ ID NO: 54526 - protein, 518 aa, Citrobacter freundii; identical to SEQ ID NO: 41471

SEQ ID NO: 54527 - DNA, 50 bp, Citrobacter freundii; identical to SEQ ID NO: 41472
  source 1..50: mol_type = genomic DNA

SEQ ID NO: 54528 - DNA, 40 bp, Citrobacter freundii; identical to SEQ ID NO: 6888
  source 1..40: mol_type = genomic DNA

SEQ ID NO: 54529 - DNA, 40 bp, Citrobacter freundii
  source 1..40: mol_type = genomic DNA
ggcaataatgccaatcaccagcatgagttcgataagcgta

SEQ ID NO: 54530 - DNA, 50 bp, Citrobacter freundii
  source 1..50: mol_type = genomic DNA
aacagtactttattatcattatcaagcattatatactgtatataattgta

SEQ ID NO: 54531 - protein, 472 aa, Mycobacteroides abscessus
MRVLGRVRLSRLTEESTSVERQRELIKKWSEMNDHTIVGWAEDIDVSGSIDPFEAPELGPWFQEDKRGDWDILVSWKLDRIGRRAIPLNKVFGWMLEHEKTLVCVSDNIDLSTWVGRLVANVIAGVAEGELEAIRERTKASRKKLLESGRWTGGPVPYWLIPEKLPEGGWVLSLNTETAPILRRAIDEVLDGTAVHTVAERLNDQGVPSPGGKKWTSQTLWRILQHKYLKGHSTDRGKTVRDSSGVPISNCEALLTPSEWDRLQAVLAQWKLPETSNRVKNTSPLLGVVVCYICDKPLYYRSYTRNYGKGLYRSYYCRNHRTPGIKADMLDEYLEENLMREVGDKNVLERYFVPAENHQIELDEAIRATEELTALLGTMTSATMRSSLTAQLAALDSRIASLEKLPTSESRWEYRELPRTYREMWESDDDPQFRRELLLKSGITLAATMTGGQKLHLHIPDDILERMALKGE

SEQ ID NO: 54532 - DNA, 50 bp, Mycobacteroides abscessus
  source 1..50: mol_type = genomic DNA
tgtctagaatagttactatacgacttatcatgtgggaatcattgtagact

SEQ ID NO: 54533 - DNA, 40 bp, Mycobacteroides abscessus
  source 1..40: mol_type = genomic DNA
cggcgtgatcacctacgacttggcgtgcgccgtgcagatg

SEQ ID NO: 54534 - DNA, 40 bp, Mycobacteroides abscessus
  source 1..40: mol_type = genomic DNA
cggcgtgatcacctacgacacggcgtgcgccgtgcagatg

SEQ ID NO: 54535 - DNA, 50 bp, Mycobacteroides abscessus
  source 1..50: mol_type = genomic DNA
tgtctagaactttctctgtgccccacaccttctgggcaagattgtctact

SEQ ID NO: 54536 - protein, 645 aa, Vibrio parahaemolyticus
MALIPYARVSSGKQLDGLSMSLQGDANLLKKLAKEHNTAVSDHIYNDEGVSSYKGKNVTDGELGRLIADIKKGIVKKGDIIVMRALDRLSRQKLTDSEILYNSIVGSGVHILTTIDNHLYKRDCVMSSVLKSLAFKTANEESAKKSFLTNSYASHRIEQFLSGEVPENGTAYDVGVGRHPFWIQVKDRVIQKHEHFALARIMFEKAMKGHGVARLQKFAKSQGLDLSYSAVGKMFRSHSVFGDLHITHQGKKYTLKGYYPALATETEYYKVRAIKDKLTKESNSQRKRVSILAGMQKLYCGCCGSSIGIARNTKQDIDYYGCTNKLDKCYQQLRQDIIDNIVLNAIDTHVFNVDTNDTSVLDGLELEFREKKKLHDNAVERFMILGDSAGDKAIETIHRLKSEVDEISKKIEIEKDKTASHAIDYDAISSYRDAMADYQAQQQKISEYVHGNSELKQEIKDILKLILKRITIDHRHMITIELLDGSKTYLYLLRRKDGKRLHDRYYVPIKVHDKDTINQIRESTPELVNWITEDERDTLDIYFEDVTNPFLAIERNHHQRDYESEFFDLLQGNVHEWKRADIMKLGATSTQWQEFKNADVSKYGFTKDVCTITTKHYTKQHKTIIYRNFDEQEIIEYLDCKKVEF

SEQ ID NO: 54537 - DNA, 50 bp, Vibrio parahaemolyticus
  source 1..50: mol_type = genomic DNA
gctccaaaatcgtagagcaacttgctttagcgtcaccaaaggtaagttac

SEQ ID NO: 54538 - DNA, 40 bp, Vibrio parahaemolyticus
  source 1..40: mol_type = genomic DNA
aaaatcgcctctacgctttctttggcatcgccaaacagca

SEQ ID NO: 54539 - DNA, 40 bp, Vibrio parahaemolyticus
  source 1..40: mol_type = genomic DNA
aaaatcgcctctacgctttggttggcatcgccaaacagca

SEQ ID NO: 54540 - DNA, 50 bp, Vibrio parahaemolyticus
  source 1..50: mol_type = genomic DNA
gcctgcaaatctttaaggaacttgggtgaggctcacagctggtaagttgc

SEQ ID NO: 54541 - protein, 523 aa, Klebsiella pneumoniae
MRQVITYLRFSSKPQERGDSIRRQKGLFERWLKDNPDAKVVDEFSDEGASAYHGHHLKGDFGRMLQNIQDGKYLSGQTVLLVESETRLNRQKARNTENLVDLITGKGVDVICLESGKIYTSTNIDDLDTSIQLKIAAHIAHQQSKEKSIKVSAAWEHRAQLALEGKQQLTKNVPGWIDPDTRKLNEHSSTVVTIFDLLLSGESLHNIARYLQANNIKSFSRREKANGFSVHSVRTILRSESTVGTLAASKRNDRPAIPNYYEPAIDVATFNKAQEILSKNRVGRAPASDNPITINLFKGIIRCQCGASVHPTGVKATYQGVYRCNNVPDGRCNVPTIKRKPFDKWMLDNIVGFLERDDGNNTDKRKAEIEYQISLVTSKLKKATTLLLELDDVTELKEQVKELNIQRSNLQSELDELTQRETLSDKPLHHLSEIDLTTKAGRVEAQLILSKFVQSIELQREMIIITLRNGTVIGKSRDLSPVLSQDLMKQVVSSPSPTDIDMFSVITSDEEFRKSGKQVTKRS

SEQ ID NO: 54542 - DNA, 50 bp, Klebsiella pneumoniae
  source 1..50: mol_type = genomic DNA
aacccgaatagcctatattcaagtgtcattgtatttgagctattcggcga

SEQ ID NO: 54543 - DNA, 40 bp, Klebsiella pneumoniae
  source 1..40: mol_type = genomic DNA
gcggcgaggtaaatcaagggtcattgcgctcatagtcgtt

SEQ ID NO: 54544 - DNA, 40 bp, Klebsiella pneumoniae
  source 1..40: mol_type = genomic DNA
gcggcgaggtaaatcaaggatcattgcgctcatagtcgtt

SEQ ID NO: 54545 - DNA, 50 bp, Klebsiella pneumoniae
  source 1..50: mol_type = genomic DNA
atttcaaatattaaatgttgaggtatcattgtatttttctgatttagaga

SEQ ID NO: 54546 - protein, 586 aa, Pseudomonas putida; identical to SEQ ID NO: 48646

SEQ ID NO: 54547 - DNA, 50 bp, Pseudomonas putida; identical to SEQ ID NO: 48647
  source 1..50: mol_type = genomic DNA

SEQ ID NO: 54548 - DNA, 40 bp, Pseudomonas putida
  source 1..40: mol_type = genomic DNA
gatcggcatgtggttggtcttgaagtagataccgaccatc

SEQ ID NO: 54549 - DNA, 40 bp, Pseudomonas putida; identical to SEQ ID NO: 54548
  source 1..40: mol_type = genomic DNA

SEQ ID NO: 54550 - DNA, 50 bp, Pseudomonas putida; identical to SEQ ID NO: 21765
  source 1..50: mol_type = genomic DNA

SEQ ID NO: 54551 - protein, 538 aa, Klebsiella michiganensis
MYTTHEMGIKMKVPVWSYARVSTLNQIDGFGIQRQVNTINQFIQCIVLDHRLPYTLDVNNITQMVSEGNSAFRGKNWNPKTKLGQYRKMVMDGVIPDSILIVENIDRLTRLDPFQAVEIISGLINRGTTILEIETGMTYSRYIPESITVLTMQINRANGESKRKSIMMKKSHENRYGNVSKVRPRWFDVVEIDGIKQYRQNDTATAIQRMFNDYVNGIGPAQIVRTYGKSDNGKQWTLVTVLRVLSDKRVADDPRYPPIIDKSLYEKVQSMKINQSRGSTHQKNMFNIFSGMSRCPICKQSIIVKRNSHGGLFTVCLGKRTHKTCEARSMAYNAIERPLLNAIKGLDFSTVYNREESNVLTLRDHWIRNERDIAAFRERLAKASRHEKFAILDELEAISKEQDELSIRLKSVDAPHDVQLDFNDDKLDLDVEYRIELNHRMKKLIQSIDIVRVDVSKSTYTVYCSIKYWTDFMSHFVIIDVESKRTGTGGTNTLTTSLRSVSSINRDGTISGNPDMEALDYWESIINQATSLALKNVR

SEQ ID NO: 54552 - DNA, 50 bp, Klebsiella michiganensis
  source 1..50: mol_type = genomic DNA
gggtgtacataattgacagactaggaacagctatgatagtatgtacacca

SEQ ID NO: 54553 - DNA, 40 bp, Klebsiella michiganensis
  source 1..40: mol_type = genomic DNA
cggccccatcaacagcagcgaacagtcggtggtaccgccg

SEQ ID NO: 54554 - DNA, 40 bp, Klebsiella michiganensis
  source 1..40: mol_type = genomic DNA
cggccccatcaacagcagcgtacagtcggtggtaccgccg

SEQ ID NO: 54555 - DNA, 50 bp, Klebsiella michiganensis
  source 1..50: mol_type = genomic DNA
aagtgttcagggaacacttactaggtacaggtattacacccagcacacca

SEQ ID NO: 54556 - protein, 490 aa, Faecalibacterium prausnitzii; identical to SEQ ID NO: 42626

SEQ ID NO: 54557 - DNA, 50 bp, Faecalibacterium prausnitzii
  source 1..50: mol_type = genomic DNA
gccgtggacaatgctccaccaaaaaatagtgcaaatccgaactcattctt

SEQ ID NO: 54558 - DNA, 40 bp, Faecalibacterium prausnitzii
  source 1..40: mol_type = genomic DNA
aatccctcacggcccaccaaaaagagcgcagctatgctat

SEQ ID NO: 54559 - DNA, 40 bp, Faecalibacterium prausnitzii
  source 1..40: mol_type = genomic DNA
aatccctcacggcccaccaagaagagcgcagctatgctat

SEQ ID NO: 54560 - DNA, 50 bp, Faecalibacterium prausnitzii
  source 1..50: mol_type = genomic DNA
gacgtggagcccaggacaccagacagaagtgcagataaagtctgactctt

SEQ ID NO: 54561 - protein, 487 aa, Mycobacteroides abscessus
MKQQAKRALVVIRLSRVTDATTSPERQREACLDLCKQRGYEVVGTAEDLDVSAGKTTPFTRPQLGDWLTNRHNEFDVLVVFRMDRIVRRLLDLADLIRWCQTHSVALVSATEAFLDLTMEFGDVVALLVAKVAEMELAAISERNRSAAQHNMREGKYRGGPPPWGYRPEKIDGDWRFVQDDEQVAVINEVVRRVLDGEPLRQVAADLTDRAVLTPRDRGNQLKGREIRGYSWHSAKLREMLTSKSLLGHAVTASGSIRNDDGSPVIRATPILERDVFEQVQVELAGRENRKEPTKRSSSLLLRVLYCGVCGKPAYKLKGGKGRQDRYRCASAQYKSTCGNGMVLVADANEVLTDAVMFELGDKYRRDRMWDAGSDHAAELAEIDDTLADLTDQLGTGAFRKGTRQRERLDARIADLAERQAQLAAQATRPAGWTWVPTTELFRDWWGSQTIEQQNLWLRQMEVRMTWDHQGPHIEMHQLERMAEQWE

SEQ ID NO: 54562 - DNA, 50 bp, Mycobacteroides abscessus
  source 1..50: mol_type = genomic DNA
tgatgtcggtagtaaaactagacagtcgaatagcccacaagctatattta

SEQ ID NO: 54563 - DNA, 40 bp, Mycobacteroides abscessus
  source 1..40: mol_type = genomic DNA
agaggatggcatgtccacggtcgaatacgccatcgggact

SEQ ID NO: 54564 - DNA, 40 bp, Mycobacteroides abscessus
  source 1..40: mol_type = genomic DNA
agaggatggcatgtccacgtacgaatacgccatcgggact

SEQ ID NO: 54565 - DNA, 50 bp, Mycobacteroides abscessus
  source 1..50: mol_type = genomic DNA
ttatgttgtgaactaaaatacacatacacatagcccccaaactggatttt

SEQ ID NO: 54566 - protein, 479 aa, Streptococcus suis
MNKVAIYVRVSTTSQAEEGYSIDEQIDKLSSYCKIKDWTVYDVYKDGGFSGGNIERPAMERLISDAKRKRFDTVLVYKLDRLSRSQKDTLFLIEEVFIKNNISFLSLNESFDTSTPFGKAMIGILSVFAQLEREQIKERLMLGKVGRAKSGKPMMFSSISFGYTYDKHAKELHINQAEAVIVKKIFSEYLSGRSLTNLRDYLNDNGFTRNGKYWDYQGLKRIMKNPVYIGMIRYNGVIYPGNHQAIIDAETFDKTQIELKKRQLQAAELQNNPRPFRAKYMLSGLLRCGYCSAPLTVVLSGKTKSGSRNIFYECYNRHPKIKKGRTIYNDGKKCNSGTYNKSYLEECILNEIRLLQLNPERIDDIYDVQPTIDVDGIENQIATLNKKLDKLNDLYLNDMVSMDVLKKQTHTLRQQKKILEHELENNNVEIIKNSKRIFKETLNISDITKLDYNIQKNIANTLIKEIVVKNGEITIQWRI

SEQ ID NO: 54567 - DNA, 50 bp, Streptococcus suis
  source 1..50: mol_type = genomic DNA
ctgccatatttagatacacgtattacaatcagcgtatctaaaactgacat

SEQ ID NO: 54568 - DNA, 40 bp, Streptococcus suis
  source 1..40: mol_type = genomic DNA
cgtcaggctggctcgaatgactgctcgagcggtttccgca

SEQ ID NO: 54569 - DNA, 40 bp, Streptococcus suis
  source 1..40: mol_type = genomic DNA
cgtcaggctggctcgaatgcatgctcgagcggtttccgca

SEQ ID NO: 54570 - DNA, 50 bp, Streptococcus suis
  source 1..50: mol_type = genomic DNA
ctaacctgtaacctcacacgttttcaaaacagcggaaactaaacagagat

SEQ ID NO: 54571 - protein, 483 aa, Streptococcus suis
MNKVAIYVRVSTTSQAEEGYSIDEQIDKLSSYCKIKDWTVYDVYKDGGFSGGNIERPAMERLISDAKRKRFDTVLVYKLDRLSRSQKDTLFLIEEVFIKNNISFLSLNESFDTSTPFGKAMIGILSVFAQLEREQIKERLMLGKVGRAKSGKPMMFSSISFGYTYDKHAKELHINQAEAVIVKKIFSEYLSGRSLTNLRDYLNDNGFTRNGKYWDYQGLKRIMKNPVYIGMIRYNGVIYPGNHQAIIDAETFDKTQIELKKRQLQAAELQNNPRPFRAKYMLSGLLRCGYCSAPLTVVLSGKTKSGSRNIFYECYNRHPKIKKGRTIYNDGKKCNSGTYNKSYLEECILNEIRLLQLNPERIDDIYDVQPTIDVDGIENQIATLNKKLDKLNDLYLNDMVSMDVLKKQTHTLRQQKKILEHELENNNVEIIKNSKRIFKETLNISDITKLDYNIQKNIANTLIKEIVVKNGGKSPSNGGFNFF

SEQ ID NO: 54572 - DNA, 50 bp, Streptococcus suis; identical to SEQ ID NO: 54567
  source 1..50: mol_type = genomic DNA

SEQ ID NO: 54573 - DNA, 40 bp, Streptococcus suis; identical to SEQ ID NO: 54568
  source 1..40: mol_type = genomic DNA

SEQ ID NO: 54574 - DNA, 40 bp, Streptococcus suis; identical to SEQ ID NO: 54569
  source 1..40: mol_type = genomic DNA

SEQ ID NO: 54575 - DNA, 50 bp, Streptococcus suis; identical to SEQ ID NO: 54570
  source 1..50: mol_type = genomic DNA

SEQ ID NO: 54576 - protein, 507 aa, Escherichia coli
MKRVISYIRFSSERQAKGDSLRRQSKMVNDWLKAHPEYYLDQDLSFRDLGVSGFTGKHLKGGLGDFLTAIEKGLVKAGDTLLIESLDRLSRQAVDRASELLRNILRSGVDVVTLSDGEHYTRESLKDPLALIKSILIMQRAHEESLRKSERIQAAWDAKKEAAKAGIKVSRRCPAWLRLNDDRKSFSVIPEKVETVKRCFQLRLEGKSIWEIVRTLNAEGHQTLNQYKAGKFGQTSVQDLLKNRSVIGYFTPKGCEEISGYFPPIIPETDFYKVQQLSYSRYGRKPASDKPLSVNLFKGVIRCSECGHALIITGFGDTRNGIYRCPLRNENRCSAKGLSRKQTDGTLLTLLSRLDRFDSDTTNVIDTWKLHREHISSNIEKLVQLSLEIEDLSAITIKLKQLKGELSQVDADIEKETQRLKSIDVGCLSDCDLTTKAGRIEAQLIIKSAVKEVVLNTAKRRCKVTFHNGRIIDLPITENPSEDVTEAIQSLSEVTERGLIDVDVVAI

SEQ ID NO: 54577 - DNA, 50 bp, Escherichia coli
  source 1..50: mol_type = genomic DNA
tagtatatttagaccttgatgatttttattagacacgtttaaatacacca

SEQ ID NO: 54578 - DNA, 40 bp, Escherichia coli; identical to SEQ ID NO: 5188
  source 1..40: mol_type = genomic DNA

SEQ ID NO: 54579 - DNA, 40 bp, Escherichia coli
  source 1..40: mol_type = genomic DNA
cggcgttaatcgggtgatttaagacagccgcccggttcat

SEQ ID NO: 54580 - DNA, 50 bp, Escherichia coli
  source 1..50: mol_type = genomic DNA
tattatattataatatatattatatatattacatacaatataatatacaa

SEQ ID NO: 54581 - protein, 544 aa, Pseudomonas helleri
MLNTSISKASSAMTVKKSLPRAFSDVFRDDETINVYSYIRFSSKAQSAGFSETRQLEQLNRFFEQYPQARQVERYEDLGVSAFKGKNLKSGQLAKFVERIKSKEILSNALLLVESFDRISRVGGYDALELIISIIQADCAIYTLFDNRLYSKRKKDSSVDISLIQNILERANDESKAKSERISDAKARNLIKGENGGIVTRRCPFWISFVDNKFVLNEHANAVKRMTELCFEIGFQAIAQELNKEEHARKYTESTVGKVLHKHAIYGSFLSMKNDENGNRTIVNKEIKNYYPAVISEAEFHRISVKLKERQDPKLAGRKASEFRNILRGLVFCKCGSTFRFHAQKNLYVDLVCNASSVAKCEFAKENKSIRYRYARVEEIFLAYQSLIPFHQIVVKSDDVKALEKEHQEVSGLIVLKEKALANNFAILESSSDSARKYITQRIDEVSEELDKLKADEHKLNQRIISMHLSSKSDLNVIEIYNLLMTEKGRIKINNFLHSQKIKLIITPVKKKFFTLDIYHDDKHIDTIDVTASDYTARNYTHLK

SEQ ID NO: 54582 - DNA, 50 bp, Pseudomonas helleri
  source 1..50: mol_type = genomic DNA
tttatacaaatcgctccgctcattgcaatgacaagcgcttttcgtataaa

SEQ ID NO: 54583 - DNA, 40 bp, Pseudomonas helleri
  source 1..40: mol_type = genomic DNA
ctcaagcatgccgatcaccgcattcatgggcgtgcggatt

SEQ ID NO: 54584 - DNA, 40 bp, Pseudomonas helleri
  source 1..40: mol_type = genomic DNA
ctcaagcatgccgatcacccaattcatgggcgtgcggatt

SEQ ID NO: 54585 - DNA, 50 bp, Pseudomonas helleri
  source 1..50: mol_type = genomic DNA
tttatacaaaaatgtagtctcatacaaataccaaaccttccacataaaaa

SEQ ID NO: 54586 - protein, 467 aa, Staphylococcus sciuri
MKVAIYCRVSTLEQSREGHSIDEQRKRLKAFCEVQDWKIYDEYIDPGFSGGNTTRPGLDKLMNDLDKIDLILVYKLDRLTRSVKDLMNLLEIFEKNDVSFRSATEVFDTTNAFGKLFITLVGAMAEWERSTIAERTKMGRQAATQKGIYTTGPPFYYDKVDGKLVPNEKREIADYIVKRALDGISIRGITEELTLSKYSPPKGKVWDRTTVKYVLTSPVSRGHTKIGDVLVENTHEPIMDEETYQLIMEKTRSRTRTKKRSHTTIFRNKIVCHQCGKKLTLNTWRRKRKDGSYRCNASYICEKCQKNKEASSFSLQKELVEKAFISYLSKADFKEDELDINKKTEHIDIIDGDKILKQREKYQQAYSLELITLDEFTKRMNETQKAYKLYEEQLEELKKIKSNDLKIDEVIELRDYIIKGWKHLSETDKENLVRSSIKNIYYSFIEGSGYGKNRIPNDLIVNHIDFY

SEQ ID NO: 54587 - DNA, 50 bp, Staphylococcus sciuri
  source 1..50: mol_type = genomic DNA
agtgtgggtaacggtggatgttttgggaaataccctcttttaatcccact

SEQ ID NO: 54588 - DNA, 40 bp, Staphylococcus sciuri
  source 1..40: mol_type = genomic DNA
aatgggaggaggaacgtttgggaattggacacctactgct

SEQ ID NO: 54589 - DNA, 40 bp, Staphylococcus sciuri; identical to SEQ ID NO: 54588
  source 1..40: mol_type = genomic DNA

SEQ ID NO: 54590 - DNA, 50 bp, Staphylococcus sciuri
  source 1..50: mol_type = genomic DNA
tatttggatcataaaggaagtattgggcaatctcctggggtaatcccact

SEQ ID NO: 54591 - protein, 507 aa, Escherichia coli
MKRAISYIRFSSEKQSRGDSLRRQAKMVTDWLKAHPEYYLDESLTFRDLGVSGFTGKHLKGGLGDFLTAIEKGLVKAGDTLLIESLDRLSRQDVDQASELLRNILRSGVDVVTLSDGEHYTRESLKDPLALIKSILIMQRAHEESLRKAERIQAAWNRKKELISEGIKVSRRCPAWLRLNDDRKSFSVIPEKVETVKRCFQLRLEGKSIWEIVRTLNDEGHQTLNQYKAGKFGQTSVQDLLKNRSVIGYFTPKGCCEIAGYYPSIIPESDFYKVQQLSYARGGRKPASGKPLSVNLFKGVIRCSECGHALIITGFSDTRNGIYRCPLRNENRCNAKGLSRKQTDGTLLALLSRIDRFDSDMTNTIDTLKLHREHISSNIEKLVQLSLEIEDLSAITSKLKQLKGELSQVDADIEKETQRLKSIDVGCLSDCDLTTKAGRIEAQLIIKSAVKEVVLNTAKRRCKVTFHNGKVIDLPITEDPSEDVTEAIQSLSEVTERGLIDVDEVII

SEQ ID NO: 54592 - DNA, 50 bp, Escherichia coli; identical to SEQ ID NO: 47682
  source 1..50: mol_type = genomic DNA

SEQ ID NO: 54593 - DNA, 40 bp, Escherichia coli; identical to SEQ ID NO: 5188
  source 1..40: mol_type = genomic DNA

SEQ ID NO: 54594 - DNA, 40 bp, Escherichia coli; identical to SEQ ID NO: 5188
  source 1..40: mol_type = genomic DNA

SEQ ID NO: 54595 - DNA, 50 bp, Escherichia coli
  source 1..50: mol_type = genomic DNA
atgtgtattatttatttgtttatttttaattgacacataataattgcaca

SEQ ID NO: 54596 - protein, 507 aa, Escherichia coli
MKRAISYIRFSSEKQSRGDSLRRQSKMVTDWLKAHPEYHLDQDLSFRDLGVSGFTGKHLQGGLGDFLTAIEKGLVKAGDTLLIESLDRLSRQDVDQASELLRNILRSGVDVVTLSDGEHYTKESLKDPLALIKSILIMQRSHEESLRKSERIQAAWNRKKELISEGIKISKRCPAWLKLNDDRKSFSVIPEKVETVKRCFQLRLEGKSIWEIVRTLNDEGHQTLNQYKAGKFGQTSVQDLLKNRSVIGYFTPKGCEEIAGYFPSIIPETDFYKVQQLSYSRYGRKPASDKPLSVNLFKGVIRCSECGHALIITGFSDTRSGIYRCPSRNENRCNAKGLSRKQTDGTLLALLSRLDRFDSDMTNTLDTLKLHREHISNNIEKLVQLSLEIEDLSAITSKLKQLKGELSQVDADIEKETQRLKSIDVGCLSDCDLTTKAGRIEAQLIIRSAVKEVVLNTAKRRCKVTFHNGKVIDLPITENPSEDVTEAIQSLSEVTERGLIDVDEVIV

SEQ ID NO: 54597 - DNA, 50 bp, Escherichia coli; identical to SEQ ID NO: 47682
  source 1..50: mol_type = genomic DNA

SEQ ID NO: 54598 - DNA, 40 bp, Escherichia coli; identical to SEQ ID NO: 5188
  source 1..40: mol_type = genomic DNA

SEQ ID NO: 54599 - DNA, 40 bp, Escherichia coli; identical to SEQ ID NO: 5188
  source 1..40: mol_type = genomic DNA

SEQ ID NO: 54600 - DNA, 50 bp, Escherichia coli; identical to SEQ ID NO: 54595
  source 1..50: mol_type = genomic DNA

SEQ ID NO: 54601 - protein, 507 aa, Escherichia coli; identical to SEQ ID NO: 47686

SEQ ID NO: 54602 - DNA, 50 bp, Escherichia coli; identical to SEQ ID NO: 47682
  source 1..50: mol_type = genomic DNA

SEQ ID NO: 54603 - DNA, 40 bp, Escherichia coli; identical to SEQ ID NO: 5188
  source 1..40: mol_type = genomic DNA

SEQ ID NO: 54604 - DNA, 40 bp, Escherichia coli; identical to SEQ ID NO: 5188
  source 1..40: mol_type = genomic DNA

SEQ ID NO: 54605 - DNA, 50 bp, Escherichia coli; identical to SEQ ID NO: 54595
  source 1..50: mol_type = genomic DNA

SEQ ID NO: 54606 - protein, 507 aa, Escherichia coli
MKRAISYIRFSSEKQSRGDSLRRQAKMVNDWLKAHPEYYLDESLTFRDLGVSGFTGKHLKGGLGDFLTAIEKGLVKAGDTLLIESLDRLSRQNVDRASELLRNILRSGVDVVTLSDGEHYTRESLKDPLALIKSILIMQRSHEESLRKSERIQAAWNRKKELISEGIKISKRCPAWLKLNDDRKSFSVIPEKVETVKRCFQLRLEGKSIWEIVRTLNDEGHQTLNQYKAGKFGQTSVQDLLKNRSVIGYFTPKGCCEIAGYYPSIIPESDFYKVQQLSYARGGRKPASGKPLSVNLFKGVIRCSECGHALIITGFSDTRNGIYRCPLRNENRCNAKGLSRKQTDGTLLALLSRIDRFDSDMTNTIDTLKLHREHISSNIEKLVQLSLEIEDLSAITSKLKQLKGELSQVDADIEKETQRLKSIDVGCLSDCDLTTKAGRIEAQLIIKSAVKEVVLNTAKRRCKVTFHNGKVIDLPITEDPSEDVTEAIQSLSEVTERGLIDVDEVII

SEQ ID NO: 54607 - DNA, 50 bp, Escherichia coli; identical to SEQ ID NO: 47682
  source 1..50: mol_type = genomic DNA

SEQ ID NO: 54608 - DNA, 40 bp, Escherichia coli; identical to SEQ ID NO: 5188
  source 1..40: mol_type = genomic DNA

SEQ ID NO: 54609 - DNA, 40 bp, Escherichia coli; identical to SEQ ID NO: 5188
  source 1..40: mol_type = genomic DNA

SEQ ID NO: 54610 - DNA, 50 bp, Escherichia coli; identical to SEQ ID NO: 54595
  source 1..50: mol_type = genomic DNA

SEQ ID NO: 54611 - protein, 507 aa, Escherichia coli
MKRAISYIRFSSEKQSRGDSLRRQSKMVTDWLKAHPEYHLDQDLSFRDLGVSGFTGKHLQGGLGDFLTAIEKGLVKAGDTLLIESLDRLSRQNVDRASELLRNILRSGVDVVTLSDGEHYTRESLRDSLALIKSILIMQRAHEESLRKAERIQAAWDAKKEAAKAGIKISKRCPAWLKLNDDRKSFSIIPEKVETVKRCFQLRLEGKSIWAIVKALNDEGHQTLNQYKAGKFGQTSVQDLLKNRSVIGYFTPKGCEEIAGYYPAIIDETTFYKVQQLSHSRYGKRSVSDKPLSVNLFKGVIRCSECGHALIITGFSDTRNGIYRCPLRNENRCSAKGLSRKQTDGTLLTLLSRLDRFDSDTTNTIDTLKLHREHISSNIEKLVQLSLEIEDLSAITSKLKQLKGELSQVDADIEKETQRLKSIDVGCLSDCDLTTKAGRIEAQLIIKSAVKEVVLNTAKRRCKVTFHNGKVIDLPITENPSEDVTEAIQSLSEVTERGLIDVDEVII

SEQ ID NO: 54612 - DNA, 50 bp, Escherichia coli; identical to SEQ ID NO: 47682
  source 1..50: mol_type = genomic DNA

SEQ ID NO: 54613 - DNA, 40 bp, Escherichia coli; identical to SEQ ID NO: 5188
  source 1..40: mol_type = genomic DNA

SEQ ID NO: 54614 - DNA, 40 bp, Escherichia coli; identical to SEQ ID NO: 5188
  source 1..40: mol_type = genomic DNA

SEQ ID NO: 54615 - DNA, 50 bp, Escherichia coli; identical to SEQ ID NO: 54595
  source 1..50: mol_type = genomic DNA

SEQ ID NO: 54616 - protein, 507 aa, Escherichia coli; identical to SEQ ID NO: 47681

SEQ ID NO: 54617 - DNA, 50 bp, Escherichia coli; identical to SEQ ID NO: 47682
  source 1..50: mol_type = genomic DNA

SEQ ID NO: 54618 - DNA, 40 bp, Escherichia coli; identical to SEQ ID NO: 21333
  source 1..40: mol_type = genomic DNA

SEQ ID NO: 54619 - DNA, 40 bp, Escherichia coli; identical to SEQ ID NO: 21333
  source 1..40: mol_type = genomic DNA

SEQ ID NO: 54620 - DNA, 50 bp, Escherichia coli; identical to SEQ ID NO: 54595
  source 1..50: mol_type = genomic DNA

SEQ ID NO: 54621 - protein, 507 aa, Escherichia coli; identical to SEQ ID NO: 47681

SEQ ID NO: 54622 - DNA, 50 bp, Escherichia coli; identical to SEQ ID NO: 47682
  source 1..50: mol_type = genomic DNA

SEQ ID NO: 54623 - DNA, 40 bp, Escherichia coli; identical to SEQ ID NO: 22878
  source 1..40: mol_type = genomic DNA

SEQ ID NO: 54624 - DNA, 40 bp, Escherichia coli; identical to SEQ ID NO: 22878
  source 1..40: mol_type = genomic DNA

SEQ ID NO: 54625 - DNA, 50 bp, Escherichia coli; identical to SEQ ID NO: 54595
  source 1..50: mol_type = genomic DNA

SEQ ID NO: 54626 - protein, 507 aa, Escherichia coli
MKRAISYIRFSSEKQSRGDSLRRQSKMVTDWLKAHPEYHLDQDLSFRDLGVSGFTGKHLQGGLGDFLTAIEKGLVKAGDTLLIESLDRLSRQNVDRASELLRNILRSGVDVVTLSDGEHYTRESLKDPLALIKSILIMQRSHEESLRKSERIQAAWNRKKELISEGIKISKRCPAWLKLNDDRKSFSVIPEKVETVKRCFQLRLEGKSIWEIVRTLNAEGHQTLNQYKAGKFGQTSVQDLLKNRSVIGYFTPKGCEEISGYYPAIIDETTFYKVQQLSYARYGRKPASDKPLSVNLFKGVIRCSECGHALIITGFSDTRSGIYRCPLRNENRCSAKGLSRKQTDGTLLALLSRLDRFDSDMTNVIDTLKLHREHISSNIEKLVQLSLEIEDLNAITNKLKQLKNELSQVDADIEKETQRLKSIDTGSLSDCDLSTKAGRIEAQLIIKSAVKEVVLNTAKRRCKVTFHNGRAITLPITENPSKDVTEAIQSLSEVTERGLIDVDEVII

SEQ ID NO: 54627 - DNA, 50 bp, Escherichia coli; identical to SEQ ID NO: 47682
  source 1..50: mol_type = genomic DNA

SEQ ID NO: 54628 - DNA, 40 bp, Escherichia coli; identical to SEQ ID NO: 5188
  source 1..40: mol_type = genomic DNA

SEQ ID NO: 54629 - DNA, 40 bp, Escherichia coli; identical to SEQ ID NO: 5188
  source 1..40: mol_type = genomic DNA

SEQ ID NO: 54630 - DNA, 50 bp, Escherichia coli; identical to SEQ ID NO: 54595
  source 1..50: mol_type = genomic DNA

SEQ ID NO: 54631 - protein, 507 aa, Escherichia coli; identical to SEQ ID NO: 47681

SEQ ID NO: 54632 - DNA, 50 bp, Escherichia coli; identical to SEQ ID NO: 47682
  source 1..50: mol_type = genomic DNA

SEQ ID NO: 54633 - DNA, 40 bp, Escherichia coli; identical to SEQ ID NO: 5188
  source 1..40: mol_type = genomic DNA

SEQ ID NO: 54634 - DNA, 40 bp, Escherichia coli; identical to SEQ ID NO: 5188
  source 1..40: mol_type = genomic DNA

SEQ ID NO: 54635 - DNA, 50 bp, Escherichia coli; identical to SEQ ID NO: 54595
  source 1..50: mol_type = genomic DNA

SEQ ID NO: 54636 - protein, 507 aa, Escherichia coli
MKRAISYIRFSSEKQSRGDSLRRQSKMVTDWLKAHPEYHLDQDLSFRDLGVSGFTGKHLQGGLGDFLTAIEKGLVKAGDTLLIESLDRLSRQDVDQASELLRNILRSGVDVVTLSDGEHYTKESLKDPLALIKSILIMQRSHEESLRKSERIQAAWNRKKELISEGIKISKRCPAWLKLNDDRKSFSVIPEKVETVKRCFQLRLEGKSIWEIVRTLNDEGHQTLNQYKAGKFGQTSVQDLLKNRSVIGYFTPKGCEEIAGYFPSIIPETDFYKVQQLSYSRYGRKPASDKPLSVNLFKGVIRCSECGHALIITGFSDTRSGIYRCPSRNENRCNAKGLSRKQTDGTLLALLSRLDRFDSDMTNTLDTLKLHREHISNNIEKLVQLSLEIEDLSAITSKLKQLKGELSQVDADIEKETQRLKSIDVGCLSDCDLTTKAGRIEAQLIIKSAVKEVVLNTAKRRCKVTFHNGKVIDLPITENPSEDVTDAIQSLSEVTERGLIDVDEVIV

SEQ ID NO: 54637 - DNA, 50 bp, Escherichia coli; identical to SEQ ID NO: 47682
  source 1..50: mol_type = genomic DNA

SEQ ID NO: 54638 - DNA, 40 bp, Escherichia coli; identical to SEQ ID NO: 5188
  source 1..40: mol_type = genomic DNA

SEQ ID NO: 54639 - DNA, 40 bp, Escherichia coli; identical to SEQ ID NO: 5188
  source 1..40: mol_type = genomic DNA

SEQ ID NO: 54640 - DNA, 50 bp, Escherichia coli; identical to SEQ ID NO: 54595
  source 1..50: mol_type = genomic DNA

SEQ ID NO: 54641 - protein, 596 aa, Pseudomonas sp JY-Q
MARAYAYVRYSSMKQREGDTVERQVTPLEAFTEDTGVAIAETFFDEGVSSFRGNNAKFGELKVILDRIKSGELRHGDYLVVESIDRITRQKVFDGVELLSSILKSGVRIYTTTDKKTYSLDDSAKHFETLMMISLIAQRANEESETKSDRRKKKWRSAKRLAVEKGKVFNKHNPPYGIRYCEDSQRFVLDEKQAEEVRKIFELLKVTGVSNVIRIVNQTSERRWTNKAINVLLRSQYPRGVMMSQKRGDGQKKVFIEFIEGYYPAIVTNTQFNEAIAAMQSRRTRKEYGNSTIGNLNVFRHVVKCGSCGESFVFEKQRNQKGELYYYFNCKTRKEHKGDCVQRFRYDLAFGMLLRAVSLLSPAKKIMTKPIAINLPEEIERLIRKEGDIRLKAMPEVSRNRGVIAGTIAESPEQKQIRLRMRKFGDDLFSKIMNHAGATSKLENKLDNAKEKLARLQMTLDNLNENMNAMIDENVGRIPRALLDKIGSVEQERDDQQEIVDALGVEVSEMSVTIPIASAKDLIEKFQTEEGRLQLNGFFKKQKVVFSFEFDQEVRRLDMTVSQNGEVVWKDQSYFGLHKPLSQFGISKLEDVMSSE

SEQ ID NO: 54642 - DNA, 50 bp, Pseudomonas sp JY-Q
  source 1..50: mol_type = genomic DNA
atgtgagtattagggctaccattctcgaacggtggtcagtataatcacat

SEQ ID NO: 54643 - DNA, 40 bp, Pseudomonas sp JY-Q
  source 1..40: mol_type = genomic DNA
aatcacgatttcacctgactccagtggctcgcgaagcact

SEQ ID NO: 54644 - DNA, 40 bp, Pseudomonas sp JY-Q
  source 1..40: mol_type = genomic DNA
aatcacgatttcacctgacaccagtggctcgcgaagcact

SEQ ID NO: 54645 - DNA, 50 bp, Pseudomonas sp JY-Q
  source 1..50: mol_type = genomic DNA
atgtgactttttacgcaaacatacacgtttggtggtcacctcattcacat

SEQ ID NO: 54646 - protein, 552 aa, Rhizobium phaseoli
MKPKAYSYIRMSTDVQLKGDSLRRQTEESKHYCEENGLELIEDFKLQDIGVSAYHGKNVAQGALGKFLALCEQQLIPSESYLIVESLDRISRQNPQAATALFLQILQAGINIVTLTDRHVYRAGSGDFTDIIVSVVIMSRAYEESRTKSLRVSAAWENKRQNIHQKKLTQVAPIWLRLSLDRTVFEVVPERVAIVRWIFDQAAQGKGSLQISRGLNQQRVPTFATSKGWHESYVSKVLTNRAVLGEFQPHRYIDGKRTPYGDPIPGYYPAIVAREQFERIQAGRAVRRVRGAGRKGHNNINLFQGVATCGYCNSRMMIINKGSGPKGGVYIRCDRARRGADCSASSWPLEHFEGAFLWFVEELDLGAVIDGAAGDEARKALEGKAAVISSDIEMQKNLRERAFDLLRESTSAAAFVRTKIDEASMKIDALERELAAVREAMIVATSGQKRPLEEVRRMIKEIGRWQSAESDSRSRVADWIKRNVKELLIFSDGLDPFDLLDAKRRQFSVTLPSGEFRTIQTIGNDPTVAAYSVHANDDRWALAEDGTLSIYT

SEQ ID NO: 54647 - DNA, 50 bp, Rhizobium phaseoli
  source 1..50: mol_type = genomic DNA
agctgattaatccacttcataatccagatgttgaggtggattaatttatg

SEQ ID NO: 54648 - DNA, 40 bp, Rhizobium phaseoli
  source 1..40: mol_type = genomic DNA
gcccggaaagatcggcatgcagatcgtcggcctgcctgat

SEQ ID NO: 54649 - DNA, 40 bp, Rhizobium phaseoli
  source 1..40: mol_type = genomic DNA
gcccggaaagatcggcatgccgatcgtcggcctgcctgat

SEQ ID NO: 54650 - DNA, 50 bp, Rhizobium phaseoli
  source 1..50: mol_type = genomic DNA
agctgatgaagtggcttcatagtcccatttttcagatgaggaaattgaag

SEQ ID NO: 54651 - protein, 507 aa, Escherichia coli
MKRVISYIRFSSEKQAKGDSLRRQSKMVTDWLKAHPEYYLDQDLSFRDLGVSGFTGKHLKGGLGDFLTAIEKGLVKAGDTLLIESLDRLSRQAVDRASELLRNILRSGVDVVTLSDGEHYTRESLKDPLALIKSILIMQRAHEESLRKAERIQAAWDAKKEAAKAGIKISRRCPAWLRLNDDRKTFYVIPEKVATVKRCFQLRLEGKSIWEIVRTLNAEGHQTLNQYKAGSFGQSSVQDLLKNRSVIGYFTPKGCEEIAGYYPSVIDETTFYKVQQLSHYRYGRKPVSDKPLSVNLFKGVIRCSECGHALIITGFSDTRNGIYRCPLRNENRCSAKGLSRKQTDGTLLTLLSRLDRFDSDTTNTIDMLRLHREHISSNIEKLVQLSLEIEDLSAITSKLKQLKGELSQVDADIEKETQRLKSIDVGCLSDCDLTTKAGRIEAQLIIKSAVKEVVLNTAKRRCKVTFHNGRLIDLPITENPSEDVTEAIQSLSEVTEKGLIDVDVVEI

SEQ ID NO: 54652 - DNA, 50 bp, Escherichia coli
  source 1..50: mol_type = genomic DNA
tagtgcatttagacattgatgattttcatcagacacgtttaaatacacta

SEQ ID NO: 54653 - DNA, 40 bp, Escherichia coli; identical to SEQ ID NO: 5188
  source 1..40: mol_type = genomic DNA

SEQ ID NO: 54654 - DNA, 40 bp, Escherichia coli; identical to SEQ ID NO: 35039
  source 1..40: mol_type = genomic DNA

SEQ ID NO: 54655 - DNA, 50 bp, Escherichia coli
  source 1..50: mol_type = genomic DNA
ttgtatgtttgggtattgttgattgaaatcacactatgtttaatacactt

SEQ ID NO: 54656 - protein, 525 aa, Enterovibrio norvegicus
MTTAYSYIRFSSKKQQKGDSLRRQSELVTTYCRQHNLTLSTQSFSDLGVSAYHSDNIKGDSGLGQFLNAISEGKIKTPCYLLVESLDRLSRAGINKALRQLMEITEQDVTVITLFDNRMYTKDMDLGDFIHSIVYMQRAYEESDTKSKRLKAVWHNRRTNPEALKTNNKPFWLDLTPDRKGFVLNESAETVRRMFDLSINGFGSNLIAKHFNRDGIPSPNVKTWGDAVITKTLNNKAVLGEYQPNTVKGRKYTPIGEPIKGYYPAVVGENTFYLSQAKIKERAKSQRRGSTSSHLNMLKGIGVCVDCGAPLRIQTQQHLKYFRCPEALKGLCNSKPVNIWFLRDWLKEQWLSPVFFETWSVATGESVSKELEALEAKKSELSNTLEMMLQSFSATTSPLVLANIQQRTEEIDSLGKEIESLKEKEASSSQHQVSYQNCWTLIDKAFSEENETENLVARNKIRGLLSRFDSFTVGMTSNREATLAADIDGGIFSFISTPFPYAPKRKAPPFIWYMVEIPSVTKSNV

SEQ ID NO: 54657 - DNA, 50 bp, Enterovibrio norvegicus
  source 1..50: mol_type = genomic DNA
accatgcttagcttgactttctacatgcatatagttatactagatatggt

SEQ ID NO: 54658 - DNA, 40 bp, Enterovibrio norvegicus
  source 1..40: mol_type = genomic DNA
taccatgcctgtggcttgcatgtacgcgtaacaaatcgtg

SEQ ID NO: 54659 - DNA, 40 bp, Enterovibrio norvegicus
  source 1..40: mol_type = genomic DNA
taccatgcctgtggcttgcttgtacgcgtaacaaatcgtg

SEQ ID NO: 54660 - DNA, 50 bp, Enterovibrio norvegicus
  source 1..50: mol_type = genomic DNA
gagatgctttggcttactctctaattgattatagtttgtttagctgtggt

SEQ ID NO: 54661 - protein, 541 aa, Enterobacter hormaechei
MPKAISYIRFSSRIQASGDSTKRQNKYINEWLKNNLDYQLDESLRFQDLGISGYSGANAKSGAFGEFLAAVESGVIEAGSVLLVESLDRVSRQDIDTARERLRKILLAGVDVVTLADNSWYKKESLNDPLSLIKAVLIMQRANEESATKSKRLRSAWDAKREDAAKGKIMSRRCVAWLRVSDDMSHFELIPDNVKAVQRVFQLRLEGLPFVRIARQMNEEGFYTLNQRNPVKGAWSHTTVKALLDNRSVIGFKVPSNCTVTKGVKEIPNYYPAVISEEHFYAVQQLKQGAGRRPSSEKPLLTNLFKGVMRCAECGFVTIVNCATEKWHGVYRCSMRYEGRCHAKSINRRLADKALVQGLLYNTNRLSLNRDNGSAIGSLQSELEHLQKQRERLIKLAMLADDTESMAKDLKALNSQIKDAEKAVSEVHQREQSSQLETISHLDLTVKKDRIEAQIIIKRIVKEIRLNTAGKKCDVFLHNGLKLLNFPLDRVVDGAQWLEVLPLIDGDEFDFAEFTTKPRHIALEEAPEWVKEMEEQPNQSL

SEQ ID NO: 54662 - DNA, 50 bp, Enterobacter hormaechei
  source 1..50: mol_type = genomic DNA
gttagtgattagagagttgtaatgaggactacacatctcttatgataaac

SEQ ID NO: 54663 - DNA, 40 bp, Enterobacter hormaechei; identical to SEQ ID NO: 29158
  source 1..40: mol_type = genomic DNA

SEQ ID NO: 54664 - DNA, 40 bp, Enterobacter hormaechei
  source 1..40: mol_type = genomic DNA
attagtatggagggtggacgacaccagatgcccggtttgc

SEQ ID NO: 54665 - DNA, 50 bp, Enterobacter hormaechei
  source 1..50: mol_type = genomic DNA
atgattgattgttcagttgtcatggataatacacataatctttgttactc

SEQ ID NO: 54666 - protein, 678 aa, Salinispora arenicola
MNPTSKITASHLSRLAIVYVRQSTSAQVRQNTESTQRQYGLASTAAELGWLAEQIVVVDADLGVSGRFGSEREGYREIVARLCLGEVGAVFGLEVSRLGRSNADLTRLMELARLTDTLLIDTDGVYDLACVNDRILLGLKGQMSEIDLHFLLGRLHGAKVAAAHRGELRHPLPAGYVYDDEGQIIKDPDEQVRRAVEDLFAEFQRTGSALKTVRAFHETGRLFPQRAWAGAWAGTIKWGKLTHARVAQVLRNPTYAGVYTFGKTREVRRVLPDGTVRSTRRRRAREEWTVLIEDHHEGYVTWQEFLATEAKLAANNTQRGARPVREGIALCQGIILCGTCGGRVGTRYSRADRKVTYKCAEPTARCRTVTADTVDDAVASLLLKTINPQQIQVALAAADEVTDRQVRTHRAAELAVERASYEAERAERAFMQVEPENRLVARTLETRWETKLAALAEAEAALATARAVKPSVPDHDALRTLAADLPRLWDAPTTSPRDRKRLLRTLIADVTLLLEQDSDLVRIGVRWHTSATDELTVERRGPGRTPPQALAIVRQYGATHSDIEIAKMLNDAGLRTGKDLRFTPRHVAGVRGIYKIFTPRTLAVQHGEISVKQAAQQLGVPADAIYNWLRHGQVPAHTRAGRWCIPWDSVTQEIYRQKVANSFRLKPNPPVEDAPDVR

SEQ ID NO: 54667 - DNA, 50 bp, Salinispora arenicola
  source 1..50: mol_type = genomic DNA
gagcggcagtatgaagcgcccgtcggaacccgtgccctatacaacccgcc

SEQ ID NO: 54668 - DNA, 40 bp, Salinispora arenicola
  source 1..40: mol_type = genomic DNA
cggccgctcgatgtccgcgggaacccgagcccgcatcgga

SEQ ID NO: 54669 - DNA, 40 bp, Salinispora arenicola
  source 1..40: mol_type = genomic DNA
cggccgctcgatgtccgcgcaaacccgagcccgcatcgga

SEQ ID NO: 54670 - DNA, 50 bp, Salinispora arenicola
  source 1..50: mol_type = genomic DNA
gcccggctgcccagcgctccctcccaagcccgcgccgctcccgacccgcc

SEQ ID NO: 54671 - protein, 519 aa, Agrobacterium tumefaciens
MVTPKAYSYLRFSTPEQMRGDSFRRQSDMAQQWALRNAVELDDKLTFQDLGVSAYMGANAETGMLREFLEAVRAGMIERGSFLLIESLDRLSRNTARKAMRLLEDICELGISVVTLSDGKVYTDSNLSTDPISFMMAFMVMIRANEESATKARRLGQAWKEKRRRAIEEATPMTSITPAWLRLDKVNGGFVVVEERAEIVRRVFRMALDGMGQHQIADTFNTEGMPTFGRGNYWHRSYIKKLLENPAVVGTFIPHTLDRSGVKKRRIPQSPVERYFPAIITERVFQDVQAQRVGVGRLARQGGKYPIASLFAGLAQCPLCGGTMTRVSKGPKGGVPKLVCARAKTGAGCRYQGVAIEQAERALVQNAGWLIELAPAGDDRVDDALDWTRANLEAVQEQISNVLEAIAGGASGAAINERLEQLEAAKDSIEKQLVGLEREQSAQTGKLVERRLADLYDALTMRPLEEWEPEDRQLANSSLRQVVSAVVIDYATGHLEFLWKHGGTSKIVFGFPMEDAATL

SEQ ID NO: 54672 - DNA, 50 bp, Agrobacterium tumefaciens
  source 1..50: mol_type = genomic DNA
atgaggtcttttgttgacaatctgctgatgttgtgatccaaagacctctc

SEQ ID NO: 54673 - DNA, 40 bp, Agrobacterium tumefaciens
  source 1..40: mol_type = genomic DNA
cgctggcggccataatctgctgatggtcggcccacccggt

SEQ ID NO: 54674 - DNA, 40 bp, Agrobacterium tumefaciens
  source 1..40: mol_type = genomic DNA
cgctggcggccataatctgttgatggtcggcccacccggt

SEQ ID NO: 54675 - DNA, 50 bp, Agrobacterium tumefaciens
  source 1..50: mol_type = genomic DNA
atcagctatatcactgccgatctgtttttgttgtaaactgatgacctttc

SEQ ID NO: 54676 - protein, 460 aa, Anaerobutyricum hallii; identical to SEQ ID NO: 27721

SEQ ID NO: 54677 - DNA, 50 bp, Anaerobutyricum hallii
  source 1..50: mol_type = genomic DNA
tatagcactaactgatactatcctaatggatagtgtaagttagtactacg

SEQ ID NO: 54678 - DNA, 40 bp, Anaerobutyricum hallii
  source 1..40: mol_type = genomic DNA
tattgctggtcccaaaccaaatggatatcgtagttaccac

SEQ ID NO: 54679 - DNA, 40 bp, Anaerobutyricum hallii
  source 1..40: mol_type = genomic DNA
tattgctggtcccaaaccagttggatatcgtagttaccac

SEQ ID NO: 54680 - DNA, 50 bp, Anaerobutyricum hallii
  source 1..50: mol_type = genomic DNA
aaaagcacttcatgtttccatcgtgtttgatagtgtttccaagtgctagc

SEQ ID NO: 54681 - protein, 665 aa, Vibrio parahaemolyticus; identical to SEQ ID NO: 21931

SEQ ID NO: 54682 - DNA, 50 bp, Vibrio parahaemolyticus
  source 1..50: mol_type = genomic DNA
gtgatgatttaagcttgataagcattacctaactgaagtttaatcatgct

SEQ ID NO: 54683 - DNA, 40 bp, Vibrio parahaemolyticus
  source 1..40: mol_type = genomic DNA
tttagctgcgcgctcaacgttaacagcgcttccttcttcg

SEQ ID NO: 54684 - DNA, 40 bp, Vibrio parahaemolyticus
  source 1..40: mol_type = genomic DNA
tttagctgcgcgctcaacggaaacagcgcttccttcttcg

SEQ ID NO: 54685 - DNA, 50 bp, Vibrio parahaemolyticus; identical to SEQ ID NO: 21935
  source 1..50: mol_type = genomic DNA

SEQ ID NO: 54686 - protein, 587 aa, Klebsiella pneumoniae
MPQLYSYIRWSSERQQKGTTRQRQVIGAKEFAIANGLELVEIEDPGVSAFRGKNTTHGKLGDFIDAVRQGAIPPDSWLYVENLDRLTRQEVTTAQKLFIELLDLGLTLVTGMDKRVYTLESVNKNPTDLMISLLLFSRANEESKTKQARTIGNVESLIERHRQGLPVNIKSCGKHPFWIDDSGSQYESVKRHAIYWEIAREAIELFLSGYGIYKVKRFLDEKYPNGLNGKEWGYQVLKKMRESRALIGERQINIGSHTYTLRDYYPCLCKNEVEFLHLQELKGQNSYKSKKNPLKEQIKLLSGLAILRCSKCGGTMSSFMNKGKPRYICLNGRHLQKGCVGWSLTAPLVDHCVIIALLMGYMDANRKERQDTSDISALIEAKNTSVGELNVSITNLVAVIEAGVNVSELASRLKVLSTERETFLKEIERLKERKALIDSKGSFEVSMMDFINLIHWNVFSDYAHESRDKIRSTINKIIEHVIIDKTDGCITIKIKCHGSDEQLIFCGIGRKPHWKFDIALYVEQDTDGDTTFEEKSILPMANQLMEEATKQFALIREGYISYFDKICKILAAIGYPDIDGSAFWPNR

SEQ ID NO: 54687 - DNA, 50 bp, Klebsiella pneumoniae; identical to SEQ ID NO: 46792
  source 1..50: mol_type = genomic DNA

SEQ ID NO: 54688 - DNA, 40 bp, Klebsiella pneumoniae; identical to SEQ ID NO: 5518
  source 1..40: mol_type = genomic DNA

SEQ ID NO: 54689 - DNA, 40 bp, Klebsiella pneumoniae
  source 1..40: mol_type = genomic DNA
gtccacgaggtttttcgggctgcccagggagacgaagccg

SEQ ID NO: 54690 - DNA, 50 bp, Klebsiella pneumoniae
  source 1..50: mol_type = genomic DNA
cactcttttacaatatgtttcaggctccttaatgagtctaaagcagaaat

SEQ ID NO: 54691 - protein, 587 aa, Klebsiella pneumoniae; identical to SEQ ID NO: 17396

SEQ ID NO: 54692 - DNA, 50 bp, Klebsiella pneumoniae; identical to SEQ ID NO: 46792
  source 1..50: mol_type = genomic DNA

SEQ ID NO: 54693 - DNA, 40 bp, Klebsiella pneumoniae; identical to SEQ ID NO: 5518
  source 1..40: mol_type = genomic DNA

SEQ ID NO: 54694 - DNA, 40 bp, Klebsiella pneumoniae; identical to SEQ ID NO: 54689
  source 1..40: mol_type = genomic DNA

SEQ ID NO: 54695 - DNA, 50 bp, Klebsiella pneumoniae; identical to SEQ ID NO: 54690
  source 1..50: mol_type = genomic DNA

SEQ ID NO: 54696 - protein, 587 aa, Klebsiella pneumoniae; identical to SEQ ID NO: 17381

SEQ ID NO: 54697 - DNA, 50 bp, Klebsiella pneumoniae; identical to SEQ ID NO: 46792
  source 1..50: mol_type = genomic DNA

SEQ ID NO: 54698 - DNA, 40 bp, Klebsiella pneumoniae; identical to SEQ ID NO: 5518
  source 1..40: mol_type = genomic DNA

SEQ ID NO: 54699 - DNA, 40 bp, Klebsiella pneumoniae; identical to SEQ ID NO: 54689
  source 1..40: mol_type = genomic DNA

SEQ ID NO: 54700 - DNA, 50 bp, Klebsiella pneumoniae; identical to SEQ ID NO: 54690
  source 1..50: mol_type = genomic DNA

SEQ ID NO: 54701 - protein, 458 aa, Klebsiella pneumoniae; identical to SEQ ID NO: 17431

SEQ ID NO: 54702 - DNA, 50 bp, Klebsiella pneumoniae; identical to SEQ ID NO: 46792
  source 1..50: mol_type = genomic DNA

SEQ ID NO: 54703 - DNA, 40 bp, Klebsiella pneumoniae; identical to SEQ ID NO: 5518
  source 1..40: mol_type = genomic DNA

SEQ ID NO: 54704 - DNA, 40 bp, Klebsiella pneumoniae; identical to SEQ ID NO: 54689
  source 1..40: mol_type = genomic DNA

SEQ ID NO: 54705 - DNA, 50 bp, Klebsiella pneumoniae; identical to SEQ ID NO: 54690
  source 1..50: mol_type = genomic DNA

SEQ ID NO: 54706 - protein, 587 aa, Klebsiella pneumoniae; identical to SEQ ID NO: 17381

SEQ ID NO: 54707 - DNA, 50 bp, Klebsiella pneumoniae
  source 1..50: mol_type = genomic DNA
caatctttttattgatgtttcgggcaccctaatgataaaaatccaatctt

SEQ ID NO: 54708 - DNA, 40 bp, Klebsiella pneumoniae; identical to SEQ ID NO: 5518
  source 1..40: mol_type = genomic DNA

SEQ ID NO: 54709 - DNA, 40 bp, Klebsiella pneumoniae; identical to SEQ ID NO: 54689
  source 1..40: mol_type = genomic DNA

SEQ ID NO: 54710 - DNA, 50 bp, Klebsiella pneumoniae; identical to SEQ ID NO: 54690
  source 1..50: mol_type = genomic DNA

SEQ ID NO: 54711 - protein, 587 aa, Klebsiella oxytoca; identical to SEQ ID NO: 17396

SEQ ID NO: 54712 - DNA, 50 bp, Klebsiella oxytoca; identical to SEQ ID NO: 46792
  source 1..50: mol_type = genomic DNA

SEQ ID NO: 54713 - DNA, 40 bp, Klebsiella oxytoca
  source 1..40: mol_type = genomic DNA
gtccacgagatttttcgggcagcccagagagacaaagccg

SEQ ID NO: 54714 - DNA, 40 bp, Klebsiella oxytoca
  source 1..40: mol_type = genomic DNA
gtccacgagatttttcgggctgcccagagagacaaagccg

SEQ ID NO: 54715 - DNA, 50 bp, Klebsiella oxytoca; identical to SEQ ID NO: 54690
  source 1..50: mol_type = genomic DNA

SEQ ID NO: 54716 - protein, 537 aa, Lachnoclostridium sp An169
MKKTLKVAAYARVSTDKEDQANSLSNQRTYFADYIRNHKGWKLREVYFDEGISGTQTKKRSGFNQMVQDALHGEVDLIITKEVARFARNTVDTLSYTRQLKAAGVGVIFTIDNIDTREADGELRLTIMASIAQEESRKTSERVKWGQKRQMEKGVVFGRDLLGYTVQNGQLHINEKEVPIVKAIFHKYTNEGKGTWTIARELLVEGMRPKRIALWSNVTILRVLRNEKYVGDLCQKKTYTPDYLTHAKKYNRGEEETVYLKNHHEPIIDRDLWNRTQAELERRSPSEEQKSKHSNRYWCSGKIRCAECGNRYVSRTKKLKSGETYKAWRCYAAANHGTKKQDADGNEIGCDNSSINDRSLKTCMNYCITLVQGEQDSLKKEILEEISQLQKTAVKKTDSKKIQKKIDSLKMKKRKAIDLMLDGLISKEDLQNQTAWYNEELEKLNIQLTDAFQKDKLDSQQINNMEQYIKAIDEIMGMDGNSEEVYKEVLDHMEIHKGNVVDVWLKSIPIGIRLKIKATGKREYFKTEILETQFIES

SEQ ID NO: 54717 - DNA, 50 bp, Lachnoclostridium sp An169
  source 1..50: mol_type = genomic DNA
gtgcgcaatatcgatacagatatacctgtatcgttatcgaaattgcacat

SEQ ID NO: 54718 - DNA, 40 bp, Lachnoclostridium sp An169
  source 1..40: mol_type = genomic DNA
gtgggcgagttcttccgtgccgatatccgtcagtgttccg

SEQ ID NO: 54719 - DNA, 40 bp, Lachnoclostridium sp An169
  source 1..40: mol_type = genomic DNA
gtgggcgagttcttccgtgtagatatccgtcagtgttccg

SEQ ID NO: 54720 - DNA, 50 bp, Lachnoclostridium sp An169
  source 1..50: mol_type = genomic DNA
gtgcttaatatagatacatatatatatatatctatatatatctgtcatat

SEQ ID NO: 54721 - protein, 479 aa, Streptococcus pneumoniae; identical to SEQ ID NO: 17911

SEQ ID NO: 54722 - DNA, 50 bp, Streptococcus pneumoniae; identical to SEQ ID NO: 17912
  source 1..50: mol_type = genomic DNA

SEQ ID NO: 54723 - DNA, 40 bp, Streptococcus pneumoniae
  source 1..40: mol_type = genomic DNA
ctgctttaggttgtgcagcgggtggagtgaaatatgggag

SEQ ID NO: 54724 - DNA, 40 bp, Streptococcus pneumoniae
  source 1..40: mol_type = genomic DNA
ctgctttaggttgtgcagcgagtggagtgaaatatgggag

SEQ ID NO: 54725 - DNA, 50 bp, Streptococcus pneumoniae
  source 1..50: mol_type = genomic DNA
aatgttattctatggagagtagaggaggtatgtgttgcataaaagaaagg

SEQ ID NO: 54726 - protein, 479 aa, Streptococcus pneumoniae
MTKIALYLRLSVDEADTDESNSITNQRYLLNNYLDQTPEFKNWERLEFVDDGFSGTSLNRPAFQRLMIDVKAGTIRHIIVKDLSRFMRDYLELGNYLENIFPFLGVRFIALNDQYDSLTSENNGLDIDVPFKNLLNDFYAKDVSEKVKSAMNTMKRSGKNMSWLPPFGYIKDPDDRFKIIIDEEVAPIVRRIFRLCIEGMGTQKIAMLLNSEQTITPAERKMQVSQARYTKSIIITAEQKRNVWTRSGILQILKNEAYKGTYLFNTRTTVNGKQIRRPESEWERLDNNHEAIVSSEEFKKAQQSLASRISGTKSQACNQPEEVLLRGLVICEHCGHRLLRYRRYNNRDYFYCCYCRSQGQNMKSCRIDRIEEAIEKELKSRLPMNSPKLSKTNLIREVERLKTQKVSHFQDYKEGLMTRETYMEKRQNLDNSIMEIEEQLKVVGRENIAFDKKLTREVVDTHIERIVVNGQGSFTVVYK

SEQ ID NO: 54727 - DNA, 50 bp, Streptococcus pneumoniae; identical to SEQ ID NO: 17912
  source 1..50: mol_type = genomic DNA

SEQ ID NO: 54728 - DNA, 40 bp, Streptococcus pneumoniae
  source 1..40: mol_type = genomic DNA
tggttatgcctttccaggaggccatgtagaaaatggcgaa

SEQ ID NO: 54729 - DNA, 40 bp, Streptococcus pneumoniae
  source 1..40: mol_type = genomic DNA
tggttatgcctttccaggagaccatgtagaaaatggcgaa

SEQ ID NO: 54730 - DNA, 50 bp, Streptococcus pneumoniae; identical to SEQ ID NO: 54725
  source 1..50: mol_type = genomic DNA

SEQ ID NO: 54731 - protein, 479 aa, Streptococcus pneumoniae
MTKIALYLRLSVDEADTDESNSITNQRYLLNNYLDQTPEFKNWERLEFVDDGFSGTSLKRPAFQRMMADVKAGTIRHIIVKDLSRFMRDYLELGNYLENIFPFLGVRFIALNDHYDSLVSEHNGLDIDVPFRNLLNDFYAKDVSEKVKSAMNSMKRSGKNMSWLPPFGYIKDPNDRFKIIIDEEVAPIVRRIFRLCIEGMGTQKIAMLLNSEQTITPAERKMQVSQARYTKSIIITAEQKRNVWTRSGILQILKNEAYKGTYLFNTRTTVNGKQIRRPESEWERLDNNHEAIVSSEDFDKAQQSLTSRISGTKSQACNQPEEVLLRGLVICEHCGHRLLRYSHNNNNNYFYCCYCRSQGQNMKSCRIDRIEEAIEKELKSRLPMNSPKLSKTNLIREVERLKTQKVSHFQDYKEGLMTRETYMEKRQNLDNSIMEIEEQLKVVGRENIAFDKKLTREVVDTHIERIVVNGQGSFTVVYK

SEQ ID NO: 54732 - DNA, 50 bp, Streptococcus pneumoniae; identical to SEQ ID NO: 17912
  source 1..50: mol_type = genomic DNA

SEQ ID NO: 54733 - DNA, 40 bp, Streptococcus pneumoniae
  source 1..40: mol_type = genomic DNA
ctgctttaggttgtgcagcgggtggagtgaaatatgggaa

SEQ ID NO: 54734 - DNA, 40 bp, Streptococcus pneumoniae
  source 1..40: mol_type = genomic DNA
ctgctttaggttgtgcagcgagtggagtgaaatatgggaa

SEQ ID NO: 54735 - DNA, 50 bp, Streptococcus pneumoniae; identical to SEQ ID NO: 54725
  source 1..50: mol_type = genomic DNA

SEQ ID NO: 54736 - protein, 614 aa, Streptococcus pyogenes; identical to SEQ ID NO: 51431

SEQ ID NO: 54737 - DNA, 50 bp, Streptococcus pyogenes
  source 1..50: mol_type = genomic DNA
ctggaccttttgactcccgcagacccatcatgtggagtgcatagcgttga

SEQ ID NO: 54738 - DNA, 40 bp, Streptococcus pyogenes; identical to SEQ ID NO: 52428
  source 1..40: mol_type = genomic DNA

SEQ ID NO: 54739 - DNA, 40 bp, Streptococcus pyogenes
  source 1..40: mol_type = genomic DNA
tagatttgtttccccagacatatcacgtcgagtgcgtagt

SEQ ID NO: 54740 - DNA, 50 bp, Streptococcus pyogenes
  source 1..50: mol_type = genomic DNA
atggacctctcaattcctctagacatttcatgtgtagaatatagagtttg

SEQ ID NO: 54741 - protein, 559 aa, Streptococcus pyogenes; identical to SEQ ID NO: 20396

SEQ ID NO: 54742 - DNA, 50 bp, Streptococcus pyogenes; identical to SEQ ID NO: 54737
  source 1..50: mol_type = genomic DNA

SEQ ID NO: 54743 - DNA, 40 bp, Streptococcus pyogenes; identical to SEQ ID NO: 52428
  source 1..40: mol_type = genomic DNA

SEQ ID NO: 54744 - DNA, 40 bp, Streptococcus pyogenes; identical to SEQ ID NO: 54739
  source 1..40: mol_type = genomic DNA

SEQ ID NO: 54745 - DNA, 50 bp, Streptococcus pyogenes; identical to SEQ ID NO: 54740
  source 1..50: mol_type = genomic DNA

SEQ ID NO: 54746 - protein, 594 aa, Streptococcus pyogenes; identical to SEQ ID NO: 51411

SEQ ID NO: 54747 - DNA, 50 bp, Streptococcus pyogenes; identical to SEQ ID NO: 54737
  source 1..50: mol_type = genomic DNA

SEQ ID NO: 54748 - DNA, 40 bp, Streptococcus pyogenes
  source 1..40: mol_type = genomic DNA
tagatttgtttccgcagacgcatcacgtcgagtgcgtagt

SEQ ID NO: 54749 - DNA, 40 bp, Streptococcus pyogenes
  source 1..40: mol_type = genomic DNA
tagatttgtttccgcagacatatcacgtcgagtgcgtagt

SEQ ID NO: 54750 - DNA, 50 bp, Streptococcus pyogenes; identical to SEQ ID NO: 54740
  source 1..50: mol_type = genomic DNA

SEQ ID NO: 54751 - protein, 594 aa, Streptococcus pyogenes; identical to SEQ ID NO: 51461

SEQ ID NO: 54752 - DNA, 50 bp, Streptococcus pyogenes; identical to SEQ ID NO: 54737
  source 1..50: mol_type = genomic DNA

SEQ ID NO: 54753 - DNA, 40 bp, Streptococcus pyogenes; identical to SEQ ID NO: 54748
  source 1..40: mol_type = genomic DNA

SEQ ID NO: 54754 - DNA, 40 bp, Streptococcus pyogenes; identical to SEQ ID NO: 54749
  source 1..40: mol_type = genomic DNA

SEQ ID NO: 54755 - DNA, 50 bp, Streptococcus pyogenes; identical to SEQ ID NO: 54740
  source 1..50: mol_type = genomic DNA

SEQ ID NO: 54756 - protein, 614 aa, Streptococcus pyogenes; identical to SEQ ID NO: 51471

SEQ ID NO: 54757 - DNA, 50 bp, Streptococcus pyogenes; identical to SEQ ID NO: 54737
  source 1..50: mol_type = genomic DNA

SEQ ID NO: 54758 - DNA, 40 bp, Streptococcus pyogenes; identical to SEQ ID NO: 52428
  source 1..40: mol_type = genomic DNA

SEQ ID NO: 54759 - DNA, 40 bp, Streptococcus pyogenes; identical to SEQ ID NO: 54739
  source 1..40: mol_type = genomic DNA

SEQ ID NO: 54760 - DNA, 50 bp, Streptococcus pyogenes; identical to SEQ ID NO: 54740
  source 1..50: mol_type = genomic DNA

SEQ ID NO: 54761 - protein, 590 aa, Streptococcus pyogenes; identical to SEQ ID NO: 51476

SEQ ID NO: 54762 - DNA, 50 bp, Streptococcus pyogenes
  source 1..50: mol_type = genomic DNA
ctggaccttttgactcccgcagacccatcatgtggagactatagcgttga

SEQ ID NO: 54763 - DNA, 40 bp, Streptococcus pyogenes; identical to SEQ ID NO: 52428
  source 1..40: mol_type = genomic DNA

SEQ ID NO: 54764 - DNA, 40 bp, Streptococcus pyogenes; identical to SEQ ID NO: 54739
  source 1..40: mol_type = genomic DNA

SEQ ID NO: 54765 - DNA, 50 bp, Streptococcus pyogenes; identical to SEQ ID NO: 54740
  source 1..50: mol_type = genomic DNA

SEQ ID NO: 54766 - protein, 590 aa, Streptococcus pyogenes; identical to SEQ ID NO: 51491

SEQ ID NO: 54767 - DNA, 50 bp, Streptococcus pyogenes; identical to SEQ ID NO: 54762
  source 1..50: mol_type = genomic DNA

SEQ ID NO: 54768 - DNA, 40 bp, Streptococcus pyogenes; identical to SEQ ID NO: 54748
  source 1..40: mol_type = genomic DNA

SEQ ID NO: 54769 - DNA, 40 bp, Streptococcus pyogenes; identical to SEQ ID NO: 54749
  source 1..40: mol_type = genomic DNA

SEQ ID NO: 54770 - DNA, 50 bp, Streptococcus pyogenes; identical to SEQ ID NO: 54740
  source 1..50: mol_type = genomic DNA

SEQ ID NO: 54771 - protein, 594 aa, Streptococcus pyogenes; identical to SEQ ID NO: 51461

SEQ ID NO: 54772 - DNA, 50 bp, Streptococcus pyogenes; identical to SEQ ID NO: 54737
  source 1..50: mol_type = genomic DNA

SEQ ID NO: 54773 - DNA, 40 bp, Streptococcus pyogenes; identical to SEQ ID NO: 52428
  source 1..40: mol_type = genomic DNA

SEQ ID NO: 54774 - DNA, 40 bp, Streptococcus pyogenes; identical to SEQ ID NO: 54739
  source 1..40: mol_type = genomic DNA

SEQ ID NO: 54775 - DNA, 50 bp, Streptococcus pyogenes; identical to SEQ ID NO: 54740
  source 1..50: mol_type = genomic DNA

SEQ ID NO: 54776 - protein, 594 aa, Streptococcus pyogenes
MKKEVKVIKGDTTLKRTASGCVERSIKRVAAYCRVSTDTEDQINSYNSQVEHYTEFIQKNNEWTLAGIYADEAITGTQVDRRIDFQRLINDCMNGDIDMIITKSISRFARNTLDTLKYVRKLKEFNVAVFFEEENINTLTMDGELLLTILSSVAQQEVENISANVKKGLRMKMERGEMVGFQGCLGYDYDPETKSISINEKEAEIVRYIFRRYIEGVGGMVISRELEEQGYLSPRGNKRWTETTVLGIIKNEKYKGDLMMGKTYTVDPISKRRLDNFGEQDKFYIENHHEPIISEKDFEKAQGIRLRRSKNRNTVANNGGKREKYSRKYAFSSMLECGFCGHNLSRRNWHSSSEYTKVIWQCVNATKNGKKYCPHSKGIEEEAIEKAFMESYRQVCHNNVEITNEFLKTVEEELKDNSLAKDLKKITNQLDKILKKEKDLVELRLNESISMDIYQDKYNEIAISKEKLLAEKRTLEVTLTDEKALKKRLEGFKKLLESNKYLEEFDRAVFESIVDKIIIGGTNDEGEIDPAMITIIYKTGKKDSQDGRLFKSRRKNAKEVNEKADSKLYPQSSDEVNNLCSYPMDNTRGVCKFT

SEQ ID NO: 54777 - DNA, 50 bp, Streptococcus pyogenes; identical to SEQ ID NO: 54737
  source 1..50: mol_type = genomic DNA

SEQ ID NO: 54778 - DNA, 40 bp, Streptococcus pyogenes; identical to SEQ ID NO: 54748
  source 1..40: mol_type = genomic DNA

SEQ ID NO: 54779 - DNA, 40 bp, Streptococcus pyogenes; identical to SEQ ID NO: 54749
  source 1..40: mol_type = genomic DNA

SEQ ID NO: 54780 - DNA, 50 bp, Streptococcus pyogenes; identical to SEQ ID NO: 54740
  source 1..50: mol_type = genomic DNA

SEQ ID NO: 54781 - protein, 590 aa, Streptococcus pyogenes; identical to SEQ ID NO: 51486

SEQ ID NO: 54782 - DNA, 50 bp, Streptococcus pyogenes; identical to SEQ ID NO: 54762
  source 1..50: mol_type = genomic DNA

SEQ ID NO: 54783 - DNA, 40 bp, Streptococcus pyogenes; identical to SEQ ID NO: 52428
  source 1..40: mol_type = genomic DNA

SEQ ID NO: 54784 - DNA, 40 bp, Streptococcus pyogenes; identical to SEQ ID NO: 54739
  source 1..40: mol_type = genomic DNA

SEQ ID NO: 54785 - DNA, 50 bp, Streptococcus pyogenes; identical to SEQ ID NO: 54740
  source 1..50: mol_type = genomic DNA

SEQ ID NO: 54786 - protein, 615 aa, Streptococcus pyogenes
MSWKCGIIKLHRKIQKKEAGAVKRDVKVIKGDTTLKRTASGCVERSIKRVAAYCRVSTDTEDQINSYNSQVEHYTDFIKQNNEWTLAGIYADEAITGTQVDRRIDFQRLINDCMNGDIDMVITKSISRFARNTLDTLKYVRKLKEYNVAVFFEEENINTLTMDGELLLTILSSVAQQEVENISANVKKGLRMKMERGEMVGFQGCLGYDYDPETKSISVNEKEAEIVRYIFRRYLEGVGGMVISRELEEQGYLSPRGHKRWTETTVLGIIKNEKYKGDLLMGKTFTVDPISKRRLDNFGEQDKFYIENHHEPIISEEDFEKAQGIRLRRAKNRNTVANNGGKREKYSRKYAFSSMLECGFCGHMLSRRNWHSSSEYTKVIWQCVNATKNGKKYCPHSKGIEEEAIEKAFMESYRQVCHNNVEITNEFLKTVEEELKDNSLAKDLKKISNQLDKILKKEKDLVELRLNEAISMEIYQEKYNEIAISKEKLLEEKRTLEVTLTDEKALKKRLEGFKKLLESNKYLEEFDRTVFESIVDKIVIGGTNDDGDIDPAMITIIYKTGKKDSQNGRLFKSRRKNAKVVEENDGDKLYSQSSNEVNKLCSYSTDNTRGVCKFT

SEQ ID NO: 54787 - DNA, 50 bp, Streptococcus pyogenes
  source 1..50: mol_type = genomic DNA
ctggaccttttgactcccgcagacgcatcatgtggagtgcatagcgttga

SEQ ID NO: 54788 - DNA, 40 bp, Streptococcus pyogenes; identical to SEQ ID NO: 52428
  source 1..40: mol_type = genomic DNA

SEQ ID NO: 54789 - DNA, 40 bp, Streptococcus pyogenes; identical to SEQ ID NO: 54739
  source 1..40: mol_type = genomic DNA

SEQ ID NO: 54790 - DNA, 50 bp, Streptococcus pyogenes; identical to SEQ ID NO: 54740
  source 1..50: mol_type = genomic DNA

SEQ ID NO: 54791 - protein, 614 aa, Streptococcus pyogenes
MFCKCGIIELHRKIQKGGGAVKKDVKVIKGDTTLKRTASGCVQRSIKRVAAYCRVSTDTEDQINSYNSQVEHYTEFIQKNKEWTLAGIYADEAITGTQVDRRIDFQRLINDCMNGDIDMIITKSISRFARNTLDTLKYVRKLKEFNVAVFFEEENINTLTMDGELLLTILSSVAQQEVENISANVKKGLRMKMERGEMVGFQGCLGYDYDPETKSISINEKEAEIVRYIFRRYIEGVGGMVISRELEEQGYLSPRGNKRWTETTVLGIIKNEKYKGDLMMGKTYTVDPISKRRLDNFGEQDKFYIENHHEPIISEEDFEKAQGIRLRRSKNRNTVANNGGKREKYSRKYAFSSMLECGFCGHNLSRRNWHSSSEYTKVIWQCVNATKNGKKYCPHSKGIEEEAIEKAFMESYRQVCHNNVEITNEFLKTVEEELKDNSLAKDLKKITNQLDKILKKEKDLVELRLNESISMDIYQDKYNEIAISKEKLLAEKRTLEVTLTDEKALKKRLEGFKKLLESNKYLEEFDRAVFESIVDKIIIGGTNDEGEIDPAMITIIYKTGKKDSQDGRLFKSRRKNAKEVNEETDNKLYPHSSDEVNNLYSYPIDNTRGVCKFT

SEQ ID NO: 54792 - DNA, 50 bp, Streptococcus pyogenes; identical to SEQ ID NO: 54787
  source 1..50: mol_type = genomic DNA

SEQ ID NO: 54793 - DNA, 40 bp, Streptococcus pyogenes; identical to SEQ ID NO: 52428
  source 1..40: mol_type = genomic DNA

SEQ ID NO: 54794 - DNA, 40 bp, Streptococcus pyogenes; identical to SEQ ID NO: 54739
  source 1..40: mol_type = genomic DNA

SEQ ID NO: 54795 - DNA, 50 bp, Streptococcus pyogenes; identical to SEQ ID NO: 54740
  source 1..50: mol_type = genomic DNA

SEQ ID NO: 54796 - protein, 590 aa, Streptococcus pyogenes
MNTKVKVIKASNTGARNRNSIHLDLKRVAAYCRVSTDSKDQLESYKSQVDYYTNLIKNNKSWTLAGIYADEATTGTTATKRADFIRLISDCQNGDIDMIITKSISRFARNTLDTLKYVRLLKENNVGVVFEEENIDTLTMDGELLLTILSSVAQQEVENTSAHVKKGLKMKMEKGELIGFQGCLGYDYDPTTKSISINEEEAKIVRYIFKRYLEGNGGSVIGRELEEQGYLTPRGKTKWSDTTVLGIIKNEKYIGDILMGKTFTVDPITKRRLANFGESDKYHIENHHEPIISREDFEKAQEIRLRRAQNRNTIANKDRKREKLSRQYAFSSMLECGFCGEILSRRTWHTSSIYKKINWQCVKSTKKGKKYCPHSKGIQEAAIEKAFVESYRQLCHADSTVIDDFLKIVEEEINDNTLVKDLKKLENQLNRIISQERKLVDLHLEDSIDEEVYAKKYKKLTKQKEELLDEKKTLELTIKDENSIKERLKQFKKVLENKEIIEEFNRTVFESIVDKVVVGRIDKDGTVHPYDLTFYFKTGDKDSQDSNNFKDKRKNAKDNDINKLCSYKNDEYKKLCSQSKDNTRGVCKFT

SEQ ID NO: 54797 - DNA, 50 bp, Streptococcus pyogenes
  source 1..50: mol_type = genomic DNA
ctggaccttttgactcccgcagacgcatcatgtggagactatagcgttga

SEQ ID NO: 54798 - DNA, 40 bp, Streptococcus pyogenes; identical to SEQ ID NO: 52428
  source 1..40: mol_type = genomic DNA

SEQ ID NO: 54799 - DNA, 40 bp, Streptococcus pyogenes; identical to SEQ ID NO: 54739
  source 1..40: mol_type = genomic DNA

SEQ ID NO: 54800 - DNA, 50 bp, Streptococcus pyogenes; identical to SEQ ID NO: 54740
  source 1..50: mol_type = genomic DNA

SEQ ID NO: 54801 - protein, 594 aa, Streptococcus pyogenes; identical to SEQ ID NO: 51411

SEQ ID NO: 54802 - DNA, 50 bp, Streptococcus pyogenes; identical to SEQ ID NO: 54737
  source 1..50: mol_type = genomic DNA

SEQ ID NO: 54803 - DNA, 40 bp, Streptococcus pyogenes; identical to SEQ ID NO: 52428
  source 1..40: mol_type = genomic DNA

SEQ ID NO: 54804 - DNA, 40 bp, Streptococcus pyogenes; identical to SEQ ID NO: 54739
  source 1..40: mol_type = genomic DNA

SEQ ID NO: 54805 - DNA, 50 bp, Streptococcus pyogenes; identical to SEQ ID NO: 54740
  source 1..50: mol_type = genomic DNA

SEQ ID NO: 54806 - protein, 594 aa, Streptococcus pyogenes
MKKEVKVIKGDTTLKRTASGCVERSIKRVAAYCRVSTDTEDQINSYNSQVEHYTEFIQKNKEWTLAGIYADEAITGTQVDRRIDFQRLINDCMNGDIDMIITKSISRFARNTLDTLKYVRKLKEFNVAVFFEEENINTLTMDGELLLTILSSVAQQEVENISANVKKGLRMKMERGEMVGFQGCLGYDYDPETKSISINEKEAEIVRYIFRRYIEGVGGMVISRELEEQGYLSPRGNKRWTETTVLGIIKNEKYKGDLMMGKTYTVDPISKRRLDNFGEQDKFYIENHHEPIISEEDFEKAQGIRLRRSKNRNTVANNGGKREKYSRKYAFSSMLECGFCGHNLSRRNWHSSSEYTKVIWQCVNATKNGKKYCPHSKGIEEEAIEKAFMESYRQVCHNNVEITNEFLKTVEEELKDNSLAKDLKKITNQLDKILKKEKDLVELRLNESISMDIYQDKYNEIAISKEKLLAEKRTLEVTLTDEKALKKRLEGFKKLLESNKYLEEFDRAVFESIVDKIIIGGTNDEGEIDPAMITIIYKTGKKDSQDGRLFKSRRKNAKEVDEGTANKLYPQSSDEVNNLCSYPMDNTRGVCKFT

SEQ ID NO: 54807 - DNA, 50 bp, Streptococcus pyogenes; identical to SEQ ID NO: 54737
  source 1..50: mol_type = genomic DNA

SEQ ID NO: 54808 - DNA, 40 bp, Streptococcus pyogenes; identical to SEQ ID NO: 52428
  source 1..40: mol_type = genomic DNA

SEQ ID NO: 54809 - DNA, 40 bp, Streptococcus pyogenes; identical to SEQ ID NO: 54739
  source 1..40: mol_type = genomic DNA

SEQ ID NO: 54810 - DNA, 50 bp, Streptococcus pyogenes; identical to SEQ ID NO: 54740
  source 1..50: mol_type = genomic DNA

SEQ ID NO: 54811 - protein, 594 aa, Streptococcus pyogenes
MKKEVKVIKGDTTLKRTASGCVERSIKRVAAYCRVSTDTEDQINSYNSQVEHYTEFIQKNNEWTLAGIYADEAITGTQVDRRIDFQRLINDCMNGDIDMIITKSISRFARNTLDTLKYVRKLKEFNVAVFFEEENINTLTMDGELLLTILSSVAQQEVENISANVKKGLRMKMERGEMVGFQGCLGYDYDPETKSISINEKEAEIVRYIFRRYIEGVGGMVISRELEEQGYLSPRGNKRWTETTVLGIIKNEKYKGDLMMGKTYTVDPISKRRLDNFGEQDKFYIENHHEPIISEEDFEKAQGIRLRRSKNRNTVANNGGKREKYSRKYAFSSMLECGFCGYNLSRRNWHSSSEYTKVIWQCVNATKNGKKYCPHSKGIEEEAIEKAFMESYRQVCHNNVEITNEFLKTVEEELKDNSLSKDLKKISNQLDKILKKEKDLVELRLNESISMDIYQDKYNEIAISKEKLLAEKRTLEVTLTDEKALKKRLEGFKKLLESNKYLEEFDRAVFESIVDKIIIGGTNDEGEIDPAMITIIYKTGKKDSQDGRLFKSRRKNAKEVDEKTDNKLYPQSSDEVNNLCSYPMDNTRGVCKFT

SEQ ID NO: 54812 - DNA, 50 bp, Streptococcus pyogenes; identical to SEQ ID NO: 54737
  source 1..50: mol_type = genomic DNA

SEQ ID NO: 54813 - DNA, 40 bp, Streptococcus pyogenes; identical to SEQ ID NO: 52428
  source 1..40: mol_type = genomic DNA

SEQ ID NO: 54814 - DNA, 40 bp, Streptococcus pyogenes; identical to SEQ ID NO: 54739
  source 1..40: mol_type = genomic DNA

SEQ ID NO: 54815 - DNA, 50 bp, Streptococcus pyogenes; identical to SEQ ID NO: 54740
  source 1..50: mol_type = genomic DNA

SEQ ID NO: 54816 - protein, 590 aa, Streptococcus pyogenes
MNTKVKVIKASNTGARNRNSIHLDLKRVAAYCRVSTDSKDQLESYKSQVDYYTNLIKNNKSWTLAGIYADEATTGTTATKRADFIRLISDCQNGDIDMIITKSISRFARNTLDTLKYVRLLKENNVGVVFEEENIDTLTMDGELLLTILSSVAQQEVENTSAHVKKGLKMKMEKGELIGFQGCLGYDYDPTTKSISINEEEAKIVRYIFKRYLEGNGGSVIGRELEEQGYLTPRGKTKWSDTTVLGIIKNEKYIGDILMGKTFTVDPITKRRLANFGESDKYHIENHHEPIISKEDFEKAQEIRLRRAQNRNTIANKDRKREKLSRQYAFSSMLECGFCGEILSRRTWHTSSIYKKINWQCVKSTKKGKKYCPHSKGIQEAAIEKAFVESYRQLCHADSTVIDDFLKIVEEEINDNTLVKDLKKLENQLNRIISQERKLVDLHLEDSIDEEVYAKKYKKLTKQKEELLDEKKTLELTIKDENSIKERLKQFKKVLENKEIIEEFNRTVFESIVDKVVVGRIDKDGTVHPYDLTFYFKTGVKDSQDSNNFKDKRKNAKDNDINKLCSYKNDEDKKLCSQSKDNARGVCKFT

SEQ ID NO: 54817 - DNA, 50 bp, Streptococcus pyogenes; identical to SEQ ID NO: 54762
  source 1..50: mol_type = genomic DNA

SEQ ID NO: 54818 - DNA, 40 bp, Streptococcus pyogenes; identical to SEQ ID NO: 52428
  source 1..40: mol_type = genomic DNA

SEQ ID NO: 54819 - DNA, 40 bp, Streptococcus pyogenes; identical to SEQ ID NO: 54739
  source 1..40: mol_type = genomic DNA

SEQ ID NO: 54820 - DNA, 50 bp, Streptococcus pyogenes; identical to SEQ ID NO: 54740
  source 1..50: mol_type = genomic DNA

SEQ ID NO: 54821 - protein, 590 aa, Streptococcus pyogenes
MNTKVKVIKASNTGARNRNSIHLDLKRVAAYCRVSTDSKDQLESYKSQVDYYTNLIKNNKSWTLAGIYADEATTGTTATKRADFIRLISDCQNGDIDMIITKSISRFARNTLDTLKYVRLLKENNVGVVFEEENIDTLTMDGELLLTILSSVAQQEVENTSAHVKKGLKMKMEKGELIGFQGCLGYDYDPTTKSISINEEEAKIVRYIFKRYLEGNGGSVIGRELEEQGYLTPRGKTKWSDTTVLGIIKNEKYIGDILMGKTFTVDPITKRRLANFGESDKYHIENHHEPIISREDFEKAQEIRLRRAQNRNTIANKDRKREKLSRQYAFSSMLECGFCGEILSRRTWHTSSIYKKINWQCVKSTKKGKKYCPHSKGIQEAAIEKAFVESYRQLCHADSTVIDDFLKIVEEEINDNTLVKDLKKLENQLNRIISQERKLVDLHLEDSIDEEVYAKKYKKLTKQKEELLDEKKTLELTIKDEDSIKERLKQFKKVLENKEIIEEFNRTVFESIVDKVVVGRIDKDGTVHPYDLTFYFKTGVKDSQDSNNFKDKRKNAKDNDINKLCSYKNDEDKKLCSQSKDNARGVCKFT

SEQ ID NO: 54822 - DNA, 50 bp, Streptococcus pyogenes; identical to SEQ ID NO: 54762
  source 1..50: mol_type = genomic DNA

SEQ ID NO: 54823 - DNA, 40 bp, Streptococcus pyogenes; identical to SEQ ID NO: 52428
  source 1..40: mol_type = genomic DNA

SEQ ID NO: 54824 - DNA, 40 bp, Streptococcus pyogenes; identical to SEQ ID NO: 54739
  source 1..40: mol_type = genomic DNA

SEQ ID NO: 54825 - DNA, 50 bp, Streptococcus pyogenes; identical to SEQ ID NO: 54740
  source 1..50: mol_type = genomic DNA

SEQ ID NO: 54826 - protein, 602 aa, Vibrio cyclitrophicus
MAFFWGEDMEVIDAYIYSRVSKESQAKDGEGLKRQIERAEKFIENENKINTNYRYQLVDEIVDAGLSAYYGKNTSKNGGLGAFLEAAKQGEIKEKSLLIVEAVDRLSRLPADRSRRLFAKLKKYKIDVAITKFSLIIPHDEQLDMGVDLLLTAAFHLAHMESEQKSQRIKATFDKKRREETVGGEKRTSVCPAWMELSSCKTYFELIPERVEVLRTMINMKLDGYGCHRITKYLNERNIANFTGKPWRNEVVNKYLKMIQLKGELQRVEHQIIDGKTKKVPVGAPIENYYPPVIDRSTFIALQSTFPVSVKGRVGSAFPNLFRGLLRCPSCGNILSYSKTLRGYPKLRCRSRLDNQGCTQKYTRYDPIEQHLVQSLVGLDYSRLLNTSYKKLQKEISIIDGKMESLRNSILVLSDELSELEHIETIKVYGSLIDQKHNELDILSVKRDELTKVSSSYDYNAIKELDLTTVEGRQKYHEYVAKFIDYIVVQDPDSRSSATVVKFKSQKIGLLFFPFDKSSWDLSHEKILIDYYTKGEDIAGAIQRPISLSYALNRRDLLKKVSTVKPPQEPEYLADIRYLFEIKQEFKKEPDKWRSLKRKLRL

SEQ ID NO: 54827 - DNA, 50 bp, Vibrio cyclitrophicus
  source 1..50: mol_type = genomic DNA
tgcagtactaatgccttgccaactaatgaagaatatgttatagtacagca

SEQ ID NO: 54828 - DNA, 40 bp, Vibrio cyclitrophicus
  source 1..40: mol_type = genomic DNA
agcaatggttattccaaccaacgaagaattcgttattgct

SEQ ID NO: 54829 - DNA, 40 bp, Vibrio cyclitrophicus
  source 1..40: mol_type = genomic DNA
agcaatggttattccaaccttcgaagaattcgttattgct

SEQ ID NO: 54830 - DNA, 50 bp, Vibrio cyclitrophicus
  source 1..50: mol_type = genomic DNA
tttagtcctattcactgtaaaagttttgaagaatataaaattttacagca

SEQ ID NO: 54831 - protein, 493 aa, Anaerotignum lactatifermentans
MKAVIYARYSSDNQREESIEGQIRECTAFAEKNGITILRHYIDRAFSAKTDNRPEFQNMIKDSGKHLFDMIIVWKLDRFARNRYDSARYKAALKKNGVKVVSATEVISDGAEGIILESVLEGYAEYYSADLSEKVVRGMTENALKSKYNGGTRPIGYLIDSDQCFQLDPLTAPFVREAFQRYDEGATMTQIRDWLNEQGVKNTRGQKMTYNSVQHLLSNRRYIGEYTYRDIVVPDGIPAIVPQDLFDRVQQKLAKNKKAPARHKAEDDYLLTTKLFCGYCGAYLCGESGTSHTGNVHHYYKCVSVKKKRTECHKKSVRKEWIEDLVVSETMRMVMDDKAIEAIVSMLMDLQDRENVNLPLYEQQLRETDTAIQNLLNAIQQGILTKSTKGRLEELEATKEELETKIACEKLAKPKVSAEFMTFWLHRFRKLDVRQKSHRKMLIDTFINAIFLYDDKMVITFNYKEGTTTITFDDLKTALADQKTGSDLDCSTA

SEQ ID NO: 54832 - DNA, 50 bp, Anaerotignum lactatifermentans; identical to SEQ ID NO: 17552
  source 1..50: mol_type = genomic DNA

SEQ ID NO: 54833 - DNA, 40 bp, Anaerotignum lactatifermentans
  source 1..40: mol_type = genomic DNA
ggttcaagtcctgttatccgcagagaaaagacggcatgaa

SEQ ID NO: 54834 - DNA, 40 bp, Anaerotignum lactatifermentans
  source 1..40: mol_type = genomic DNA
ggttcaagtcctgttatccaaagagaaaagacggcatgaa

SEQ ID NO: 54835 - DNA, 50 bp, Anaerotignum lactatifermentans
  source 1..50: mol_type = genomic DNA
tggttggatttgccttggttaaccaaaccaaaccaaatatttaaaaaatt

SEQ ID NO: 54836 - protein, 494 aa, Anaerotruncus colihominis
MKAVIYARYSSDNQREESIEGQIRECTAFAEKNGITILRHYIDRAFSAKTDNRPEFQNMIKDSGKRLFDMIIVWKLDRFARNRYDSARYKAALKKNGVKVVSATEVISDGAEGIILESVLEGYAEYYSADLSEKVVRGMTENALKSKYNGGTLPIGYQIDSDQCFQLDPLTAPCVREAFQRYDEGATMTQIRDWFNEQGVKNTRGQKMTYNSIQHLLNNRRYIGEYTYRDIVVPDGIPAIVPQDLFDRVQEKLAKNKKAPARHKAEDDYLLTTKLFCGYCGAYLCGESGTSHTGNVHHYYKCVSVKKKRTECHKKSVRKEWIEDLVVSETMKMVMDDTASEAIVSMLMDLQDRENVNLPLYEQQLREADTAIQNLLNAIQQGILTKSTKGRLEELEATKEELETKIACEKLAKPKVSAEFMTFWLHRFRKLDVRQKSHRKMLIDTFVNAIFLYDDKIVITFNYKDGTDTITFDDLKAALDKENTGSDLDCLTAP

SEQ ID NO: 54837 - DNA, 50 bp, Anaerotruncus colihominis
  source 1..50: mol_type = genomic DNA
ggttcggatttggattgcttaacggcaccaaaccaatataatccgaacct

SEQ ID NO: 54838 - DNA, 40 bp, Anaerotruncus colihominis
  source 1..40: mol_type = genomic DNA
ggttcgacccccgccaccggcaccatacaaaagatctgga

SEQ ID NO: 54839 - DNA, 40 bp, Anaerotruncus colihominis
  source 1..40: mol_type = genomic DNA
ggttcgacccccgccaccgaaaccatacaaaagatctgga

SEQ ID NO: 54840 - DNA, 50 bp, Anaerotruncus colihominis; identical to SEQ ID NO: 54835
  source 1..50: mol_type = genomic DNA

SEQ ID NO: 54841 - protein, 494 aa, Anaerotruncus colihominis; identical to SEQ ID NO: 54836

SEQ ID NO: 54842 - DNA, 50 bp, Anaerotruncus colihominis; identical to SEQ ID NO: 54837
  source 1..50: mol_type = genomic DNA

SEQ ID NO: 54843 - DNA, 40 bp, Anaerotruncus colihominis
  source 1..40: mol_type = genomic DNA
ggttcaagtcctgttacccgcaccaagtaatatggagcgg

SEQ ID NO: 54844 - DNA, 40 bp, Anaerotruncus colihominis
  source 1..40: mol_type = genomic DNA
ggttcaagtcctgttacccaaaccaagtaatatggagcgg

SEQ ID NO: 54845 - DNA, 50 bp, Anaerotruncus colihominis; identical to SEQ ID NO: 54835
  source 1..50: mol_type = genomic DNA

SEQ ID NO: 54846 - protein, 557 aa, Bittarella massiliensis; identical to SEQ ID NO: 11441

SEQ ID NO: 54847 - DNA, 50 bp, Bittarella massiliensis; identical to SEQ ID NO: 11442
  source 1..50: mol_type = genomic DNA

SEQ ID NO: 54848 - DNA, 40 bp, Bittarella massiliensis
  source 1..40: mol_type = genomic DNA
caaaaaccacgggctgaaaaaagacagcccggtctccatc

SEQ ID NO: 54849 - DNA, 40 bp, Bittarella massiliensis
  source 1..40: mol_type = genomic DNA
caaaaaccacgggctgaaaccagacagcccggtctccatc

SEQ ID NO: 54850 - DNA, 50 bp, Bittarella massiliensis
  source 1..50: mol_type = genomic DNA
ctttatcactctgaaacaccaggacctgaggaggtgacctggccatagca

SEQ ID NO: 54851 - protein, 557 aa, Clostridium leptum; identical to SEQ ID NO: 11441

SEQ ID NO: 54852 - DNA, 50 bp, Clostridium leptum; identical to SEQ ID NO: 11442
  source 1..50: mol_type = genomic DNA

SEQ ID NO: 54853 - DNA, 40 bp, Clostridium leptum
  source 1..40: mol_type = genomic DNA
attccaaccgggtctatcgaaagtcacgcctgaaacgccg

SEQ ID NO: 54854 - DNA, 40 bp, Clostridium leptum
  source 1..40: mol_type = genomic DNA
attccaaccgggtctatcgccagtcacgcctgaaacgccg

SEQ ID NO: 54855 - DNA, 50 bp, Clostridium leptum; identical to SEQ ID NO: 54850
  source 1..50: mol_type = genomic DNA

SEQ ID NO: 54856 - protein, 557 aa, Hungatella hathewayi; identical to SEQ ID NO: 11441

SEQ ID NO: 54857 - DNA, 50 bp, Hungatella hathewayi; identical to SEQ ID NO: 11442
  source 1..50: mol_type = genomic DNA

SEQ ID NO: 54858 - DNA, 40 bp, Hungatella hathewayi
  source 1..40: mol_type = genomic DNA
attaaatccgggacggtcgaatgttgttcctgaaatgcca

SEQ ID NO: 54859 - DNA, 40 bp, Hungatella hathewayi
  source 1..40: mol_type = genomic DNA
attaaatccgggacggtcgcctgttgttcctgaaatgcca

SEQ ID NO: 54860 - DNA, 50 bp, Hungatella hathewayi; identical to SEQ ID NO: 54850
  source 1..50: mol_type = genomic DNA

SEQ ID NO: 54861 - protein, 557 aa, Clostridioides difficile; identical to SEQ ID NO: 11441

SEQ ID NO: 54862 - DNA, 50 bp, Clostridioides difficile; identical to SEQ ID NO: 11442
  source 1..50: mol_type = genomic DNA

SEQ ID NO: 54863 - DNA, 40 bp, Clostridioides difficile
  source 1..40: mol_type = genomic DNA
taactatcgtggtccatataattacacacctggtatagag

SEQ ID NO: 54864 - DNA, 40 bp, Clostridioides difficile
  source 1..40: mol_type = genomic DNA
taactatcgtggtccatatccttacacacctggtatagag

SEQ ID NO: 54865 - DNA, 50 bp, Clostridioides difficile; identical to SEQ ID NO: 54850
  source 1..50: mol_type = genomic DNA

SEQ ID NO: 54866 - protein, 496 aa, Phascolarctobacterium faecium
MSTYERLVNSQNFFSPYLTQEDLSRLGRNYLKTGELIEIVFPENGVRYIAINDGVDTAREDNEFTPLRNWFNEFYARDTSKKIRAVKQAQAQKGERVNGEYPYGYIPDPNNRHHLIPDPETAPIVKQVFAMFVSGVRMCEIQKWLAENKVLTIGALRYQRTGQARYQRAMIAPYTWPDKTLYDILARQEYLGHTITAKTHKVSYKSKKTRKNEEEQRYFFPNTHEPLVDEETFELAQKRIATRHRPTKAAEIDIFSGLLFCAGCGHKMYYQQGVNIEPRRFSYSCGAWRNRARTGSECTSHYIRKNVLLDLVLEDMRRVLQYVKEHEQDFICKATEYGDMEARKALAQQQKELSKAQARMTELDTLFRKLYEDNALGRLTDERFVFLTSGYEDEKKSLAARIDELQQQIATVTERKRDISRFIQIVGKYSDIQELTYENVHEFIDRILIHELDRETNTRKIEIHYSFVGQVDTEQEPTQVVNHDRRNMVDVKSIAI

SEQ ID NO: 54867 - DNA, 50 bp, Phascolarctobacterium faecium; identical to SEQ ID NO: 11442
  source 1..50: mol_type = genomic DNA

SEQ ID NO: 54868 - DNA, 40 bp, Phascolarctobacterium faecium
  source 1..40: mol_type = genomic DNA
cggtaaaccaggttgtctaaacggcattccagtgtgcaga

SEQ ID NO: 54869 - DNA, 40 bp, Phascolarctobacterium faecium
  source 1..40: mol_type = genomic DNA
cggtaaaccaggttgtctacccggcattccagtgtgcaga

SEQ ID NO: 54870 - DNA, 50 bp, Phascolarctobacterium faecium; identical to SEQ ID NO: 54850
  source 1..50: mol_type = genomic DNA

SEQ ID NO: 54871 - protein, 557 aa, Phascolarctobacterium faecium; identical to SEQ ID NO: 36631

SEQ ID NO: 54872 - DNA, 50 bp, Phascolarctobacterium faecium; identical to SEQ ID NO: 11442
  source 1..50: mol_type = genomic DNA

SEQ ID NO: 54873 - DNA, 40 bp, Phascolarctobacterium faecium; identical to SEQ ID NO: 54868
  source 1..40: mol_type = genomic DNA

SEQ ID NO: 54874 - DNA, 40 bp, Phascolarctobacterium faecium; identical to SEQ ID NO: 54869
  source 1..40: mol_type = genomic DNA

SEQ ID NO: 54875 - DNA, 50 bp, Phascolarctobacterium faecium; identical to SEQ ID NO: 54850
  source 1..50: mol_type = genomic DNA

SEQ ID NO: 54876 - protein, 463 aa, Staphylococcus epidermidis
MKVAIYTRVSTAEQNLNGFSIHEQRKKLISFCEINEWKEYEVFTDGGFSGGSTKRPALQDLFSRLTQFDLVLVYKLDRLTRNVRDLLEMLERFEKYNVSFKSATEVFDTTTAIGKLFITIVGAMAEWERETIRERSLFGSRAAVESGKYIREQPFVYDNIEGKLVPNENTKYIEYIVKKFKEGNSANEIARLLNSKKKPSKIKNWNRQTIIRLIKNPVLRGHTKFGDIFIENTHEPILSDDDYYKVINAIENKTHKSKSKHNAIFRGVLKCPQCNGNLHLYAGTIHPKNGRSYNVRRYTCDKCHRDKYSRNISFNESEIENKFIEELEKMDLTRFEIHKPKKVEINIESDKKRIKEQRTKLLRAYTMGYVEEEEFKIIMDETQRQLEDIKREENKETVQEIDEKQIKSIGNFIIEGWKTLTIKEKEKLILSSVDKIDIEFIPREKNNNSNTNTVNIKKVHFIF

SEQ ID NO: 54877 - DNA, 50 bp, Staphylococcus epidermidis
  source 1..50: mol_type = genomic DNA
aatgtgggttatgtaactatagccgtggtgcttgttacataacccacata

SEQ ID NO: 54878 - DNA, 40 bp, Staphylococcus epidermidis
  source 1..40: mol_type = genomic DNA
cataaatggcacaactaatgttgcaccggttcctcccata

SEQ ID NO: 54879 - DNA, 40 bp, Staphylococcus epidermidis
  source 1..40: mol_type = genomic DNA
cataaatggcacaactaatggtgcaccggttcctcccata

SEQ ID NO: 54880 - DNA, 50 bp, Staphylococcus epidermidis
  source 1..50: mol_type = genomic DNA
attgtaggtcctcaaaatcaagctggagtgcttgttcaaccagacacatc

SEQ ID NO: 54881 - protein, 512 aa, Blautia sp N6H1-15
MEQYVKYLRKSRFDRDYADLSIEETLKRHEAILDKLANDRGYYIAKTYYEVVSGESIAARPEIQKMLEEVSAGLYAGVLVVDVERLARGNGADQAYISQVFQFSGTKIITPTKMYDPSNEFDEEYFEFGLFMSRREYKTINRRLIRGRDSSASEGKWLGSIAPYGYNRVKIPHEKGYTLEVHPEEGPVVRKIFEMYLNHQGTKVICNHLNDNDIPTRHGDLWTYNTIFQIITNPIYMGKIRRGWSKQIKSIENGTVKRRIKRSKDMSTYDIYDGLHPALVSEESFMKVQDIRLDKKPDAPVKNEFKMQNPFSGLLFCSVCGKRIGRTTMSKRSGNPARLRCVNGRNCHNGSAYFEIVEKEIIDALRTWLKGYKVKIDTVGYAEDIKLGKKRLQKLEQEKGKLSTQMDNAFNLVEQGVYTLEVFQDRRAKLTLSMEDLDIQIEKLQKEVLALETSESTQKNIIPQTEELLDSYDEMTNEERNELLKEILEEIKYFKGADGQIEIDLYPRLPRI

SEQ ID NO: 54882 - DNA, 50 bp, Blautia sp N6H1-15
  source 1..50: mol_type = genomic DNA
tgtaggtatcctcaacttacctatgtgtgagtaacgtgatgatacctaca

SEQ ID NO: 54883 - DNA, 40 bp, Blautia sp N6H1-15
  source 1..40: mol_type = genomic DNA
gatcggagcagtaacccacgttttcgtacaagactcgaca

SEQ ID NO: 54884 - DNA, 40 bp, Blautia sp N6H1-15
  source 1..40: mol_type = genomic DNA
gatcggagcagtaacccacattttcgtacaagactcgaca

SEQ ID NO: 54885 - DNA, 50 bp, Blautia sp N6H1-15
  source 1..50: mol_type = genomic DNA
tgtatgtatctcatatatacatatatgtatgtatctcatatatacatata

SEQ ID NO: 54886 - protein, 558 aa, Tyzzerella nexilis
MKRIRMLLRVSSDQQLEADGDLSIQRKILMEYIQKQEDWILDGKEYFEGSKSAYKNTASQREILQEILQDAQNKEFDILVPYKDDRVGRLMWDTSSYIMNLKEFGVDVYTVKDGCISPETDDIMGQMMLTFRYANAQKSSADTGMRVKDTAQKLVEQGKFMGGKAPYGYELEYSGEVSKHGRALKHLVVVPERAEMVKYIYSLSFNKEFGSAKIAQLLNKNSKYKELAPNGIWKSGTITSILTNPIYAGFTAYKRRERTNGKYKRLDSKEWVLAKEADEAIQIIEPEMWNRTQEKRKLRGKKYTEKLENQNITVIHKNEGMLALIDVIYCGYCGSKLTNGSKYNYWTIKSTGERRASRTPIYKCQGAWQGIPHNEAKQFQAKEIEPVVFEAIAAYIGRLQENENVFDEIQKNQNKEKTAMAKELRKEQEEAEKIRKKISVMEENIPNAMSGEYPLSLDELVTLIKKQKESLEQQEIVVKEKELAFQNAEVSVNDWEELKQKIPTWQEVFLNADGEAKRVLVNRLIQRIEVKKDEIKVFFKINLDDFFCHPRISGDSGT

SEQ ID NO: 54887 - DNA, 50 bp, Tyzzerella nexilis
  source 1..50: mol_type = genomic DNA
ccccgaatcagtggcgattccggtaccccggaatcaatacttattcgggg

SEQ ID NO: 54888 - DNA, 40 bp, Tyzzerella nexilis
  source 1..40: mol_type = genomic DNA
tcatatccttgattccggtaccattcagtatagacgcggt

SEQ ID NO: 54889 - DNA, 40 bp, Tyzzerella nexilis
  source 1..40: mol_type = genomic DNA
tcatatccttgattccggtctcattcagtatagacgcggt

SEQ ID NO: 54890 - DNA, 50 bp, Tyzzerella nexilis
  source 1..50: mol_type = genomic DNA
tcccgaagggcagccgattcctctctcccagcatcaggttgaatctgggg

SEQ ID NO: 54891 - protein, 531 aa, Azotobacter chroococcum
MTKPLAIPYLRFSSGKQAQGNSYERQHQMIAAWLQLHPDFLLATMRFEDLGISGWNGEHLDYGFGKLIAAIREGYIPAGSVVLVEAIDRIGRLQPIEMIRHLSNILSNGVNIITLDDGIEYTKDSVNGQHLFLLAAKVQQANLFSENLSRRATASWDAKRKQADRGEPVKRRLPIWINPDNTLNQDIAPIVVEIFELYASGFGTRRIQHRIKQRCQEKGISIKISNAGIQHWVSMKLAIGYWNDSPNVHPAVISEELWWRVQKERERRSKGKKLSAPTKHPLAGLVVCGVCGCTYRVKAETGKSKVMHCSRRDELDNRNCSNKKAIPVAVLETVRMMTGLEYIEKAILSTQPSVNTTRLAEIDQKLSALHSQLKSLADTIVSVGALPEIVAKASELKNERESLELEQTILLQQTDTTDIRSIVKAEATLLLDDPLRLNALLQKVGYKISVFPDARITVDDQSFRYAGYERKTDRFKLIDLMVEVGQLIYINKNEREKEARLKAVASTTKDPSPLLVLMKRKNAYISKAENL

SEQ ID NO: 54892 - DNA, 50 bp, Azotobacter chroococcum
  source 1..50: mol_type = genomic DNA
tagagatttattggacaattcagtatgctaagtagtacgatgagtccatc

SEQ ID NO: 54893 - DNA, 40 bp, Azotobacter chroococcum
  source 1..40: mol_type = genomic DNA
cgggtcctggcagttcggcatgcgcgattgcacgtcgaca

SEQ ID NO: 54894 - DNA, 40 bp, Azotobacter chroococcum; identical to SEQ ID NO: 54893
  source 1..40: mol_type = genomic DNA

SEQ ID NO: 54895 - DNA, 50 bp, Azotobacter chroococcum
  source 1..50: mol_type = genomic DNA
tagaaataaagggaacaattcagtatgctaagcaggaaagtgagagtgtt

SEQ ID NO: 54896 - protein, 516 aa, Bacillus cereus
MYRPESLDVFIYLRKSRKDVEEERRALEEGNSYNALERHRKRLFAIAKAESHNIIDVFEEVASGESIQERPEMQKLLRKLEGNEADGVLVIDLDRLGRGDMLDAGMIDRAFRYSSTKIITPTDVYDPDDESWELVFGIKSLISRQELKSITKRLQNGRIDSVKEGKHIGKKPPYGYLKGENLKLYPDPEKAWIVKKIFELMYNGKGRQAIAAELDKLGIEPPVTKRGAWDASTITSIIKNEVYTGVIIWGKFKHKKRNGKYTRHKVPEEKWIVYENAHEPIVPKELFDAANKAHSGRQRTSVISDKHLTNPLAGILKCKLCGYTMLIQTRKDRPHNYIRCNNPTCRGKQKQSVFYLVEEKILEALQQVIDEFQAKKKEKVEIDETNLVSFKEKAIHLKEKELQELQGQKGNLHDLLEKGVYTVEIFLERQKNLVERISSIENDIKMLREEIESEKMKEQNKTEFIPALKTVIEAYDKTPNIELKNQLLKTILEKVTYYRNPDWKTNEFEIQVYFKI

SEQ ID NO: 54897 - DNA, 50 bp, Bacillus cereus
  source 1..50: mol_type = genomic DNA
gtacatggtggagtattaaactgatttaattctccaccctatacacgaag

SEQ ID NO: 54898 - DNA, 40 bp, Bacillus cereus; identical to SEQ ID NO: 21658
  source 1..40: mol_type = genomic DNA

SEQ ID NO: 54899 - DNA, 40 bp, Bacillus cereus; identical to SEQ ID NO: 21658
  source 1..40: mol_type = genomic DNA

SEQ ID NO: 54900 - DNA, 50 bp, Bacillus cereus
  source 1..50: mol_type = genomic DNA
cttaatgttatctcatttaattcatttaattctctaaacaaaacatgaag

SEQ ID NO: 54901 - protein, 562 aa, Vibrio cholerae
MQKILYPYVRFSSEQQSGGSSYHRQLGDILKYAKENGYTVNDSLELRDLGLSAYKADHIKKGSLGDFFDAIDSGVIETDGSAYLCVEQIDRLSRQSLDDASDVLRTILRANINVITLMDKMIYTKESLNDLMSVLYSSMLMVQANKESAVKSERILKSFDRRIDKLNNGEPIQYVGIFPGWIDNKGTKQKKDFVVNDKAKIVQRVFKMYIAGTSMGDIARIFNDKGIEQVAKRRHKNFTNSWSSAKINHLLKNRCVLGDLHIKKTGEVFKNYYPQIISIDDWDVVQSMTTTKKTTKYSGRKSINIFTGKIFCSGCGQKYYFETDDKITKKGRTLYYMLKCQGRRILGCKSKSIKYDDFLSSTPNLFGMITKTKKDNSEEIKKIKQKISDISSKTREIEKNINTLENMNDNGSLDYETYLKESSKQRKKIRINDTRVADFKANIARLSSDNKLNHFDKTDPISIIKGKRFVNENFAGFVISSDSKSCTALYLNGQVVHFLLQNSKIEKKESINPVDGFGEFFELKEEIINAYKSGKMDGRFIEILRAANFWGVDTSEKDYSLE

SEQ ID NO: 54902 - DNA, 50 bp, Vibrio cholerae
  source 1..50: mol_type = genomic DNA
ttcctgttaatcttttgtagcactgtagtttggtgtatgattaacaggaa

SEQ ID NO: 54903 - DNA, 40 bp, Vibrio cholerae; identical to SEQ ID NO: 23803
  source 1..40: mol_type = genomic DNA

SEQ ID NO: 54904 - DNA, 40 bp, Vibrio cholerae
  source 1..40: mol_type = genomic DNA
ggctggcgctaaattgacctaaatgcgcttcgctggaaac

SEQ ID NO: 54905 - DNA, 50 bp, Vibrio cholerae
  source 1..50: mol_type = genomic DNA
ttcctgttgtgcaaatggagctcttaaatgtggtgctgcattaatagaac

SEQ ID NO: 54906 - protein, 416 aa, Vibrio cholerae
  REGION 402..416: note = misc_feature - Xaa can be any naturally occurring amino acid
MQKILYPYVRFSSEQQSGGSSYHRQLGDILKYAKENGYTVNDSLELRDLGLSAYKADHIKKGSLGDFFDAIDSGVIETDGSAYLCVEQIDRLSRQSLDDASDVLRTILRANINVITLMDKMIYTKESLNDLMSVLYSSMLMVQANKESAVKSERILKSFDRRIDKLNNGEPIQYVGIFPGWIDNKGTKQKKDFVVNDKAKIVQRVFKMYIAGTSMGDIARIFNDKGIEQVAKRRHKNFTNSWSSAKINHLLKNRCVLGDLHIKKTGEVFKNYYPQIISIDDWDVVQSMTTTKKTTKYSGRKSINIFTGKIFCSGCGQKYYFETDDKITKKGRTLYYMLKCQGRRILGCKSKSIKYDDFLSSTPNLFGMITKTKKDNSEEIKKIKQKISDISSKTREIEKNIXXXXXXXXXXXXXXX

SEQ ID NO: 54907 - DNA, 50 bp, Vibrio cholerae; identical to SEQ ID NO: 54902
  source 1..50: mol_type = genomic DNA

SEQ ID NO: 54908 - DNA, 40 bp, Vibrio cholerae; identical to SEQ ID NO: 23803
  source 1..40: mol_type = genomic DNA

SEQ ID NO: 54909 - DNA, 40 bp, Vibrio cholerae; identical to SEQ ID NO: 54904
  source 1..40: mol_type = genomic DNA

SEQ ID NO: 54910 - DNA, 50 bp, Vibrio cholerae; identical to SEQ ID NO: 54905
  source 1..50: mol_type = genomic DNA

SEQ ID NO: 54911 - protein, 427 aa, Vibrio cholerae
  REGION 398..426: note = misc_feature - Xaa can be any naturally occurring amino acid
MQKILYPYVRFSSEQQSGGSSYHRQLGDILKYAKENGYTVNDSLELRDLGLSAYKADHIKKGSLGDFFDAIDSGVIETDGSAYLCVEQIDRLSRQSLDDASDVLRTILRANINVITLMDKMIYTKESLNDLMSVLYSSMLMVQANKESAVKSERILKSFDRRIDKLNNGEPIQYVGIFPGWIDNKGTKQKKDFVVNDKAKIVQRVFKMYIAGTSMGDIARIFNDKGIEQVAKRRHKNFTNSWSSAKINHLLKNRCVLGDLHIKKTGEVFKNYYPQIISIDDWDVVQSMTTTKKTTKYSGRKSINIFTGKIFCSGCGQKYYFETDDKITKKGRTLYYMLKCQGRRILGCKSKSIKYDDFLSSTPNLFGMITKTKKDNSEEIKKIKQKISDISSKTREIXXXXXXXXXXXXXXXXXXXXXXXXXXXXXI

SEQ ID NO: 54912 - DNA, 50 bp, Vibrio cholerae; identical to SEQ ID NO: 54902
  source 1..50: mol_type = genomic DNA

SEQ ID NO: 54913 - DNA, 40 bp, Vibrio cholerae; identical to SEQ ID NO: 23803
  source 1..40: mol_type = genomic DNA

SEQ ID NO: 54914 - DNA, 40 bp, Vibrio cholerae; identical to SEQ ID NO: 54904
  source 1..40: mol_type = genomic DNA

SEQ ID NO: 54915 - DNA, 50 bp, Vibrio cholerae; identical to SEQ ID NO: 54905
  source 1..50: mol_type = genomic DNA

SEQ ID NO: 54916 - protein, 588 aa, Zhihengliuella halotolerans
MSESDPKSNLAFVYCRISKDRSGAGHGVERQRRDCEEVAAREGLTVVEVFVDNDISAYKKKRRPGYDEMVSRLSEVGHVITWHTDRLHRRPAELESYLTATISENVFTHVYQGGNLNLTTSDGRLHARMGAAIAAHESEHKGDRIKSKWKQLAEQGRHAHGARPFGWDLERDDTDKAERLASRLVLNEREATELRKAIDGYLYEGRSLGAICRDWNDPEREGGPVLTTLGNRWTTDALRQVFVRPRNAGIATHQGMEVSRGKFEAIVSEAQLRAVQRKVKERAAPKGHTNKATHLLSGIALCPCGASLVAGARRQTRKGEHYWVPTYKCLPDRPRRGEGPHTNKQVDHLDDAVKIAVYEWFKHPYKFLPKVSPEDEARAAEIESERRELGHRRDNMAEALAAGTLDIAAYSAATTALSTRERELDEELEALGARMQAVPSPVEPQDVPRVAVDPFRLEQADRLYRDWLTWPLDDQRDFVRRHFRVQVLPTPKGAPRRFDPALVDIRLVNEGEPVGAHLGATHDAEDTDAGWPVSGDRLGVYEPAGDFRERRAEYERLAARLNGDDTPPASAKGSAPSARWEAGDGAEA

SEQ ID NO: 54917 - DNA, 50 bp, Zhihengliuella halotolerans
  source 1..50: mol_type = genomic DNA
atctggctttgcgttcctgccaacgcgtccatgttcgatgtaggtctgta

SEQ ID NO: 54918 - DNA, 40 bp, Zhihengliuella halotolerans
  source 1..40: mol_type = genomic DNA
cgacgcggaggcggcgaacgcgtcgatgttcacctactga

SEQ ID NO: 54919 - DNA, 40 bp, Zhihengliuella halotolerans
  source 1..40: mol_type = genomic DNA
cgacgcggaggcggcgaacttgtcgatgttcacctactga

SEQ ID NO: 54920 - DNA, 50 bp, Zhihengliuella halotolerans
  source 1..50: mol_type = genomic DNA
atatcgctaagagtttctggcttcttgtgcatgttattgagagggctgta

SEQ ID NO: 54921 - protein, 530 aa, Micrococcus luteus
MAVSYLRVSTKEQAERGGRAEGFSIPAQREANLRKARDLNAVITEEFIDAGESARKADRPELMRMIEYVQTHQVAYCIVHKVDRLARNRADDVTIHLALKEAGVVLVSATENIDETPSGMLLHGIMSTIAEFYSRNLAGEVSKGMNQKALSGGTNGKAPMGYLNVTRRDELGREVRTVEVDPDRAPLVRWAFEAYATGNHSTISLREELIDRGLTTVPTPKRPSKPPVLSTIHKMLTNPYYKGSVRFRGASYDGIHEPLVAREVWYRVQAVLNAHQTSGEKTQSHDHYLKGSLYCGECGSRLTLTNARSRRGVVYPYFMCSGRHAKRTNCERKSMFVPDIEAAVEDHYRQVQIPEHVVTALRELVTGEFDRLHAVAKQERQAYKIERDALRDERTKLMQAHYAGAVPLDLLGSEQRRIARRLVFLDAQIKAGDIEYDQAKAHLDDCLALAGDMHAIYMSIDDSLRRIANQAFFDKLIVQDEDAIHGEPGVPFTVFLNPDVQTLAVRQQGRTAESRTQTGDVAGLNNDLLV

SEQ ID NO: 54922 - DNA, 50 bp, Micrococcus luteus
  source 1..50: mol_type = genomic DNA
ggtttgaacaacgaccttttggtggactttcgtggggagttcgagaaccc

SEQ ID NO: 54923 - DNA, 40 bp, Micrococcus luteus
  source 1..40: mol_type = genomic DNA
cccgggcccttcttcggtggaggcaaggggactcgaaccc

SEQ ID NO: 54924 - DNA, 40 bp, Micrococcus luteus
  source 1..40: mol_type = genomic DNA
cccgggcccttcttcggtgtgggcaaggggactcgaaccc

SEQ ID NO: 54925 - DNA, 50 bp, Micrococcus luteus
  source 1..50: mol_type = genomic DNA
tcttcaaccattgtgcttttggtgtgcttttgggggaaaagcaagaatcc

SEQ ID NO: 54926 - protein, 562 aa, Bacillus sonorensis
MEVDELLILKGEERLNTEQIMGLIGRINAIIYVRVSTADQAKKGYSLESQIDRCKERAITKFGYKDSELIALIEPGKMGDDPNRPALNHALYLMEKGLGKKFIVLHPDRLTRDNTLQGIVSRKIWSMGVDIEFIEFEVDPTNPESMLMYNIQGSIAQYNKAKISANSKRGRFAKAKKGEFPSFKRLYGYTFNKETDIPEYNEEERAILLEMKNMLLIQGMSSNEIAKELSRRGLPAPDGDIWYQATVSRILQNEDYTGDFYYGKSKVVQINGEKKQVPTPEEEWVLIKIPPMWDHETRDQIIKHLKANRKGGRRSPRDYLLKNKAKCGRCGSSCGSGSVSRSKSGVYKYYACRRKNAKGYHNGKKVLQCHGKNWRVDIVDDVFWKWFKKLLKNPTEFLERLLAETSNEKKIEELKNKANKLEKQIEGIDSEIANYVILFGKGKINEDMFDKLTQPLEQNKKYVENELSVVKSQLKTNKEVEDKNQKIMQYVESFSEMVDKDLSMDEKRKLIDFFIEKVTLFDDDHMEIVWKGNDDQKTQGVLFNEEMGAILDNSHRNLNHIQ

SEQ ID NO: 54927 - DNA, 50 bp, Bacillus sonorensis
  source 1..50: mol_type = genomic DNA
cgcacagaaacttaaaccatattcaagaacatggttttagtttctgtgcc

SEQ ID NO: 54928 - DNA, 40 bp, Bacillus sonorensis
  source 1..40: mol_type = genomic DNA
agcgatcgacacattggtaaaacatatggaagataaacgc

SEQ ID NO: 54929 - DNA, 40 bp, Bacillus sonorensis; identical to SEQ ID NO: 54928
  source 1..40: mol_type = genomic DNA

SEQ ID NO: 54930 - DNA, 50 bp, Bacillus sonorensis
  source 1..50: mol_type = genomic DNA
caaacacaatgtcaaacatttttcaaagacatgattctcttttttgtgcc

SEQ ID NO: 54931 - protein, 541 aa, Blautia massiliensis
MNVYRTREILKTCSIFDLKLKVAFYARVSTESEDQQVSIHHQDEYYRNFIAQNKNWVFVGAYIDNGISGIRTEKRDEFQRMMADAKTGKIDMIVTKEITRFARNTLDSIKYTRELLMYGVCVWFQNDNINTIDEDSELRLTIMSGIAQDESRKLSNRIKFGHAQSIKNGVVLGSRIYGYIKKDGKLTVDPKTAPMIKEIFEKYSTGEWSTSTIEKYLYKKGYRNYKGGKLSRDNIKKIIKNPKYKGYYCGGKVKVVDMFTKKQEFLPEDEWTMYKDDGNHVPQIVDESVWNKANVIMQTRSDAIKSHRTSFKQNNLFTGYIFCGDDGAPYWMKQRTARGREDVRWVCSYRIKNGAQSCNSFGIHEKELKIMLADLINKSGDIQAAIERYISLVEKNIDFSNDGAEINRLKNMVLQLEKKKDKLLDLNLDGIITNSEYLEKSEKFKNEIQNINNKLSELESKEEANKDSHLKLKEIGKILNDLQGIGPEDITKTVLGEFLDKIVINPKRPQECEILFFLKTGDVKKKSIIERGKQSCSEYFF

SEQ ID NO: 54932 - DNA, 50 bp, Blautia massiliensis
  source 1..50: mol_type = genomic DNA
cagagttgttctgaatacttttttttaaataagttctcagaacgacacgc

SEQ ID NO: 54933 - DNA, 40 bp, Blautia massiliensis
  source 1..40: mol_type = genomic DNA
ctgcgcctcgatcatctttttgaccatatatccgcctacg

SEQ ID NO: 54934 - DNA, 40 bp, Blautia massiliensis
  source 1..40: mol_type = genomic DNA
ctgcgcctcgatcatctttaggaccatatatccgcctacg

SEQ ID NO: 54935 - DNA, 50 bp, Blautia massiliensis
  source 1..50: mol_type = genomic DNA
caagatttttataaatattattttagaaataagttttttctactacctgc

SEQ ID NO: 54936 - protein, 540 aa, Blautia sp YL58
MTMKKSKEEYFMYLRKSRKDRDAEMRGEGETLARHEKLLTELGNKMGLNITRVYKEVVSGETIDSRPEIQRLLHDIEDGHCAGVLVVEVERLARGDTKDQGVIAEAFKYSDTKIITPIKTYDPNDEYDEEYFEFGLFMSRREFKTINRRIQRGRIASVQEGKFISSVAPYGYRKVKVHNGKGYTLEIDQERAEVVKMMYDWYTKGVPDENGTYRPLGATAICRRLDAMHIKPMLNSTWSKASVSDILKNPVYIGKIRWSYRKEIRKMSNGVLVKTRPDNHNDYILVDGLHPPIISEEIFSAAQHMSIRNRKTPLKVNSRLQNPLSGLVYCKKCGSRMTRLGPTTHTPYATLKCSNRYCDNISSPLYLIEKKLLTLLNDWLTNYNLNWEGCSSSLPSDSELKVKKQSINDINESLATLEEQLDNAYAFLEKGIYTPEIFIQRKEKLTEEMAALHTDLQSMIERYENILTIQRSQEEFLPKVRGVIDAYWTVSDMQTRNDMLKELLEKIEYKKGIANTRGKRENANFTLDIYPRLPRKSPIS

SEQ ID NO: 54937 - DNA, 50 bp, Blautia sp YL58
  source 1..50: mol_type = genomic DNA
cacctatatcatgaatggggatacacatataaccattcaggatgtaggta

SEQ ID NO: 54938 - DNA, 40 bp, Blautia sp YL58
  source 1..40: mol_type = genomic DNA
gacgtatgaatggggttacacctacgggccgcccatggcc

SEQ ID NO: 54939 - DNA, 40 bp, Blautia sp YL58
  source 1..40: mol_type = genomic DNA
gacgtatgaatggggttacatctacgggccgcccatggcc

SEQ ID NO: 54940 - DNA, 50 bp, Blautia sp YL58
  source 1..50: mol_type = genomic DNA
cctatatatcatatatagtgatatatatatgaacatattacatgtacata

SEQ ID NO: 54941 - protein, 455 aa, Enterococcus faecalis
MANEIKQVALYIRVSTDQQAKHGDSLDEQQHTLNEYVRQQGNMRVFKTYIDDGISGQKLYRDEFQKLLDDVKKGRIDTILFTKLDRWFRNLRHYLNIQEILDKNNVTWLAVTQPFFNTETAMGRSFVNQSMGFAELEAQMTSERIRAVFDNKIRKGEVVSGKVPLGYEIKDKHLVPNEKAEIVKEIFQYYLETGSMRATVRHLENHFSMTRDYQSVRQMLTNRKYIGELRDNKNFCEPIIDRDVFERVQLQLSKNIRMNKKRDYMFTGLLVCSECGCNYSATAVISRYVRKDGTTNPNERHLYRCTKNRNNVKKCSNKKGIYETTLENFLLENIEKQAKDLSVKMQREPEVKKTKNTNDKIKKKIDRLKKAYLNEVITLEEYKKDRKELEALLIPERDNKIAKIDLNSLHNYSTAEFRDGYKQLTISEKSSLWRQVIKNIVVYPDGNLKINFLGY

SEQ ID NO: 54942 - DNA, 50 bp, Enterococcus faecalis
  source 1..50: mol_type = genomic DNA
atttgcactaataaatactaaccagatggatgataaattttagtgcaaac

SEQ ID NO: 54943 - DNA, 40 bp, Enterococcus faecalis
  source 1..40: mol_type = genomic DNA
tgacggtgtcggattgccagatggatgattatgagctaac

SEQ ID NO: 54944 - DNA, 40 bp, Enterococcus faecalis
  source 1..40: mol_type = genomic DNA
tgacggtgtcggattgccatttggatgattatgagctaac

SEQ ID NO: 54945 - DNA, 50 bp, Enterococcus faecalis
  source 1..50: mol_type = genomic DNA
atattcacaataaaatattaagcattttatttataataaaaagtgaaaac

SEQ ID NO: 54946 - protein, 455 aa, Enterococcus faecalis
MANEIKQVALYIRVSTDQQAKHGDSLDEQQHTLNEYVRQQGNMRVFKTYIDDGISGQKLYRDEFQKLLDDVKKGRIDTILFTKLDRWFRNLRHYLNIQEILDKNNVTWLAVTQPFFNTETAMGRSFVNQSMGFAELEAQMTSERIRAVFDNKIRKGEVVSGKVPLGYDIKDKHLVPNEKAKIVKEIFQYYLETGSMRATVRHLENHFSMTRDYQSVRQMLTNRKYIGELRDNKNFCKPIIDRDVFERVQLQLSKNIRMNKKRDYMFTGLLVCSECGCNYSATAVISRYVRKDGTTNPNERHLYRCTKNRNNAKKCSNKKGIYETTLENFLLENIEKQAEELSVKMQQEPEVKKTKNTNDKIKKKIDRLKKAYLNEVITLEEYKKDREELEALLIPERDNKIAKIDLNSLHNYSTAEFRDGYKQLTISEKSSLWRQVIKNIVVYPDGNLKINFLGY

SEQ ID NO: 54947 - DNA, 50 bp, Enterococcus faecalis; identical to SEQ ID NO: 54942
  source 1..50: mol_type = genomic DNA

SEQ ID NO: 54948 - DNA, 40 bp, Enterococcus faecalis; identical to SEQ ID NO: 33858
  source 1..40: mol_type = genomic DNA

SEQ ID NO: 54949 - DNA, 40 bp, Enterococcus faecalis
  source 1..40: mol_type = genomic DNA
agacggtgtcggattgccatttggatgattatgagctaat

SEQ ID NO: 54950 - DNA, 50 bp, Enterococcus faecalis; identical to SEQ ID NO: 54945
  source 1..50: mol_type = genomic DNA

SEQ ID NO: 54951 - protein, 562 aa, Propionibacterium freudenreichii
MTTLVDDRLKVDSLVSPSIPTGGATAVIYLRVSTKEQAEKGGGDEGYSIPAQRDANMSKAEQLGATVVEEFVDAGESARKADRPALMRMIKYVAEHRVNYCIVHKVDRLARNRADDVTIHLALRDAGVMLVSASENIDETPSGMLLHGIMSSIAEFYSRNLATETIKGLTQKASQGGTIGAAPVGYENVGIRNEHGREERTVRIDAERGELVSWAFQVFASGLWTVAELQRELERRGLTTRPTPRRPARPLGKSSLRRMLRNTYYKGDITYKEVTYRGSHEPLVPREVWYQVQAVLDSHVSAADKTQVHDHYLKGTVYCGQCGSRLIICHARNRQGKVYPYFVCSGRHSGSTGCTRQAMLIEDVEHLIEDYYQSIQVSAQVREDVAGMLHAEFDRLMASETKELEQLTKQRDKLEAERFKLLQAHYADAVPLDMLKREQSRIGAAMETIDNHIAAHDNEYLEARENLEDSLGLLANISAIYQRCDDLNRRLCNQAFFTRVYIDEEGERRVHVDFQRPFDALCDPEVQGNALNWAAEAKKKGDVQTGPRMVPLVEGLNIAQVG

SEQ ID NO: 54952 - DNA, 50 bp, Propionibacterium freudenreichii
  source 1..50: mol_type = genomic DNA
aggtttgaacatcgcccaagtggggtcctgcctggccctattcttaaacc

SEQ ID NO: 54953 - DNA, 40 bp, Propionibacterium freudenreichii; identical to SEQ ID NO: 28993
  source 1..40: mol_type = genomic DNA

SEQ ID NO: 54954 - DNA, 40 bp, Propionibacterium freudenreichii
  source 1..40: mol_type = genomic DNA
tcctcgtgtcataggtggggaggatgacgagacttgaact

SEQ ID NO: 54955 - DNA, 50 bp, Propionibacterium freudenreichii
  source 1..50: mol_type = genomic DNA
aggtaaggggcagcccgaagtggggacctggctggctgccagcctcagcc

SEQ ID NO: 54956 - protein, 466 aa, Salinispora arenicola
MMTRAAIYCRISRDREGAGLGVERQHQDCIALVEARNWTIAETYTDNDLSAYRGKPRPGYRKLLNDITMGLIDTVVAWHTDRLHRSPVELEEYIAACDQHGVPTHTVKAGPLDLATPSGRLVARQLGAVARYEVEHSIERQQRAKLQAATDGRWKGGRRPFGYEADGVTVRPTEAQVVQDATTAILAGGSLRGVAANLNLHGVVTSTGRAWSPTELRKMLLRPRNAGLMEHRGEVVGYATWPPLVDEDRWRAVASVLTDPARRTQTSGARRWLLSGIAWCGVCGAPLRCTLQNSNRAGVPSYTCKASKHVARNAVELEAYVSAVVVERLSRPDAIDLLSASGGTEVSALHTDAAALRERLDELATAYAEGAIDAQQLRQGSERLRSRLAELNVQRADAARGSVLTGIVDADDVAEAWQALDLDRRRAVITALMRITVHRTRKGRPKGWRPGRSYFDPSTIEIAPRA

SEQ ID NO: 54957 - DNA, 50 bp, Salinispora arenicola
  source 1..50: mol_type = genomic DNA
acctgtcattgccttacctttgccctgtcgatagtcaagctatgccatac

SEQ ID NO: 54958 - DNA, 40 bp, Salinispora arenicola
  source 1..40: mol_type = genomic DNA
gcagggctctggcttcgatctcgcgatcgcggtcgcggta

SEQ ID NO: 54959 - DNA, 40 bp, Salinispora arenicola
  source 1..40: mol_type = genomic DNA
gcagggctctggcttcgattgcgcgatcgcggtcgcggta

SEQ ID NO: 54960 - DNA, 50 bp, Salinispora arenicola
  source 1..50: mol_type = genomic DNA
atcagtcataatgataccttttcatgttcatttgtttagatatgccacac

SEQ ID NO: 54961 - protein, 466 aa, Salinispora arenicola
MMTRAAIYCRISRDREGAGLGVERQHQDCIALVEARNWTIAETYTDNDLSAYRGKPRPGYRKLLNDITTGLIDTVVAWHTDRLHRSPVELEEYIAACDQHGVPTHTVKAGPLDLATPSGRLVARQLGAVARYEVEHSIERQQRAKLQAATDGRWKGGRRPFGYEADGVTVRPTEAQVVQEATTAILAGGSLRGIATNLNLHGVVTSTGRAWSPTELRKMLLRPRNAGLMEHRGEIVGYATWPPLVDEDRWRAVASVLTDPARRTQTSGARRWLLSGIAWCGVCGAPLRCTLQNSNRAGVPSYTCKASKHVARNAVELEAYVSAVVVERLSRPDAIDLLSASGGTEVSALHADAAALRERLDELATAYAEGAIDAQQLRQGSERLRSRLAELNVQRADAARGSVLTGIVDADDVAEAWQALDLDRRRAVITALMRITVHKTRKGRPKGWRPGRSYFDPSTIEIAPRA

SEQ ID NO: 54962 - DNA, 50 bp, Salinispora arenicola; identical to SEQ ID NO: 54957
  source 1..50: mol_type = genomic DNA

SEQ ID NO: 54963 - DNA, 40 bp, Salinispora arenicola; identical to SEQ ID NO: 54958
  source 1..40: mol_type = genomic DNA

SEQ ID NO: 54964 - DNA, 40 bp, Salinispora arenicola; identical to SEQ ID NO: 54959
  source 1..40: mol_type = genomic DNA

SEQ ID NO: 54965 - DNA, 50 bp, Salinispora arenicola; identical to SEQ ID NO: 54960
  source 1..50: mol_type = genomic DNA

SEQ ID NO: 54966 - protein, 611 aa, Enterobacter hormaechei
MRTVKAYIYSRVSSLQQVDAFGLDRQISTVLDFLENAKLPAELGYQLDPSNYEVLESDKGLSGYKGHNFTKGSLGQFKRRVEAGEITEGCLLIESVDRFSRKQGYDAIDEFTFLIKRNIDIVEVETGQIYSYKLDHKLSALSTSIERAHQESKRKARISKKSWNRRKEESLATGVALNNNTPDWLSLSQDKKTYEIDAQKVQTITSIFEWYRDGYGVTEIVNRLNSEGNRYNGRGWNTVTVYNKLRDRRLNGYLIGKYKTIPKKDSESTTDTEKRILENIKIKKEANDNAQRIYPVVIDDELFTKIQSMMDRNVSSKKQRSTTTKQRNLFNGLTKCHECGSPMIVQSMSNGGQYLRCYRQRTKDEKCNSKMLRYFESEKVLLGHIKNINLDEIYSDRKHAQSLDVLKRQLSDVNEKIVLLNDKVKSASDEDELFAIMEFKRKRILEKDELNQKISSLENESEIVRLNYNYDIDKLTDQDNTALRRKANEHIAKVISAIKCRRIDSSYIGAYYLYDITYHRDILKHILITDNSGKLISEITISEKDNERTYLVREEDQTVFKVESNGNAWVMYASRTKTIDDLLYYINTMMVGREPDDFAYQLNEDHIEWID

SEQ ID NO: 54967 - DNA, 50 bp, Enterobacter hormaechei
  source 1..50: mol_type = genomic DNA
tgtatgtattttactttacgctgcttccagcgtactatagaatacatatt

SEQ ID NO: 54968 - DNA, 40 bp, Enterobacter hormaechei
  source 1..40: mol_type = genomic DNA
gagcggcatcgatagcttcttccagcgtggcgtacattgt

SEQ ID NO: 54969 - DNA, 40 bp, Enterobacter hormaechei
  source 1..40: mol_type = genomic DNA
gagcggcatcgatagcttcgcccagcgtggcgtacattgt

SEQ ID NO: 54970 - DNA, 50 bp, Enterobacter hormaechei
  source 1..50: mol_type = genomic DNA
tgaattcaccaaagtttaccctgagcccagcaaagtgtttaatacataat

SEQ ID NO: 54971 - protein, 611 aa, Enterobacter kobei
MRTVKAYIYSRVSSLQQVDAFGLDRQISTVLDFLENAKLPAELGYQLDPSNHEVLDSDKGLSGYAGHNFTKGSLGRFKERVRSGEITEGCLLIESVDRFSRKQGYDAIDEFTFLIKRNIDIVEVETGQIYSYKLDHKLSALSTSIERAHQESKRKARISMKSWKHRKEASLANGVALNNNTPDWLSLSTDKLSYEIDYHKVETIKRIFQMYRDGYGVTHIVKVLNDEGNRYNGKGWNTVTVYNKLRDRRLNGFLVGKYKTIPKKINESTNEAEKRILENLKIKKEANDNAKRIYPVVVDDDLFLKVQSLMDRNVSNKKQRSTTTKQRNLFNGLTKCYECGSPMIVQSMSNGGQYLRCYRQRTKDEKCNSKMLRYSVTEKVLLEHIKGLELDDIYGDKTQNNSVDTLKNLLQQTNNKLLELNEKIKSANDEEELFAIMEFKRKRNIEKEDLIAKINSIENASEVVRLSYNYDIGEISNQDNTVLRRKTNENISKVVASIKCLRTDSSYIGAYYSYDITYHKDILKHLLLTDNNGALLSEISIYQKNNERTYIVKEDKEMVFRVESNGDVWVLYASRKKSINDLLHYINVMMVGREPDTFSFVLNEDMIEWID

SEQ ID NO: 54972 - DNA, 50 bp, Enterobacter kobei; identical to SEQ ID NO: 54967
  source 1..50: mol_type = genomic DNA

SEQ ID NO: 54973 - DNA, 40 bp, Enterobacter kobei; identical to SEQ ID NO: 32693
  source 1..40: mol_type = genomic DNA

SEQ ID NO: 54974 - DNA, 40 bp, Enterobacter kobei
  source 1..40: mol_type = genomic DNA
gagcggcatcaatagcttcgcccagcgtggcgtacatggt

SEQ ID NO: 54975 - DNA, 50 bp, Enterobacter kobei; identical to SEQ ID NO: 54970
  source 1..50: mol_type = genomic DNA

SEQ ID NO: 54976 - protein, 588 aa, Klebsiella variicola
MKLYSYQRWSSAVQADGTSKARQSHAAEKYAVANNLELVEIVDAGISGFKSANLKSGALAQFLEAVDAGLIIKNSYLYVESLDRITRDEIDIALELFMGILRRGITIVTGMDNKVYTHAGIKGNPIDLISSLLLFMRAHEESKTKQNRTNGNALALIRRFQEGKPTTIKSVGSHPWWIDCSTDKFESVRRHPTLWQPAQDAMNMFMDGMSVFKVVQYLDEKYPHAYKGKAWKTANIRKLRFNKAVYGLREINVDDKDYELQNYFPALITEGQFGRLKEIRENTKYIGKVGKGKTVIDKEGNSKVIAERNNINLLAGMKLFRCGHCGGTMMAMRNGDTIRYLCEKGRGHLNDCKTWSLPGILVEHTLMIVTTIAYINIQRKGGVEKEDYTAQISSTKMLIEDISKKISNGAHLVLAGLGDLDEVIKELQELKDSRSNLTLELEVLQRKQLLLQDNTFESLMMDFFTYAQYGVLQDPVHEYRNKLRDIVYSSIDEAKAWKIDKKLMLSFKIKGDDEYYTFSAGDERYNYNFYYGYPVQVGDELTYELTEDVKSAYRKVHDATNELLNTAKEMLRVIHYPPLDGRLFWPKK

SEQ ID NO: 54977 - DNA, 50 bp, Klebsiella variicola
  source 1..50: mol_type = genomic DNA
tcatgtgtagaaaaccattttgggaatccaagagtcatttctacacatta

SEQ ID NO: 54978 - DNA, 40 bp, Klebsiella variicola; identical to SEQ ID NO: 5423
  source 1..40: mol_type = genomic DNA

SEQ ID NO: 54979 - DNA, 40 bp, Klebsiella variicola
  source 1..40: mol_type = genomic DNA
tatgattagccatccgggtagtccgaaattcccggtggat

SEQ ID NO: 54980 - DNA, 50 bp, Klebsiella variicola
  source 1..50: mol_type = genomic DNA
tcacacatagagtgccattgtgggagtccaggagtccagtagagaaattc

SEQ ID NO: 54981 - protein, 473 aa, Ruminococcus bicirculans
MSNAVIYARYSSDKQSEESIEAQLRACRQYAATKGYNIVAVYADEAISGKGSMTASRAQYQKMLRDCNKGTFDTILIHKYDRVARSLGEHVNLDARLQKMGITLIAVGQDFGFGPESKIMRALMWSMSEYYIDNLANETKKGEREIALKGLHNGGYPPFGYDIVDQKYVINPYEAEYVRKIFAAVKNHEGTKDIIAEMAAVGIVGKRGKPLKYSAVYEILRNEKYTGTYIYCVDEEKDRSKRRSKPNAIRIENALPMIIDKATFNEVQKIMDSRKQSGPKTSYLCSGLVYCSCGAKMHAHISTKKGHVYHYYRCSKKCGAPMISMDIVDDAAKTYLRTLLNEENQKAIANAMRKYKCGEPERAADFKKIVASKISEKQKQYDTLMTNMSSGVLPADVIEDIGAKMNQLRSEIEALKKTEMPKDYTTDQISLWLKALHDSPDDKAIRLLISRIDIKNTAEINIQSTLTSVVGTI

SEQ ID NO: 54982 - DNA, 50 bp, Ruminococcus bicirculans
  source 1..50: mol_type = genomic DNA
cattaacttcggtcgtgggaactattgtcttgctgataccaaatggatgc

SEQ ID NO: 54983 - DNA, 40 bp, Ruminococcus bicirculans
  source 1..40: mol_type = genomic DNA
tcaaacgatagtcctgaaactggttgcgggagctggattt

SEQ ID NO: 54984 - DNA, 40 bp, Ruminococcus bicirculans
  source 1..40: mol_type = genomic DNA
tcaaacgatagtcctgaaaagggttgcgggagctggattt

SEQ ID NO: 54985 - DNA, 50 bp, Ruminococcus bicirculans
  source 1..50: mol_type = genomic DNA
ctttgcatttttttgtagaaacaaaggtcctgctgatacggaagggaagc

SEQ ID NO: 54986 - protein, 561 aa, Flavonifractor plautii
MKKKQPNEQRITVLYARLSRDDEKEGISGSIQNQRAILEKFAADNHLPNPRFMFDDGYSGVTFARPAFMEIMELAEQGLVANLVVKDHSRLGRNRLVVGQLLEEDFVRLNVRYIAIMDNIDTANGVSDIVPMQDLFNEWHAKNTSDKVRRVMQSRGNAGIPLTTNPPYGYTKAPEDKNRWIVDEPAAEVVRRIFRMSVSGLGPTQIAKKLRSEGVMTPSEYLHSTGINCANKPPAYPCNWSSGTVAGILDRQEYVGDTVNFRTYRQSFKQKKQLDRPQEEWKVFPNTHPAIIDRETFALVQSLRQHRRRPTRTGAVSMFSGLLYCADCGGKLYYSAMGNYKREQANFFCSSYRKAPGVCTAHFIRERTVEQLVLEGLQRLLWYIQVYEKRFAQEQMERFGLQEKKELTAKRRELDRAKQRVAEIDQLIQKSYEDMTKGLLSEERFATLTVSLENEQRQLKADIPALENSLNATADKADDLQKFIQRARQVTRLTELTPEIVHEFIDKIVVSKPEKLDGKRHQRVDIYYSTIGLWTAPDPETLEQEYMAYYNSMQKRRKKTA

SEQ ID NO: 54987 - DNA, 50 bp, Flavonifractor plautii
  source 1..50: mol_type = genomic DNA
caacttccttacgggagctgccccgagggagaggtaacgtaaggaagtta

SEQ ID NO: 54988 - DNA, 40 bp, Flavonifractor plautii
  source 1..40: mol_type = genomic DNA
cgccgcaaagcggccgcccgacgggcggccgcttttttgg

SEQ ID NO: 54989 - DNA, 40 bp, Flavonifractor plautii
  source 1..40: mol_type = genomic DNA
cgccgcaaagcggccgccccacgggcggccgcttttttgg

SEQ ID NO: 54990 - DNA, 50 bp, Flavonifractor plautii
  source 1..50: mol_type = genomic DNA
caacttgatttgtggagctggccccacagagatataaactaacctagtta

SEQ ID NO: 54991 - protein, 585 aa, Holdemania filiformis
MKDVEIIKARNVLSSRTRANLAKRLRVAAYCRVSTDSEDQLNSYKSQVQHYTDLIKSKPEWDLAGIYADEAITGTQVTKREDFQRLINDCMNGDVDMIITKSISRFARNTLDTLKYVRMLKEKGIAVFFEEENINTLTMDGELLLVILSSVAQQEVENISANVKKGLKMKMQRGELVGFQGCLGYDYHPEDKSITINEEEAEIVRYIFRRYIEGAGGSVISQELEHLGYKTKRGSTRWAETTVIGIIKNEKYKGDILMGKTFTLDPISKRRLDNFGEEDQFYIRDHHEAIISEEMFEKAQEILKRRAKPRRLGTDGKREKFSRKYAFSCMLECGFCGSTLTRRSWHSGSQYNKVIWQCVTATKKGKKFCPDSKGIAEETIEQAFIESYRLLCQNNKDVLDEFIARTEETLSDGNAGKQLAKVEKDIAALDAKRAKLVDMRLEEIIDKDTYEQKYFDLSSQIEQLQKQREDLQESAETESTMKKRIAEFRKTLEENEVLDTFDRYVFESIVEKVIVGGYDEDGNKDPSMLTFIYKTGFKNSLDGTNFKPPRKNSKTAKQNAGLCSHTTDEAKSMYSYHSNNTRGDN

SEQ ID NO: 54992 - DNA, 50 bp, Holdemania filiformis
  source 1..50: mol_type = genomic DNA
ctatcatagtaacaacacacgtggagacaatagtgttgctacaaagagga

SEQ ID NO: 54993 - DNA, 40 bp, Holdemania filiformis
  source 1..40: mol_type = genomic DNA
ccgatgacgtcgcatgtggagacaatttgtttgttggtca

SEQ ID NO: 54994 - DNA, 40 bp, Holdemania filiformis; identical to SEQ ID NO: 54993
  source 1..40: mol_type = genomic DNA

SEQ ID NO: 54995 - DNA, 50 bp, Holdemania filiformis
  source 1..50: mol_type = genomic DNA
ctaatacagatagatcacacgggaagacaatactttaagggcaaaaagta

SEQ ID NO: 54996 - protein, 507 aa, Escherichia coli
MKRVISYIRFSSEKQAKGDSLRRQSKMVNDWLKAHPEYYLDQDLSFRDLGVSGFTGKHLKGGLGDFLTAIEKGLVKAGDTLLIESLDRLSRQDIDIASELLRRILRAGVDVVTLSDGEHYTRESLKDPLSLIKSILIMQRSHEESLRKSERIQAAWDAKKEAAKAGIKISRRCPAWLKLNDDRKSFSVIPEKVETVKRCFQLRLEGKSIWEIVRTLNDEGHQSMSQYKPGKFGQTSVQDLLKNRSVIGYFTPKGCEEIAGYYPAIIDETTFYKVQQLSHSRYGRKPASAKPLSVNLFKGVIRCSECGHALIITGFSDTRNGIYRCPLRNENRCSAKGLSRKQTDGTLLTLLSRLDRFDSDMTNTLDTLKLHREHISSNIEKLVQLSLEIEDLNAITSKLKQLKGELSQVDADIEKETQRLKSIDVGCLSDCDLTTKAGRIEAQLIIKSAVKEVVLNTAKRRCKVTFHNGKSITLPITENPSEDVTEAIQSLSEVTEKGLIDVDVVEI

SEQ ID NO: 54997 - DNA, 50 bp, Escherichia coli
  source 1..50: mol_type = genomic DNA
tggtgtatttagaccttgatgatttttattagacacgtttaaatacacta

SEQ ID NO: 54998 - DNA, 40 bp, Escherichia coli; identical to SEQ ID NO: 5188
  source 1..40: mol_type = genomic DNA

SEQ ID NO: 54999 - DNA, 40 bp, Escherichia coli; identical to SEQ ID NO: 5188
  source 1..40: mol_type = genomic DNA

SEQ ID NO: 55000 - DNA, 50 bp, Escherichia coli
  source 1..50: mol_type = genomic DNA
tgctgtatagttaactttattttttttataagtcactggagtgtactcta

SEQ ID NO: 55001 - protein, 523 aa, Corynebacterium striatum
MSRTVTAIPATKKLRSAAASSGVPAHRRVAAYARVSTEMEEQTSSYEAQIDYYTTYIHSRNDWQFAGMYCDEGISGTSMKRREGFQTMIDDALAGKIDLILTKSVSRFARNTVDSLTTVRKLKDAGVEVYFQKENIYTFDAKGELLITIMSSLAQEESRSISENVTWGHRKRFADGKIMVPYKSLLGYKKGEGGSLVIDETQAPTVRLIYQLFLDGMAISEIKTELAQRKILTPRGKEVWSTSTVRSILSNEKYKGDALLQKTFTTDFLTKKMKVNEGEVPQYYVSGNHEPIIAPRIWDQVQYELATRHANISSAKVGLFSTRLKCSQCGAWYGRKTWASNTKYKYTVWQCNHKYTDEHPCSSATVKDEQIKDSFVQALNQLIARHRYESQLPQVLGDMFDTSRLEEQAAACQAKLVELTEQIETLIAENQRCALDQDAYQNKYTKLDTTYRKTLARKTSLEADIVANTAKHAAITTTLNDLAGEPVSEFRPAQWSALIDHAIVGEDTIRFVFRVGEVVRVQL

SEQ ID NO: 55002 - DNA, 50 bp, Corynebacterium striatum
  source 1..50: mol_type = genomic DNA
cttatcattttcgacgtcatagtggatacttagacgtcgaaaatgataaa

SEQ ID NO: 55003 - DNA, 40 bp, Corynebacterium striatum
  source 1..40: mol_type = genomic DNA
aacctacggcgggaaaatggagccgacgacgggaatcgaa

SEQ ID NO: 55004 - DNA, 40 bp, Corynebacterium striatum
  source 1..40: mol_type = genomic DNA
aacctacggcgggaaaatgacgccgacgacgggaatcgaa

SEQ ID NO: 55005 - DNA, 50 bp, Corynebacterium striatum
  source 1..50: mol_type = genomic DNA
ataactattgcaatagttatggtgacaacttaaacaacagcaatgataaa

SEQ ID NO: 55006 - protein, 496 aa, Cutibacterium granulosum; identical to SEQ ID NO: 43521

SEQ ID NO: 55007 - DNA, 50 bp, Cutibacterium granulosum
  source 1..50: mol_type = genomic DNA
gacaccagactgacaaaatcgtcaccccacgaccgcctcgcaccgcagcg

SEQ ID NO: 55008 - DNA, 40 bp, Cutibacterium granulosum
  source 1..40: mol_type = genomic DNA
ccccgtgacaaaatcgtcacctcccaacgcagccgagcac

SEQ ID NO: 55009 - DNA, 40 bp, Cutibacterium granulosum
  source 1..40: mol_type = genomic DNA
ccccgtgacaaaatcgtcaagtcccaacgcagccgagcac

SEQ ID NO: 55010 - DNA, 50 bp, Cutibacterium granulosum
  source 1..50: mol_type = genomic DNA
gaccccagacctgagaaatccccaagccaggactgtgacacactgcaaca

SEQ ID NO: 55011 - protein, 507 aa, Escherichia coli; identical to SEQ ID NO: 5406

SEQ ID NO: 55012 - DNA, 50 bp, Escherichia coli
  source 1..50: mol_type = genomic DNA
gtgtatttagaccttgacgcaccttttcatcagacacgtttaaatacacc

SEQ ID NO: 55013 - DNA, 40 bp, Escherichia coli; identical to SEQ ID NO: 5408
  source 1..40: mol_type = genomic DNA

SEQ ID NO: 55014 - DNA, 40 bp, Escherichia coli
  source 1..40: mol_type = genomic DNA
gcggcgttaatcgggtgattatagacagccgcccggttca

SEQ ID NO: 55015 - DNA, 50 bp, Escherichia coli
  source 1..50: mol_type = genomic DNA
ctctaattgttctctgacttacagtatcatcagcaatgtagaaatacacc

SEQ ID NO: 55016 - protein, 507 aa, Sphingobium yanoikuyae
MSRASEKQAVIYCRVSSTKQTTRGDGLASQETRCREYAKYRGHSVVKVFKDDMSGSVVGRPGMKDMLAYLRAHRKSQLVVIIDDISRLARGLEAHLRLRADIGSAGGILESPSIEFKEDSDSQLVEHLLASVSQHQRQKNGEQTLHRMHSRVLNGYWVFQAPWGYTYGRAPNGGKMLVRSEPLATIIQEAFHAFASGRLASIGEVKRFFESHPEFPRTRHNVVRHERVRQILTQPIFAGYIEVPRWKVSRRKGQHEALVDLETFERVQERLLGKPRAPARVDLNEDFPLRGFIACDDCGHALTANWSKGEFRSYPYYLCRQPGCVSKGKSIARDKVENAFVELLRSLTPARELFDLASAVFRDVWDGQRARSGERKTVLKRELADIEKKVTALVDRIVESESQTVAAALERRLEELENRKLILSENIAKCGAPIRDYDQTFRTAMVFLASPWNLWKSDRLEDKRATLKLTFSGNLRYSRQEGFRTPQTSLPFKVLGNLSTLGREMAH

SEQ ID NO: 55017 - DNA, 50 bp, Sphingobium yanoikuyae
  source 1..50: mol_type = genomic DNA
aacttatcgacgttgggaagagaaatggtgcaccctgaaggggatgagtc

SEQ ID NO: 55018 - DNA, 40 bp, Sphingobium yanoikuyae
  source 1..40: mol_type = genomic DNA
gttttattcctgtgaagaaatggcgcacccggaacgattc

SEQ ID NO: 55019 - DNA, 40 bp, Sphingobium yanoikuyae
  source 1..40: mol_type = genomic DNA
gttttattcctgtgaagaatgggcgcacccggaacgattc

SEQ ID NO: 55020 - DNA, 50 bp, Sphingobium yanoikuyae
  source 1..50: mol_type = genomic DNA
atctcactgggactggttagacaatgggtgcagcctacaaagggtgagcc

SEQ ID NO: 55021 - protein, 563 aa, Pseudomonas putida
MSKVFSYIRFSSAKQSAGDSYARQVKAAKAFCDENGLEMADPREYLFFDKGRSAFKGKHLDDTGELARFLSYVEDSTIPPGSYLVVESLDRLSREKVRDALPRFLDLLAKGINVYTSVDKRLYTKDYNELDLIISIISMSRAHEESAVKGGRVSSAWREKQKAARTTGKPLGKLRPLWLDVTPDGYVLNPDKAAVVRRIFDLSTKGHGSRIIAATLNQEGIPAFSAGRKNFSGLWGFSTVRHILDSRTTLGEYQPHIFTDGKRTPDGDPIKDYFPSVVTEDEFYLAQAARTSRKTHSVTKATTNFNVLAGILNCYKCGSAMHLQGQRGRKYYKCSKTTRGLCDAGIISAPRTEQVFKEILTKVDSLSLVQDSSGSLQKSLQIVEGRIASLKARQDDAEASHAEFPSRITAKLLHELEADIGALESERTAIAEQLASDKVMSKHDFFEKLDLVSFEGRVAANNLIKRLGLFIFASKNGRTDETYWVSKNNAIPLPFSAETPNLLFYLMHRGKEIQFEAMYDEYVDLQLTQGDLNEVEAAFAKTESWDSLPPHMLAMWKARHIIK

SEQ ID NO: 55022 - DNA, 50 bp, Pseudomonas putida; identical to SEQ ID NO: 19237
  source 1..50: mol_type = genomic DNA

SEQ ID NO: 55023 - DNA, 40 bp, Pseudomonas putida; identical to SEQ ID NO: 28678
  source 1..40: mol_type = genomic DNA

SEQ ID NO: 55024 - DNA, 40 bp, Pseudomonas putida
  source 1..40: mol_type = genomic DNA
cgccagcgggcacaaattcctgaaatgctgcgccagctac

SEQ ID NO: 55025 - DNA, 50 bp, Pseudomonas putida
  source 1..50: mol_type = genomic DNA
agtcttgtggcacagcagaacatcctacaattcttccttcattcccaact

SEQ ID NO: 55026 - protein, 487 aa, Anaerostipes hadrus
MKKIAAAYIRVSTHMQEELSPDAQLRCIRVWGDAHGYYVPDEYVFIDNGISGRKAKKRHDFLRMIGLAKTKPASPFEAILLWKFNRFARNQEESIVYKSMLRKKCNVDVISTTQQTTKDIYGDLIERIIEWTDEFYSIQLGEDVFRGMTENALRGNFQASPAFGYKVEKGLGLVIVEDQANIVRMIFNLYANTRMGFYEIARHLNRLGYKTKKGGAFEARAIRYIIQNPIYKGYLRWNYANGTTRVVNDESEWIIVKSPLVPIIVSEELWDRANERLKNEYRPKNGKPVTKHRHWLSGLVKCSSCGASLSTSVQYRHDRTYINFQCYKYLKGKCMVSHGISEKKLVPLVLNVLKEDMSKSYIECERIEKVVENQQDILDVQLKRLATRETRIKEAYLNGIDSLAEYKANKEEIQKEREFLLQQSQDHNKTENESNELPNKIRGVYDILVSDQCSKDEKQAAIRSIVKKIVFDKENKTLDFHYYIKED

SEQ ID NO: 55027 - DNA, 50 bp, Anaerostipes hadrus
  source 1..50: mol_type = genomic DNA
ctttatacgcacttgcagaatggatggctttactgtaagtgcgtataaag

SEQ ID NO: 55028 - DNA, 40 bp, Anaerostipes hadrus
  source 1..40: mol_type = genomic DNA
gtgtcttgtcccgaatggatgacacagtggggttctaaat

SEQ ID NO: 55029 - DNA, 40 bp, Anaerostipes hadrus
  source 1..40: mol_type = genomic DNA
gtgtcttgtcccgaatggaagacacagtggggttctaaat

SEQ ID NO: 55030 - DNA, 50 bp, Anaerostipes hadrus
  source 1..50: mol_type = genomic DNA
ctttataattcaggggagaatgaaaggcttttcagtattctcatttacat

SEQ ID NO: 55031 - protein, 578 aa, Sphingobium xenophagum
MKPHAYIYARFSTKRQDKGSSLDRQYELTQEMCERNGWEVVETLTDKGQSAWKGDHLRVGELGRFKQRVDQGDIPAGSFLVVENLDRVSRQDVKKARRWIEEVTDAGIKVAVCSPAPGKIFDEASLSGENIVDLLQYLLEAQRSNKESERKSGLQHDAISRFMDKARAGVVYSKRTPFWLKGEKNGQFEVDEARAAVVRQIYDWCAAGQGIHMIAKTLNATVKPWTVGHKAEKPSWKVGYVRDILTGWQAEGEYHVRSGPNRIPTGEVITNYYPRVVPPELVAAARSAMALRRGATGPNHSEAKNLFSGRIKCGHCKDTMVRIVQRNTRGTQYEYLKCTRFNNGADCENTTMYRYDNFERAALDRILHLALDNSHFVKSDETGPLLGQVAQLSKEVELLEGERSNLMTFIRKYGEDEDTEKELLKLRPKLADARKQLTEAQEALERAKGNATPEEHLARVLEVKDAIKSEDDEIRQEARRTVRDAIRSIVSLVTCEREYVPGKKTPKRTITMFAAGNHLKYEFDNDGNQIGGWDMREFATSDEPILQAFSQEIAEPNEAQPLAKVALTDVLRRSKSEP

SEQ ID NO: 55032 - DNA, 50 bp, Sphingobium xenophagum
  source 1..50: mol_type = genomic DNA
tgtttgcagtttaatttgcatatgaacagctaaaaatggttgtgcaaaca

SEQ ID NO: 55033 - DNA, 40 bp, Sphingobium xenophagum; identical to SEQ ID NO: 24343
  source 1..40: mol_type = genomic DNA

SEQ ID NO: 55034 - DNA, 40 bp, Sphingobium xenophagum
  source 1..40: mol_type = genomic DNA
ggtgcgggtgctgcacctgtttgcgcgcaacatgctgatc

SEQ ID NO: 55035 - DNA, 50 bp, Sphingobium xenophagum
  source 1..50: mol_type = genomic DNA
tgtgtgcatatatgtatgtatgtgttcagaaaaaaatgtttgagttaaca

SEQ ID NO: 55036 - protein, 548 aa, Vibrio mediterranei
MTKIIIPYVRFSSAEQRKGHSLKRQIERIEEYARKNGYTVDNSLNLRDLGLSAYTAKHIEKGSLGVFLEAIEANLIPRDGSIYLCIEQFDRLSRQNVDDAYGLFSKILKSNVNIITLMDEKVYTKDSLTEMVSIISSLLLMQQANIESEKKSERVLAVFKDRLKDLQGGNKVVFASMLPGWIENTGTKKSPHFVFNEKVETVREVFRLYIEGKTMGQIARLLNDRKTLQIARKRTKNFTNSWNSGKISHLLSNQCVIGQLKIKKSGEVFEDYYPSAISLDDWDVVQSMKRTTATVKAGGRKSINIFQGRLFCADCGNKYYFETDTQTTKTKEYRYHLLKCSGRRFHSCDSKTIRYDDLLEMDHLFIKKHSEKNNDQSLVNDLKEKNKNINKQLRELEKENLELNSMFESGEISTIAFAKASTVTNNKIDVLKRDLAQNKQTIMLFSNTTKVEKIEKENPVFISKAKRHIKENFAAFIISSKYNSIVSLTHSGHISITETPNNYADVIETYSLFKDIKKQIQENDRKDVLDGKFKEILQALKFYDMEQV

SEQ ID NO: 55037 - DNA, 50 bp, Vibrio mediterranei
  source 1..50: mol_type = genomic DNA
ttccttgtaacaataagattaatgaccgataatttgatggtttacacgaa

SEQ ID NO: 55038 - DNA, 40 bp, Vibrio mediterranei
  source 1..40: mol_type = genomic DNA
gtttccggcgaagagaatcacggtgaatctcgctcctgcg

SEQ ID NO: 55039 - DNA, 40 bp, Vibrio mediterranei
  source 1..40: mol_type = genomic DNA
gtttccggcgaagagaatcatggtgaatctcgctcctgcg

SEQ ID NO: 55040 - DNA, 50 bp, Vibrio mediterranei
  source 1..50: mol_type = genomic DNA
atccttttaggtggaacattaataatctaaaatttgtctcattataaggg

SEQ ID NO: 55041 - protein, 513 aa, Bacteroides fragilis
MSKKKSKEKIIEYSKLEHKVAAVWTRVSTGKQADNNGSLESQKRICDEYAACKGIRIKEYFGDTNESAQTEGKLYRDMIEKVAKDKEINVILVASYDRFSRTGPEGIMTKAYLKAKGIYVVSATQATDPDSAAGTFMENIIFLFNQFENSLRRDKAVIGMTDCLRKGNWFSKPPLGYNKVKVEKDHILTVNETGRILRNAFIWKATEGIGDIEIVQRLKELGLSIDRKHLNKILHNPFYCGYIQHSLLGDEIIKGNQEILIDEATFNKVNGISNTGYEHKKITEPFPLKRHIICSDCGGYLTGYTVKARGKDYYKCNKKGCKSNHSTEKLHQKYINLLNEYNIPDEYIPILTDVLRKVFEEYNQNKGETKKVLLKRKTECENQINAVKVRLGLGEINNEIYTATMGELNSRLAEVKRGLEDAGKNLSNMMKYINQTIEMSCKLGSLWNDSNFVDRQKVQNLVFPSGIYFDKEKDDYRTENENEVFKIFRRFTETYKDEKEKATTDFARLSPSV

SEQ ID NO: 55042 - DNA, 50 bp, Bacteroides fragilis; identical to SEQ ID NO: 40042
  source 1..50: mol_type = genomic DNA

SEQ ID NO: 55043 - DNA, 40 bp, Bacteroides fragilis
  source 1..40: mol_type = genomic DNA
ggcttgtctatgcgaatgtcggaatgaggcgactcgaacg

SEQ ID NO: 55044 - DNA, 40 bp, Bacteroides fragilis
  source 1..40: mol_type = genomic DNA
ggcttgtctatgcgaatgttagaatgaggcgactcgaacg

SEQ ID NO: 55045 - DNA, 50 bp, Bacteroides fragilis
  source 1..50: mol_type = genomic DNA
ttttgctttttcttctccttctgttatttccattatgtgtatatgttaca

SEQ ID NO: 55046 - protein, 513 aa, Bacteroides caccae
MSKKKSKEKVVEFSKLTNKVAAVWTRVSTERQADTNGSLESQRRICTEYAESHAIRIKKYYGGTNESAKVEGKLYREMIAEVARDKEINIILVYSFDRFSRAGYEAMMTKAYLKAKGIYVVSATQATDPDSAAGGFMEDVIFLFNQFENNLRKDKCITGMVECLRNGNWYSKPPLGYDKLKVGREHVLTVNEKGKILRNAFIWKATEGIKDIEIVHRLKGLGLSIDRKHLNKILHNPFYCGYIQHSLLGDEIIKGNQEILIDEAIFNKVNDISNAGYEHKEITEPFPLKRHIICSDCGGYLTGYTVKARGRDYYKCNKKGCKSNHSTEKLHQKYINLLNEYNIPDGLIPILTDVLRKVFEEYNQNKGETKKVLLKRKTECENRINTVKVRFGLGEINSEIYTATMSELNSRLAEIRRELEDAGKNLSNMMKYINQTIEMSCKLGGLWSDSNFSNRQKIQNLVYPSGIYFDKENDDYRTENENEVFKIFRRFTASCEGGKEKATTDFARLSPSV

SEQ ID NO: 55047 - DNA, 50 bp, Bacteroides caccae; identical to SEQ ID NO: 40042
  source 1..50: mol_type = genomic DNA

SEQ ID NO: 55048 - DNA, 40 bp, Bacteroides caccae
  source 1..40: mol_type = genomic DNA
aagctaccctttaccttgtcggaatgaggcgactcgaacg

SEQ ID NO: 55049 - DNA, 40 bp, Bacteroides caccae
  source 1..40: mol_type = genomic DNA
aagctaccctttaccttgttagaatgaggcgactcgaacg

SEQ ID NO: 55050 - DNA, 50 bp, Bacteroides caccae; identical to SEQ ID NO: 55045
  source 1..50: mol_type = genomic DNA

SEQ ID NO: 55051 - protein, 513 aa, Bacteroides thetaiotaomicron
MSKKKSKEKVVEYSKLEHKVAAVWTRVSTGKQADNNGSLESQKRICDEYAASKGIRIKEYFGDTNESAQTEGKLYRNMIEKVAKDKEINVILVASYDRFSRTGPEGIMTKAYLKAKGIYVVSATQATDPDSAAGTFMENIIFLFNQFENSLRRDKAVIGMTDCLRKGNWFSKPPLGYNKVKVEKDHILTVNETGRILRNAFIWKATEGIGDIEIVQRLKELGLSIDRKHLNKILHNPFYCGYIQHSLLGDEIIKGNQEILIDEATFNKVNGISNTGYEHKKITEPFPLKRHIICSDCGGYLTGYTVKARGKDYYKCNKKGCKSNHSTEKLHQKYINLLNEYNIPDEYIPILTDVLRKVFEEYNQNKGETKKVLLKRKTECENQINAVKVRLGLGEINSEIYTATMGELNSRLAEVKRGLEDAGKNLSNMMKYINQTIEMSCKLGSLWNDSNFVDRQKVQNLVFPSGIYFDKEKDDYRTENENEVFKIFRRFTEIYKDEKEKATTDFARLSPSV

SEQ ID NO: 55052 - DNA, 50 bp, Bacteroides thetaiotaomicron; identical to SEQ ID NO: 40042
  source 1..50: mol_type = genomic DNA

SEQ ID NO: 55053 - DNA, 40 bp, Bacteroides thetaiotaomicron
  source 1..40: mol_type = genomic DNA
aagctaacccttatcttgtcggaatgaggcgactcgaacg

SEQ ID NO: 55054 - DNA, 40 bp, Bacteroides thetaiotaomicron
  source 1..40: mol_type = genomic DNA
aagctaacccttatcttgttagaatgaggcgactcgaacg

SEQ ID NO: 55055 - DNA, 50 bp, Bacteroides thetaiotaomicron; identical to SEQ ID NO: 55045
  source 1..50: mol_type = genomic DNA

SEQ ID NO: 55056 - protein, 513 aa, Phocaeicola vulgatus; identical to SEQ ID NO: 55051

SEQ ID NO: 55057 - DNA, 50 bp, Phocaeicola vulgatus; identical to SEQ ID NO: 40042
  source 1..50: mol_type = genomic DNA

SEQ ID NO: 55058 - DNA, 40 bp, Phocaeicola vulgatus
  source 1..40: mol_type = genomic DNA
ggcttatcctttacaatgtcggaatgaggcgactcgaacg

SEQ ID NO: 55059 - DNA, 40 bp, Phocaeicola vulgatus
  source 1..40: mol_type = genomic DNA
ggcttatcctttacaatgttagaatgaggcgactcgaacg

SEQ ID NO: 55060 - DNA, 50 bp, Phocaeicola vulgatus; identical to SEQ ID NO: 55045
  source 1..50: mol_type = genomic DNA

SEQ ID NO: 55061 - protein, 550 aa, Roseburia intestinalis
MNREGKKCVLYPRVSTEMQVDGYSLEGQKNSLKRFADREEMEIVGIYEDAGKSGKSIEGRPAFKKMLSDIKNGLEIDYILVYKLSRFGRNAADILNSLEFVQSYGINLICIEEGIDSSQTSGKLLISVLSAVAEIERENIIEQTMNGRREKARQGGWNGGFAPYGYYLKDNQLLIDETEAEAIRIIFDKFANSDIGLGGVAKYLNLQGIKKIPRQNGTLETWSSHFIRLILDNPVYCGKIAYGRRTREKVKGTKNEYKQIHTDDYILEDGQHEGIVSEELWQKVHAKRMATGIKQPSKIGKDRAHLLTGILKCPLCGSSMYTNKHAWTNKDGTYKEVYYYICGRNKQERGHHCDYKASLRKTDIEPLVIEAVKELVSDKYFAKEIEKRVGVQTDTTAIDKELANYESKLKEVDLNKARLEREIDNLPIDARFRERKIHDMTLRLDGLYDTIVELEERIEDAKLRKSSIEMEAITLDNIYKLMLNFGKLYDIISDEEKKSLITYLIKEIQIYPNGESEMPLKSIEFNFPIYRDGQEVRRLLWEKGNTVESV

SEQ ID NO: 55062 - DNA, 50 bp, Roseburia intestinalis; identical to SEQ ID NO: 2672
  source 1..50: mol_type = genomic DNA

SEQ ID NO: 55063 - DNA, 40 bp, Roseburia intestinalis
  source 1..40: mol_type = genomic DNA
tccgtggacgaaacatgttgagtcggtagttctgatgcag

SEQ ID NO: 55064 - DNA, 40 bp, Roseburia intestinalis
  source 1..40: mol_type = genomic DNA
tccgtggacgaaacatgttatgtcggtagttctgatgcag

SEQ ID NO: 55065 - DNA, 50 bp, Roseburia intestinalis
  source 1..50: mol_type = genomic DNA
ttttgggaaatgtactatacattgattatggtagtatttatttgccaaaa

SEQ ID NO: 55066 - protein, 550 aa, Clostridioides difficile
MNREGKKCVLYPRVSTEMQVDGYSLEGQKNSLKRFADREEMEIVGVYEDAGKSGKSIEGRPAFKKMLSDIKNGLEIDYILVYKLSRFGRNAADILNSLEFVQSYGINLICIEEGIDSSQTSGKLLISVLSAVAEIERENIIEQTMNGRREKARQGGWNGGFAPYGYYLENNQLLIEETEAKAIRIIFEKFGNSDIGLGGVAKYLNLQGIKKIPRQNGKLETWSSHFIRQILDNPVYCGKIAYGRRTREKVKGTKNEYKQVHTDDYILEDGQHEGIVSAELWEKVRAKRIATGIKQPSKVGKDRSHLLTGVLKCPMCGSSMYTNKHAWTNKDGTYKEVYYYICGRNKQERGHHCDYKASLRKTDIEPLVIEAVKELVSDKYFAREIKSRIGIQTDTGNVDKEIANYESKLKEVDLNKARLEREIDNLPADARYRERKIHDMTLRLDGLYDTIVELEERIEDAKLRRSSIEMEAITLENVYKIMKNFGKLYAIMSDEEKKSVISYLIKEIQIYPNGESEMPLKSIEFNFPIYRDGKEVRKVLWERGNTVETV

SEQ ID NO: 55067 - DNA, 50 bp, Clostridioides difficile; identical to SEQ ID NO: 2667
  source 1..50: mol_type = genomic DNA

SEQ ID NO: 55068 - DNA, 40 bp, Clostridioides difficile
  source 1..40: mol_type = genomic DNA
cccaaatactccacattgtgagacggtagcgttattgtcc

SEQ ID NO: 55069 - DNA, 40 bp, Clostridioides difficile
  source 1..40: mol_type = genomic DNA
cccaaatactccacattgtatgacggtagcgttattgtcc

SEQ ID NO: 55070 - DNA, 50 bp, Clostridioides difficile; identical to SEQ ID NO: 55065
  source 1..50: mol_type = genomic DNA

SEQ ID NO: 55071 - protein, 549 aa, Faecalicatena contorta
MNREGKKCVLYPRVSTEMQVDGYSLEGQKNSLKRFADREEMEIVGIYEDAGKSGKSIEGRPAFKKMLSDIKYGLEIDYILVYKLSRFGRNAADILNSLEFVQSYGINLICIEEGIDSSQTSGKLLISVLSAVAEIERENIIEQTMNGRREKARQGGWNGGFAPYGYYLKDNKLLIQETEAEAIRIIYDKFGNSDIGLGGIAKYLNLQGIKKIPRQNGKLETWSSHFIRLILDNPVYCGKIAYGRRTREKVKGTKNEYKQVHTDDYILEDGQHEAIISEELWQKVHAKRLATGVKQPSKIGKDRAHLLTGLLKCPICGSSMYTNKHAWTNKDGTYKEVYYYICGRNKQERGHHCDYKASLRKTEIEPLVIEAVKELVSDKYFAQEIEKRIGAQTDTSMIDKELANYERKLKEVDLNKARLEREIDNLPIDARYRERKLHDMILRLDGLYDTIVELEERIEDAKLRRNSIEMEAITLDNIYKIMLNFGKLYDIISDEEKKSIITYLIKEVQIYPHGESEMPLKSIEFNFPIYRDGKEVRKILWESGNTVET

SEQ ID NO: 55072 - DNA, 50 bp, Faecalicatena contorta; identical to SEQ ID NO: 10162
  source 1..50: mol_type = genomic DNA

SEQ ID NO: 55073 - DNA, 40 bp, Faecalicatena contorta
  source 1..40: mol_type = genomic DNA
ccctatgggggtgcacgttgagacggttgcgctcttaacc

SEQ ID NO: 55074 - DNA, 40 bp, Faecalicatena contorta
  source 1..40: mol_type = genomic DNA
ccctatgggggtgcacgttatgacggttgcgctcttaacc

SEQ ID NO: 55075 - DNA, 50 bp, Faecalicatena contorta; identical to SEQ ID NO: 55065
  source 1..50: mol_type = genomic DNA

SEQ ID NO: 55076 - protein, 550 aa, Blautia faecis
MNREGKKCVLYPRVSTEMQVDGYSLEGQKNGLKRFADREEMEIVGIYEDAGKSGKSIEGRPAFKKMLSDIKNGLEIDYILVYKLSRFGRNAADILNSLEFVQSYGINLICIEEGIDSSQTSGKLLISVLSAVAEIERENIIEQTMNGRREKARQGGWNGGFAPYGYYLKDNQLLIEETEAEAIRIIFDKFANSDIGLGGVAKYLNLQGIKKIPRQNGTLETWSSHFIRLILDNPVYCGKIAYGRRTREKVKGTKNEYKQVHAEDYILEDGQHEVIISEELWQKVHAKRMATGIKQPSKIGKDRSHLLTGILKCPLCGSSMYTNKHAWTNKDGTYKEVYYYICGRNKQERGHHCDYKASLRKTDIEPLVIEAVKELVSDKYFAKEIEKRIGVQTDTTAIDKELANYESKLKEVDLNKARLEREIDNLPVDTRFRERKIHDMTLRLDALYDTIVELEERIEDAKLRKSSIEMETITLDNIYKLMLNFGKLYDIISDEEKKSLITYLIKEIQIYPNGESEQPLKSIEFNFPIYRDGQEVRRLLWEKGNTVETV

SEQ ID NO: 55077 - DNA, 50 bp, Blautia faecis; identical to SEQ ID NO: 2672
  source 1..50: mol_type = genomic DNA

SEQ ID NO: 55078 - DNA, 40 bp, Blautia faecis
  source 1..40: mol_type = genomic DNA
cccgaatacggtgtcggtggagacggttgttcttttgtcc

SEQ ID NO: 55079 - DNA, 40 bp, Blautia faecis
  source 1..40: mol_type = genomic DNA
cccgaatacggtgtcggtgatgacggttgttcttttgtcc

SEQ ID NO: 55080 - DNA, 50 bp, Blautia faecis; identical to SEQ ID NO: 55065
  source 1..50: mol_type = genomic DNA

SEQ ID NO: 55081 - protein, 512 aa, Clostridium botulinum
MKRIAIYSRKSRETDTGESIKNQIDMCKTYFDRTNEDCSFEVFQDEGFSGGNTNRPSFQRMLELAKHKQFDVIAVYKVDRIARNIVDFVNTFNELEEHDVKLVSITEGFDPSTPIGKMMMMLLASFAEMERMNTAERVKDNMKGLAKIGRWSGGTPPTGYKSKTITVNGKKETYLELIPEKKQLIISIFEKASDGYTTYQIGEMFSMSPKTISNIIINPTYVKSDELSANYLKSIGYDVFCELNGNGYLAYNRRPKKKGKKLFNAKGMFVSVSLHEAPIDSKTWIKANNNLKDRATEAKPRISNNSFLAHLVKCSCGSGMYIHTGHKKKDGTKNTYFVCSKKKSKNKCASKWLRIDVVEAEVLNTLKKVSSNPKILDVYLKKKNNSVNYVESIKNIKKQINKNTEAINALTDKLVLLEGASIDIVSKKINSIANENTKLNTQLLEIERKKMFLEVDGENLKLLISNMSKFLARFDRIDINEKQNFIKTIIKEVIWDSISNDGEDEITIEFLE

SEQ ID NO: 55082 - DNA, 50 bp, Clostridium botulinum
  source 1..50: mol_type = genomic DNA
agacatacttttaactgtaccggatgtgcaatacatctaaaattgatgct

SEQ ID NO: 55083 - DNA, 40 bp, Clostridium botulinum; identical to SEQ ID NO: 1438
  source 1..40: mol_type = genomic DNA

SEQ ID NO: 55084 - DNA, 40 bp, Clostridium botulinum
  source 1..40: mol_type = genomic DNA
cggcggcggttgggccggaattgcagcagctataagcgct

SEQ ID NO: 55085 - DNA, 50 bp, Clostridium botulinum
  source 1..50: mol_type = genomic DNA
acacataccagtaatagtacagaaattttaaaacattctctattgctgct

SEQ ID NO: 55086 - protein, 507 aa, Escherichia coli
MKRVISYIRFSSERQAKGDSLRRQSKMVTDWLKAHPEYYLDQDLSFRDLGVSGFTGKHLKGGLGDFLTAIEKGLVKAGDTLLIESLDRLSRQNVDRASELLRNILRSGVDVVTLSDGEHYTKESLRDPLSLIKSILIMQRSHEESLRKSERIQAAWNRKKELISEGIKISKRCPAWLKLNDDRKSFSVIPEKVETVKRCFQLRLEGKSIWEIVRTLNAEGHQTLNQYKAGSFGQTSVQDLLKNRSVIGYFTPKGCEEIAGYFPPIIPETDFYKVQQLSYSRYGRKPASDKPLSVNLFKGVIRCSECGHALIITGFSDTRNGIYRCPLRNENRCSAKGLSRKQTDGTLLALLSRLDRFDSDMTNTIDTLKLHREHISSNIEKLVQLSLEIEDLSAITIKLKQLKGELSQVDADIEKETQRLKSIDVGCLSDCDLTTKAGRIEAQLIIKSAVKEVVLNTAKRRCKVTFHNGKVIDLPITENPSDNVTEAIQSLSEVTERGLIDVDVVEI

SEQ ID NO: 55087 - DNA, 50 bp, Escherichia coli
  source 1..50: mol_type = genomic DNA
tagtgcatttagaccttgatgatttttattagacacgtttaaatacacta

SEQ ID NO: 55088 - DNA, 40 bp, Escherichia coli; identical to SEQ ID NO: 5188
  source 1..40: mol_type = genomic DNA

SEQ ID NO: 55089 - DNA, 40 bp, Escherichia coli; identical to SEQ ID NO: 5749
  source 1..40: mol_type = genomic DNA

SEQ ID NO: 55090 - DNA, 50 bp, Escherichia coli
  source 1..50: mol_type = genomic DNA
aaatgcattaacccattcatgataaatgttaaaaatttcatcatacacta

SEQ ID NO: 55091 - protein, 507 aa, Escherichia coli
MKRVISYIRFSSEKQSRGDSLRRQSKMVNDWLKAHPEYYLDQDLSFRDLGVSGFTGKHLKGGLGDFLTAIEKGLVKAGDTLLIESLDRLSRQDIDIASELLRNILRSGVDVVTLSDGEHYTRESLKDPLALIKSILIMQRAHEESLRKSERIQAAWDAKKEAAKAGIKVSKRCPAWLKLNDDRKSFSVIPEKVETVKRCFQLRLEGKSIWEIVRTLNDEGHQTLNQYKAGKFGQTSVQDLLKNRSVIGYFTPKGCEEISGYYPAIIDETTFYKVQQLSHYRYGRKPVSDKPLSVNLFKGVIRCSECGHALIITGFSDTRNGIYRCPLRNENRCSAKGLSRKQTDGTLLTLLSRLDRFDSDTTNTIDTLKLHREHISSNIEKLVQLSLEIEDLSAITIKLRQLKGELSQVDADIEKETQRLKSIDVGCLSDCDLTTKAGRIEAQLIIKSAVKEVVLNTAKRRCKVTFHNGKLIDLPITETPSDNVTEAIQSLSEVTERGLIDVDEVII

SEQ ID NO: 55092 - DNA, 50 bp, Escherichia coli; identical to SEQ ID NO: 55087
  source 1..50: mol_type = genomic DNA

SEQ ID NO: 55093 - DNA, 40 bp, Escherichia coli; identical to SEQ ID NO: 5188
  source 1..40: mol_type = genomic DNA

SEQ ID NO: 55094 - DNA, 40 bp, Escherichia coli; identical to SEQ ID NO: 5749
  source 1..40: mol_type = genomic DNA

SEQ ID NO: 55095 - DNA, 50 bp, Escherichia coli; identical to SEQ ID NO: 55090
  source 1..50: mol_type = genomic DNA

SEQ ID NO: 55096 - protein, 543 aa, Vibrio alginolyticus; identical to SEQ ID NO: 45501

SEQ ID NO: 55097 - DNA, 50 bp, Vibrio alginolyticus; identical to SEQ ID NO: 45502
  source 1..50: mol_type = genomic DNA

SEQ ID NO: 55098 - DNA, 40 bp, Vibrio alginolyticus
  source 1..40: mol_type = genomic DNA
gttagaccacctactgtgcgaactaaaagctggccaatct

SEQ ID NO: 55099 - DNA, 40 bp, Vibrio alginolyticus
  source 1..40: mol_type = genomic DNA
gttagaccacctactgtgctgactaaaagctggccaatct

SEQ ID NO: 55100 - DNA, 50 bp, Vibrio alginolyticus
  source 1..50: mol_type = genomic DNA
aatttgtacttcagttctttaaattggctttaaccaagtattgtcaacta

SEQ ID NO: 55101 - protein, 533 aa, Bacteroides thetaiotaomicron
MENFELKGFAKGKKQQKEQVGGNAIIYTRVSSSEQVDGQSLEVQIDKCREYANMHSYNIVGEFGGTYESAKSDKERKEFSRMLTFIKQSNKKGSNQIVKTVIVFSTSRFSRTGSTTIIEEVEARGAYVVSATSNYDPRTPVGKYMQLMELANARFQNDEKRATTVENSVKALLKGRWIGKAPRGYEQKTTKKEQIITINEEGKLIRKAFLWKANNKLSNEEIRHRLAAEGFHICKQKLSELFKNPFYCGYMAHKFLQGDIVQGNHPPLIPKEIFLKVNGELSKNHSGYEQKIDKEYAPLLGSIKCPCCGNNLSASISTKMRKKFGRTDIGYYVCSRKGCKYNSSTKNVHEAFEEEVNKYSLSDKVSELLKLQLTITFDNMNKENKERAQSIKSNIKAKEKELEQVETNYALCSDTKKQEICVKVMTRLEAEIRGLQVEYSKVNTEILNLDKFIDYAFAMRSNLFNLWELQGLEGRRRLQKLVFPDGFIYDKNNEHIEPKAVNQFFLLNYSFPTNNGDKKRETNSENHHSSLQV

SEQ ID NO: 55102 - DNA, 50 bp, Bacteroides thetaiotaomicron
  source 1..50: mol_type = genomic DNA
aaatcaccattcgtcccttcaagtacccttaacggatgaaatattgaacc

SEQ ID NO: 55103 - DNA, 40 bp, Bacteroides thetaiotaomicron
  source 1..40: mol_type = genomic DNA
tttaatcaggaatactcgtactcgaagcgggacttgaacc

SEQ ID NO: 55104 - DNA, 40 bp, Bacteroides thetaiotaomicron
  source 1..40: mol_type = genomic DNA
tttaatcaggaatactcgtcttcgaagcgggacttgaacc

SEQ ID NO: 55105 - DNA, 50 bp, Bacteroides thetaiotaomicron
  source 1..50: mol_type = genomic DNA
aaacctggaatcatcccttcaagtctcctaaacacagcacagtttgagcc

SEQ ID NO: 55106 - protein, 533 aa, Bacteroides thetaiotaomicron
MENFELKGFAKGKKQQKEQVGGNAIIYTRVSSSEQVDGQSLEVQIDKCREYANMHSYNIVGEFGGTYESAKSDKERKEFSRMLTFIKQSNKKGSNQIVKTVIVFSTSRFSRTGSTTIIEEVEARGAYVVSATSNYDPRTPVGKYMQLMELANARFQNDEKRATTVENSVKALLKGRWIGKAPRGYDQKTTKKEQIITINEEGKLIRKAFLWKANNKLSNEEIRHRLAAEGFHICKQKLSEVFKNPFYCGYMAHKFLQGDIVQGNHPPLIPKEIFLKVNGELSKNHSGYEQKIDKEYAPLLGSIKCPCCGNNLSASISTKMRKKFGRTDIGYYVCSRKGCKYNSSTKNVHEAFEEEANKYVLSDKVSELLKLQLTITFENMNKENKERAQSIKSNIKAKEKELEQVETNYVLCSDTKKQEICVKVMTRLEEEIRGLQAEYSKVNTKILNLDKFIDYAFAMRSNLFNLWELQGLEGRRRLQKLVFPDGFIYDKNNEHIEPKTVNQFFLLNYSFPTNNGDKKRETNSENHRSSLQV

SEQ ID NO: 55107 - DNA, 50 bp, Bacteroides thetaiotaomicron
  source 1..50: mol_type = genomic DNA
aaatcaccgttcgtcccttcaagtacccttaacagatgaaatattgaacc

SEQ ID NO: 55108 - DNA, 40 bp, Bacteroides thetaiotaomicron; identical to SEQ ID NO: 55103
  source 1..40: mol_type = genomic DNA

SEQ ID NO: 55109 - DNA, 40 bp, Bacteroides thetaiotaomicron; identical to SEQ ID NO: 55104
  source 1..40: mol_type = genomic DNA

SEQ ID NO: 55110 - DNA, 50 bp, Bacteroides thetaiotaomicron; identical to SEQ ID NO: 55105
  source 1..50: mol_type = genomic DNA

SEQ ID NO: 55111 - protein, 513 aa, Microbacterium caowuchunii
MASDTVQAAIYVRQSVREDQGIAQQIADCRRRLVAEEWAEVDVYDDNRTSATKDRGTGTAWARMLEDIDAGRVQVVVAVAAARLLRRVEDVLELTKRDVRIVTLRDGIDTATNGGKMMLYMLVLMAEAEIEEKEARALPYRASRREAGHPTSGLVPYGYRWVPKLERDAKGTRFAIVPEEAEIIRYMSAELLGGTTLAAIVDALNADGKRTRAGARWRSSTVRRILISPFHAAKLPPAMPEGKPYRADRFTWSECTPGTWAEILPEDAVLAARGLLLDDARRSHDGDTRPKWLLSTIGRCAGCHGPLRSAQTKTTATSYRAYRCTAGCFVRPAALIEEYVTRAAVDVLSAPGLLSWVDDDPESIEVLRARREALSALRAEDEELYRARKLSPAMFSRLVDENAAEIADIDRELAEIVRVNPLAAFVSGDDVRDLWDGLSVGRRRAVLSALVDHVEVSPVGKGRRVLTVEAVEGTVSMGWRRVERRRSLDTGATTRTPKVPDEARNAIVRALNK

SEQ ID NO: 55112 - DNA, 50 bp, Microbacterium caowuchunii
  source 1..50: mol_type = genomic DNA
atatgtcattcctgcgccacagtggccaccgtgagcgtttcaaggcacac

SEQ ID NO: 55113 - DNA, 40 bp, Microbacterium caowuchunii
  source 1..40: mol_type = genomic DNA
atacgcgatcgccacgatggcggcggtcgcgttcgccggc

SEQ ID NO: 55114 - DNA, 40 bp, Microbacterium caowuchunii
  source 1..40: mol_type = genomic DNA
atacgcgatcgccacgatgagggcggtcgcgttcgccggc

SEQ ID NO: 55115 - DNA, 50 bp, Microbacterium caowuchunii
  source 1..50: mol_type = genomic DNA
atatttcatgatatggatacagggagcacagggaggggaacaacacacac

SEQ ID NO: 55116 - protein, 494 aa, Bacillus megaterium
MRCAIYARVSTEFDSQKTSIDNQIDLFRNYVNEKNWEIVKIYTDKNSGTKVDRPGLKSLIADGKAKLFDVILAKELSRLARNGRLSYELRDICQLNNIHIVCLDNSINTLTGDVQNFGLFAWLYENESLTTSRRNKASKRTKAVRGEFTGSNPTYGYYNDGGKLKIRHDQSPDIVRRIFDCYLEGIGMDSIAKTLIAEGIPTPSQVAKKANASTLWHASTIKNILKNRHYCGDLVQHKTESISVTTTKRRTLDEANLIVHRDMHESIISRETFEAVQRMLQSRTRIGKAPKKHLFTNVLYCKECGRGMWYKVNQKGYRCGGNLKYGDFYCLNKKAVKELELKKIVLAYLKELFQAFQDDSMMKSLMKKLEQKQQEFQKKMSNVDNQIQDLRLKKLEYLNLYTEQVITKQELIEYRELTDQKLKELDILKAQIHKTLEECTNENYAIKLGDKLNNFFPLKDLNSKLMHSLVEKITVSIDGNIDIHYTFINPFQDK

SEQ ID NO: 55117 - DNA, 50 bp, Bacillus megaterium
  source 1..50: mol_type = genomic DNA
gtgagttgcgagacacactccacgtgtgcggtctgcaactggcaacccaa

SEQ ID NO: 55118 - DNA, 40 bp, Bacillus megaterium
  source 1..40: mol_type = genomic DNA
actcaccacattctccacgtgcgccgtatgcggaaacata

SEQ ID NO: 55119 - DNA, 40 bp, Bacillus megaterium
  source 1..40: mol_type = genomic DNA
actcaccacattctccacgggcgccgtatgcggaaacata

SEQ ID NO: 55120 - DNA, 50 bp, Bacillus megaterium
  source 1..50: mol_type = genomic DNA
cagagtagctgcttactctccaggggcccggcctgcccaaggcaacctca

SEQ ID NO: 55121 - protein, 550 aa, Mycobacterium kansasii
MASPSKRSTSESAARRVLGRLRLSRSTEESTSIERQREVIEQWSSANGHTIVGWAEDLDVSGSVDPFDTPGLGVWLNQKAPEWDIVCAWKLDRLGRNAMQLNKLFAWCNDHGKTVVSCSESIDLGTWAGRMLTSVIAGLAEGELEAIRERQRSSRAKLRASARWPGGKPPYGYIGVPPGTVDPACVPPDLHKKSCRCHEGPGWALKIDPDASKVVRRIVDDLLDGTPITRIARELTEEGYRTPGQYYAALRGSQSGVRVRPGDKPGKWTSTPLRNMLRSKALRGYAHHNGETVRDEDGMPVQLAEPLVNLDEWELIQAALDRTLEARKDARRSEVSPLSGLVFCAETNHSSDCPNDGAGASSQPCDCPRCGEPLYHDHNTIRRPSKTYEFRYYRCRSRKHTMLPADELEELAEEQFLHHLGDMAVRERVWVQGDTHEAELREAVTALDELAKAAGRAVSATAKQRLRGQLAALDARIAELETAPTREARWEYRATGGTYRDVWESAGVDERRELLRRSGITFGARVVGGRGSKAREFAIQVPTEITQRMP

SEQ ID NO: 55122 - DNA, 50 bp, Mycobacterium kansasii
  source 1..50: mol_type = genomic DNA
gttgtggggatcgtgatgcgcggcgaatagaacaatatcttgaacacaac

SEQ ID NO: 55123 - DNA, 40 bp, Mycobacterium kansasii
  source 1..40: mol_type = genomic DNA
gttgggcgctatgcgcggcgaatagaacagcagccggaac

SEQ ID NO: 55124 - DNA, 40 bp, Mycobacterium kansasii
  source 1..40: mol_type = genomic DNA
gttgggcgctatgcgcggcatatagaacagcagccggaac

SEQ ID NO: 55125 - DNA, 50 bp, Mycobacterium kansasii
  source 1..50: mol_type = genomic DNA
gttgagggtggccgggttcttggcatcttgaacaaagaattgaacaaaac

SEQ ID NO: 55126 - protein, 406 aa, Pantoea ananatis
MPQLYSYVRWSSDKQTKGTTLERQMASAKLFANDNGLDLVEIIEPGVSAFKGKNAKDGKLGDFINAVEAGAIERDSWLYVENLDRLTRQSATEAQTLFIRLLNLGLTLVTGMDKRIYTLDSVNNNPTEFMISILLFSRANEESKTKSERTKGNVLALIARHKEGLPVNIKSVGKHPWWIDDSGSQYEAVREDEKYWPIAREIIDLYLAGKGAYKVKRHLDTKYPNGYEGKEWDYQMLIRMRKNKALYGERTLNINGKAFKLVNYYPSLCTDEAEYLRLQELKRKNDYQSKDKDDVVNIKLLSGLSLLRCGKCGGTMSSFMNKEKPRYICLNGRHLQKNCHGWSVNALLIEYCLIATLVIGYINDKKDSQIDNTENTSLLEKDLGELERLDKTIANVSYALEQGVNL

SEQ ID NO: 55127 - DNA, 50 bp, Pantoea ananatis
  source 1..50: mol_type = genomic DNA
tagattggattatttacttttggacaaccgagtgatataaatccaatctt

SEQ ID NO: 55128 - DNA, 40 bp, Pantoea ananatis
  source 1..40: mol_type = genomic DNA
gtcgacaaggttttttggacagccgagcgagacaaatccg

SEQ ID NO: 55129 - DNA, 40 bp, Pantoea ananatis
  source 1..40: mol_type = genomic DNA
gtcgacaaggttttttggatagccgagcgagacaaatccg

SEQ ID NO: 55130 - DNA, 50 bp, Pantoea ananatis
  source 1..50: mol_type = genomic DNA
tagaggggaagaaggacttttgtataactgagtagtcattttataatcat

SEQ ID NO: 55131 - protein, 556 aa, Faecalibacterium prausnitzii
MREVEILKKKQLKCYLYTRVSTSMQVDGYSLDAQRDKLRKYAAYEDMIVAGEYSDEGFSGKNIQGRQEFQRMLNDIQDGKDDVSYVLVFKLSRFGRNAADVLNSLQLMQDFGVNLICVEDGIDSSKDAGKLMISVLSAVAEIERENIRTQTMAGREQKAREGKWNGGFAPYGYKLENGNLVIAEDEVEVIRVIYDRYIHTNEGVAGVAKYLNRNGYTKKLRQNNTIPGFSRDFVKNVLYNPVYMGKIAYGRRRTEKKQGTRNEMHVVEQSEFPVYEGQHEAIISEEDWYLAQEKRKINSFKREKVNNPDHAHILSGILKCPCCGKSMYGNIAKAHSKDKKTRYYYYCKNTVTPTGHECSFRLNIEQTEINKFVAKVISAMVNNPRFVEAIQAKIGTAVDTEDMERQIAVLQGRLKQAFGTKSRLERQMDTLDINDAHYDRKILDLQRRYDEQYDTIEEIEVQIGELQSQIRSIQQEKISGDNIYRLLLAFDEVYHSATEAEQKEFMKAFIERIEMFPEKRKDGSWIKKIVFNFPVPVDGEEVKELPLETETTVETV

SEQ ID NO: 55132 - DNA, 50 bp, Faecalibacterium prausnitzii
  source 1..50: mol_type = genomic DNA
cccttggaaactgaaacaactgtcgagacggtagttcttttatcccacaa

SEQ ID NO: 55133 - DNA, 40 bp, Faecalibacterium prausnitzii
  source 1..40: mol_type = genomic DNA
cccgcatacggagcatatcgagacggtatgtgcattgtcc

SEQ ID NO: 55134 - DNA, 40 bp, Faecalibacterium prausnitzii
  source 1..40: mol_type = genomic DNA
cccgcatacggagcatatctggacggtatgtgcattgtcc

SEQ ID NO: 55135 - DNA, 50 bp, Faecalibacterium prausnitzii
  source 1..50: mol_type = genomic DNA
tctttgaaaagttggacaacttactgtatggtagtttgacagtcacacaa

SEQ ID NO: 55136 - protein, 563 aa, Serratia marcescens
MRAFLYCRVSSKHQTKQQGGTGITRQEATVIEYINDYQPDPKLGYQLSLDDHEMLDPDLGKSAYHGYNFTKGALGEFKRKVLSREIKEGALVIENVDRFSRLPEHEAIREFNDLILGGIDIHEVETGVVYSKKIPNTLSKLSHSIERAWGESERKSTIAKKVWKARRETVLATGKPLPARTPKWLKIVNSEYVIDKKYSDAVNTIFKLYTEGYGTAYIVKYLNNNDMKIDGLSWSTAALTKMYSDERLIGWKSGMKIYPAIVGEDVFKKAREIKNSKVMLNKQKVNSSQRSIFNSVARCGKCGAAMCVSVNGHNKLYYWCWKKRGTKECDLSGFVYAYAELAILQHIKNIDWNKVYRDSDRSNERSEDLNMELAELLNYKLEIDEIIKTTERPPTAVLRALITTEEKISKLEEEISSIKASEYPLDFDFNVDDITNQNNIELRQKCNIQIKKSIKSISFNKDDKVIIIDIKYFTDVLKHVLILDNKTGGVVSSISIIKEGDAINYSSGSFKIIEHEDGCTFDGIDDVSVTDYFMLANYIGSIREKQWIVDVMYLQHNMDAVLK

SEQ ID NO: 55137 - DNA, 50 bp, Serratia marcescens
  source 1..50: mol_type = genomic DNA
cgggaggaaaaggttgcaattgacaggtcaatcatattataatactcctt

SEQ ID NO: 55138 - DNA, 40 bp, Serratia marcescens; identical to SEQ ID NO: 52018
  source 1..40: mol_type = genomic DNA

SEQ ID NO: 55139 - DNA, 40 bp, Serratia marcescens
  source 1..40: mol_type = genomic DNA
gggagtaggcgcgtaatacgtgtcaatcatgttgcctcct

SEQ ID NO: 55140 - DNA, 50 bp, Serratia marcescens
  source 1..50: mol_type = genomic DNA
gggagaaaaatatttgcaatttacgtggaaatcaaatggttataatcctt

SEQ ID NO: 55141 - protein, 551 aa, Chromobacterium piscinae
MKNAKVYSYLRFSDPKQSAGSSIDRQMQYAARWATEHKLTLDDSLTLRDEGLSAYHQRHVKHGALGVFLQAIDDGRIAPGSVLIVEGLDRLSRAEPIQAQAQLAQIINAGITVVTASDNKEYNRERLKANPMDLVYSLLVMIRAHEESETKSKRVKAAFRHQAEEWLAGNFRGRIATGHNPEWLKWSNGTWVEIAERCEALRFALRLYKKGHSGSAILIMMSEKGMSLNNKGLPRSTNFYRMLLNPALYGTRNLEIDGQKYQLENYYPSIISHAEWLELQAMISDRTKRGRKSEIQPVISGMGILRCGYCGGSLAGQFVGGKRKRKEDGTPHDGHRRLLCGHHSMRACPVHGSCSSVPVENAIIDFCSDQLNLTSLTSNRDLTKPVHQQLLIEKNKAKDTQVQLNNLTEALLSATTDAPRTFIQKANQLESILNETNSRIAELEAKLAEATKIEASPSLSTEWAGLAEGVKTLDNEARLKAKQLVYQTFERIIVYSNGILPKSGRKKGKSSPPIDLILIPKGGKPRTLRINRKTGEWIAGEDVLIEKQIQI

SEQ ID NO: 55142 - DNA, 50 bp, Chromobacterium piscinae
  source 1..50: mol_type = genomic DNA
ggtatatattcaacatcattttggcaccctagagataccattcctatacg

SEQ ID NO: 55143 - DNA, 40 bp, Chromobacterium piscinae
  source 1..40: mol_type = genomic DNA
atcgctcgcggccttgggacaaccaagggagacgaaaccg

SEQ ID NO: 55144 - DNA, 40 bp, Chromobacterium piscinae
  source 1..40: mol_type = genomic DNA
atcgctcgcggccttgggactaccaagggagacgaaaccg

SEQ ID NO: 55145 - DNA, 50 bp, Chromobacterium piscinae
  source 1..50: mol_type = genomic DNA
tctttatatggaatttcattttggctccccaaataattccctcctatccc

SEQ ID NO: 55146 - protein, 461 aa, Siminovitchia fortis
MRVAIYVRVSTQEQAKEGFSIPGQLESLRAFCKSQSWDIVEEYKEEGRSAKDLDRPKMQEMMRDIKKNKIDLVLVYKLDRLTRSVLDLYQLLNYFDEYEVKFRSATEVYDTTTAMGRLFITLVAALAQWERENLAERVKFGIHQMIDEGKRPGGHSPYGYKFKKNFDCEIIEEEAKWVIKIFEWYADGFGYRKISDRLNELNIKPRIAEKWNHNTVYGMLRNDIYIGVYRWGDKVIYNNHPAIVSNSLFVKVQKKLKSNHKNLARKGKFPLTGILQCGHCSEPMSGIFDARDKKTYYRCFGCNRSTDGKKITNLLLDEIEKLITSKDYFLSQVDKNYQPLTVNIDEIRKKLEKINQQKEKWYSLFLDEEDNPIPKETLYKKINELNQAEDDLKTILQEAEIDEETPEEKFEKLKNIKNIHLVYDEADAFEQKELLHAIFEELLLYRDKGRNKPITLKYKLN

SEQ ID NO: 55147 - DNA, 50 bp, Siminovitchia fortis
  source 1..50: mol_type = genomic DNA
accagtgttatgttttgttatactcatcttatacaaaacataacactgga

SEQ ID NO: 55148 - DNA, 40 bp, Siminovitchia fortis
  source 1..40: mol_type = genomic DNA
cccggttatcaactttgcccaattaacccaaacagatgga

SEQ ID NO: 55149 - DNA, 40 bp, Siminovitchia fortis
  source 1..40: mol_type = genomic DNA
cccggttatcaactttgcctcattaacccaaacagatgga

SEQ ID NO: 55150 - DNA, 50 bp, Siminovitchia fortis
  source 1..50: mol_type = genomic DNA
agaagtggtcgactttgacttaattctattatagaaaaaaaaaccctgga

SEQ ID NO: 55151 - protein, 629 aa, Enterobacter sp Crenshaw
MPQLYSYIRWSSDRQDQGTTRNRQVAAAKAYAEETGLEMVEILEPGISAFRGKNRAGKLGDFIDAVKNNAIPSDSWLYCENLDRLSRDQVDEALRLFLELIGLGLTIVTGMDRKVYNSKSIKQNPIDLMISILMFIRGNEESETKSNRTVGNVVALVERHKEGLPVNIKSVGRHPFWIDDSGSQYEAVKEHPVYWSIAREAIEMFLAGDGIYTVKRYLDDKYPNGLKGKEWDYQVLKKMRDNRALIGERTINVAGATYKLDNYYPWLCKDEAEFLTLAERKQQNNYKAKKDKVEEIKLLSGLQVLRCSKCGGTMHSFMNHGSARYICTNGVHLQKNCSGWSISAQLVEHCTMISLLIGYMDKSRKDGIDTTAIEEEISRKATLITDLESRISNMAKAIAIAPEVSELAVQLNAFDLERKKAVLEVDKLKERLHSLKGKGSLEVDITDFLMLIQWSVFTNMEDADRNKIRKIISSIIESIIIDKTDGCITIKIKCHNKDEWLVFGGVNRKPFWAFTIEYSTNDAKDIEGEDFSNFVSNPLFQKAVEQLDSIKQSYLNLFETANTMLGVVGYSDIRGASFWPNTEQYERANVEYEGITYSIAMNGRVSKAITAALEATGLSRKAFIERYKV

SEQ ID NO: 55152 - DNA, 50 bp, Enterobacter sp Crenshaw; identical to SEQ ID NO: 46807
  source 1..50: mol_type = genomic DNA

SEQ ID NO: 55153 - DNA, 40 bp, Enterobacter sp Crenshaw
  source 1..40: mol_type = genomic DNA
atccacgaggtttttcgggcagcccagggagacgaagccg

SEQ ID NO: 55154 - DNA, 40 bp, Enterobacter sp Crenshaw
  source 1..40: mol_type = genomic DNA
atccacgaggtttttcgggttgcccagggagacgaagccg

SEQ ID NO: 55155 - DNA, 50 bp, Enterobacter sp Crenshaw
  source 1..50: mol_type = genomic DNA
tcatttatttttctattatgaattttccctgcttatcctttacccatctt

SEQ ID NO: 55156 - protein, 630 aa, Klebsiella pneumoniae
MPQLYSYIRWSTDRQDKGTTRNRQLAAAKVYAAEAGLEMVEIEDPGVSAFRGKNTNTGKLGDFIDAVKQGAIASDSWLYVENLDRITRQNVTTAQKLFIELLELGLTLVTGMDKRVYTLDSVNKNPTELMISLLLFSRANEESETKSNRTIGNVVALVERHQAGLPVNIKSVGRHPFWIDDSGSQYEAVKEHPVYWSIAREAIDMFLDGNGIYTVKRYLDEKYPNGLKGKEWDYQVLKKMRDNRALIGERTINVGGATYKLDNYYPWLCKDEAEFLTLAERKQQNNYKAKKDKTEEIKLLSGLQVLRCSKCGGTMHSFMNHGSARYICTNGVHLQKNCSGWSISAQLVEHCTIISLLIGYMDKSRKDGIDTTAIEEEISRKEILITDLESRIANMAQAIAIAPDVSALAVQLNTFDLERKKTVLEVDKLKERLHSLKGKGSLEVDITDFLMLIQWSVFTNMEDADRNKIRKIISSIIESIIVEKADGCITIKIKCHHKDEWLVFGGVNRKPFWAFTIEYSTNDAKEIEGGDSSNFVSNTLFQKAVEQLDSIKQSYLKLFETANTMLGVVGYSDIRGASFWPNTGQYERANVEYEGITYSIAMNGRVSKAITAALEATGLSRKDFIERYKV

SEQ ID NO: 55157 - DNA, 50 bp, Klebsiella pneumoniae; identical to SEQ ID NO: 46802
  source 1..50: mol_type = genomic DNA

SEQ ID NO: 55158 - DNA, 40 bp, Klebsiella pneumoniae; identical to SEQ ID NO: 5518
  source 1..40: mol_type = genomic DNA

SEQ ID NO: 55159 - DNA, 40 bp, Klebsiella pneumoniae; identical to SEQ ID NO: 32089
  source 1..40: mol_type = genomic DNA

SEQ ID NO: 55160 - DNA, 50 bp, Klebsiella pneumoniae; identical to SEQ ID NO: 55155
  source 1..50: mol_type = genomic DNA

SEQ ID NO: 55161 - protein, 630 aa, Klebsiella pneumoniae; identical to SEQ ID NO: 51091

SEQ ID NO: 55162 - DNA, 50 bp, Klebsiella pneumoniae; identical to SEQ ID NO: 46807
  source 1..50: mol_type = genomic DNA

SEQ ID NO: 55163 - DNA, 40 bp, Klebsiella pneumoniae; identical to SEQ ID NO: 5518
  source 1..40: mol_type = genomic DNA

SEQ ID NO: 55164 - DNA, 40 bp, Klebsiella pneumoniae; identical to SEQ ID NO: 32089
  source 1..40: mol_type = genomic DNA

SEQ ID NO: 55165 - DNA, 50 bp, Klebsiella pneumoniae; identical to SEQ ID NO: 55155
  source 1..50: mol_type = genomic DNA

SEQ ID NO: 55166 - protein, 490 aa, Microbacterium saccharophilum
MTPKKPAPRAAIYARQSVAEPEGIKRQIAACRALAESREYDVVAEYVDDNVSGYKARGEGTGFARLLDDARAGRFDVLIVRKLDRLGRSLSALEALTAARVNTVTTDGALDLASPSGRLVANVLTSVSRAESEIKAERRVFANADRRLSGIPTSGRVPYGYRWVPTAERDGDGHAYVYDGGRAGDVLAIYDAFLAGVPLGSIARDLNAAGKRTIGTKRHPEGVPFTPTTLRRILMSPYYAGLLPLPSQDGEQRPYDQREISRETCVPGRWEPIVSVETWEEAKARLEHPERKTSPGPSRKWLLSGLAVCGTEGCGKPIRAGGGEAGIHSYRCASMAHFMRRGVPLDDFVERVVIARLSRPDAVDLLDDRERHDVDELRAERRRLETAVRQAGDDEMDGLIDRAERVRLTRRANARIAELDEKLRAGVDTTALAEVVTSDDVAAAWHGLTLGKRRAILEALATVVVFSVGQGNRRRMSDEALARTVRFDWH

SEQ ID NO: 55167 - DNA, 50 bp, Microbacterium saccharophilum
  source 1..50: mol_type = genomic DNA
atccgctttatttcctcaacagtggcgactgttgacgtattagggcagac

SEQ ID NO: 55168 - DNA, 40 bp, Microbacterium saccharophilum
  source 1..40: mol_type = genomic DNA
gtacgccatcgcgacgatggccgccgtcgcgttcgccggc

SEQ ID NO: 55169 - DNA, 40 bp, Microbacterium saccharophilum
  source 1..40: mol_type = genomic DNA
gtacgccatcgcgacgatgaacgccgtcgcgttcgccggc

SEQ ID NO: 55170 - DNA, 50 bp, Microbacterium saccharophilum
  source 1..50: mol_type = genomic DNA
ttccacttttgatgttcaacagtgaagactcctggcagcatggcacagag

SEQ ID NO: 55171 - protein, 532 aa, Vibrio vulnificus
MKAGAKIYLYFRYSDMKQENGDSIRRQRECAQRVADKYKLEIDEESVITDRGVSAFYGNNAKKGNLAGFLKSVEQGEIEKDSILIVESFDRLSRDAPRDAHKLFDKLIDNDITIITENDGLEYNKETLAREPSRLFMMIGTMLRAHEESLTKQKRAIESIKGKVKEFRESGNVKSIGTVPHWLDYIDGSYVLNSRAENVKLIIDMYLNNEGLKSISRKLAEKGIKSPTGKDRWGITTIRTILDNKALYGFKEFEISYLVNGRKVKENFELESFYPSLISKVDYLVIQEKKNARSNSRESYGEVTYLLSSYGKGKSVCAKCGYATGTQTQKQINRKGKYMQSVMRLHCKKHSESGDCCKSFKCAELEKHFIYSIYHELDPEFLMKYKSKKVNKEGLKAEISEIDRQIKVLVSSMIELNNADLTTVFQEKLSDLNEKKIKLSNELNQTNDTKNEGDLKELKTLALKCLDVKNSVERKKLKNIIMQVLDKIVIDFETKSLSIKFTNGNVMNVYFDEKSKSYCTSLFRSKIIRRKK

SEQ ID NO: 55172 - DNA, 50 bp, Vibrio vulnificus
  source 1..50: mol_type = genomic DNA
gcagtagacattgtagatttgtgttcacaccaatttacaatcttaactgc

SEQ ID NO: 55173 - DNA, 40 bp, Vibrio vulnificus
  source 1..40: mol_type = genomic DNA
gaaatagccaaatgagccatcggtccaatggatatcctgc

SEQ ID NO: 55174 - DNA, 40 bp, Vibrio vulnificus
  source 1..40: mol_type = genomic DNA
gaaatagccaaatgagccaatggtccaatggatatcctgc

SEQ ID NO: 55175 - DNA, 50 bp, Vibrio vulnificus
  source 1..50: mol_type = genomic DNA
tcagataaccaaatatatttcagtatacaccaaaataaacacttcactgc

SEQ ID NO: 55176 - protein, 626 aa, Vibrio atypicus
MSVDTEQIHQEKIAYSYIRYSSKRQEFGDSFRRQTQQTKDFCEKFGYTLANQFEDLGVSGFKDDQEALQAFIRDCESGKIKKGSLLIVESLDRLSRKQTKIALRQLLQILEYVDVYSHHEEKFYRSEADNSDNQMIDLMMSIMVMSRAHNESFAKQKRLKEVWATSRDNAIKGVKKAKGSLPHWLSLSPDATKFIVKEERTDIIFTMFELSASGMGSTQIIKFLNKNIDKYPSPSPKTKLWVRSTVKNILKDKRLLGEHQFFKTDPTNIKKKIPAGDVIPDYFPQVIDEELFYEVQAGMRSRKIKAGRVSSTHFPNVFRHILKCGSCGASMSYVNKGLMNAKVRKPTKYLACSVAKKSDECSQNKHFRYDPIEHMMIHLASANGFMPKVESSADLTVRYEKLLDTHEKEQKQLEMLLSRDLSSTTVLNKIEALDSSVKHIASEIQMLEDLIAANKGQYEYEDLYRDLVLLDDEVMKYSNRAQFNAHLQQDIKEAVLFHEYDTPYLAFKMKDGVVHTAMLDQQTTFGGCTLADGSNTFKRLEGQNSVEDDERLWELLKYFGDIADDLKQADLYEHHRKEVQEVMQKLSFKISKYVQEPFNEGLFEEIYQLSDRVYEEIGKKEKIFIG

SEQ ID NO: 55177 - DNA, 50 bp, Vibrio atypicus
  source 1..50: mol_type = genomic DNA
ttagtagtttattgacataggttgataaacttatgtcaatagactactat

SEQ ID NO: 55178 - DNA, 40 bp, Vibrio atypicus
  source 1..40: mol_type = genomic DNA
acacggaggagcgacatgaatgacggctaatccacctaaa

SEQ ID NO: 55179 - DNA, 40 bp, Vibrio atypicus
  source 1..40: mol_type = genomic DNA
acacggaggagcgacatgactgacggctaatccacctaaa

SEQ ID NO: 55180 - DNA, 50 bp, Vibrio atypicus
  source 1..50: mol_type = genomic DNA
taaagagtttatgtcaatatgatgctaaaattatatctaatgactagtat

SEQ ID NO: 55181 - protein, 597 aa, Coprococcus eutactus; identical to SEQ ID NO: 48031

SEQ ID NO: 55182 - DNA, 50 bp, Coprococcus eutactus; identical to SEQ ID NO: 38587
  source 1..50: mol_type = genomic DNA

SEQ ID NO: 55183 - DNA, 40 bp, Coprococcus eutactus
  source 1..40: mol_type = genomic DNA
gctagacttgctgctgctcaggctgcaatcgctaacaagt

SEQ ID NO: 55184 - DNA, 40 bp, Coprococcus eutactus
  source 1..40: mol_type = genomic DNA
gctagacttgctgctgctcgagctgcaatcgctaacaagt

SEQ ID NO: 55185 - DNA, 50 bp, Coprococcus eutactus
  source 1..50: mol_type = genomic DNA
tcccatattctaccttatcttccggaactcctactgtgtgtaagttggag

SEQ ID NO: 55186 - protein, 543 aa, Ralstonia solanacearum
MSKARVYSYLRFSDPKQAAGSSADRQIEYARRWAAERNLELDDTLSLRDEGLSAYHQRHVKQGALGVFLSAAEGGRIAPGSVLIVEGLDRLSRAEPIQAQAQLAQIVNAGITVVTASDGKEYNRERLRSQPMDLVYSLLVMIRAHEESDTKSKRVKAALRRQCQQWIDGKWRGIIRSGRDPHWVEIRDGQFALVPERVAAVREALALFSRGHGKTKILRTLTERGLSMSNAGNHGTFIYRLVRNPMLMGTRVFEIDKEEFRLEGYYPALLSPEEFAVLQHLADERKGTRVKGEIPGLLTGLGITHCGYCGAAMVAQNYMGRARKADGTPQDGHRRLHCVSDSQNSGCVVAGSVSIVPIERAIMTFCADQMNLTKLVEGDDGSAAVAGRLALARQKARGLQAQLERLTTALLADDGNAPPATFLRRARELEEELSSERRAIESLEREVLASANTTAPAAADVWAKLTHGVLALDYESRVRARQLVADTFSRIVIFHAGFRPGEGTEKRIGIQLVAKHGNVRMLDVDRKSGDWRAAEDFDLRALT

SEQ ID NO: 55187 - DNA, 50 bp, Ralstonia solanacearum
  source 1..50: mol_type = genomic DNA
agtgtattttaagcatcactcgggcacccaagcgacaccattcctatact

SEQ ID NO: 55188 - DNA, 40 bp, Ralstonia solanacearum
  source 1..40: mol_type = genomic DNA
atcgacgagtgccttggggcacccaagggatacaaagccc

SEQ ID NO: 55189 - DNA, 40 bp, Ralstonia solanacearum
  source 1..40: mol_type = genomic DNA
atcgacgagtgccttggggagcccaagggatacaaagccc

SEQ ID NO: 55190 - DNA, 50 bp, Ralstonia solanacearum
  source 1..50: mol_type = genomic DNA
agaggaagtattaaagcacttgttagccaaagccacactattcctatact

SEQ ID NO: 55191 - protein, 578 aa, Streptomyces rimosus
MIDTRNPARPSRTFSRSSVAPALQAWLDEGGTVEEWLNGRTPLISYARISADRLDGDAIGIGRQHKNNTRNAELHDCAVVLHYEDNNITAAKREVERPAFIQMCRDITHGKEEETGIPVKGCIAVERKRVYRLPRDFIAFQDALVMVGDGIFIDDKTSLDLVNDDGTIIAGLVTSGTGEAEVKDIRKRTVRNAADRAEEGKVYGGPRRFGWLGASKDPYRLGNKHKDTVEWPHLIDMIKARYAGRSWRFITREINKKGVLTARGGRFTEQAVKGIITNPAWWGGRILNGELVTDRTTGEPVIGEWDHADEEIDGVGYETWKSIMAGVKANRMHRGMKRDEEAQQTEEELRTRTYLYSGTLRCGRINDFEEICYSKLSGNKATGKNAKYGDYYRCGDVNCKGVGRRVAPVDEFLEGLTLAYLDKHFVGTKVKTIPWRGKEKLANLRKQRRDIKDSVATGSADWSDVHDLLMRLNRTIQTLEKEEKDHLKAESKRNLLRGWSREKWGRMELDEKREVIAQVLTAVVVLPVPEGVSDKAPFDPNLLKVSWRKEALAAKDKEEKAVTSPDQDPAGETAPVAA

SEQ ID NO: 55192 - DNA, 50 bp, Streptomyces rimosus
  source 1..50: mol_type = genomic DNA
gactgttgtttatgatcatacgggtcatcgtatcatcgctggtcacagtg

SEQ ID NO: 55193 - DNA, 40 bp, Streptomyces rimosus
  source 1..40: mol_type = genomic DNA
ccctttcgggtgggaccagtcatcgtatttaggccggtgg

SEQ ID NO: 55194 - DNA, 40 bp, Streptomyces rimosus
  source 1..40: mol_type = genomic DNA
ccctttcgggtgggaccagctatcgtatttaggccggtgg

SEQ ID NO: 55195 - DNA, 50 bp, Streptomyces rimosus
  source 1..50: mol_type = genomic DNA
aactttatttctgaatcatctggcctatggtatccttcagggtcccagtg

SEQ ID NO: 55196 - protein, 568 aa, Pseudomonas helleri
MIGCYDLPSDLLRLFIMSKAYAYVRYSRAIQGTGDSENRQLTALELFETSTGTKIVEVVYDKGKSAFRGDNARSGNFKEMLDRMHSGAIRQGDYLVVESIDRITRQRVLDGVELLQGILKKGINIYTTVDKKTYSYNDPSRDFENLLMISLIAKRANEESETKSDRLLSAWKARKTKAENGEVIIKKGKSIPYGLRVVNDKFVIHEEEQKEIKKLFELLLKFGMNTALIKINETSNKKWSNGSLNKIIKHKTVIGCMTTHRIEYTADGKAKKILTGFIENYYPNIIKPSLFYKVIDVMSKRKQKNWSGRRAEQDFNIFKHCIFCSECGGKLYYDHRGSRYKDKIYPFFKCDNARIQKHICAAGNIRFEYVFGSLLECINMANRLANDFPKGFNGVTTQAIFLNSRVENLLASSDTSQDIEFENKQNELTSCRTKLSSLNAILTGADFKLPQVMLKEISNLEVRIEKLKIELELLATSVEVESLDIENSQSIIDLFMTDEGRAKLNTFFKRHEISFFVSHDKSTKQTNFEMRNLKGERVTRAIKTYPLKNILGKFGLGDLQTMFDLSVN

SEQ ID NO: 55197 - DNA, 50 bp, Pseudomonas helleri
  source 1..50: mol_type = genomic DNA
ctctgtaaatacatttacccaatcatgattgggtgttatgatttgccgag

SEQ ID NO: 55198 - DNA, 40 bp, Pseudomonas helleri
  source 1..40: mol_type = genomic DNA
gcccaacgacaaaccgctgatgattcggttgcgccgtggg

SEQ ID NO: 55199 - DNA, 40 bp, Pseudomonas helleri
  source 1..40: mol_type = genomic DNA
gcccaacgacaaaccgctgaagattcggttgcgccgtggg

SEQ ID NO: 55200 - DNA, 50 bp, Pseudomonas helleri
  source 1..50: mol_type = genomic DNA
atctgtaaacaaaatttccctatgaagattaaatgtgttaatttgtgcag

SEQ ID NO: 55201 - protein, 532 aa, Pseudomonas syringae
MTITTPLPRSFSDVFQSDETINVYSYIRFSSKAQKLGFGEIRQLEQLNRFFDQYPQARQVERYEDLGVSAFKGKNLKTGQLAKFVERIKSKEILPNALLLVESFDRISRMGGYDALELIISIIQADCAIYTLFDNRLYSKRKKDSSVDISLIQNILERANDESRAKSERISDAKARNLEKGLNGGIITKRCPFWISFIGGKFVLNENAEAVKKATELCFDFGFQVVAQELNKQGYPKKYSASSIGKFLHSHALYGSFLALKLDENGQRSIVNKEVRNYYPALISEAEFHRISAKLKERLDPRLAGRKSDDFKNILRGLVFCKCGSTFRYHAQKSQYVDLVCSASMIGKCEFAKLGKGVRHRYALVEQLFLIFHAQIPFHKIIIKSDDIKALEKEYENVSGLIILKEKALANNFSILEKSSESAQKYIMSRIDEVSLELDKLKLDEHRLKVQINSLHIASKSELKVIEIYRLLVTEKGRVRINNFLHSQKVKLIITPIMKKYFSIEIVHDENHIDTIDVTPTGYTARINAHLK

SEQ ID NO: 55202 - DNA, 50 bp, Pseudomonas syringae
  source 1..50: mol_type = genomic DNA
attctacgaatagcgccgttcattgcaatgaagcaggttattcgtagaaa

SEQ ID NO: 55203 - DNA, 40 bp, Pseudomonas syringae
  source 1..40: mol_type = genomic DNA
ctccagcatgccgatcaccgcattcatcggggtgcggatt

SEQ ID NO: 55204 - DNA, 40 bp, Pseudomonas syringae
  source 1..40: mol_type = genomic DNA
ctccagcatgccgatcaccatattcatcggggtgcggatt

SEQ ID NO: 55205 - DNA, 50 bp, Pseudomonas syringae
  source 1..50: mol_type = genomic DNA
gttttaggatagaagatgttgattataaataagcaataacatggtagaaa

SEQ ID NO: 55206 - protein, 515 aa, Bacillus sp FDAARGOS 235
MKTAIYLRKSRADLEAEARGEGETLAKHRTTLLKIAKEMNLNVLSVREEIVSGESLVKRPEMLALLEEIEDNKYDVVLCMDMDRLGRGGMKEQGIILETFKRSNTKIMTPRKTYDLNDEWDEEYSEFEAFMARKELKIITRRMQRGRVASVEAGNYLGTHAPFGYDIHRLNKRERTLTINSEEASVVRMIFDWYANEDMGANAIRSKLNDLGYKSKLGNDWNPYSILDILKNNVYIGKVTWQKRKEVKRPDAVKRSCARQDKSDWIIADGKHEPIIPESLFEQVQEKLNSRYHIPYNTNGIKNPLAGIIKCAKCGYSMVQRYPKNRKESMDCKHRGCENKSSYTELIEKRLLEALKEWYINYKADFEKHKQDDKLKETQVIQMNEAALRKLEKELVDVQKQKNNLHDLLERGVYTVDMFLERSNVISNRITEITSTMENLKKEIKTEIKKEKVKKDTIPQMEHVLDLYFKTDDPKKKNSLLKSVLEKAVYKKEKWQRLDDFELVLYPKLPQDGDI

SEQ ID NO: 55207 - DNA, 50 bp, Bacillus sp FDAARGOS 235
  source 1..50: mol_type = genomic DNA
tgtcgtcaccttgttggtgtaattaggttgttaccaacagggtgatgaca

SEQ ID NO: 55208 - DNA, 40 bp, Bacillus sp FDAARGOS 235
  source 1..40: mol_type = genomic DNA
tgtggccattaggcgcatgagatttaccccgtttaatcct

SEQ ID NO: 55209 - DNA, 40 bp, Bacillus sp FDAARGOS 235
  source 1..40: mol_type = genomic DNA
tgtggccattaggcgcatgaaatttaccccgtttaatcct

SEQ ID NO: 55210 - DNA, 50 bp, Bacillus sp FDAARGOS 235
  source 1..50: mol_type = genomic DNA
tgtcctcccaagattcatgtaataaagtttttaagtccaaggtgatgata

SEQ ID NO: 55211 - protein, 538 aa, Pseudomonas chlororaphis
MPVAFSYIRFSSAEQAHGDSLTRQQEYVAKWLLAHPEYVLSGASFQDLGISGYSGKHLENGFGKLLAAVENGVIKSTDVVLIEAIDRAGRLEPSVMLHLLTGIVNAGVKLITLDDGVTYSNDPNNSNNLFLLVAKVQQAHQYSDALSRRIKDAYTRKREKAAAGNGVKRHTPIWLTSDGELVEGLASIIVQVFEDYADGLGERRILSRIRSKHPLVEATNPTTLKRWLRNPTAIGRWNDIEDVYPPVVSKELWYRVQKRLTEGYRPRSAPSKYLLSGLVRCGRCGTNYCVVDTKRSPAVMLCYRRHRKGADGCANGRSIPMHVLDFVRSRTMYGAMQRAAASQNLTSGEKRLIEIEGELAELQRQSSNLADSLAEFGMLVPIRSKLEQVTTSIQKLEQERALLKVAPAPVTLGDMIDLQHTLLDDDQMRLNALLQSVGYVIVCDGTTITVDEPHLQTEGERQVYEYRGSHRATETYRLIENNHTEHHLDMPNSKRVEVMIEQDRKDEAEFEQLVTDGKVSPIVYQYDEGTDKFILMPR

SEQ ID NO: 55212 - DNA, 50 bp, Pseudomonas chlororaphis
  source 1..50: mol_type = genomic DNA
catcataattacgcagatacttgccagcataagtccgcgatgttatgatc

SEQ ID NO: 55213 - DNA, 40 bp, Pseudomonas chlororaphis
  source 1..40: mol_type = genomic DNA
aaacaaaaccccggccaggcaactggtcggggttttgtgt

SEQ ID NO: 55214 - DNA, 40 bp, Pseudomonas chlororaphis
  source 1..40: mol_type = genomic DNA
aaacaaaaccccggccaggttactggtcggggttttgtgt

SEQ ID NO: 55215 - DNA, 50 bp, Pseudomonas chlororaphis
  source 1..50: mol_type = genomic DNA
caacaaaatactagacatcattgtttggattattccttcacattatgatc

SEQ ID NO: 55216 - protein, 506 aa, Escherichia marmotae; identical to SEQ ID NO: 23231

SEQ ID NO: 55217 - DNA, 50 bp, Escherichia marmotae; identical to SEQ ID NO: 40222
  source 1..50: mol_type = genomic DNA

SEQ ID NO: 55218 - DNA, 40 bp, Escherichia marmotae; identical to SEQ ID NO: 31363
  source 1..40: mol_type = genomic DNA

SEQ ID NO: 55219 - DNA, 40 bp, Escherichia marmotae
  source 1..40: mol_type = genomic DNA
gcggcgaggtaaatcaaggaacattgaagtcataatcgtt

SEQ ID NO: 55220 - DNA, 50 bp, Escherichia marmotae
  source 1..50: mol_type = genomic DNA
aaatcaaatttgttttattttataaacattttatgtgttacattcagaat

SEQ ID NO: 55221 - protein, 506 aa, Escherichia marmotae; identical to SEQ ID NO: 40351

SEQ ID NO: 55222 - DNA, 50 bp, Escherichia marmotae; identical to SEQ ID NO: 40222
  source 1..50: mol_type = genomic DNA

SEQ ID NO: 55223 - DNA, 40 bp, Escherichia marmotae; identical to SEQ ID NO: 31363
  source 1..40: mol_type = genomic DNA

SEQ ID NO: 55224 - DNA, 40 bp, Escherichia marmotae; identical to SEQ ID NO: 55219
  source 1..40: mol_type = genomic DNA

SEQ ID NO: 55225 - DNA, 50 bp, Escherichia marmotae; identical to SEQ ID NO: 55220
  source 1..50: mol_type = genomic DNA

SEQ ID NO: 55226 - protein, 550 aa, Clostridium leptum
MTANTYKPEQITALYARLSQEDALDGDSNSIVNQKAVLSKYAADNGFSNPVFFIDDGVSGVTFDRPNFNRMIAEIEAGNVGTVIVKDMSRLGRDYLKVGYYTEIFLVERDVRYIAINDGVDSAKGDNDFTPFRNLFNDFYAKDTSKKVRAIKKAQGMAGEHLTKPPYGYKVDPNDKKQWIVDEEAAAVVKRIFDLCVAGKGPMQIAKILKTEKTLTVKAYYAKRKDKPLPENPYHWNDNSVVGILERMDYCGHTVNFKSYSKSHKLKKRIPTTKEQQAIFRNTHEAIVEEAVFERVQELRANKRRPTKAERQGLFSGLVYCADCGSKLHFATCKNFNGSQDHYRCENYKSNTGSCTAHFIREEVLKTIVLQRIFAVTALFYEDISAFMELIRKQRFDEAEKEMKRKRREVGQARKRIAELDRIFKRIYEDDINGTISHERFLKLSAEYEAEQRELTEKVNAEQKEVDTYEQNKSDFDSFALIIRKYVGITELTPTIVNEFIKKIIVHAPEKVNGKRFQKVDIVFNFVGEIHLPTDPQTEQEATNEQEKTA

SEQ ID NO: 55227 - DNA, 50 bp, Clostridium leptum
  source 1..50: mol_type = genomic DNA
ttacttccttgtaaccgaaaacacttgattttacagtgataaggaagtat

SEQ ID NO: 55228 - DNA, 40 bp, Clostridium leptum
  source 1..40: mol_type = genomic DNA
ctcaaaatagcttaaacccttgcttttacgccgcttttga

SEQ ID NO: 55229 - DNA, 40 bp, Clostridium leptum
  source 1..40: mol_type = genomic DNA
ctcaaaatagcttaaacccaagcttttacgccgcttttga

SEQ ID NO: 55230 - DNA, 50 bp, Clostridium leptum
  source 1..50: mol_type = genomic DNA
ttattttgttcctcctgaaaacagaagattctaacataatgaggaagtct

SEQ ID NO: 55231 - protein, 506 aa, Lysinibacillus sphaericus
MYRPVEKCDILQSNKPKALYLRKSKKKKGKTEEETLESNMQRLLEFCKNNKIDDYVIYNDFVAKSTKLDRIEYRKMLNACLQGVHDTIVVLEESRLYRTVYEQTNVYEDLKGTDIVIFSDREGIINPNDRTQFLANIVRGAVNEHELHNYAHRMNQTKLQTAKNGSYVNKIPFGYIKERNNLIPHPIESKAFRLIVEKIIEGYTIKEVIIELNLRGYTTKQGKKFKAATTITRLFDNKVYLGESHYNSKMFGEDVIIRDTHEPLMTIEEYQKIKKKIASRSRNTQGIRYTKINTPLDRLMYCGICGHRLPIHKSYVNKEGVISYQISNCKNSYGENFEYKCPHKSVSLNFLLPHFYKAINNYKEIIGEELLNTSIDNRNDTKLSILQEIKLFNKKIKEKEEEIKNTDMYLIKGILKETKYVNIMPQLENELQELKSLLVDSNKKLKTVSEKSSVDLKKKALDFLQTVENIETEEQNRLFRLLFEKVVLINTDDKFSIEIIEKDTSL

SEQ ID NO: 55232 - DNA, 50 bp, Lysinibacillus sphaericus
  source 1..50: mol_type = genomic DNA
aagcttagaaagaaacgttttctagtgaaaaagcacattattctaaatgg

SEQ ID NO: 55233 - DNA, 40 bp, Lysinibacillus sphaericus
  source 1..40: mol_type = genomic DNA
cacggaattgctttatctagtgatattgtgattcaaggcg

SEQ ID NO: 55234 - DNA, 40 bp, Lysinibacillus sphaericus
  source 1..40: mol_type = genomic DNA
cacggaattgctttatctatggatattgtgattcaaggcg

SEQ ID NO: 55235 - DNA, 50 bp, Lysinibacillus sphaericus
  source 1..50: mol_type = genomic DNA
aaggttagaatggaaggaattctatggaaatagaacttgtgtgcaaagga

SEQ ID NO: 55236 - protein, 471 aa, Blautia sp
MSSKVACLYIRVSTEDQTELSPDAQKRLLLDYAQKNDMIVSGDFIFTESVSGRHAQKRPEFQKMIALAKQPSHPIDVILVWKFSRFARNQEESIVYKSMLKKDNVDVISVSEPLIEGPFGSLIERIIEWMDEYYSIRLSGEVLRGMKEKALQKGYQTSPCLGYTAVGHGKPYIINEAEYAIVSYIMDLYDNQNLDETAIARRCNDLGYRTKRGKLFERRSVDRILGNPFYCGTVVWNGVEFEGNHEVRLSRERYEKRQKLITSRKRPVKARNVSACKHWLSGLLKCSVCGATLSYTGNNKCPYFQCWKYAKGFHKTSVALSVKKAEEAVISYFDQILDGAEFTYVCQKKKTDHSLQIEQLQKEIGKLTMRESRIKEAYEAGVDTLEEYKNNKDRLVSDRLELTAALSQLLQEEQSEQPNTEEVLKEIRSVADVLKNPDVSYEEKGNLIRSVVEQIIYDKESGKMSFDIIIS

SEQ ID NO: 55237 - DNA, 50 bp, Blautia sp
  source 1..50: mol_type = genomic DNA
tattatagggtactgcactctggtggcccggatagcaataccctataata

SEQ ID NO: 55238 - DNA, 40 bp, Blautia sp; identical to SEQ ID NO: 51948
  source 1..40: mol_type = genomic DNA

SEQ ID NO: 55239 - DNA, 40 bp, Blautia sp
  source 1..40: mol_type = genomic DNA
tatcatgagccagtacggtgtcccggacggtgagatcggc

SEQ ID NO: 55240 - DNA, 50 bp, Blautia sp
  source 1..50: mol_type = genomic DNA
tactatagaaagaggcagtctggtgtcctggaaagagtacagctattgga

SEQ ID NO: 55241 - protein, 555 aa, Bacillus subtilis
MELKNIVHSYNITNILGYLRRSRQDMEREKRTGEDTLTEQKELMNKILKSIEIPYELKMEIGSGESIEGRPVFKECLKDLEEGKYQAIAVKEITRLSRGSYSDAGQIVNLLQSKRLIIITPYKVYDPRNPADMRQIRFELFMAREEFEMTRERMTGAKYTYAAQGKWISGLAPYGYRLNKKTSKLVPVEEKAKVVQFIFNIFLNGLNGKDYSYTAIASHLTKLQIPTPSGKKRWNQYTIKAILQNEAYIGTVKYKVREKTKDGKRTIRPEKEQIVVSDAHAPIIDQEQFQQSQDKISNKVPLLPNKNALELSELAGVCTCSKCGEPLSKYETRRTRENKNGTKSVYHVKSLTCKKNKCTYVRYNDVENAILDYLSSLSNLDNKTLTKHITSMISKYEDVNSNVKTKKQMSEHLSQKEQELINKENFIFEKYESGIYTDELFLKRKAVLDEEFKELQIAKHELNGTQEAQSEIDSNTVRNNINRIIDQYHIESSTEKKNALLRMVFKEVIVTMTQKRKGPIPAQFEITPILRFNFSLSTSPSLIVPQNTVNILKNR

SEQ ID NO: 55242 - DNA, 50 bp, Bacillus subtilis
  source 1..50: mol_type = genomic DNA
cagtaaatatcttaaaaaaccgataaagccgtttattaagatacttacta

SEQ ID NO: 55243 - DNA, 40 bp, Bacillus subtilis
  source 1..40: mol_type = genomic DNA
gattaatatcagtaccgataaagccgtttccccggtaaac

SEQ ID NO: 55244 - DNA, 40 bp, Bacillus subtilis
  source 1..40: mol_type = genomic DNA
gattaatatcagtaccgatccagccgtttccccggtaaac

SEQ ID NO: 55245 - DNA, 50 bp, Bacillus subtilis; identical to SEQ ID NO: 22490
  source 1..50: mol_type = genomic DNA

SEQ ID NO: 55246 - protein, 625 aa, Burkholderia pseudomallei
MPRAYSYVRFSTPEQSKGDSLRRQQELSEAYAAEHGLTLDTTLTFHDLGVSAYKGSNVERGRLGDFIEACESGLVERGSYLLVESLDRISRSEVDKALRLFLSILDHGIVVVTLTDGRVYRTGGADVSMDLIISITVMTRAHEESATKSKRQRAAWNNKRANIGTMKLTARSPLWLKLNADRTEFDFIPERVEVVKEIISLAKNGFGQLAIAKMLNERGTPAFSGEKNAWHSSYIQKILTSKQLYGEFQPGETLNGKKIISGTPIDSYYPAVITKDEFYSLQAFRAQNAVGGGRARKGKTVPNLLSGLLRCGYCGRSNMVIAGAAAKRVKTPEGETIRPPKKVLVCDAARRGLGCYAVQWGYNEFEAAFLTFCRGLSLDALLADLRNDNGPQPVKLEDQLHAEEQKIADAQKAIEKVFELYESGNGPAKDVVGQRLNRLTEEKSNAEAAKERLLIEIQQRKDSGTDSREVARVTKSLIEQIASVTDEERFRVRAALAAQLRRFIDMVELHGAGRLVTKEFIKKQKAGLIEAGMSKADATKYCDEHYQTEPKRQGKGDRGRFASRANNGRFFVIKTKHGGFRVVYPNFDDPTLAIVEGGFNDGGPGLSGQDDLLPALLNEIKNEKN

SEQ ID NO: 55247 - DNA, 50 bp, Burkholderia pseudomallei
  source 1..50: mol_type = genomic DNA
atgtgtgttcttcgccacatcaccgcaaattgccggttatgaacacataa

SEQ ID NO: 55248 - DNA, 40 bp, Burkholderia pseudomallei; identical to SEQ ID NO: 24068
  source 1..40: mol_type = genomic DNA

SEQ ID NO: 55249 - DNA, 40 bp, Burkholderia pseudomallei
  source 1..40: mol_type = genomic DNA
cggcacgagccatctcgtcacgatttccgggctgcacgtc

SEQ ID NO: 55250 - DNA, 50 bp, Burkholderia pseudomallei
  source 1..50: mol_type = genomic DNA
ttgtgatctgcccgcctcagccccacaaagtgccgggattacagacataa

SEQ ID NO: 55251 - protein, 629 aa, Oleidesulfovibrio alaskensis
MAVDNTHNPHTHDHTATTATTSNTATAHYSHLKPKAYSYLRFSTPDQMKGDSFRRQTELSRMYAEENGLDLDDTLTFQDLGVSAFRGKNAEEGELGAFIEAVDQGKVKRGSFLLVESLDRLSRQSPYKAFLQFSNILNRGLSIVTLQDGKVYSAGSNGNDLAFSDLMVSIAVMQRAYEESLTKSRRLSEVWKAKRRKAADGSLKLTSRCPEWLKLDKKNNTFHVIEERAAIVQRIFEMTLDGIGKRVIAATFNAEGIKPFGRGKGWHYSYVTKILENEATIGRYQPHKMQEVQGKRKRVPVGEPIENYFPAVISEETFLKAKRMRKERKIAGANVGNRYSNLFSGLAVCGVCGGVMHFENKGKPPKGGTYLVCSNARMKLGCKRYSWRYPQAQAHILMNLTELNYRELFPTLYEKSRESVERLQDKLLVMEERLKATEAKLERLTNILIERPHSSTLLTRLDALEEEKQGLIVGIEKAARDLSEEQERVEGAGKEYEELEDALQRYIEIEEAGEPDAILEARRRLFQLLKQVIESITFMPASSNDKDEKPELDYQGNPIHGTIEIRFRGVTDYSRRIKVAGNQEDSRGFKIIFNEKGEVSEEEEQTIIVDAQWPPRDRIVTASFVADLL

SEQ ID NO: 55252 - DNA, 50 bp, Oleidesulfovibrio alaskensis
  source 1..50: mol_type = genomic DNA
ttggggtattgcgtatatattttgagcaagttgtgtcttgaatacccgaa

SEQ ID NO: 55253 - DNA, 40 bp, Oleidesulfovibrio alaskensis
  source 1..40: mol_type = genomic DNA
gccgggagggccgatcatcagcatattgtgcgcaccggcg

SEQ ID NO: 55254 - DNA, 40 bp, Oleidesulfovibrio alaskensis
  source 1..40: mol_type = genomic DNA
gccgggagggccgatcatctgcatattgtgcgcaccggcg

SEQ ID NO: 55255 - DNA, 50 bp, Oleidesulfovibrio alaskensis
  source 1..50: mol_type = genomic DNA
tttagctatctcatatatattttgtgaaagttgtatttacaatatgcctt

SEQ ID NO: 55256 - protein, 557 aa, Acidovorax sp KKS102
MNHTVMPQAVSYIRFSSGSQAKGSSVERQKEAFDLWLGQHTQYIESTLSRTDKGVSGYTRANLEKGRGLHDLLMCIEAGQIKSGDAVVVEAIDRLGRSDFFSMLAVLQQLLVAGVSVVTLEDRKTYTHESVNNADVYMLVAKIQAAHDYSKRLGTRISAAYERKRKDARAGKDIRLHTPFWLNTDGTWRDDPAVIVRGAIAMYLGGKGTREIARKLSGMHAELSELHPRTIKRWFSSKALIGEWENKGDPIAGVFDPLIDESTYLELQVELKRRATKPAPADKYLMSGMVWCAECGGRFQIRRQKPKPTINAPLGSEEYAKKPVILYANCKTYLQKGTCKNKSTWPYEALEFIYRQVAVEALYDIAMGIAEDTRSKDLESYTASIGVLRIKHERASSLYMASGEKAHLDLVIDYRSKIEEFENKAELLRASLLSQSKQDASIAADAYQSRQRGGPIQEQLKATVDELTSRPAYEIAFLLKRYIEIKIKGKEALSTYDGFTYTLLRRAQKYLCYFVSCESPDTGMVYFAIERGVDNPLSALSIERLFRKLESRLGERE

SEQ ID NO: 55257 - DNA, 50 bp, Acidovorax sp KKS102
  source 1..50: mol_type = genomic DNA
gttcatactaagtgggcagacttctgagacaatgcactcataccatgaat

SEQ ID NO: 55258 - DNA, 40 bp, Acidovorax sp KKS102
  source 1..40: mol_type = genomic DNA
gttcatcgccgcgatcatctggaagcgtgccggaaattcc

SEQ ID NO: 55259 - DNA, 40 bp, Acidovorax sp KKS102
  source 1..40: mol_type = genomic DNA
gttcatcgccgcgatcatcccgaagcgtgccggaaattcc

SEQ ID NO: 55260 - DNA, 50 bp, Acidovorax sp KKS102
  source 1..50: mol_type = genomic DNA
gttcttacctgagctgcaaactgtccagagcatgcagtcaaaacaagaat

SEQ ID NO: 55261 - protein, 638 aa, Citrobacter braakii
MKPKLYSYVRFSSVKQREGNSLERQQDTALKIAARYNLELDTTAFHDLGMSAFKGKNAHEGKLSEFIKQIGVKVPVGSWLVVENLDRISRDDAWSALDIFKSILSKGIVVVTGMDEKVYKYADVKNNPTDLIISLLMFTRAHDESLTKKNRVEAQARSLIRHNLTRELGTPAKAIESVGQNVWWVDTKSGYVTPHPIYFAVAQKIIELKQNGETLLGIQRYLNEHYPAPKKRVYKDKTGQALTPKTELWGKHLIRTFLNPTVHGQKIFTLDKRDESGAIIYDSESDEPLKETFIIPDYYPALMSEVDYLTLSKLDRHRAVTRSSSTYPEGNPEPEIPLLSGIGILFCGKCGSFMFKSGSSENKYRYICGSKIVQGKPCGKKGFTSYQLEHTVLQLIADHVWNNHQEDKTAWYESEIEKASEAVKKLLKLATLTDDIEELADQINANKQKKITLEKEFQQYKISRSEIQTTGWDQFRHFDVHDTKNPERKRIRLKVKQAIKRIDCYDIDGRHGHFEVTFADETKQRIVIKFNRNRSPGISYVEAQTVNDQNLLKMQGLVLHSFIDELISPEKFAQHIKNKHKVSILNPTFITKLEDGVTRDEDNGMAIRVDSIASKSYATVNGIKYEINSLEDLENLLH

SEQ ID NO: 55262 - DNA, 50 bp, Citrobacter braakii
  source 1..50: mol_type = genomic DNA
accgtgaacaattgactattaggcttgcctaatatataattattcactgt

SEQ ID NO: 55263 - DNA, 40 bp, Citrobacter braakii
  source 1..40: mol_type = genomic DNA
gcatggcgtattagcgggcttgccatcagtcataccgggg

SEQ ID NO: 55264 - DNA, 40 bp, Citrobacter braakii
  source 1..40: mol_type = genomic DNA
gcatggcgtattagcgggcctgccatcagtcataccgggg

SEQ ID NO: 55265 - DNA, 50 bp, Citrobacter braakii
  source 1..50: mol_type = genomic DNA
accatgaaaaagaaaatattatgccttatttatatctaattattgactgt

SEQ ID NO: 55266 - protein, 491 aa, Mycobacteroides abscessus
MKQRAKRALVVVRLSRVTDETTSPLRQRAACFELCEQRGYEVIGTAEDLDISAGKTSPFDRPQLGDWLTNRRGEFDVLVTFRMDRIVRRLLDLADLIRWCQSNSVSLVSATETFLDLDSAFGDIIALLVAKVAEMELAAISERNRSAAQHNMRQGKYRGGPPPWGYMPEKVDGDWRFVHDDEQVKVINEVVRRVLDGEPLRQVAADLTDRAVLTPRDRVNQLKGREIRGYSWHSAKIREMLTSKSLLGHAVTANGSIRNDDGSPIIRATPILERDVFEQVQVELAGRENRKEPTKRSSSLLLRVLYCGVCGKPAYKLKGGKGRQDRYRCASAQYKSTCGNGMVLVADANEVLTDAVMFELGDKYRRDRVWDAGSDYAAELAEIDDTLADLTDQLGTGAFRKGTRQRERLDARIADLAERQAQLAAQATRPAGWTWVPTTELFKDWWKSQTVEQLNLWLRSMDIQMWWNHQGIQTDMLHLEKMAEQWSPALS

SEQ ID NO: 55267 - DNA, 50 bp, Mycobacteroides abscessus
  source 1..50: mol_type = genomic DNA
gggctgtaaaagttggtaatggaatattccacgagtatcgtttacaacca

SEQ ID NO: 55268 - DNA, 40 bp, Mycobacteroides abscessus; identical to SEQ ID NO: 29268
  source 1..40: mol_type = genomic DNA

SEQ ID NO: 55269 - DNA, 40 bp, Mycobacteroides abscessus
  source 1..40: mol_type = genomic DNA
tggcatgtccacggtcgagcacgcgatcgggactatcgcg

SEQ ID NO: 55270 - DNA, 50 bp, Mycobacteroides abscessus
  source 1..50: mol_type = genomic DNA
gggttgtaatcatttgtcatggatcataacaacaatatggaatacaacca

SEQ ID NO: 55271 - protein, 492 aa, Mycobacteroides abscessus
MKQQAKRALVVVRLSRVTDETTSPLRQREACLELCGQRGYEVIGTAEDLDISAGKTSPFDRPQLGDWLTNRRGEFDVLVTFRMDRIVRRLLDLADLIRWCQSNSVSLVSATETFLDLDSAFGDIIALLVAKVAEMELAAISERNRSAAQHNMRQGKYRGGPPPWGYMPEKVDGDWRFVHDDEQVKVINEVVRRVLDGEPLRQVAADLTDRAVLTPRDRVNQLKGREIRGYSWHSAKIREMLTSKSLLGHAVTANGSIRNDDGSPIIRATPILERDVFEQVQVELAGRENRKEPTKRSSSLLLRVLYCGVCGKPAYKLKGGKGRQDRYRCASAQYKSTCGNGMVLVADANEVLTDAVMFELGDKYRRDRVWDAGSDYAAELAEIDDTLADLTDQLGTGAFRKGTRQRERLDARIADLAERQAQLAAQATRPAGWTWVPTTELFKDWWKSQTVEQLNLWLRSMDIQMWWNHQGIQTDMLHLEKMAEQWSNPSIG

SEQ ID NO: 55272 - DNA, 50 bp, Mycobacteroides abscessus
  source 1..50: mol_type = genomic DNA
tggttgtaaagattgctattggaatactccatgagtatcatttacaacca

SEQ ID NO: 55273 - DNA, 40 bp, Mycobacteroides abscessus; identical to SEQ ID NO: 29263
  source 1..40: mol_type = genomic DNA

SEQ ID NO: 55274 - DNA, 40 bp, Mycobacteroides abscessus
  source 1..40: mol_type = genomic DNA
cgcgatagtcccgatcgcgtgctcgaccgtggacatgcca

SEQ ID NO: 55275 - DNA, 50 bp, Mycobacteroides abscessus
  source 1..50: mol_type = genomic DNA
tggttgtattccatattgttgttatgatccatgacaaatgattacaaccc

SEQ ID NO: 55276 - protein, 414 aa, Pseudomonas balearica
MTKKCFPYVRFSSAKQEDGSTRARQNELIEAFVAKHGLEIDQTLEDAGTSAFRGLNASKDGVLGGFLEQVRNGEIEKGSYLLIENFDRLSRDKIVRSNKIFSDLLFAGIKIVILDKNKVYDADNLDFSEWIIALVEFERANKESERKSDFSSKAWRYNREKMRSGEIVTKKVPNWLSVEDGVFIVDLDKVSRITHLFNLSLKYGLLEATKRYNQEYADKLAPHQVQYILGNRKLIGEHQPKKLYWEDGGKRRLKDEGNPIPNYYPAVIEQELFYKVQEIIKGRKPFTGNYNKQQYNIFRGLIYCRWCGGTIRYMNKGERDYFICTNSMGHKCMAPGQQSIRGKKLFSLFFQFTDKLNIQSLINESKGRRQKLSATPDLSGTVLPLCLIPNSALKSAPPFKSVVPKASACAGLPA

SEQ ID NO: 55277 - DNA, 50 bp, Pseudomonas balearica
  source 1..50: mol_type = genomic DNA
atggaacgtatcgcagaacacatccagatgtgttaggttaaaggttccac

SEQ ID NO: 55278 - DNA, 40 bp, Pseudomonas balearica
  source 1..40: mol_type = genomic DNA
tcgcgcaaagcagtaaatgcagccatgttcgcagccgcgg

SEQ ID NO: 55279 - DNA, 40 bp, Pseudomonas balearica
  source 1..40: mol_type = genomic DNA
tcgcgcaaagcagtaaatgctgccatgttcgcagccgcgg

SEQ ID NO: 55280 - DNA, 50 bp, Pseudomonas balearica
  source 1..50: mol_type = genomic DNA
atggaacgtcagatagaaaccatactcatgtttcaaggtccaggttaaat

SEQ ID NO: 55281 - protein, 560 aa, Rhodococcus pyridinivorans
MTVQRQPLRAIVGARVSVVQGPQKVSHLAQLETATKWAQARGYEIVGTFEDLGVSAEKRPEDRPDLGPWLTDEGASRWDVIVWSKMDRAFRSTRHCVDFAQWAEERQKVVAFADDGLTLDYRPGVAKGIDSMMAELFVYLGSFFAQLELNRFKTRAQDSHRALRQMDRWASGVPPLGFRVIDHPSGKGKGLATDDVGKRLLHSMADRLLDGWSFIRIAAWLNAPYADSRCTRTHVDGCECRDGAALTNMDRARVAKGVPAKARPWTVNTVIEALTSPRTQGFKMTGRGKNAMVVLDAEGDPIVLAPPTFDPATWKQLQEAAQLRKLNQRTPTASTNPMLGIGVCGCEGCPACGEGPCGASLAQQKSKTTTKSGKVNEHRYYRCGRTPLNCNGTVVKADVADATMERLFLDKWGDEKVTRRVFVQGEDHSVELELVNAIIDRLRMESDAGLLTTPEDEQRWLARMKAQVAKRDQLAARPLRASGWVTEETDQTYREVWPTADKRQLMIDHGARFVLYPTGAEDGLRQMAMLVPRGLADLSPDLSLNDLPEPDAVWIKFGNG

SEQ ID NO: 55282 - DNA, 50 bp, Rhodococcus pyridinivorans
  source 1..50: mol_type = genomic DNA
ggtttacatcgcgtggatacctcccagcaggtgaaagtatcattacaaca

SEQ ID NO: 55283 - DNA, 40 bp, Rhodococcus pyridinivorans
  source 1..40: mol_type = genomic DNA
catcggcatgctgctcgaccagcaggtggcgatggaggtc

SEQ ID NO: 55284 - DNA, 40 bp, Rhodococcus pyridinivorans
  source 1..40: mol_type = genomic DNA
catcggcatgctgctcgacgtgcaggtggcgatggaggtc

SEQ ID NO: 55285 - DNA, 50 bp, Rhodococcus pyridinivorans
  source 1..50: mol_type = genomic DNA
tgtttacacaatttagatacctctgtgaaggagaaaatttttccaccaca

SEQ ID NO: 55286 - protein, 541 aa, Pseudomonas indica
MRSQGGKVYSYLRFSDPKQAGGHSADRQMQYARAWAAERGLQLDESLSLRDEGLSAFHQRHVTQGALGVFLKAVDDGRIAPGSVLVVEGLDRLSRAEPIQAQAQLAQIINAGITVVTASDGREYNRERLKAQPMDLVYSLLVMIRAHEESDTKSKRVKAAIRRQCEGWQAGTFRGVIRNGADPFWVRWDGNAWELIPERVEAVLFALARYREGMGAKRLHELMVHRGFDLEGWGFRAAQLYRVVRLVGLKGAKRISVDGVEYLLEGYYPALMSADEFDELQDLSGQRHRRRGKGSIPGIITGIGLAWCGYCGLSVCAMNQKGKVDEAGRLRDTYRRMLCSSAQVGNPCAANSTSVAPLERAVMAYCSDQMNLQRLHEPAVQGQDLRQRVIGIRRRVEDLERQLARVTDALLAGESEGAAPLAFVRKARELEAQIQEGQVELQQAERELAGAATRQTPADAQRWAALASAVEAQDVDARDRVRQLMMDTFERIVIYMKGLIPAEGRAKHLDVLLISKAGQRRWMRIDRKTGVWTAGTDRLQN

SEQ ID NO: 55287 - DNA, 50 bp, Pseudomonas indica
  source 1..50: mol_type = genomic DNA
agtttatattagccgtcattagggttccccaacgcctgcgaatatatact

SEQ ID NO: 55288 - DNA, 40 bp, Pseudomonas indica
  source 1..40: mol_type = genomic DNA
gatcaggatggctttgggattgcccgccgcgacccagaac

SEQ ID NO: 55289 - DNA, 40 bp, Pseudomonas indica
  source 1..40: mol_type = genomic DNA
gatcaggatggctttgggagagcccgccgcgacccagaac

SEQ ID NO: 55290 - DNA, 50 bp, Pseudomonas indica
  source 1..50: mol_type = genomic DNA
agtttagaggctgtgtaattagtggacccacactcctcagggtttatgct

SEQ ID NO: 55291 - protein, 487 aa, Bacillus cereus
MKEIMNVAIYLRLSRDEENRGIENVLENHRNKLTELCQQKKWKYEIYQEIASSRTIELREQLVDMLEHVKRNQYDAVVVMDVDRLSRNEFDAPQIFKILSDSNTVIVTPTKTYDWSRDEDNLLLGIQSLVAAQEYKQIKKRMTAGKRSASEKGLWVHGIPPFGYDKDSETRKLVPNEDAKHVKFIFNSIVNGKTVSDVYHGLNMMKVKTRTNSTFAFNSVVRIVNNEAYKGTIVSNKYLDKNAMRPKDEWHYVENVHPAIVDEATWEKANKIVNTYSFSAPRSRNKIYPTTKLIFCGNCGRVQGAQMAGTGKMYLKVCQRCKNRTFLYEPILRIIKDRVASHVPHILKKITAIEQNDNNADIEYKKQQIQKQMKAIERAIEKIKEAYELDEYTIAEFKDRKAKRENELKQLKAELDHVEQQNSKDKIADLTEIKRRIEYLLQNWQCLDGGGLTDENVNRNLHFIIERIEWMYGKDDTEPKLSIKYKQ

SEQ ID NO: 55292 - DNA, 50 bp, Bacillus cereus
  source 1..50: mol_type = genomic DNA
aaatagtccccaaattcgtaacaaacaagacctgaatttagggactattt

SEQ ID NO: 55293 - DNA, 40 bp, Bacillus cereus; identical to SEQ ID NO: 5758
  source 1..40: mol_type = genomic DNA

SEQ ID NO: 55294 - DNA, 40 bp, Bacillus cereus
  source 1..40: mol_type = genomic DNA
acttgtgtttactggaccgcatggatctgggaagacgacg

SEQ ID NO: 55295 - DNA, 50 bp, Bacillus cereus
  source 1..50: mol_type = genomic DNA
aaatattctttgatttcgtaaatacaaaaatttgaattagtgaaccatat

SEQ ID NO: 55296 - protein, 563 aa, Priestia aryabhattai
MKKRVWTSYRVSTKKQGEENDIPLQKSQCHTFAEKNGWVITKEITEKLSGFQTDINDRESLKDIKAGAEKKEFDILLIYHSDRLGRQMEYSLWIASLYELGVQVWSVKEGELKNEEHSDALMNMIRYWQSEGESRKTSMRVKDAMKELNEQGATWLGGYCPFGYHVIDTGEKRNSKKDKTIKKLAIHPEESKVIKLMFSLALNKLMGSGVIAQYLNNNGYTNRGRMFTYTTVGRMLRNPTYSGYRRWGTSQKKSLKSKTRLGVPREQWNLQPFNPEIQIVSEEDFQKVQELITNRNTHLTADKSKRVPVNSQVLLSGLVTCGYCGGRMKTGYTYQRWTRKNDGVKVERKAYRYSCNTARGLGDAHEGQKQFGAVTIDQTVEAEVLEAISSLKLEAFNEEKEAFDFAEIDARKVQLKELEKQLSDKAKAYSNTEEMFDKVMSGQVNLDLNFIAGKLEEYGQAKMELQDKVNKLKDEIKQTEMQSTDLETLKHQLSNWVETYKAKATLEEKKAMLSQVVKEVQVSRENIVIKFHITVEKALQKGGEYLESAEAEPIMVSEDNTWK

SEQ ID NO: 55297 - DNA, 50 bp, Priestia aryabhattai
  source 1..50: mol_type = genomic DNA
tggtgtctgaggacaacacatggaagggaatatgtagtcaaaacacacct

SEQ ID NO: 55298 - DNA, 40 bp, Priestia aryabhattai
  source 1..40: mol_type = genomic DNA
agttagatcttcatatggaaggaaatacggcggcgcatct

SEQ ID NO: 55299 - DNA, 40 bp, Priestia aryabhattai
  source 1..40: mol_type = genomic DNA
agttagatcttcatatggacggaaatacggcggcgcatct

SEQ ID NO: 55300 - DNA, 50 bp, Priestia aryabhattai
  source 1..50: mol_type = genomic DNA
ttgtgaatgaacaaaacaaatgcacgccaatatttaagaaaaaaacacat

SEQ ID NO: 55301 - protein, 461 aa, Mycobacteroides abscessus; identical to SEQ ID NO: 51341

SEQ ID NO: 55302 - DNA, 50 bp, Mycobacteroides abscessus; identical to SEQ ID NO: 51342
  source 1..50: mol_type = genomic DNA

SEQ ID NO: 55303 - DNA, 40 bp, Mycobacteroides abscessus; identical to SEQ ID NO: 51888
  source 1..40: mol_type = genomic DNA

SEQ ID NO: 55304 - DNA, 40 bp, Mycobacteroides abscessus
  source 1..40: mol_type = genomic DNA
cagcgcctcgtgctgcacgatcgcgatcgtggctgcaccc

SEQ ID NO: 55305 - DNA, 50 bp, Mycobacteroides abscessus
  source 1..50: mol_type = genomic DNA
aagaaccctctcttaaaggtctggatcagggcccctttcctgtgacatct

SEQ ID NO: 55306 - protein, 507 aa, Escherichia coli
MKRAISYIRFSSEKQSRGDSLRRQAKMVTDWLKAHPEYYLDESLTFRDLGVSGFTGKHLKGGLGDFLTAIEKGLVKAGDTLLIESLDRLSRQDVDQASELLRNILRSGVDVVTLSDGEHYTRESLKDPLALIKSILIMQRSHEESLRKSERIQAAWDAKKEAAKAGIKISRRCPAWLKLNDDRKSFSIIPEKVETVKRCFQLRLEGKSIWEIVRTLNDEGHQTLNQYKAGKFGQTSVQDLLKNRSVIGYFTPKGREEIAGYFPPIIPETDFYKVQQLSYSRYGRKPASDKPLSVNLFKGVIRCSECGHALIITGFSDTRSGIYRCPLRNENRCSAKGLSRKQTDGTLLALLSRLDRFDSDTTNIIDTLKLHREHISSNIEKLVQLSLEIEDLSAITSKLKQLKGELSQVDADIEKETQRLKSIDVGCLSDCDLTTKAGRIEAQLIIKSAVKEVVLNTAKRRCKVTFHNGKIIDLPITENPSEDVTEAIQSLSEVTERGLIDVDVVEI

SEQ ID NO: 55307 - DNA, 50 bp, Escherichia coli
  source 1..50: mol_type = genomic DNA
aggtgcatttagaccttgatgatttttattagacacgtttaaatacacca

SEQ ID NO: 55308 - DNA, 40 bp, Escherichia coli; identical to SEQ ID NO: 21333
  source 1..40: mol_type = genomic DNA

SEQ ID NO: 55309 - DNA, 40 bp, Escherichia coli
  source 1..40: mol_type = genomic DNA
cggcgttaatcgggtgatttcagacggccgcccggttcat

SEQ ID NO: 55310 - DNA, 50 bp, Escherichia coli
  source 1..50: mol_type = genomic DNA
atctcaattacctaattgatgaattctatcagccacttaaaaataaaaca

SEQ ID NO: 55311 - protein, 507 aa, Escherichia coli
MKRAISYIRFSSEKQSRGDSLRRQAKMVTDWLKAHPEYYLDESLTFRDLGVSGFTGKHLKGGLGDFLTAIEKGLVKAGDTLLIESLDRLSRQDVDQASELLRNILRSGVDVVTLSDGEHYTRESLKDPLALIKSILIMQRSHEESLRKSERIQAAWDAKKEAAKAGIKISRRCPAWLKLNDDRKSFSIIPEKVETVKRCFQLRLEGKSIWEIVRTLNDEGHQTLNQYKAGKFGQTSVQDLLKNRSVIGYFTPKGREEIAGYFPPIIPETDFYKVQQLSYSRYGRKPASDKPLSVNLFKGVIRCSECGHALIITGFSDTRSGIYRCPLRNENRCSAKGLSRKQTDGTLLALLSRLDRFDSDTTNIIDTLKLHREHISSNIEKLVQLSLEIEDLSAITSKLKQLKGELSQVNADIEKETQRLKSIDVGCLSDCDLTTKAGRIEAQLIIKSAVKEVILNTAKRRCKVTFHNGKVIDLPITEDPSENVTEAIQSLSEVTERGLIDVDEVII

SEQ ID NO: 55312 - DNA, 50 bp, Escherichia coli; identical to SEQ ID NO: 55307
  source 1..50: mol_type = genomic DNA

SEQ ID NO: 55313 - DNA, 40 bp, Escherichia coli; identical to SEQ ID NO: 21333
  source 1..40: mol_type = genomic DNA

SEQ ID NO: 55314 - DNA, 40 bp, Escherichia coli; identical to SEQ ID NO: 55309
  source 1..40: mol_type = genomic DNA

SEQ ID NO: 55315 - DNA, 50 bp, Escherichia coli; identical to SEQ ID NO: 55310
  source 1..50: mol_type = genomic DNA

SEQ ID NO: 55316 - protein, 507 aa, Escherichia coli
MKRVISYIRFSSERQAKGDSLRRQSKMVNDWLKAHPEYYLDQDLSFRDLGVSGFTGKHLKGGLGDFLTAIEKGLVKAGDTLLIESLDRLSRQDVDQASELLRNILRSGVDVVTLSDGEHYTKESLKDPLALIKSILIMQRSHEESLRKSERIQAAWDAKKEAAKAGIKISKRCPAWLKLNDDRKTFSVIPEKVETVKRCFQLRLEGKSIWEIVRTLNDEGHQTLNQYKAGKFGQTSVQDLLKNRSVIGYFTPKGCEEITGYFPPIIPETDFYKVQQLSYSRYGRKPASDKPLSVNLFKGVIRCSECGHALIITGFSDTRNGIYRCPLRNENRCSAKGLSRKQTDGTLLTLLSRLDRFDSDMTNTIDMLRLHREHISSNIEKLVQLSLEIEDLSAITIKLKQLKGELSQVDADIEKETQRLKSIDVGCLSDCDLTTKAGRIEAQLIIKSAVKEVVLNTAKRRCKVTFHNGKSITLPITENPSEDVTEAIQSLSEVTERGLIDVDVVEI

SEQ ID NO: 55317 - DNA, 50 bp, Escherichia coli; identical to SEQ ID NO: 55307
  source 1..50: mol_type = genomic DNA

SEQ ID NO: 55318 - DNA, 40 bp, Escherichia coli; identical to SEQ ID NO: 5188
  source 1..40: mol_type = genomic DNA

SEQ ID NO: 55319 - DNA, 40 bp, Escherichia coli
  source 1..40: mol_type = genomic DNA
cggcgttaatcgggtgatttcagacagccgcccggttcat

SEQ ID NO: 55320 - DNA, 50 bp, Escherichia coli; identical to SEQ ID NO: 55310
  source 1..50: mol_type = genomic DNA

SEQ ID NO: 55321 - protein, 507 aa, Escherichia coli; identical to SEQ ID NO: 55306

SEQ ID NO: 55322 - DNA, 50 bp, Escherichia coli; identical to SEQ ID NO: 55307
  source 1..50: mol_type = genomic DNA

SEQ ID NO: 55323 - DNA, 40 bp, Escherichia coli; identical to SEQ ID NO: 5188
  source 1..40: mol_type = genomic DNA

SEQ ID NO: 55324 - DNA, 40 bp, Escherichia coli; identical to SEQ ID NO: 55319
  source 1..40: mol_type = genomic DNA

SEQ ID NO: 55325 - DNA, 50 bp, Escherichia coli; identical to SEQ ID NO: 55310
  source 1..50: mol_type = genomic DNA

SEQ ID NO: 55326 - protein, 507 aa, Escherichia coli; identical to SEQ ID NO: 55306

SEQ ID NO: 55327 - DNA, 50 bp, Escherichia coli; identical to SEQ ID NO: 55307
  source 1..50: mol_type = genomic DNA

SEQ ID NO: 55328 - DNA, 40 bp, Escherichia coli; identical to SEQ ID NO: 22878
  source 1..40: mol_type = genomic DNA

SEQ ID NO: 55329 - DNA, 40 bp, Escherichia coli
  source 1..40: mol_type = genomic DNA
cggcgttaatcgggtgatttcagacagccgccctgttcat

SEQ ID NO: 55330 - DNA, 50 bp, Escherichia coli; identical to SEQ ID NO: 55310
  source 1..50: mol_type = genomic DNA

SEQ ID NO: 55331 - protein, 676 aa, Bacteroides oleiciplenus; identical to SEQ ID NO: 49021

SEQ ID NO: 55332 - DNA, 50 bp, Bacteroides oleiciplenus; identical to SEQ ID NO: 40127
  source 1..50: mol_type = genomic DNA

SEQ ID NO: 55333 - DNA, 40 bp, Bacteroides oleiciplenus
  source 1..40: mol_type = genomic DNA
gataatatgctcgcaggtgtgcataggcgggtattcctgc

SEQ ID NO: 55334 - DNA, 40 bp, Bacteroides oleiciplenus; identical to SEQ ID NO: 55333
  source 1..40: mol_type = genomic DNA

SEQ ID NO: 55335 - DNA, 50 bp, Bacteroides oleiciplenus
  source 1..50: mol_type = genomic DNA
aaggatgtggacatttataatatttgcttagttgagggtttctcaacctc

SEQ ID NO: 55336 - protein, 550 aa, Streptococcus pyogenes
MSKEKIKVYLYTRVSTSIQIDGYSLEAQKSRMKAFALYNDYEIVGEYEDAGKSGKSIEGRVQFTRMMEDIKSGKDGVSFVLVFKLSRFARNAADVLSTLQIMQDYGVNLICVEDGIDSSKDAGKLMISVLSAVAEIERENIRVQTMEGRIQKAREGKWNGGFAPYGYKLEDGKLFINEEEAVAIRTIFDQYVNTTIGANGISKYLENHGIRKIPRQNGKNPLFDAGLIRKILKNPVYNGKIAFGRRTLEKVHGTRNEYRQVEQDDYLVAEGIHEAIIPDELWQAAQVKLKAQAKKYEHVNKGKNMRTHLLSGIVKCPICGAGMFGNKSIKYKKDGTKYKDFYYYGCKHRLMNRGHKCTYNKQIREELLDDAVAEVIIKLVSNPKFASMMKEKINMKVDTSAIENEIDNYQKELRKSHSTKFKLIEEIDNLDVDDKHYKRRKQDLDDRLYRMYDKIEELESLLIDAKAKKQTIEAEKLTGDNIYKVLIYFDKLYKVMNDVERRQLIEALISEIQIYEEKQANGQWLKSITFKLPIIDEDLNISLDNDEHVE

SEQ ID NO: 55337 - DNA, 50 bp, Streptococcus pyogenes
  source 1..50: mol_type = genomic DNA
agtttggacaatgatgagcatgttgagacggtagcacttttgtccaaact

SEQ ID NO: 55338 - DNA, 40 bp, Streptococcus pyogenes
  source 1..40: mol_type = genomic DNA
tccgcaaacgcatcacgtcgagtgtgtagtgttgctaatc

SEQ ID NO: 55339 - DNA, 40 bp, Streptococcus pyogenes
  source 1..40: mol_type = genomic DNA
tccgcaaacgcatcacgtccagtgtgtagtgttgctaatc

SEQ ID NO: 55340 - DNA, 50 bp, Streptococcus pyogenes
  source 1..50: mol_type = genomic DNA
aggttggagaagcttgggcttgatcacagggtagcaataacgacgaaaat

SEQ ID NO: 55341 - protein, 509 aa, Microbacterium esteraromaticum
MTLTVREYLRVSKDPRGTGKSPDQQHVENVTSFERQGWALHPSAPYRDTDRSASRYAKRQREDFGRLISDLEENAFGADVLAIWESSRGSRRVGEWVDLIDLCKQREVRIWVTTHGRLYDPANARDRRTLLEDAVDAEYESDKTSERIRRNVRAAAEAGRPHGKNLYGYQRVYDDKTRELLRIDEHPEQAAVVREAARRVLSGETFYAIAKDFNLRGIPPRRPTRVEHRKNHGWTPPAIKQMLTMPAYAGKRQHRGTIVSDALWPALIDYSTWEKLQSVMSPQDRKRTNDWPAKHLLSGIALCGVCGAPMRVGKQNAGSKKLGSDGTPLPREVYGAYVCSGVPGRPGPDGKRGFHVAMRQEHLEEIVTELLFARLERPDFLATIGDQGDAATAARDALLAEISGYQAYLDNVREEAAALLRFDILLDQEARIEPKIKAAQTKLEKLSEMDPFVLALVSAGAIRMEWHSLKLAEKRRTVRAVMAPRVNRIGKGWRGRKGLNFDRVEPGWR

SEQ ID NO: 55342 - DNA, 50 bp, Microbacterium esteraromaticum
  source 1..50: mol_type = genomic DNA
ccacctcatgattcaactgtcactccagatatagtcattgttggaggtgg

SEQ ID NO: 55343 - DNA, 40 bp, Microbacterium esteraromaticum
  source 1..40: mol_type = genomic DNA
gacgatggcacagttcgcgccgctgaccgcggtcaagtgg

SEQ ID NO: 55344 - DNA, 40 bp, Microbacterium esteraromaticum
  source 1..40: mol_type = genomic DNA
gacgatggcacagttcgcgaagctgaccgcggtcaagtgg

SEQ ID NO: 55345 - DNA, 50 bp, Microbacterium esteraromaticum
  source 1..50: mol_type = genomic DNA
ccatctctgctaaaaacacacacaaaaaatatagccaggcgtggtggtgg

SEQ ID NO: 55346 - protein, 535 aa, Anaerobutyricum hallii
MSDGKCIVKYLRLSLEDEDMLDESNSITNQRIVIGQYIASKNEFKNTEVLEFKDDGYSGTNFDRPGFQSMMELVRDGKVSTIIVKDLSRFGRNHIEVDTYLEQIFPFMNVRFIAINDNVDSMKYESGMPGIDVGFRNIINEHHSIDTSVKVKRTLIQRQKAGKYMGARAPYGYLKPDEDVTSLVINPETAPVVKMIFQKYLNGMNITQLARYLNEQKIMSPGQYKREVLKTGVKKTTEKYIWYPVTVRLILMTETYTGTTIGGKWKVASVGSNKHLKTKEEDWIVVEGTHEAIVSKEVFDAVQEKLELNSRKRSKTHNNNYPLKGLVKCGGCGQNLQHVTRCNPHFKCPRKFNAANQDCVTDNLYDDEFNEMIFRAIKLFAKISDDAEPVLELQKVELKSKVNGAAKKIRDAKDSISRYKHQKTELYMRYAMEEISEEEFTRKNDKLDKQIEKETLAIAQMETEQSEAAERLFELPPDGRQCLTDLIEGNKQLTREIAVTFIRGIKVYNDKRIEIEWNFADELVKYVEQVQKICS

SEQ ID NO: 55347 - DNA, 50 bp, Anaerobutyricum hallii; identical to SEQ ID NO: 39837
  source 1..50: mol_type = genomic DNA

SEQ ID NO: 55348 - DNA, 40 bp, Anaerobutyricum hallii
  source 1..40: mol_type = genomic DNA
gatgaatatcttaaatgggggacgtcacgctgacaatacg

SEQ ID NO: 55349 - DNA, 40 bp, Anaerobutyricum hallii
  source 1..40: mol_type = genomic DNA
gatgaatatcttaaatgggttacgtcacgctgacaatacg

SEQ ID NO: 55350 - DNA, 50 bp, Anaerobutyricum hallii
  source 1..50: mol_type = genomic DNA
tgtctcattttccagagacaagtttttgtttttgtttttgttttgagacg

SEQ ID NO: 55351 - protein, 535 aa, Blautia wexlerae
MSDGKCIVKYLRLSLEDEDMLDESNSITNQRIVIGQYIASKNEFKNTEVLEFKDDGYSGTNFDRPGFQSMMELVRDGKVSTIIVKDLSRFGRNHIEVDTYLEQIFPFMNVRFIAINDNVDSMKYESGMPGIDVGFRNIINEHHSIDTSVKVKRTLIQRQKAGKYMGARAPYGYLKPDEDVTSLVINPETAPVVKMIFQKYLDGMNITQLARYLNEQKIMSPGQYKREVLKTGVKKTTEKYIWYPVTVRLILMTETYTGTTIGGKWKVASVGSNKHLKTKEEDWIVVEGTHEAIVSKEVFDAVQEKLELNSRKRSKTHNNKYPLKGLVKCGGCGQNLQHVTRCNPHFKCPRKFNSANQDCVTDNLYDDEFNEMIFRAIKLFAKISDDAEPVLELQKAELKSKVNGAAKKIRDAKDSISRYKHQKTELYMRYAMEEISEEEFTRKNDKLDKQIEKETLAIAQMETEQSEAAERLFELPSDGRQCLTDLIEGNKQLTREIAVTFIRGIKVYNDKRIEIEWNFADELVKYVEQVQKICS

SEQ ID NO: 55352 - DNA, 50 bp, Blautia wexlerae; identical to SEQ ID NO: 39837
  source 1..50: mol_type = genomic DNA

SEQ ID NO: 55353 - DNA, 40 bp, Blautia wexlerae; identical to SEQ ID NO: 55348
  source 1..40: mol_type = genomic DNA

SEQ ID NO: 55354 - DNA, 40 bp, Blautia wexlerae; identical to SEQ ID NO: 55349
  source 1..40: mol_type = genomic DNA

SEQ ID NO: 55355 - DNA, 50 bp, Blautia wexlerae; identical to SEQ ID NO: 55350
  source 1..50: mol_type = genomic DNA

SEQ ID NO: 55356 - protein, 535 aa, Blautia wexlerae
MSDGKCIVKYLRLSLEDEDMLDESNSITNQRIVIGQYIASKNEFKNTEVLEFKDDGYSGTNFDRPGFQSMMELVRDGKVSTIIVKDLSRFGRNHIEVDTYLEQIFPFMNVRFIAINDNVDSMKYESGMPGIDVGFRNIINEHHSIDTSVKVKRTLIQRQKAGKYMGARAPYGYLKPDEDVTSLVINPETAPVVKMIFQKYLNGMNITQLARYLNEQKIMSPGQYKREVLKTGVKKTTEKYIWYPVTVRLILMTETYTGTTIGGKWKVASVGSNKHLKTKEEDWIVVEGTHEAIVSKEVFDAVQEKLELNSRKRSKTHNNNYPLKGLVKCGGCGQNLQHVTRCNPHFKCPRKFNAANQDCVTDNLYDDEFNEMIFRAIKLFAKISDDAEPVLELQKAELKSKVNGAAKKIRDAKDSISRYKHQKTELYMRYAMEEISEEEFTRKNDKLDKQIEKETLAIAQMETEQSEAAERLFELPPDGRQCLTDLIEGNKQLTREIAVTFIRGIKVYNDKRIEIEWNFADELVKYVEQVQKICS

SEQ ID NO: 55357 - DNA, 50 bp, Blautia wexlerae; identical to SEQ ID NO: 39837
  source 1..50: mol_type = genomic DNA

SEQ ID NO: 55358 - DNA, 40 bp, Blautia wexlerae; identical to SEQ ID NO: 55348
  source 1..40: mol_type = genomic DNA

SEQ ID NO: 55359 - DNA, 40 bp, Blautia wexlerae; identical to SEQ ID NO: 55349
  source 1..40: mol_type = genomic DNA

SEQ ID NO: 55360 - DNA, 50 bp, Blautia wexlerae; identical to SEQ ID NO: 55350
  source 1..50: mol_type = genomic DNA

SEQ ID NO: 55361 - protein, 535 aa, Coprococcus comes
MSDGKCIVKYLRLSLEDEDMLDESNSITNQRIVIGQYIASKQEFKNAEVLEFKDDGYSGTNFERPGFQSMMELVRDGQVSTIIVKDLSRFGRNHIEVDTYLEQIFPFLNVRFIAINDNVDSMKYESGMPGIDVGFRNIINEHHSIDTSVKVKKTLLQRQKAGKYMGARAPYGYLKPDEDVTSLVINPETAPVVRMIFQKYLEGMNITQLARYLNEQKIMSPGQYKREVLKTGVKKTTEKYIWYPVTVRLILMTETYTGTTIGGKWKVASVGSNKHLKTKEEDWIVVEGTHEAIVSKEVFDAVQEKLELNSRKRSKTHNNNYPLKGLVKCGGCGQNLQHVTRCNPHFKCPRKFNAANQDCVTDNLYDDEFNEMIFRAIKLFAKISDDAEPVLELQKAELKSKVNGAAKKIRDAKDSISRYKHQKTELYMRYAMEEISEEEFTRKNDKLDKQIEKETLAIAQMETEQSEAAERLFELPPDGRQCLTDLIEGNKQLTREIAVTFIRGIKVYNDKRIEIEWNFADELVKYVEQVQKICS

SEQ ID NO: 55362 - DNA, 50 bp, Coprococcus comes; identical to SEQ ID NO: 39837
  source 1..50: mol_type = genomic DNA

SEQ ID NO: 55363 - DNA, 40 bp, Coprococcus comes
  source 1..40: mol_type = genomic DNA
gatgaatatcctaaatgggggacggcatgcggataattcc

SEQ ID NO: 55364 - DNA, 40 bp, Coprococcus comes
  source 1..40: mol_type = genomic DNA
gatgaatatcctaaatgggttacggcatgcggataattcc

SEQ ID NO: 55365 - DNA, 50 bp, Coprococcus comes; identical to SEQ ID NO: 55350
  source 1..50: mol_type = genomic DNA

SEQ ID NO: 55366 - protein, 530 aa, Comamonas thiooxydans
MIDAYSYIRFSSHAQTIGDSLRRQMQAATAYAHQHRLHLREDLTFRDLGVSAYDSSNLEKGALSLFLQAVKSGQVKRGSVLLVENLDRLTRASTYRAVALLAELIEAGIKVVTLSDGMEYTEKSLQDDKDLFYSVMLFARGHDESKRKSELISKVYEGKRRRNSKIICSVAPGWLDKDKDNECWVLNKEKSESVVKVFNQYLSGLSAHKICQNANEENWPLPSMRKDKNTGWHVSLVRRILKNPAVIGNYIERNKTEHKEFFPRVISDEDFAQAQLASDKRRSFPKRRDQEKYNIFQGIIFCGYCSAVMGYRNHGAKNESHKCEHRRYFCSNHVRGFTDTCKGRPGAKETQSVLIQEIFSRISIRISSDEKIAELQLNMEAAQDLREELKKRENNILDMIEFSPDAREQLAKRLSSIKYDIGEAEKKFLTAQADLIEAKDGGDELLNVYDSVSEALLAFEAGPEEREKLRLKMTRYVKKVYLYFKEGLAYVYFSDSKNPMLLMASNDANIIRFNDNGDPYPYKPPLPKIA

SEQ ID NO: 55367 - DNA, 50 bp, Comamonas thiooxydans
  source 1..50: mol_type = genomic DNA
tttgacaattatgttgcaacctgcgtgcaggttgcaccataattgtcaaa

SEQ ID NO: 55368 - DNA, 40 bp, Comamonas thiooxydans
  source 1..40: mol_type = genomic DNA
atccgccaggcccaccagagtgaacgaaggcagtccgttg

SEQ ID NO: 55369 - DNA, 40 bp, Comamonas thiooxydans
  source 1..40: mol_type = genomic DNA
atccgccaggcccaccagaccgaacgaaggcagtccgttg

SEQ ID NO: 55370 - DNA, 50 bp, Comamonas thiooxydans
  source 1..50: mol_type = genomic DNA
tttgaaactgtgtctgctgcctgcccccaggtcgcacgaggactctcagt

SEQ ID NO: 55371 - protein, 525 aa, Pseudomonas aeruginosa
MPSAFSYVRFSSGKQAKGSSEQRQRSMLGQWLEQHPSFTLSDLRFEDLGRSGFSGEHLDHGLGQLLAAIDSGAIKSGDVILVEAVDRIGRLEPLEMLPLFSRIVRAGVSVITLEDGHIYSKDSVNETSLFLLVAKVQQAHDYSNRLSRRINASYTARREKARAGLGVKRETPVWLTTDGQLVSHVAPHIAQAFQDYADGLGERRICRKLRESGLEEFSKTNATTVRRWLKNKTAIGYWNDIPDVYPHVVDPALFYRVQQRLDAPKVDRAKPSTHYLTGLVKCAVCGRNYNFKQRKHTDPAMLCTSRARLAGEGCSNSKTYPVIVLDQVRKLTSLPFLQHAMESASSQADPSSQRLAVIDGEIGELSRKISEATKALLVLGFTPEIQESLEQLKTAREALEEERAALLLPQAEKLTAAQLEAFSNGLLDDEPMKLNHVLQTAGYSMVVHPDGSIDVDGKRFVYEGASRKEKVYKLRLIGEDKQWSLPILTPQMATYKSLFMASVRLPGDPSEEELRRFEEAKHSER

SEQ ID NO: 55372 - DNA, 50 bp, Pseudomonas aeruginosa
  source 1..50: mol_type = genomic DNA
cgtgtccatcttgagtcttctttctcgcaagacaatacaaaatagacaca

SEQ ID NO: 55373 - DNA, 40 bp, Pseudomonas aeruginosa; identical to SEQ ID NO: 20278
  source 1..40: mol_type = genomic DNA

SEQ ID NO: 55374 - DNA, 40 bp, Pseudomonas aeruginosa
  source 1..40: mol_type = genomic DNA
gagaccgtgacctacatgcgtgaagggcgtatgcgccacg

SEQ ID NO: 55375 - DNA, 50 bp, Pseudomonas aeruginosa
  source 1..50: mol_type = genomic DNA
ggtgtccaaccggggaccagtttcgtgaaagacaattttccacagacccg

SEQ ID NO: 55376 - protein, 517 aa, Clostridium perfringens
MLENIQKLKCALYVRTSTTEQKDSLELQARYKNNNFKIDKIYSEEVSGRDILKRPEQIKLLNDCGIEVTSVQKQAIFTLNDKPPLYDCIIVSNTSRWGRNVVQVKQIVEALHKKNVKLWFDDLSKFSDSKDLSLTLDMLFVLDENYSQTISQKVKSAMDKRKKEGYILTNGRLIGYDKSKEGTLVKNKDSDMVKSIFEDYVYENLAIRKLAEKYNLSTSTITTLLKNIKYAGFMAYGIKEYGWDFSKLEIVKTDKIEPIITEELFWKVQDIRRSRSRIVEGSKNTRNKIGVNNKTHSLSSKILCTNCGKNFHYKDRGYWICGTHSKYPKKCDMPTMRENKIINYLKSPYGLKAIKNGLEVRLEGELNKLQLENTEPIKRNLKEFKEKSSKLLDLYMDSLIDKNTFEKRNNILKNKIDKLENELKRYNDKENYRIKLLELKKEAKRFLDEYEEILDSNKPEKIFDRVFKIEVDKIIDIKKGKEVSYVKNIRFKDFKVLEDYQLFNQFTNIEDVLEYRK

SEQ ID NO: 55377 - DNA, 50 bp, Clostridium perfringens
  source 1..50: mol_type = genomic DNA
gtattgtatttaattacacctggagtacgcacaaaagtaacagagaaaaa

SEQ ID NO: 55378 - DNA, 40 bp, Clostridium perfringens
  source 1..40: mol_type = genomic DNA
tggccttataggtcctggagttcacgcttcgcatggtatg

SEQ ID NO: 55379 - DNA, 40 bp, Clostridium perfringens
  source 1..40: mol_type = genomic DNA
tggccttataggtcctggagatcacgcttcgcatggtatg

SEQ ID NO: 55380 - DNA, 50 bp, Clostridium perfringens
  source 1..50: mol_type = genomic DNA
gaatggtcctggatttcacctggagagcgccctaaagcttgacagaaaga

SEQ ID NO: 55381 - protein, 540 aa, Roseburia hominis; identical to SEQ ID NO: 3656

SEQ ID NO: 55382 - DNA, 50 bp, Roseburia hominis; identical to SEQ ID NO: 3657
  source 1..50: mol_type = genomic DNA

SEQ ID NO: 55383 - DNA, 40 bp, Roseburia hominis
  source 1..40: mol_type = genomic DNA
actctcgaaatatgagacaggggaatccctgccggatatc

SEQ ID NO: 55384 - DNA, 40 bp, Roseburia hominis
  source 1..40: mol_type = genomic DNA
actctcgaaatatgagacacaggaatccctgccggatatc

SEQ ID NO: 55385 - DNA, 50 bp, Roseburia hominis
  source 1..50: mol_type = genomic DNA
cacaatcatggcggaagggaaaggcatgtcttccatgatggcagacacga

SEQ ID NO: 55386 - protein, 540 aa, Intestinimonas butyriciproducens; identical to SEQ ID NO: 45941

SEQ ID NO: 55387 - DNA, 50 bp, Intestinimonas butyriciproducens; identical to SEQ ID NO: 45942
  source 1..50: mol_type = genomic DNA

SEQ ID NO: 55388 - DNA, 40 bp, Intestinimonas butyriciproducens; identical to SEQ ID NO: 4193
  source 1..40: mol_type = genomic DNA

SEQ ID NO: 55389 - DNA, 40 bp, Intestinimonas butyriciproducens
  source 1..40: mol_type = genomic DNA
gctctcgaagtgggaatcccacagcgccgtccctgacgcg

SEQ ID NO: 55390 - DNA, 50 bp, Intestinimonas butyriciproducens; identical to SEQ ID NO: 55385
  source 1..50: mol_type = genomic DNA

SEQ ID NO: 55391 - protein, 540 aa, Faecalibacterium sp
MKQPYNTTIYNTALYLRLSRDDELQGESGSIQTQRMMLRQYAAEHGLTVVDEYIDDGWSGTNFERPSFQRMIDDIEDGKINCVVTKDLSRLGRNYILTGQYTEIYFPSKGVRYIAINDNVDTINGESELAPFLNILNEMHARQTSKKVKAAMHTRFANGAHYGAYAPLGYVKDPDKKGHLLIDPETRWIVEKIFDLAVHGRGAASITRILVEEKVPTPGWLNYERYGTFANIYAGAPAEKAYAWTIAQVKSILKEKTYIGHSVHNKQSNISFKNKKKVRKPQEEWYRVENTHEAIISEEVFQKVQELIASRRRRQKNGTTQIFSGLVKCADCGWSLAYGVNSQNKNPYAHYHCSKYGQGLRQCSMHYIRYDVLYAYVLARLQYWSMMVQKDEDKLLKRLLNASDRERNSAKKKQAAELKKAEKRKAEVDGLFAKMYEDWSAGRITEYNFNMLSEKYQNEQKELETKIRQLHETMEAAVQTAADAEKWIALMKQYVNPVELTAELLNTLIEKITVHEAVKGEDGSREQEVEIYYRFIGKID

SEQ ID NO: 55392 - DNA, 50 bp, Faecalibacterium sp; identical to SEQ ID NO: 3657
  source 1..50: mol_type = genomic DNA

SEQ ID NO: 55393 - DNA, 40 bp, Faecalibacterium sp
  source 1..40: mol_type = genomic DNA
cgtcagtaagtgggaacggggactgagtgtgccggacatc

SEQ ID NO: 55394 - DNA, 40 bp, Faecalibacterium sp
  source 1..40: mol_type = genomic DNA
cgtcagtaagtgggaacggcaactgagtgtgccggacatc

SEQ ID NO: 55395 - DNA, 50 bp, Faecalibacterium sp; identical to SEQ ID NO: 55385
  source 1..50: mol_type = genomic DNA

SEQ ID NO: 55396 - protein, 540 aa, Coprococcus eutactus; identical to SEQ ID NO: 17726

SEQ ID NO: 55397 - DNA, 50 bp, Coprococcus eutactus; identical to SEQ ID NO: 3657
  source 1..50: mol_type = genomic DNA

SEQ ID NO: 55398 - DNA, 40 bp, Coprococcus eutactus
  source 1..40: mol_type = genomic DNA
cgtatcaaggtgggaaacaggcagcgacatgccggatctc

SEQ ID NO: 55399 - DNA, 40 bp, Coprococcus eutactus
  source 1..40: mol_type = genomic DNA
cgtatcaaggtgggaaacacacagcgacatgccggatctc

SEQ ID NO: 55400 - DNA, 50 bp, Coprococcus eutactus; identical to SEQ ID NO: 55385
  source 1..50: mol_type = genomic DNA

SEQ ID NO: 55401 - protein, 545 aa, Intestinimonas butyriciproducens; identical to SEQ ID NO: 15631

SEQ ID NO: 55402 - DNA, 50 bp, Intestinimonas butyriciproducens; identical to SEQ ID NO: 15632
  source 1..50: mol_type = genomic DNA

SEQ ID NO: 55403 - DNA, 40 bp, Intestinimonas butyriciproducens
  source 1..40: mol_type = genomic DNA
aaagaatacccccggcggcaacagccgccgggggtattct

SEQ ID NO: 55404 - DNA, 40 bp, Intestinimonas butyriciproducens
  source 1..40: mol_type = genomic DNA
aaagaatacccccggcggcgacagccgccgggggtattct

SEQ ID NO: 55405 - DNA, 50 bp, Intestinimonas butyriciproducens
  source 1..50: mol_type = genomic DNA
tgcagtccccgcagagccggacctgaggccccggacaggccacgggatgg

SEQ ID NO: 55406 - protein, 545 aa, Flavonifractor plautii; identical to SEQ ID NO: 15631

SEQ ID NO: 55407 - DNA, 50 bp, Flavonifractor plautii; identical to SEQ ID NO: 15632
  source 1..50: mol_type = genomic DNA

SEQ ID NO: 55408 - DNA, 40 bp, Flavonifractor plautii
  source 1..40: mol_type = genomic DNA
aaaaaagcgcggaccgtacaacggtccgcgctttttttgt

SEQ ID NO: 55409 - DNA, 40 bp, Flavonifractor plautii
  source 1..40: mol_type = genomic DNA
aaaaaagcgcggaccgtacgacggtccgcgctttttttgt

SEQ ID NO: 55410 - DNA, 50 bp, Flavonifractor plautii; identical to SEQ ID NO: 55405
  source 1..50: mol_type = genomic DNA

SEQ ID NO: 55411 - protein, 570 aa, Pseudomonas fluorescens
MSGNVYSYMRWSTDRQSDGSTEARLRAAQEAFCKHYDLTLVEEITDPGMTSFRGKNAHEGKLRDFINRAKRGEIPPGSLLLFENADRMSRMQLAHAVPLFFEILGAGLRIGIADRLQVYTPGTLDLGGLMTILVDMERANAESKRKSDFGRAGWAKAHVRMEAGDVTTDKVAQWLEVERIDGERRFKVKEGIAEQIRALFTASLQYGVAESCRRVNEQFGSGWKIHQVQYLLKNRRLIGEHTITNYSEQAGKNMPSDRVLTDYYPVVVDKNLFAEVQAVINKRKPFAGKQDASNLNIYRGLVKCAACGGSVRFMFKTGKEYFHCTASMSNSCTGPGIRSIRGEHLRRLLFKFEHWTNLRTYFMQSSEDLKTLRRERDALLALIEKIATRTSQTQQRLMDEDDSDRQSVLLDMLTKAKGDDKDARAKLAATETQLSELEDAFTIAGLDLGNRVEWMLNDRSEAAALERARINRYLSNIFETLVIDFEGKTLSTAVKLALKGKVTEFKATISSPPDKRFNVVKGPVRIAGKSRRVLSTMPDAFTPEELETLKGVQWKAPLPLLSPVMKKPLR

SEQ ID NO: 55412 - DNA, 50 bp, Pseudomonas fluorescens
  source 1..50: mol_type = genomic DNA
tatgtaccaacaagacactacaggcatctatactctctgaaaggaaccaa

SEQ ID NO: 55413 - DNA, 40 bp, Pseudomonas fluorescens
  source 1..40: mol_type = genomic DNA
ccgcgcatagcagtagatacagccatgctcgcaaccgcga

SEQ ID NO: 55414 - DNA, 40 bp, Pseudomonas fluorescens
  source 1..40: mol_type = genomic DNA
ccgcgcatagcagtagatattgccatgctcgcaaccgcga

SEQ ID NO: 55415 - DNA, 50 bp, Pseudomonas fluorescens
  source 1..50: mol_type = genomic DNA
tatgtaccctatcaacaataaaaatttatctactgtgctagaggaatcac

SEQ ID NO: 55416 - protein, 479 aa, Mycobacteroides abscessus; identical to SEQ ID NO: 17141

SEQ ID NO: 55417 - DNA, 50 bp, Mycobacteroides abscessus
  source 1..50: mol_type = genomic DNA
agggtatattaggaacttgtcaccaagctaaactgttgttaaactaccct

SEQ ID NO: 55418 - DNA, 40 bp, Mycobacteroides abscessus; identical to SEQ ID NO: 8958
  source 1..40: mol_type = genomic DNA

SEQ ID NO: 55419 - DNA, 40 bp, Mycobacteroides abscessus; identical to SEQ ID NO: 8959
  source 1..40: mol_type = genomic DNA

SEQ ID NO: 55420 - DNA, 50 bp, Mycobacteroides abscessus
  source 1..50: mol_type = genomic DNA
agtgtctattatgcacttgtcactatgctaagctgaaacatagaaacatt

SEQ ID NO: 55421 - protein, 595 aa, Vibrio paracholerae
MTQPYIYSYSRISSKKQQRGRGLEIQRERESIERLKQEFGLQESPIVLSDSGKSAFHGLHVKDGKLGWFLKAVENGDVAPGSILVVQGFDRFSREDIISATNQLTNITARGVMIYSAMERIHLGHPDDGNQTRADKLKEAMGAFTRAYSESQAKSYRVNELTELAIAEFKQGVRDEKNGRVKAIKVVGNDVWWIDNSDGTIRKRDGYFQLAKEIIERRTRGESVHKLCQWLNDIDRPGYLPCPTNRSDKRGAKGRWAREIVHRMSEPRRSKVEGSSVTARPILGEKLIRDEVLVGYYPALVTEEQYYALMDTVKNRARPKRHDCRGESLLSGINVYCAHCNSRVTRTMETGGILNYRCGHSTCDRHWSKRGELLESALLKTCIDKVWRPERKKNYLDPCRVIEGELAIVNEKIKELERDLSEEGYSKVLARAVRDLEAKEQTLRGKLEEAKTLNAVTLRSQPTELAERWKQVTDDTLDMNNDLGRRNVRELIYQSCEYIKIGRPSVDAVCDDDLPEKRRFILDIDIKFKDGVHRFIRLGAKSIIHVSGTDFVSVKGRTAERLSDIEADNNMYQYEQYMDSGWLENEFSSFNPDEE

SEQ ID NO: 55422 - DNA, 50 bp, Vibrio paracholerae
  source 1..50: mol_type = genomic DNA
aacccgcatagtgtgattttacgctgaccatatatcacaccatgcaagtt

SEQ ID NO: 55423 - DNA, 40 bp, Vibrio paracholerae; identical to SEQ ID NO: 22673
  source 1..40: mol_type = genomic DNA

SEQ ID NO: 55424 - DNA, 40 bp, Vibrio paracholerae; identical to SEQ ID NO: 22674
  source 1..40: mol_type = genomic DNA

SEQ ID NO: 55425 - DNA, 50 bp, Vibrio paracholerae; identical to SEQ ID NO: 22675
  source 1..50: mol_type = genomic DNA

SEQ ID NO: 55426 - protein, 543 aa, Vibrio alginolyticus
MTEEKQRFAVTYQRFSSGRQIGNSSLDRQTDTQKAWLRQNPNVTVIDNFVDKAMSGWSGKHLKEGSLGQLMKAIEDGIIQPGTLILVEHFSRLTRQNIDNAEELVKRIWKAGITLVTVRDNTEYPPEAVNNMSLRIRLIVEMEQAFKESEWRSAKVKASYTRREKLAKEEGKAPRIRKPFWLNPDGTLNHLHQAVKDMFSWYLEGLGQQRIVVRLREKYPDTAIQKINPSTVMRWIQSEIVRGYWRGNRVYEPAVDDQLFFDVQAIHKSRLYKNVKPDRQWPLSGLMQCGVCGRGMSIQKSGKSNPVVRCSSKQRDHSCDRKTTFPYFIVHMYMMTHVLQHAIRLHSDKSSNKGLQIELGKVERKLATTRKKLNDEKEFYNKASNEGQNTTMILQLMNETYQKVAELEEQEKSLKASLKQNNHSVSPESRDLVLTPETFNLEMHKLGFKIVVGEQELSTIGFDKPVSKMVYVGYCRKERAYKYADGSSDFIKVWPSSLVTDELLNMQMLKNYINSSSGLRYIWDNLYEDDLEENLAKKLKEKR

SEQ ID NO: 55427 - DNA, 50 bp, Vibrio alginolyticus
  source 1..50: mol_type = genomic DNA
aatgtgcacacgtattctttaagtgagctgtaggcgtaggtgtgcaaatt

SEQ ID NO: 55428 - DNA, 40 bp, Vibrio alginolyticus; identical to SEQ ID NO: 55098
  source 1..40: mol_type = genomic DNA

SEQ ID NO: 55429 - DNA, 40 bp, Vibrio alginolyticus
  source 1..40: mol_type = genomic DNA
gttagaccacctactgtgccaactaaaagctggccaatct

SEQ ID NO: 55430 - DNA, 50 bp, Vibrio alginolyticus
  source 1..50: mol_type = genomic DNA
aatctccatttgttttctttaagccagctgtagattgtgttgagtaactt

SEQ ID NO: 55431 - protein, 501 aa, Dorea longicatena
MKQPYNTTIYNTALYLRLSRDDELQGESGSIQTQRMMLRQYAAEHGLTVVDEYIDDGWSGTNFERPSFQRMIDDIEDGKINCVVTKDLSRLGRNYILTGQYTEIYFPSKGVRYIAINDNVDTINGESELAPFLNILNEMHARQTSKKVKAAMRTRFANGAHYGAYAPLGYVKDPDKKGHLLIDPETRWIVEKIFDLAVHGRGAASITRILVEEKVPTPGWLNYERYGTFANIYAGVPAEKAYAWTIAQVKSILKEETYIGHSVHNKQSNISFKNKKKVRKPQEEWYRVENTHEAIISEEVFQKVQELIASRRRKRRNGTTQIFAGLIKCADCGWSLAYGENKQNKNPYGYYHCSKNGQGLRQCSMHYIRYDVLYAYVLARLQYWSMLAQKDEDKLLKRLLNASDRERNSAKKKQAAELKKAEKRKAEVDGLFAKMYEDWSAGRITEYNFNMLSEKYQNEQKELETKIRQLHETMEAAVQTAADAEKWIALMKQYVNPVELT

SEQ ID NO: 55432 - DNA, 50 bp, Dorea longicatena
  source 1..50: mol_type = genomic DNA
aatgaaacagtatgtcaaccctgtggagctgaccgaaacggaattttatt

SEQ ID NO: 55433 - DNA, 40 bp, Dorea longicatena
  source 1..40: mol_type = genomic DNA
gcattgtgccacagacaaaggagctgaccgccgaacttct

SEQ ID NO: 55434 - DNA, 40 bp, Dorea longicatena
  source 1..40: mol_type = genomic DNA
gcattgtgccacagacaaaaaagctgaccgccgaacttct

SEQ ID NO: 55435 - DNA, 50 bp, Dorea longicatena
  source 1..50: mol_type = genomic DNA
actgaaactcaaactcaagactgaaaagatgactgagaaaactttctatt

SEQ ID NO: 55436 - protein, 522 aa, Blautia sp YL58
MIESKSRVAIYCRLSEEDRNKQSETDDSNSIQNQKSMLLQYSLEHGWEVYNIYSDDDYTGSDRRRPEFNRLLEDAKNRKFDIVLCKTQSRFTRELELVEKYIHGLFPIWGIRFISIVDNADTANKGNKKSRQINGLVNEWYLEDMSENIKSVLTDRRKNGYHIGAFALYGYKKDPDVKGHLIIDEEAAEVVREVFTLFSQGYGKTAIARMLNDRGISNPTEYKRLHGLRYKQPKTKNSTLWKYFAISDMLVNEIYIGNMVQGKYGSVSYKTKQNKPRPKDEWYRVEGTHESIIDRELWDRVQALVAQKAKPFTVGTIGLFARKARCMNCGYTMRSSKNRGKHYLQCSNRHVAKDACIGSFISVDKLEKAVIDELNKLSAEYLDKDELEQNVQFNNDLRGQKEALETEIAAYQKKIAEYTKGIRELYLDKVKGILSELDYLDLSKDFSTQKERLEKLVIDTQKQLDVIERKMLIGDNRRQLIEQYTNLEHLDRETVEKLIDYVLVGKKDPVTKEVPIEIHWNF

SEQ ID NO: 55437 - DNA, 50 bp, Blautia sp YL58; identical to SEQ ID NO: 12237
  source 1..50: mol_type = genomic DNA

SEQ ID NO: 55438 - DNA, 40 bp, Blautia sp YL58
  source 1..40: mol_type = genomic DNA
ggtggtacgcgctttctgctctgctgccatatcctcaaat

SEQ ID NO: 55439 - DNA, 40 bp, Blautia sp YL58
  source 1..40: mol_type = genomic DNA
ggtggtacgcgctttctgcaatgctgccatatcctcaaat

SEQ ID NO: 55440 - DNA, 50 bp, Blautia sp YL58
  source 1..50: mol_type = genomic DNA
tgtcctcattatttaatcatccccaatggttctacctcctaataacatca

SEQ ID NO: 55441 - protein, 522 aa, Clostridioides difficile
MIESKSRVAIYCRLSEEDRNKQSETDDSNSIQNQKSMLLQYSLEHGWEVYNIYSDDDYTGSDRRRPEFNRLLEDAKNRKFDIVLCKTQSRFTRELELVEKYIHGLFPIWGIRFISIVDNADTANKGNKKSRQINGLVNEWYLEDMSENIKSVLTDRRKNGHHIGAFALYGYKKYPDVKGHLIIDEEAAEVVREVFTLFSQGYGKTAIARMLNDREIPNPTEYKRLHGLRYKQPKTKNSTLWKYFAISDMLVNEIYIGNMVQGKYGSISYKTKQNKPRPKDEWYRVEGTHEPIIDRELWDRVQALVAQKAKPFTVGTIGLFARKARCMNCGYTMRSSKNHGKHYLQCSNRHVAKDACIGSFISVDKLEKAVIDELNKLSAEYLDKDELEQNVQFNNDLRGQKEALETEIAAYQKKIAEYTKGIRELYLDKVKGILSELDYLDLSKDFSTQKERLEKLVIDTQKQLDVIERKMLIGDNRRQLIEQYTNLEHLDRETVEKLIDYVLVGKKDPVTKEVPIEIHWNF

SEQ ID NO: 55442 - DNA, 50 bp, Clostridioides difficile; identical to SEQ ID NO: 12237
  source 1..50: mol_type = genomic DNA

SEQ ID NO: 55443 - DNA, 40 bp, Clostridioides difficile
  source 1..40: mol_type = genomic DNA
cgtagccaatgctttttgttcagcagccatatcctcatgt

SEQ ID NO: 55444 - DNA, 40 bp, Clostridioides difficile
  source 1..40: mol_type = genomic DNA
cgtagccaatgctttttgtaaagcagccatatcctcatgt

SEQ ID NO: 55445 - DNA, 50 bp, Clostridioides difficile; identical to SEQ ID NO: 55440
  source 1..50: mol_type = genomic DNA

SEQ ID NO: 55446 - protein, 522 aa, Blautia producta
MIESKSRVAIYCRLSEEDRNKQSETDDSNSIQNQKSMLLQYSLEHGWEVYNIYSDDDYTGSDRRRPEFNRLLEDAKNRKFDIVLCKTQSRFTRELELVEKYIHGLFPIWGIRFISIVDNADTANKGNKKSRQINGLVNEWYLEDMSENIKSVLTDRRKNGHHIGAFALYGYKKDPDVKGHLIIDEEAAEVVREVFTLFSQGYGKTAIARMLNDRGIPNPTEYKRLHGLRYKQPKTKNSTLWKYFAISDMLVNEIYIGNMVQGKYGSVSYKTKQNKPRPKDEWYRVEGTHEPIIDRELWDRVQALVAQKAKPFTVGTIGLFARKARCMNCGYTMRSSKNHGKHYLQCSNRHVAKDACIGSFISVDKLEKAVIDELNKLSAEYLDKDEVEQNVQFNNDLRGQKEALETEIAAYQKKIAEYTKGIRELYLDKVKGILSELDYLDLSKDFSTQKERLEKLVIDTQKQLDVIERKMLIGDNRRQLIEQYTNLEHLDRETVEKLIDYVLVGKKDPVTKEVPIEIHWNF

SEQ ID NO: 55447 - DNA, 50 bp, Blautia producta; identical to SEQ ID NO: 12237
  source 1..50: mol_type = genomic DNA

SEQ ID NO: 55448 - DNA, 40 bp, Blautia producta; identical to SEQ ID NO: 55438
  source 1..40: mol_type = genomic DNA

SEQ ID NO: 55449 - DNA, 40 bp, Blautia producta; identical to SEQ ID NO: 55439
  source 1..40: mol_type = genomic DNA

SEQ ID NO: 55450 - DNA, 50 bp, Blautia producta; identical to SEQ ID NO: 55440
  source 1..50: mol_type = genomic DNA

SEQ ID NO: 55451 - protein, 583 aa, Enterobacter hormaechei
MATRLYSYVRWSTDKQSGNTSLDRQTDKAKAFASLHGLEYVQILDAGISAFRGKNTTQGALAGFIEAVKAGAIPNDSYLYVENLDRLTRQDVMTALNLFTGLLSLGLTIVTGMDGKVYSQDSVKNNVTDLMMSLFLFSRANEESLTKQKRAHETALKLIDRHRAGLPVNIKSAGSAPWWIDASMGTYEAVKPHPVHWKAAQKAVELMLEGWGCFRVASYLTDNPDLYPPPRGNRGKGKKRSECWAVANLKAMRSNRALYGEKVITIDGVTHRLSNYYPAVCSQTDFARLQDVACSNRHKVGEVRQTITLLSGLGLLRCGHCGGSMSFFSKEGRIRYVCETGKNKTSACRVWSVSGLLVERCLLAPLIRGYMDLMMGKQGKREDLTQAIEAKQGELNGIESQISNITSAITMGGNIPALVASLQALEHTKSGVLVELERLTQRQALQDGKDHQLESMVDFYELLTPDLLEDTTDERRLKVREVVRAVVRSVTLSKGPDKALTLSYELQDKTAYVYTGTLTAEGKKGYTLEVVNGDIQINGTEDNEEAQRLIGVIQDAEQEYHKAISKILAGFPAPVGSHFFGKR

SEQ ID NO: 55452 - DNA, 50 bp, Enterobacter hormaechei
  source 1..50: mol_type = genomic DNA
attggaatctaaaaatattttgggttccccaacttcaaatagatgccaat

SEQ ID NO: 55453 - DNA, 40 bp, Enterobacter hormaechei
  source 1..40: mol_type = genomic DNA
atcaatcgggtatttcggatttcccgggtggctgataatg

SEQ ID NO: 55454 - DNA, 40 bp, Enterobacter hormaechei
  source 1..40: mol_type = genomic DNA
atcaatcgggtatttcggagctcccgggtggctgataatg

SEQ ID NO: 55455 - DNA, 50 bp, Enterobacter hormaechei
  source 1..50: mol_type = genomic DNA
attggtatctagttaaaatttgaggcctctgacttcacaagtataccagt

SEQ ID NO: 55456 - protein, 493 aa, Faecalibacterium prausnitzii; identical to SEQ ID NO: 44951

SEQ ID NO: 55457 - DNA, 50 bp, Faecalibacterium prausnitzii
  source 1..50: mol_type = genomic DNA
ctaatttgacatagcaacgctgcttatggcgttgtcgaaacgggtgaaga

SEQ ID NO: 55458 - DNA, 40 bp, Faecalibacterium prausnitzii
  source 1..40: mol_type = genomic DNA
tcccgctttgctctgaaccgatatagagtgaagcactact

SEQ ID NO: 55459 - DNA, 40 bp, Faecalibacterium prausnitzii
  source 1..40: mol_type = genomic DNA
tcccgctttgctctgaaccattatagagtgaagcactact

SEQ ID NO: 55460 - DNA, 50 bp, Faecalibacterium prausnitzii
  source 1..50: mol_type = genomic DNA
ataatagcacctacctatgctattattggagttgtcatgagggttgaaga

SEQ ID NO: 55461 - protein, 452 aa, Blautia marasmi
MKKIRCALYDRVSHDLQAKYGLSLETQMEDLKEYALSHGYEIVGTYSDEGITARKKLQNRKDFMRLLSDVQQDKIDLILVTKLDRWFRNVKDYHNTQAILEAHHCNWKTVHEDYDTSTADGQLKINIMLAVAQNECDRTSERIKVVFAHKKRQGQHVTGAAPYGYILGDDKRLHKDPEREHIVDEIFKYYFSCFSKRRTVFYILDKYSDDKKLTEYKINRILSNEAYAGIYDGIEGYHPAYITPDQYREIHKISTAKSYPHTREPYLFSGLIKCPHCGSCLSGITKKQKLGNGDISHYKRYRCSRKFDYHSSPCITESVIEEYMVANLIPQLENNIFNIQQQQQAMKKNPQNRVSKIKSEMNRLNLLFQKGRIEEAYYDQEYGRLEKELKKEQPVAVPLEKYLEIKKSVSGDWQRLYDKLDVEHRKAFWKRTIKEIHVDPETHKICGFEFLV

SEQ ID NO: 55462 - DNA, 50 bp, Blautia marasmi
  source 1..50: mol_type = genomic DNA
aggtgtagtatcttataaaaatccgttgaatttatatgattactacacct

SEQ ID NO: 55463 - DNA, 40 bp, Blautia marasmi
  source 1..40: mol_type = genomic DNA
tggtcagggtgactttactgttgaatttgaaccaagcgcc

SEQ ID NO: 55464 - DNA, 40 bp, Blautia marasmi
  source 1..40: mol_type = genomic DNA
tggtcagggtgactttacttctgaatttgaaccaagcgcc

SEQ ID NO: 55465 - DNA, 50 bp, Blautia marasmi
  source 1..50: mol_type = genomic DNA
aggtgaagttattgttattaatactctgcatttatactgcacttaaaact

SEQ ID NO: 55466 - protein, 550 aa, Flavonifractor plautii
MKQSDKITALYCRLSRDDESQGDSNSIVNQKAYLSRYAKEHSFRNTEFFVDDGYTGANFQRPDWQRMMALVEDGKIGTVITKDMSRIGRNYLEVGMYTEITFPQNNVRFIAINSGVDSANQQDNEFVPFVNIINEYYVRDGSKKVRTSLRLKGESGEHLTTIPPYGYVKDPDNSEHWLVDPEAAQVVKRIFSLCMDGNGPTQIARMLKEDHMLTPTVYQDRQKRKVRCALPDNPYNWNGSTVAAILERMEYCGHTVNFKTHRQSYKIKKTIENPPEQWKIFRNTHEAIVDEDTFQRVQELRRNKRRPARTGKSNLFSGVAYCADCGEKMYYCTSRNFEERQDHFVCSTSRKKGKDVCGTHFIRAVVLEKGVLRFLQILLWYISDCEDLFRDKLGAKRKEDFKKELAAKRRQLTQAQRRMEELDRLFKRLYEDNISGKINDSRFEKLSADYENEQAELTEKMQLLEQEITQQEKEADSIEQFILRAKKYPNLQELTPAVLHDLVSRVYVSAPDKSSGQRVQDVHISLACIGFLPESIIAEMLTHAAKSRTA

SEQ ID NO: 55467 - DNA, 50 bp, Flavonifractor plautii
  source 1..50: mol_type = genomic DNA
aacctgtcttatgcgcttctaccctggggtagctgtccataaaacaggtt

SEQ ID NO: 55468 - DNA, 40 bp, Flavonifractor plautii
  source 1..40: mol_type = genomic DNA
cagaaaaaaggtacgcccctgcggggcgtacctttttttg

SEQ ID NO: 55469 - DNA, 40 bp, Flavonifractor plautii
  source 1..40: mol_type = genomic DNA
cagaaaaaaggtacgccccttcggggcgtacctttttttg

SEQ ID NO: 55470 - DNA, 50 bp, Flavonifractor plautii
  source 1..50: mol_type = genomic DNA
catttgtctttaatgcttctacaattaggtagatgttttaaaaacatgcc

SEQ ID NO: 55471 - protein, 652 aa, Streptomyces scabiei
MSNVSTTLPAAIGTSTRTTGTRSLRAVDYLRVSTEEQKKGYGVARQRRKTVRHIALKQWAHVGTYKDEGVSGSLEAADRGDLKRLMEEAQQTPRPFDIVVVPDGRVIGRKGRAFWRWVWALEDIGVYVAVVADDYDNTTTEGRKKMRRDADYAETEWETIRERTQGGLQEKAELTPAAHIGGRPPYGFRIANKGTPGSYLEIETTEAKVVAYVYELVVSEGLNLREATIRLNSEGSTTRSGKTWTRDNLRDRIMSTAVLDGVTLFRGKHAHIDDEGDPIWGQSIRIELPRILTQDQSTELRSKVAETAKRSSGQREFYPLTGRVISLCGKTYTGISRSAENRNRFYRCAGAVPKDVTQKPCGCSYVDAAALEAHVWGKVTEIASDSDKLQELATEWIGMAESDKVALTDRIAGLDQQITDMNASITAVIVATAKQSKSADAIEAATTALNIELQQLQNLRDEAAEWLADMEESDRRARDLRALASMARTSFPEMAPEQQAAILSMLELKVTVKGPVPDGRRGGVPCTVRAWYAAAGLQVPASAVSDDDWTKIAPLLPKGRTGTVRRSVDAIFYKARTGKSWPKVFKDTGATHQASVLFNAWKSDGTWTRVNAVLADVERTPLPEPELLPTMVIEGRVDPTAMLHVEERSRTG

SEQ ID NO: 55472 - DNA, 50 bp, Streptomyces scabiei
  source 1..50: mol_type = genomic DNA
gctgcacgtagaagaacgatcccgaaggggatcgtcctcgcacgttcctg

SEQ ID NO: 55473 - DNA, 40 bp, Streptomyces scabiei
  source 1..40: mol_type = genomic DNA
gcggaacgaggcgatgccgaacgggatgccgatgatcgtg

SEQ ID NO: 55474 - DNA, 40 bp, Streptomyces scabiei
  source 1..40: mol_type = genomic DNA
gcggaacgaggcgatgccgtccgggatgccgatgatcgtg

SEQ ID NO: 55475 - DNA, 50 bp, Streptomyces scabiei
  source 1..50: mol_type = genomic DNA
gctgcacattctggaacaagtccttcggtgatcataagcacacgcttctg

SEQ ID NO: 55476 - protein, 507 aa, Escherichia coli
MKRVISYIRFSSERQAKGDSLRRQSKMVNDWLKAHPEYYLDQDLSFRDLGVSGFTGKHLKGGLGDFLTAIEKGLVKAGDTLLIESLDRLSRQDIDIASELLRRILRAGVDIVTLSDGEHYTRESLKDPLALIKSILIMQRAHEESLRKAERIQAAWDAKKEAAKAGIKISKRCPAWLKLNDDRKTFSVIPEKVETVRRCFQLRLEGKSIWEIVRTLNDEGHQTLNQYKAGKFGQTSVQDLLKNRSVIGYFTPKGCEEIAGYFPPIIPETDFYKVQQLSYSRYGRKPASDKPLSVNLFKGVIRCSECGHALIITGFSDTRNGIYRCPLRNENRCSAKGLSRKQTDGTLLALLSRLDRFDSDTTNIIDTLKLHREHISSNIEKLVQLSLEIEDLSAITSKLKQLKGELSQVDADIEKETQRLKSIDVGCLSDCDLTTKAGRIEAQLIIKSAVKEVVLNTAKRRCKVTFHNGKIIDLPITENPSEDVTEAIQSLSEVTERGLIDVDEVII

SEQ ID NO: 55477 - DNA, 50 bp, Escherichia coli
  source 1..50: mol_type = genomic DNA
tagtgtatttagaccttgctaatcttcatcagacacgtttaaatacacca

SEQ ID NO: 55478 - DNA, 40 bp, Escherichia coli; identical to SEQ ID NO: 21333
  source 1..40: mol_type = genomic DNA

SEQ ID NO: 55479 - DNA, 40 bp, Escherichia coli; identical to SEQ ID NO: 22799
  source 1..40: mol_type = genomic DNA

SEQ ID NO: 55480 - DNA, 50 bp, Escherichia coli; identical to SEQ ID NO: 5190
  source 1..50: mol_type = genomic DNA

SEQ ID NO: 55481 - protein, 507 aa, Escherichia coli
MKRVISYIRFSSERQAKGDSLRRQSKMVNDWLKAHPEYYLDQDLSFRDLGVSGFTGKHLKGGLGDFLTAIEKGLVKAGDTLLIESLDRLSRQDIDIASELLRNILRSGVDVVTLSDGEHYTKESLRDPLSLIKSILIMQRAHEESLRKAERIQAAWDAKKEAAKAGIKISRRCPAWLKLNDDRKSFSVIPEKVETVKRCFQLRLEGKSIWEIVRTMNAEGHQTLNQYKAGSFGQTSVQDLLKNRSVIGYFTPKGCEEISGYYPAIIDETTFYKVQQLSYARYGRKPASDKPLSVNLFKGVIRCSECGHALIITGFSDTRSGIYRCPLRNENRCNAKGLSRKQTDSTLLALLSRLDRFDSDMTNTVDTLKLHREHISNNIEKLVQLSLEIEDLSAITSKLKQLKGELSQVDADIEKETQRLKSIDVGCLSDCDLTTKAGRIEAQLIIKSAVKEVVLNTAKRRCKVTFHNGKVIDLPITENPSEDVTEAIQSLSEVTERGLIDVDEVII

SEQ ID NO: 55482 - DNA, 50 bp, Escherichia coli; identical to SEQ ID NO: 55477
  source 1..50: mol_type = genomic DNA

SEQ ID NO: 55483 - DNA, 40 bp, Escherichia coli; identical to SEQ ID NO: 5188
  source 1..40: mol_type = genomic DNA

SEQ ID NO: 55484 - DNA, 40 bp, Escherichia coli; identical to SEQ ID NO: 5189
  source 1..40: mol_type = genomic DNA

SEQ ID NO: 55485 - DNA, 50 bp, Escherichia coli; identical to SEQ ID NO: 5190
  source 1..50: mol_type = genomic DNA

SEQ ID NO: 55486 - protein, 507 aa, Escherichia coli
MKRVISYIRFSSERQAKGDSLRRQSKMVTDWLKAHPEYYLDQDLSFRDLGVSGFTGKHLKGGLGDFLTAIEKGLVKAGDTLLIESLDRLSRQDVDQASELLRNILRSGVDVVTLSDGEHYTKESLRDPLSLIKSILIMQRAHEESLRKAERIQAAWDAKKEAAKAGIKISRRCPAWLKLNDDRKSFSVIPEKVETVKRCFQLRLEGKSIWEIVRTLNAEGHQTLNQYKAGKFGQTSVQDLLKNRSVIGYFTPKGCEEISGYYPAIIDETTFYKVQQLSYARYGRKPASDKPLSVNLFKGVIRCSECGHALIITGFSDTRNGIYRCPLRNENRCSAKGLSRKQTDGTLLTLLSRLDRFDSDTTNTIDMLRLHREHISSNIEKLVQLSLEIEDLNAITNKLKQLKNELSQVDADIEKETQRLKSIDVGCLSDCDLTTKAGRIEAQLIIKSAVKEVVLNTAKRRCKVTFHNGKLIDLPITETPSKDVTEAIQSLSEVTERGLIDVDEVII

SEQ ID NO: 55487 - DNA, 50 bp, Escherichia coli; identical to SEQ ID NO: 55477
  source 1..50: mol_type = genomic DNA

SEQ ID NO: 55488 - DNA, 40 bp, Escherichia coli; identical to SEQ ID NO: 5188
  source 1..40: mol_type = genomic DNA

SEQ ID NO: 55489 - DNA, 40 bp, Escherichia coli; identical to SEQ ID NO: 5189
  source 1..40: mol_type = genomic DNA

SEQ ID NO: 55490 - DNA, 50 bp, Escherichia coli; identical to SEQ ID NO: 5190
  source 1..50: mol_type = genomic DNA

SEQ ID NO: 55491 - protein, 507 aa, Escherichia coli
MKRVISYIRFSSERQAKGDSLRRQSKMVTDWLKAHPEYYLDQDLSFRDLGVSGFTGKHLKGGLGDFLTAIEKGLVKAGDTLLIESLDRLSRQDVDQASELLRNILRSGVDVVTLSDGEHYTKESLKDPLALIKSILIMQRAHEESLRKSERIQAAWNRKKELISEGIKISKRCPAWLKLNDDRKSFSVIPDKVETVKRCFQLRLEGKSIWEIVRTLNAEGRQTLNQHKAGSFGQTSVQDLLKNRSVIGYFTPKGCEEISGYYPAIIDETTFYKVQQLSYARYGRKPASDKPMAVNLFKGVIRCSECGHALIITGFSDTRNGIYRCPLRNENRCSAKGLSRKQTDGTLLALLSRLDRFDSDMTNTIDTLKLHREHISSNIEKLVQLSLEIEDLSAITSKLRQLKNELSQVDADIEKETQRLKSIDVGCLSDCDLTTKAGRIEAQLIIKSAVKEVVLNTAKRRCKVTFHNGKAITLPITENPSDNVTEAIQSLSEVTERGLIDVDEVII

SEQ ID NO: 55492 - DNA, 50 bp, Escherichia coli
  source 1..50: mol_type = genomic DNA
aggtgtatttagaccttgctaatgttcatcagacacgtttaaatacacca

SEQ ID NO: 55493 - DNA, 40 bp, Escherichia coli; identical to SEQ ID NO: 5188
  source 1..40: mol_type = genomic DNA

SEQ ID NO: 55494 - DNA, 40 bp, Escherichia coli; identical to SEQ ID NO: 5189
  source 1..40: mol_type = genomic DNA

SEQ ID NO: 55495 - DNA, 50 bp, Escherichia coli; identical to SEQ ID NO: 5190
  source 1..50: mol_type = genomic DNA

SEQ ID NO: 55496 - protein, 507 aa, Escherichia coli
MKRVISYIRFSSERQAKGDSLRRQSKMVNDWLKAHPEYYLDQDLSFRDLGVSGFTGKHLKGGLGDFLTAIEKGLVKAGDTLLIESLDRLSRQDVDQASELLRNILRSGVDVVTLSDGEHYTRESLKDPLSLIKSILIMQRSHEESLRKSERIQAAWDAKKEAAKAGIKISRRCPAWLKLNDDRKSFSVIPEKVETVKRCFQLRLEGKSIWEIVRTLNAEGHQTLNQYKAGSFGQTSVQDLLKNRSVIGYFTPKGCEEIADYYPAIIDETTFYKVQQLSYARYGRKPASDKPMAVNLFKGVIRCSECGHALIITGFSDTRNGIYRCPLRNENRCSAKGLSRKQTDGTLLTLLSRLDRFDSDTTNTIDTLKLHREHISSNIEKLVQLSLEIEDLSAITSKLKQLKNELSQVDADIEKETQRLKSIDVGCLSDCDLTTKAGRIEAQLIIKSAVKEVVLNTAKRRCKVTFHNGKVIDLPITENPSDNVTEAIQSLSEVTERGLIDVDEVII

SEQ ID NO: 55497 - DNA, 50 bp, Escherichia coli; identical to SEQ ID NO: 55477
  source 1..50: mol_type = genomic DNA

SEQ ID NO: 55498 - DNA, 40 bp, Escherichia coli; identical to SEQ ID NO: 5188
  source 1..40: mol_type = genomic DNA

SEQ ID NO: 55499 - DNA, 40 bp, Escherichia coli; identical to SEQ ID NO: 5189
  source 1..40: mol_type = genomic DNA

SEQ ID NO: 55500 - DNA, 50 bp, Escherichia coli; identical to SEQ ID NO: 5190
  source 1..50: mol_type = genomic DNA

SEQ ID NO: 55501 - protein, 507 aa, Escherichia coli
MKRVISYIRFSSERQAKGDSLRRQSKMVNDWLKAHPEYYLDQDLSFRDLGVSGFTGKHLKGGLGDFLTAIEKGLVKAGDTLLIESLDRLSRQDVDQASELLRNILRSGVDVVTLSDGEHYTKESLRDPLSLIKSILIMQRAHEESLRKAERIQAAWDAKKEAAKAGIKISRRCPAWLKLNDDRKSFSVIPEKVETVKRCFQLRLEGKSIWEIVRTLNAEGHQTLNQYKAGKFGQTSVQDLLKNRSVIGYFTPKGCEEIAGYFPPIIPETDFYKVQQLSYSRYGRKPASDKPLSVNLFKGVIRCSECGHALIITGFSDTRSGIYRCPLRNENRCSAKGLSRKQTDGTLLALLSRIDRFDSDMTNVIDTLKLHREHISSNIEKLVQLSLEIEDLNAITNKLKQLKNELSQVDADIEKETQRLKSIDVGCLSDCDLTTKAGRIEAQLIIKSAVKEVILNTAKRRCKVTFHNGKVIDLPITEDPSENVTEAIQSLSEVTERGLIDVDEVII

SEQ ID NO: 55502 - DNA, 50 bp, Escherichia coli; identical to SEQ ID NO: 47657
  source 1..50: mol_type = genomic DNA

SEQ ID NO: 55503 - DNA, 40 bp, Escherichia coli; identical to SEQ ID NO: 5188
  source 1..40: mol_type = genomic DNA

SEQ ID NO: 55504 - DNA, 40 bp, Escherichia coli; identical to SEQ ID NO: 5189
  source 1..40: mol_type = genomic DNA

SEQ ID NO: 55505 - DNA, 50 bp, Escherichia coli; identical to SEQ ID NO: 5190
  source 1..50: mol_type = genomic DNA

SEQ ID NO: 55506 - protein, 535 aa, Mycobacterium senegalense
MSQQLRALVGARVSVVQGPQKVAHIAQLETAKKWAEAKGYKIVGTFEDLGVSAEKPPEDRPDLGPWLTDEGAAKWDVIVWSKMDRAFRSTAHCVDFARWAEERRKVVAFADDGLVLDYLPKRPGAVKGIDEMMAELFVYLGSFFAQLELNRFKTRAQDAHRVLRQMDRWASGVPPLGFKVVDHPSGKGKGLDTDETGKALLHSMARRLLDGWSFIRIAAWLNEPYADPRCGRRHVTGCECRDSAALTNMDRARVLAGKPAKARPWTVNVVIDGLTSPRTQGLKMTGRGKHAMTVLDAEGEPIRLGPPTFDADTWKQIQDAAQRRKIGQRTPSKTKNPVLGVAVCGCTGCPACGVTEGICGASLAQQITRRKLASGEMGEWRSYRCGRTPLNCNGVSARADDVEFQLAHEFGFTRGDEPMTRRVFVPGEDHSAELEQVKATIDRLRMESDAGLLTTDEDQRQWLERLKAQTAKRDQLAVMPARAAGWTTEETGQTKAEAWKAADESERRQLYLDAGLRYVLCRKGERSYFDRSHTL

SEQ ID NO: 55507 - DNA, 50 bp, Mycobacterium senegalense
  source 1..50: mol_type = genomic DNA
gctcgtaatcgtgttgtcacctctcagcaggtgaccatacactgataacc

SEQ ID NO: 55508 - DNA, 40 bp, Mycobacterium senegalense
  source 1..40: mol_type = genomic DNA
ggtgggcatgttgttggaccagcagattccgatggaggtc

SEQ ID NO: 55509 - DNA, 40 bp, Mycobacterium senegalense
  source 1..40: mol_type = genomic DNA
ggtgggcatgttgttggacgcgcagattccgatggaggtc

SEQ ID NO: 55510 - DNA, 50 bp, Mycobacterium senegalense
  source 1..50: mol_type = genomic DNA
gctggtactgtggctgtcacctctgctggggtgtacagtacttcagaacc

SEQ ID NO: 55511 - protein, 575 aa, Holdemanella biformis
MTATQKHDIIPICTTVLSADQPPKEDIMLDQQKITILYCRLSNEDAQEGESNSIANQREYLTRYARDHGYTNLKILVDDGYTGTNFNRPGVQEGFELVKQGLVGCWLVKDLSRFGRDYLTVGQYTDIIFPSYDVRFIAINDGVDSNRGDSEGFAAIRNLFNEWYPRDTSKKVRVSLRQRGTSGKHMGKPPYGYRCDPEDKDHWILDEEAAPVVKLIFDLCIDGKGPEQIARILEEKQIMTAKALYAKRKKKPMPERPYHWGNQSIAGILERQEYTGCTCNFKTYSKSYKLKKRIPNEPENMFYLPDTQEAIVSQAQFDRVQELRKNKRRPAKAERQGLFSELLFCADCGGKLHFATSKSFEGKQDHYVCNNYKSNRGTCTAHYIREDVLREIVLERIRAVNEYIRSDVDGFQEEWLQCRRTDQERSIRDDKKKLEQAKKRLADLDVIIARLYEDYVLGNLNQDRYRKMSADYEAEQERLKLEIEVIEEWVEQREEMNDGLDAFIALTQKYVDVEELTQTIVNEYIKKIIVYAPDKSSGKRKQKVKIFFNFVDDVDIPVISEPIITQTTYEHRKTA

SEQ ID NO: 55512 - DNA, 50 bp, Holdemanella biformis; identical to SEQ ID NO: 277
  source 1..50: mol_type = genomic DNA

SEQ ID NO: 55513 - DNA, 40 bp, Holdemanella biformis
  source 1..40: mol_type = genomic DNA
cgaaaaaaccccgaaaccgttgtggtatcggggttttccg

SEQ ID NO: 55514 - DNA, 40 bp, Holdemanella biformis
  source 1..40: mol_type = genomic DNA
cgaaaaaaccccgaaaccgatgtggtatcggggttttccg

SEQ ID NO: 55515 - DNA, 50 bp, Holdemanella biformis
  source 1..50: mol_type = genomic DNA
ctagttacatgacctttttatgccatagcttcataggattaaggaaatca

SEQ ID NO: 55516 - protein, 575 aa, Mediterraneibacter faecis; identical to SEQ ID NO: 3726

SEQ ID NO: 55517 - DNA, 50 bp, Mediterraneibacter faecis; identical to SEQ ID NO: 277
  source 1..50: mol_type = genomic DNA

SEQ ID NO: 55518 - DNA, 40 bp, Mediterraneibacter faecis
  source 1..40: mol_type = genomic DNA
cgcgaaagcccgctaacctttcggctaacgggcttcgttg

SEQ ID NO: 55519 - DNA, 40 bp, Mediterraneibacter faecis
  source 1..40: mol_type = genomic DNA
cgcgaaagcccgctaacctatcggctaacgggcttcgttg

SEQ ID NO: 55520 - DNA, 50 bp, Mediterraneibacter faecis; identical to SEQ ID NO: 55515
  source 1..50: mol_type = genomic DNA

SEQ ID NO: 55521 - protein, 662 aa, Klebsiella quasipneumoniae
MTKLYSYVRWSSEKQGNSTTLSRQMSSARDFAREKGLELVEIIDPGVSAYRGKNANEGKLADFISAVEGGVIDRDSWLYVENLDRITRQSPTKAQTLFIRLLDLGLTVVTGMDRRIYTLQSVNDNPTELMVSLLLFSRSHEESKTKGNRTKGNVEALVKRFRDGLPVNIKSVGKHPWWIDESGSQYEAVKKHEHYWPIAREIIDLFMAGHGAYKAKRYLDDKYPKGFVGGAEWDYQMLIRMRKSRALIGERTIVLNKKPSKKKQADQDIWSDICTEPEIKYVLKGYYPSLCTDEVEFIKLQEVRSKNAYQSKDSTGTVNIKLLSGIGILRCGRCGGTMNSFMNKGKPRYICTNGRHLQKNCTGWSVNAMLIEHCTIIALIVGYMDTDRKTGFDTDVITKQIEVLNDKLIDLDKGIANITLAIEKGLELEQLINKGMELQQERGKIIKDIDLLVQRKAVYENKGSFEIAMFDFIEMIQWNVIIDTSNEIRNKIRSVIDRIIDEVKIDKVDGCISVRIKLIGNDVVFVFAGENRKPNWKFDVEYYSSSTDKNSESDIYIRNTLETDALNKIFEQLDTLRGKYQKLLKHIMNEILPVAGYPAIDGKMFWPNTSGNERVVVSYKGERHTLAVKGTLPANIAALIEDSGLKRKEFIEAYHIKNELNE

SEQ ID NO: 55522 - DNA, 50 bp, Klebsiella quasipneumoniae
  source 1..50: mol_type = genomic DNA
aagtttgtttcttgatttttcgggcagcccaatgatataaatccaatctt

SEQ ID NO: 55523 - DNA, 40 bp, Klebsiella quasipneumoniae; identical to SEQ ID NO: 5518
  source 1..40: mol_type = genomic DNA

SEQ ID NO: 55524 - DNA, 40 bp, Klebsiella quasipneumoniae
  source 1..40: mol_type = genomic DNA
gtccacgaggtttttcgggaagcccagggagacgaagccg

SEQ ID NO: 55525 - DNA, 50 bp, Klebsiella quasipneumoniae
  source 1..50: mol_type = genomic DNA
aagttgattttaaaattttttcggaagctcaaagaaattcctcaaacttt

SEQ ID NO: 55526 - protein, 662 aa, Klebsiella pneumoniae
MTKLYSYVRWSSEKQGNSTTLSRQMSSARDFAREKGLELVEIIDPGVSAYRGKNANEGKLADFISAVEGGVIDRDSWLYVENLDRITRQSPTKAQTLFIRLLDLGLTVVTGMDRRIYTLQSVNDNPTELMVSLLLFSRSHEESKTKGNRTKGNVEALVKRFRDGLPVNIKSVGKHPWWIDESGSQYEAVKKHEHYWPIAREIIDLFMAGHGAYKAKRYLDDKYPKGFVGGAEWDYQMLIRMRKSRALIGERTIVLNKKPSKKKQADQDIWSDICTEPEIKYVLKGYYPSLCTDEVEFIKLQEVRSKNAYQSKDSTGTVNIKLLSGIGILRCGRCGGTMNSFMNKGKPRYICTNGRHLQKNCTGWSVNAMLIEHCTIIALIVGYMDTDRKTGFDTDVITKQIEVLNDKLIDLDKGIANITLAIEKGLELEQLINKGMELQQERGKIIKDIDLLVQRKAVYENKGSFEIAMFDFIEMIQWNVIIDTSNEIRNKIRSVIDRIIDEVTIDKVDGCISVRIKLIGNDVVFVFAGENRKPNWKFDVEYYSSSTDKNSESDLYIRNALETDALNKIFEQLDTLRGKYQKLLKHIMNEILPVAGYPAIDGKMFWPNTSGNERVVVSYKGERHTLAVKGTLPANIAALIEDSGLKRKEFIEAYHIKNELNE

SEQ ID NO: 55527 - DNA, 50 bp, Klebsiella pneumoniae; identical to SEQ ID NO: 55522
  source 1..50: mol_type = genomic DNA

SEQ ID NO: 55528 - DNA, 40 bp, Klebsiella pneumoniae; identical to SEQ ID NO: 5518
  source 1..40: mol_type = genomic DNA

SEQ ID NO: 55529 - DNA, 40 bp, Klebsiella pneumoniae; identical to SEQ ID NO: 55524
  source 1..40: mol_type = genomic DNA

SEQ ID NO: 55530 - DNA, 50 bp, Klebsiella pneumoniae; identical to SEQ ID NO: 55525
  source 1..50: mol_type = genomic DNA

SEQ ID NO: 55531 - protein, 506 aa, Agrobacterium vitis
MSDKDFVILGYARVSGKKQVKEGDGLGSQEARIREYARSRSYPTLSAMFTDNKTGGTDARPGFAALLKFLMKNRRATCIVIIDDITRLARSVLVHHKLRAAIASTGAKLECPSHEFGDSSDDILVENLLASVSQHQRQKNGEQVLNRMKGRLLNGYWCFSSKPPAYKFARVAGQNILIREEPIATIVIEALEGFASGRFQTQAEVQRFLEGSPGFPKRKDGSVKFDRVTEMLTCVLYAGMIEYLPWSVSIRKGHHAGLITYETYQKIQMRLKENAKAPARADLSHHFPLRQAVQCGSCGRLLGGAFSRGRNTEYPYYFCLNKKCLRYKKSFSRDTVHSDFEELLKKMAPTSEVIQTATSIFRETWEKRSASLTERTALSRGELSSIEKLIGGLIDRIGAATDAELIRAYEARLVSLQREKASLTEKIENSELRQPDFDSTLRTALAFLASPWKLWETGNLEDRRAVRKLVFTEHLQYEPESGFRTAETTLPFKILTDLKTDKIEMV

SEQ ID NO: 55532 - DNA, 50 bp, Agrobacterium vitis
  source 1..50: mol_type = genomic DNA
gacttaaagactgacaaaatagagatggtgcagccggcgggagaaagaac

SEQ ID NO: 55533 - DNA, 40 bp, Agrobacterium vitis
  source 1..40: mol_type = genomic DNA
atggaattgatgtgaaagaatggtgcccccggcaggattc

SEQ ID NO: 55534 - DNA, 40 bp, Agrobacterium vitis
  source 1..40: mol_type = genomic DNA
atggaattgatgtgaaagatgggtgcccccggcaggattc

SEQ ID NO: 55535 - DNA, 50 bp, Agrobacterium vitis
  source 1..50: mol_type = genomic DNA
gccttaaaggtagtcccaaaagagtggctgcaaatatttagagtaagaac

SEQ ID NO: 55536 - protein, 519 aa, Ruminococcus lactaris
MNIAAYCRVSTDKADQLNSLEAQKEFFSEYTKRTGDTLVRLYADEGISGTKIKNRKEFLRMMSDAEHGLFDMVVVKDISRFARNTVDLLQNVRKLKSLGIETQFLTANMTSMGNSEFVLTIFGALAQEESANTSKRVKFGKKMNAEKGRVPNIVYGYDKTIGDYFNLAINKEESKVVKQIYKWYTEEGYGAAKIANMLNEKGYKTKRNCKWSQNATCRILTNEIYTGKIINGKQEVSDFLTGQRRDKDETEWMVVERSELRIIEDETFEKAQEILRGRHDAFNLSHERQSNKHLFSTLIKCKECGWSFRRTVRTYKNTYVRWVCSGRNGRGADSCPNKTVVDEEELIEVLQEYFTNVLKQKKKVIAHVVNEFQRVYKAKDENVEYEKELNAELAKLQKTRQKYMDMYTDDLISREELNEKIGGSRQEMERIENELKMVSYHLTKGEQLENILNNTFKEIEDITDVHQMTNQQLKQLIQKIEVDKDGNVDIYLRLLGDLGLDESVLIEENKTVLNCNDQT

SEQ ID NO: 55537 - DNA, 50 bp, Ruminococcus lactaris
  source 1..50: mol_type = genomic DNA
ccgttctaaattgtaacgaccaaacatatggttgtaacaatatagaactg

SEQ ID NO: 55538 - DNA, 40 bp, Ruminococcus lactaris
  source 1..40: mol_type = genomic DNA
gataagtaagagtacggtacataaagacgtcaccgagcgg

SEQ ID NO: 55539 - DNA, 40 bp, Ruminococcus lactaris
  source 1..40: mol_type = genomic DNA
gataagtaagagtacggtagataaagacgtcaccgagcgg

SEQ ID NO: 55540 - DNA, 50 bp, Ruminococcus lactaris
  source 1..50: mol_type = genomic DNA
ccattcaaaggaagaatgaagaaagagaaaattgtattctcatagaacag

SEQ ID NO: 55541 - protein, 540 aa, Erwinia rhapontici
MKIPVLYIRVSSKEQSLNGGGIEDQQRAAMSYINSMPQHFDISRLVIIKDEGVSSFKGDNLLEGMPLRDFVQGCIERQDGNRHSLIVYSVDRISRMNVWVSTQFVAQTIMSGIEIHDLMTRQVLKADDQIGAIISTLNLIRANSESEAKSIRRRDSIESSLRRSLETGKAMPGKVPKWLKIVDETYVVEERIASCIRDSVDWYIEGQTSGQIVNRLNNTGRLYGEMLWSAAFLIKTLKSKTLIGTYTRTKDGEPVQYENFYPAIVNEEKFNLVNKIIRNIGKKFIAKTRVDKGRVVNILSGMLFCGSCGGVVHINRTSERLKYFYCSNNYGRKICKSPKGNFLTLERVLLSHLKDFDLNTIVNSPDNHERKLVEADLSEARGVVRTIEASIASRKESGKLVLVEMLEALADAREQTERLVSRLENEFSSFEVPTIDYDINSIVQDTNSERGKIHRELSTIIDNVKISRFSSFNLMIITYRNAHKHVIMFENKTGNVLHAIFTTEELIEVFGGSSEYKHIVEGEAVMLADGYERMKRKNSQ

SEQ ID NO: 55542 - DNA, 50 bp, Erwinia rhapontici
  source 1..50: mol_type = genomic DNA
tttcatgattgttaggcgtttgtcgtgatgatacactcacattcatgaaa

SEQ ID NO: 55543 - DNA, 40 bp, Erwinia rhapontici
  source 1..40: mol_type = genomic DNA
cccggctttcaccttagtcgttactaccgtatcgtcaata

SEQ ID NO: 55544 - DNA, 40 bp, Erwinia rhapontici
  source 1..40: mol_type = genomic DNA
cccggctttcaccttagtcattactaccgtatcgtcaata

SEQ ID NO: 55545 - DNA, 50 bp, Erwinia rhapontici
  source 1..50: mol_type = genomic DNA
tctaatgaaaaaaaggtgttagtcatgctgattcaaatagttttatgtaa

SEQ ID NO: 55546 - protein, 522 aa, Bacillus thuringiensis; identical to SEQ ID NO: 36956

SEQ ID NO: 55547 - DNA, 50 bp, Bacillus thuringiensis; identical to SEQ ID NO: 14487
  source 1..50: mol_type = genomic DNA

SEQ ID NO: 55548 - DNA, 40 bp, Bacillus thuringiensis
  source 1..40: mol_type = genomic DNA
ttttcggattaatcgtggagaaccgtatcataagtaatgt

SEQ ID NO: 55549 - DNA, 40 bp, Bacillus thuringiensis
  source 1..40: mol_type = genomic DNA
ttttcggattaatcgtggaccaccgtatcataagtaatgt

SEQ ID NO: 55550 - DNA, 50 bp, Bacillus thuringiensis
  source 1..50: mol_type = genomic DNA
atttaatatacaataaagatggcaccaccaaatcaatgaggaaagtatag

SEQ ID NO: 55551 - protein, 522 aa, Bacillus cereus
MNHSKRKVAIYIRVSTEEQANEGFSLGAQEDYLKQYANTKGYEVYDIYVDDGYSGKDYNRPEIQRLFKDLYQEKFTGILVKSVDRISRRVSDVTKLIDDVLAPRKCCVLVSDNNLDSSTTGGTAFIQLLATFAEYERSMIVQRVKSGMSKRAELGYWNGGRVLGYDVKNKELKINKEEAEIVRKVFHLRAEGKGYKSIAIILNQQGFKTKRGRLFSIGTIKTILENPLYIGYCRWGRHKNWNLERRKGKTDEYKFVKGKHEPIVSEELWKRVQGVNYAHKKSISKNRNFNGEFVLSGILRCPSCGAGMVMCKTKKRDKSGYHLYYMCQAFHSKGKLACKSNLIRKEDIEEKVLQCINKIILIPSIVDKTFERIQEKQESGIERIKNDLSYINEELKRKKQFIKKLNKDYFDEKIRVETYTELSEPLREEIVELEREKSKLDREIESSEIPITKEMVIKALENFTNLYENATYEQKKSLLRAIIKKIEVQPNRKEIKGITYWFDCDNGQDDALLVSKEGRTVS

SEQ ID NO: 55552 - DNA, 50 bp, Bacillus cereus; identical to SEQ ID NO: 14487
  source 1..50: mol_type = genomic DNA

SEQ ID NO: 55553 - DNA, 40 bp, Bacillus cereus
  source 1..40: mol_type = genomic DNA
gtttcggattaatcgtggtgaaccgtatcataagtgatgt

SEQ ID NO: 55554 - DNA, 40 bp, Bacillus cereus
  source 1..40: mol_type = genomic DNA
gtttcggattaatcgtggtccaccgtatcataagtgatgt

SEQ ID NO: 55555 - DNA, 50 bp, Bacillus cereus; identical to SEQ ID NO: 55550
  source 1..50: mol_type = genomic DNA

SEQ ID NO: 55556 - protein, 585 aa, Streptococcus pyogenes
MNTKVKLIKASNIGARNRNALHLDLKRVAAYCRVSTDSKDQLESYKSQVDYYTNLIKNNKNWTLAGIYADEATTGTTATKRADFMRLISDCQNGDIDMIITKSISRFARNTLDTLKYVRLLKENNVGVVFEEENIDTLTMDGELLLTILSSVAQQEVENTSAHVKKGLKMKMEKGELIGFQGCLGYDYDPITKSISINEEEAKIVRYIFKRYLEGNGGSVIGRELEEQGYLTPRGKTKWSDTTVLGIIKNEKYIGDILMGKTFTVDPITKRRLANFGESDKYHIENHHEPIISKEDFEKAQEIRLRRAQNRNTIANKDRKREKLSRQYAFSSMLECGFCGEILSRRTWHTSSIYKKINWQCVKSTKKGKKYCPHSKGIQEAAIEKAFVESYRQLCHADSTVIDDFLKIVEEEINDNTLVKDLKKLENQLNRIISQERKLVDLHLEDSIDEEVYAKKYKKLTKQKEELLDEKKTLELTIKDEDSIKERLKQFKKVLENKEIIEEFNRTVFESIVDKVVVGRIDKDGTVHPYDLTFYFKTGVKDSQDSNNFKDKRKNAKDNDINKLCSYKNDEDKKLCSQSKDNARR

SEQ ID NO: 55557 - DNA, 50 bp, Streptococcus pyogenes
  source 1..50: mol_type = genomic DNA
cccaatcaaaagacaacgcacgtcgagactatagcgttgatacaaaagat

SEQ ID NO: 55558 - DNA, 40 bp, Streptococcus pyogenes
  source 1..40: mol_type = genomic DNA
tccgcaaacgcatcacgtggagtgcgtagtgttgctaatc

SEQ ID NO: 55559 - DNA, 40 bp, Streptococcus pyogenes
  source 1..40: mol_type = genomic DNA
tccgcaaacgcatcacgtgcagtgcgtagtgttgctaatc

SEQ ID NO: 55560 - DNA, 50 bp, Streptococcus pyogenes
  source 1..50: mol_type = genomic DNA
cctactgaacccttcactcacctccacactagagagcagatgcaaaagat

SEQ ID NO: 55561 - protein, 555 aa, Bradyrhizobium jicamae
MNRITIPAAGQAPPPDTQQQPRAYSYKRFSTPAQALGDSLRRQTAIAQAWANRMGVPLDTELNLTDRGVSAYTGANRDVGNLGAFLKAVEEGTVPKGSWLLVESLDRLSREPAADASFEMQKIIRAGITVVDLSDNGGLGREYNMETLRSQDGLMHLIAMVLSFARGNQESAVKGMRVAQKYAEKRRVFASEERLTKPYTRRLPAWIRWNTEKKSYELIDERAERLRWIFEMADDGMGQHTIAAQLNEAKVDTWGAGGWKAKFWHKSYIRKLLTNKAAIGVFVPHTVRKVDGKRTKERTPQEPILHRFPAAIDRELFERVNARLSTTGARGKNTNAPVQSIFAGVLKCRHCGGTVTRVNKGEHVYLVCSAAHAKSGTCKYESIPYHDAEEEMRRIIRLVLEEAPRGNDTAEMDEKITQQRAAIDDGEDRVRELLEITITDKSRAARQALNTLDQALEEAKENLREMLARRDTMTSTNVKLRLAAVEEALTAETIDTEEANKALRGAVRKLVMRPAEGGLEIHWHHADEPQETAFITRRYDWDANQIEKNAEETGQ

SEQ ID NO: 55562 - DNA, 50 bp, Bradyrhizobium jicamae
  source 1..50: mol_type = genomic DNA
gattgacattgaaaaaatgatatgctcatgtgattgtctcactgcccatg

SEQ ID NO: 55563 - DNA, 40 bp, Bradyrhizobium jicamae
  source 1..40: mol_type = genomic DNA
cgccggcgggcatcacctgctgatgatcggctcacccggc

SEQ ID NO: 55564 - DNA, 40 bp, Bradyrhizobium jicamae
  source 1..40: mol_type = genomic DNA
cgccggcgggcatcacctgtggatgatcggctcacccggc

SEQ ID NO: 55565 - DNA, 50 bp, Bradyrhizobium jicamae
  source 1..50: mol_type = genomic DNA
gattgacaaaatgaaaaacatatgtgcccatggttgaccatatgggcatg

SEQ ID NO: 55566 - protein, 528 aa, Demequina maris
MQCMNSPHPAAHLVDLYLRLSVDREGKDSLENQENDLREWATGAGLTVRKVWRDRGISGYKDVERPDFENALSALRAREVGTLAVWKTDRLSRRGAGQVGLVMDELEALGARIYFLKDQKDTSVPGDRMIIILLSEFARAESASTSIRVKAKKDKDRAKGRYLGGSAPWGYTVGDGRDGRPSDRKLRQHPDEAPLLREVVDRLLAGETMLAICRDFNARGVPTRRRGSQWRPSTLSATLRSPVLAGLQPEKRRDETSGKWSTSTDAWRDPKTGETVSLMADGAEPVVSESERLRLLDVMDSRLRRYGRGLRPVKQPKSLLGGLLVCASCGRTANTFGGSYRCRRWHSDGVDCAAPLNVKIDVIESAVLHTWAYGLAAMEPDSPVLDAVAEHWLRRYDPAPLQERADLMREIADVDASAKAADDARFVARTLSPDRYERVARGLDDRLTALRARLKELPEPEANLAALLDPEISLPAIVAASVEEARALLRLAIKRIECTAAPHPGARFVRHERVRVVWVGTEDDATTT

SEQ ID NO: 55567 - DNA, 50 bp, Demequina maris
  source 1..50: mol_type = genomic DNA
ggtagttataccgtccagtttccctcgcgtgattgtgcgatataacatgc

SEQ ID NO: 55568 - DNA, 40 bp, Demequina maris
  source 1..40: mol_type = genomic DNA
ggcgttgacccagatctcctccaccgtcggatcgtcgagc

SEQ ID NO: 55569 - DNA, 40 bp, Demequina maris
  source 1..40: mol_type = genomic DNA
ggcgttgacccagatctcctgcaccgtcggatcgtcgagc

SEQ ID NO: 55570 - DNA, 50 bp, Demequina maris
  source 1..50: mol_type = genomic DNA
ggtgatggatacccccatttcccctgacgtgattattatgcattacatgc

SEQ ID NO: 55571 - protein, 575 aa, Vibrio parahaemolyticus
MTKIAYSYTRLSTEKQIKGHGFTRQREAIEKVCCQHGWQLSDQTFNDLGVSAWKGANATTGALSQFIDLAKKGAIRPNSVLIVESVDRLSRQQVDKSLRLMLELLEVGVSIFTLSDSKLYTTNSDSVMLDLMMWLMTAQRAHEESEIKSLRVRAAKKKNKELIRKGIIVTRKCPEWLTVSDDKSCFLVNNERAEIVRKIFTWYSQGFSTKPIALKLNELGIPYWGKSSTWSYRHIRSLLKHRGVIGEIQLLKRIDGRDVADGDPVEDYYPAIIDRGLWATCQQIKSSKTTAKGRVVERGMANLFRGLLKCECGSGLAINSSTVKGRTYRFLRCSQLKTTGCQAKNWHYEKTERILLIALRHSLSSFSEEDHAVSLRECQQYLARISEELKEKERQAENAIDYLLDKPSKLLEARLQTLEDDIARLKAIQEQAEHRLEAVHYEKSTALDKVEELQRVLEDIANDDDSRHKANGLLRRLIDTITLGSISNPRSKEFMEVSGNDYHGLIIIKRRDGLELRVEVLKDYGLSISWEGDDFTVIECSPTQQLNSQHVSQRLINLGGQTVDLWDDEGWVASS

SEQ ID NO: 55572 - DNA, 50 bp, Vibrio parahaemolyticus; identical to SEQ ID NO: 43507
  source 1..50: mol_type = genomic DNA

SEQ ID NO: 55573 - DNA, 40 bp, Vibrio parahaemolyticus; identical to SEQ ID NO: 4428
  source 1..40: mol_type = genomic DNA

SEQ ID NO: 55574 - DNA, 40 bp, Vibrio parahaemolyticus; identical to SEQ ID NO: 21804
  source 1..40: mol_type = genomic DNA

SEQ ID NO: 55575 - DNA, 50 bp, Vibrio parahaemolyticus
  source 1..50: mol_type = genomic DNA
aatttgcaaaaacacactaaaaatagggtactttattcacttccctcaat

SEQ ID NO: 55576 - protein, 575 aa, Vibrio parahaemolyticus
MTKIAYSYTRLSTEKQIKGHGFTRQREAIEKVCCQHGWQLSDQTFNDLGVSAWKGANATTGALSQFIDLAKKGAIRPNSVLIVESVDRLSRQQVDKSLRLMLELLEVGVSIFTLSDSKLYTTNSDSVMLDLMMWLMTAQRAHEESEIKSLRVRAAKKKNKELIRKGIIVTRKCPEWLTVSDDKSCFLVNNERAEIVRKIFTWYSQGFSTKPIALKLNELGIPYWGKSSTWSYRHIRSLLKHRGVIGEIQLLKRIDGRDVADGDPVEDYYPAIIDRGLWATCQQIKSSKTTAKGRVVERGMANLFRGLLKCECGSGLAINSSTVKGRTYRFLRCSQLKTTGCQAKNWHYEKTERILLIALRHSLSSFSEEDHAVSLRECQHYLARISEELKEKERQAENAINYLLDKPSKLLEARLQTLEDDIARLKAIQEQAEHRLEAVHYEKSTALDKVEELQRVLEDIANDDDSRHKANGLLRRLIDTITLGSISNPRSKEFMEVSDNDYHGLIIIKRRDGLELRIEVLKDYGLSISWEGDDFTVIECSPTQQLNSQHVSQRLINLGGQTVDLWDDEGWVASS

SEQ ID NO: 55577 - DNA, 50 bp, Vibrio parahaemolyticus; identical to SEQ ID NO: 43507
  source 1..50: mol_type = genomic DNA

SEQ ID NO: 55578 - DNA, 40 bp, Vibrio parahaemolyticus; identical to SEQ ID NO: 4428
  source 1..40: mol_type = genomic DNA

SEQ ID NO: 55579 - DNA, 40 bp, Vibrio parahaemolyticus; identical to SEQ ID NO: 21804
  source 1..40: mol_type = genomic DNA

SEQ ID NO: 55580 - DNA, 50 bp, Vibrio parahaemolyticus; identical to SEQ ID NO: 55575
  source 1..50: mol_type = genomic DNA

SEQ ID NO: 55581 - protein, 575 aa, Vibrio parahaemolyticus; identical to SEQ ID NO: 43506

SEQ ID NO: 55582 - DNA, 50 bp, Vibrio parahaemolyticus; identical to SEQ ID NO: 43507
  source 1..50: mol_type = genomic DNA

SEQ ID NO: 55583 - DNA, 40 bp, Vibrio parahaemolyticus; identical to SEQ ID NO: 4428
  source 1..40: mol_type = genomic DNA

SEQ ID NO: 55584 - DNA, 40 bp, Vibrio parahaemolyticus; identical to SEQ ID NO: 21804
  source 1..40: mol_type = genomic DNA

SEQ ID NO: 55585 - DNA, 50 bp, Vibrio parahaemolyticus; identical to SEQ ID NO: 55575
  source 1..50: mol_type = genomic DNA

SEQ ID NO: 55586 - protein, 575 aa, Vibrio parahaemolyticus
MTKIAYSYTRLSTEKQIKGHGFTRQREAIEKVCCQHGWQLSDQTFNDLGVSAWKGANATTGALSQFIDLAKKGAIRPNSVLIVESVDRLSRQQVDKSLRLMLELLEVGVSIFTLSDSKLYTTNSDSVMLDLMMWLMTAQRAHEESEIKSLRVRAAKKKNKELIRKGIIVTRKCPEWLTVSDDKSCFLVNNERAEIVRKIFTWYSQGFSTKPIALKLNELGIPYWGKSSTWSYRHIRSLLKHRGVIGEIQLLKRIDGRDVADGDPVEDYYPAIIDRGLWATCQQIKSSKTTAKGRVVERGMANLFRGLLKCECGSGLAINSSTVKGRTYRFLRCSQLKTTGCQAKNWHYEKTERILLIALRHSLSSFSEEDHAVSLRECQHYLARISEELKEKERQAENAINYLLDKPSKLLEARLQTLEDDIARLKAIQEQAEHRLEAVHYEKSTALDKVEELQRVLEDIANDDDSRHKANGLLRRLIDTITLGSISNPRSKEFMEVSGNDYHGLIIIKRRDGLELRIEVLKNYGLSISWEGDDFTVIECSPTQQLNSQHVSQRLINLGGQTVDLWDDEGWVASS

SEQ ID NO: 55587 - DNA, 50 bp, Vibrio parahaemolyticus; identical to SEQ ID NO: 43507
  source 1..50: mol_type = genomic DNA

SEQ ID NO: 55588 - DNA, 40 bp, Vibrio parahaemolyticus; identical to SEQ ID NO: 4428
  source 1..40: mol_type = genomic DNA

SEQ ID NO: 55589 - DNA, 40 bp, Vibrio parahaemolyticus; identical to SEQ ID NO: 21804
  source 1..40: mol_type = genomic DNA

SEQ ID NO: 55590 - DNA, 50 bp, Vibrio parahaemolyticus; identical to SEQ ID NO: 55575
  source 1..50: mol_type = genomic DNA

SEQ ID NO: 55591 - protein, 575 aa, Vibrio vulnificus; identical to SEQ ID NO: 43506

SEQ ID NO: 55592 - DNA, 50 bp, Vibrio vulnificus; identical to SEQ ID NO: 43507
  source 1..50: mol_type = genomic DNA

SEQ ID NO: 55593 - DNA, 40 bp, Vibrio vulnificus; identical to SEQ ID NO: 5483
  source 1..40: mol_type = genomic DNA

SEQ ID NO: 55594 - DNA, 40 bp, Vibrio vulnificus
  source 1..40: mol_type = genomic DNA
gttcggttggcacgtgttgagggtgttgtacagaacctaa

SEQ ID NO: 55595 - DNA, 50 bp, Vibrio vulnificus; identical to SEQ ID NO: 55575
  source 1..50: mol_type = genomic DNA

SEQ ID NO: 55596 - protein, 528 aa, Brasilonema octagenarum
MDSTVFESWGYARVSTDEQAQDKDALLKQMQRLRDAGVGKIFFDIDKRTKYDRKGLLNLIKAVQELPINHNIRFLKFTRLDRVAASQVIFYKLISELQKKKIKPVALDDPFDLDSVGGELTVDIRLDVAKHEVKMLGLRIRKERELRRKEKKSNFYAPFGYKIESDKYVFNNDPCICLIDNKQQLSVVEVAQLILKTFYQVGSCTQTAKRLNEFFGIGSKCSEKYVRKSGNYSIDEDDTLTQKTLKKKVDEKSNAGLRYPYSGLRWTTTGIRDWLTNPVLAGGTPYNTVKENGNKKSFDEINVFWNTHDDQALITFPQHQEIKEIIRSNRKNAWASVSDRDPQKLNIFQGLVFCAKCNAKFVKVTTYQSKDGKFKSYYQCTYYLKTGMCQHKTAITNFELEDQIIEFLVKEAERLSVLGEQTNMPITESKELLELRSQLQALESIPGNNPAIETAKQGLRLQIADLLESGERTNQALLISRERIIAAFRNKDFWKGIQNPVDKKRLLRECIICAVVDEGKVVEVKLRI

SEQ ID NO: 55597 - DNA, 50 bp, Brasilonema octagenarum
  source 1..50: mol_type = genomic DNA
ttacttgacactaaaaatgtaactcaagccacgtttatagtgtaaagtaa

SEQ ID NO: 55598 - DNA, 40 bp, Brasilonema octagenarum
  source 1..40: mol_type = genomic DNA
gtttctggaaaacctggtacacgacccgttttctaagcgg

SEQ ID NO: 55599 - DNA, 40 bp, Brasilonema octagenarum
  source 1..40: mol_type = genomic DNA
gtttctggaaaacctggtagtcgacccgttttctaagcgg

SEQ ID NO: 55600 - DNA, 50 bp, Brasilonema octagenarum
  source 1..50: mol_type = genomic DNA
attctccatttgaaatttgtaactgtagccaggttttcatcttaaactaa

SEQ ID NO: 55601 - protein, 474 aa, Rhodococcus fascians
MNATDEALTAVIYARVSRDTTGRGKSVEQQIAECRTTCENEGWQIAEIVTDNSISASRYELRNRPGYESLTRILKPGMVLVVWEFSRAGRRTQEHLALQELCEERSVLFRAGSRNYDFRKSEDRFMGTLESAIAAKSSDETRERVLRAKRADAERGRPNGALGFGFMPTIDPVTHEKVWTLDPITAPLVKEAATAILAGASLNSIVKDWNQRGIKTFKGNDWRSITLRQLLLRPAIAGLRQHQGQTTAVKAVWPPIITEQQHRALVATFTDPSRTTQRGSEVKHLLTNIALCGKCDKPVVRMSPNPKLQRASRYACPDRHVGRNQAEVDKHVVSELLRIMDDRLADEFLMDETGAADGMDSPSEHHLTKAAELQQQLDDATAEFIAGRLTAATLGRIEAALLPQIDQERRSAAERTSNPLLAKLAAGAAGAWKAADVTERRAMIRAAVVVTIQPVGKGGTHVFDPNGVTVERRR

SEQ ID NO: 55602 - DNA, 50 bp, Rhodococcus fascians
  source 1..50: mol_type = genomic DNA
aaagacgggttatgaatctcagcttcggccgacatttctaacaggctttc

SEQ ID NO: 55603 - DNA, 40 bp, Rhodococcus fascians
  source 1..40: mol_type = genomic DNA
aaacgttgcaattccggattcggccgacatgccggccccg

SEQ ID NO: 55604 - DNA, 40 bp, Rhodococcus fascians
  source 1..40: mol_type = genomic DNA
aaacgttgcaattccggatttggccgacatgccggccccg

SEQ ID NO: 55605 - DNA, 50 bp, Rhodococcus fascians
  source 1..50: mol_type = genomic DNA
aaaatggggatgacaatagcagctttgcctgacatggttgagaggatttc

SEQ ID NO: 55606 - protein, 479 aa, Streptococcus suis
MNKVAIYVRVSTTSQAEEGYSIDEQIDKLSSYCKIKDWTVYDVYKDGGFSGGNIERPAMERLISDAKRKRFDTVLVYKLDRLSRSQKDTLFLIEEVFIKNNISFLSLNESFDTSTPFGKAMIGILSVFAQLEREQIKERLMLGKVGRAKSGKPMMFSSISFGYTYDKHAKELHINQAEAVIVKKIFSEYLSGRSLTNLRDYLNDNGFTRNGRYWDYQGLKRIMKNPVYIGMIRYNGVIYPGNHQAIIDAETFDKTQIELKKRQLQAAELQNNPRPFRAKYMLSGLLRCGYCSAPLTVVLSGKTKSGSRNIFYECYNRHPKIKKGRTIYNDGKKCNSGTYNKSYLEECILNEIRLLQLNPERIDDIYDVQPTIDVDSIENQIATLNKKLDKLNDLYLNDMVSMDVLKKQTHTLRQQKKILEHELENNNVEIIKNSKRIFIETLNISDVTKLDYNIQKNIANTLIKEIVVKNGEITIQWRI

SEQ ID NO: 55607 - DNA, 50 bp, Streptococcus suis
  source 1..50: mol_type = genomic DNA
ctgtcatatttagatacacgtattacaatcagcgtatctaaatatggcat

SEQ ID NO: 55608 - DNA, 40 bp, Streptococcus suis
  source 1..40: mol_type = genomic DNA
cgtcaggctggctcgaatgactgctcgagcagtttccgca

SEQ ID NO: 55609 - DNA, 40 bp, Streptococcus suis
  source 1..40: mol_type = genomic DNA
cgtcaggctggctcgaatgtatgctcgagcagtttccgca

SEQ ID NO: 55610 - DNA, 50 bp, Streptococcus suis
  source 1..50: mol_type = genomic DNA
ctgagatatcaccatacacctatttaaaacagcttaaaaaggcagggcgc

SEQ ID NO: 55611 - protein, 497 aa, Ornithinimicrobium cerasi
MSEPMCTPVRMRALIYARVSLDQAEGRSVVEQETECRAWAAREGWTVTRVITETGSASRYARSTGARTRWPDLVAAVASGEHDILLTWEASRATRQLGEYAQLRNLCDLHGVLWGYSGRTYDLRNPSDRFATGLDALMSEDASARTSERVQRAVRARAREGRPHGKLPYGYRREYDPTTGRLLQQVPDEDQAPVVREIYARVLAGDSLYGIANDLTARQVTPPRPPTKRHDRKQEWLSITLRRIATSPTYAARRTHRGVVVGDADWEPLVPLEDWERAVAILTDPARATRTGDSTSRHLLAGIARCGKTDEVGAQCGAELRHLRNRGRWGTYGCARQGCYGVAIAAPHLDAFVRDVVLTLLEQHRDALAAGVADTGHDTELHTARTQLQDLRARLAGFVTEAGAGRLSPATLSAVEADLAPRIATAERDVRRLLLPRTLPDLTEADPATWWDSPCTDIVARRQLVRELVTVTVRPAGRGNWGKRGLDDTRVDVTPRW

SEQ ID NO: 55612 - DNA, 50 bp, Ornithinimicrobium cerasi
  source 1..50: mol_type = genomic DNA
ccatatccttgacggacgtttgtcgggatgaacgtccgtcgaggagatgt

SEQ ID NO: 55613 - DNA, 40 bp, Ornithinimicrobium cerasi
  source 1..40: mol_type = genomic DNA
ccacctgtcggccgtcagcgggagcaacgtggcgatgatc

SEQ ID NO: 55614 - DNA, 40 bp, Ornithinimicrobium cerasi
  source 1..40: mol_type = genomic DNA
ccacctgtcggccgtcagctcgagcaacgtggcgatgatc

SEQ ID NO: 55615 - DNA, 50 bp, Ornithinimicrobium cerasi
  source 1..50: mol_type = genomic DNA
ccacatcctcaagtgcagtctgtttcggcaaacatctgagcatgagatgt

SEQ ID NO: 55616 - protein, 589 aa, Sporanaerobacter acetigenes
MKKVEVIKGGNLLSDRNQGREINLKRVAAYCRVSTDSEDQLQSYRSQVRYYTDLINGNSDWTMAGIYADESITGTQVDKRINFQRLINDCMNGDIDMIITKSISRFARNTLDTLKYVRKLKKMNVAVFFEEENINTLTMDGELLLVILSSVAQQEVENISANVKKGLKMKMQRGELVGFQGCLGYDYDPMDKSISVNKEEAEIIRYIFKRYLEGAGGSVICRELENLGYKTPRGKSKWSATTVLGIIKNEKYKGDILMGKTFTVDPISKRRLDNFGEEDKFYIKEHHEAIISAEDFDKAQEIRLKRAINRNTVPSKNGKREKYSGKYAFSSLLECGFCGANLSRRTWHSKTEYNKIIWQCVVGTKKGKKYCPESKGVEEEAIEKAFVESYRQLCSNNQDVVEEFLLRIEKVLNDGSIEKDIKKLDNEISSLLAKQNSLVDLRLENKIDEKIYKDKYLSLQNKYLEKSKEKENLEFNLKNENNIKKRMKEFKDMLEKNEVLKEFDRFVFESIVEKVIVGEIDENNNVDPYKLTFVYKTGFKDNLDGSKFKAPRKNESEKHKKDGEESSKLCSHTNDEVNKLYSYSSDNTR

SEQ ID NO: 55617 - DNA, 50 bp, Sporanaerobacter acetigenes
  source 1..50: mol_type = genomic DNA
gtattcctatagtagcgacaacacacgtggagtgcatagcgttgatacaa

SEQ ID NO: 55618 - DNA, 40 bp, Sporanaerobacter acetigenes
  source 1..40: mol_type = genomic DNA
atgtttccgaggacggggcacgttgagagtataattctga

SEQ ID NO: 55619 - DNA, 40 bp, Sporanaerobacter acetigenes
  source 1..40: mol_type = genomic DNA
atgtttccgaggacggggccagttgagagtataattctga

SEQ ID NO: 55620 - DNA, 50 bp, Sporanaerobacter acetigenes
  source 1..50: mol_type = genomic DNA
ttattcctattttggagataacaacaatgaagcacacggggtttatataa

SEQ ID NO: 55621 - protein, 522 aa, Streptomyces albidoflavus
MRGTTMDEIERPYDGCGKCLLGVRRLSRVKAATTSPERQREDVLTAAAAIGGHIIDWADDWEVSGATDPMTRPKLGPWLRDERGKYDGLVAAAVDRLGRNVVDCLNTGYKMRDEGKLLVSYGHEGVWDLDDPNDENRFTMEAWGAQMELRAIQRRNRDATRKIRAAGRPKGKPSYGFQYVRTVPNGRVDRVELHPHAAEVLRTIARRILADPENVSVSSEAARLNRLGELSPADHLAVMYGKQAGGRPWYPTSLRNMLLSEAAMGYLVHQGKPVIDRTGNPVRLCEGLWNRTTHNALKEVLRAGDTPYRGRKSNRSYLLTEVALCGQCHNRLFTQTSVDAPPRYACTVRNKGWKNAQHCRPAPNMRVANLDALVEGWFLEKFGHGAIVETVYDSGNGVADRIAEVQSSRQRLRADREAGLYDQPDDAEWYRERYIELSRELKELESEPQRPPGMVQRPTGETVEDRWMKAPDVQARKEILLDFGVRVTVFPASAPVRWVPGILHGPEQDPLSLSGSFRTAGS

SEQ ID NO: 55622 - DNA, 50 bp, Streptomyces albidoflavus
  source 1..50: mol_type = genomic DNA
gggttgtcctaacggaggttggtcgacaccaataaagacaaagacaaccg

SEQ ID NO: 55623 - DNA, 40 bp, Streptomyces albidoflavus
  source 1..40: mol_type = genomic DNA
gcagtcggtgtgcctggtggacacgaacgtggacaacccc

SEQ ID NO: 55624 - DNA, 40 bp, Streptomyces albidoflavus
  source 1..40: mol_type = genomic DNA
gcagtcggtgtgcctggtgaccacgaacgtggacaacccc

SEQ ID NO: 55625 - DNA, 50 bp, Streptomyces albidoflavus
  source 1..50: mol_type = genomic DNA
gggttatactcagtgatgttggtgacaaccagaagaaccttagacaaatg

SEQ ID NO: 55626 - protein, 579 aa, Methylobacterium brachiatum
MGLPSGLPADPAPAIAYSYLRLSSKRQVSKGDGERHRDGFRRQIELRDAYLAENPHLTLDTRFNLHDIGVSAYTRANIAKGGTGKLRLFVDEVEAGRIAVGSYFLCESLDRVSRAEINIAQELLLRLVNNGIIVRSIIDRQTYHAQSDPMQFIISIVYLMRAHDESLMKAARLKETWIRKRADIGKRKLTARIPSWLEVDGDGFKPHEVRAPIVRRIFSELADGRGRDAIARGLNRDGEPTWGKGRAWHGGVIQKITDTRAVLGEFRPHRMEASIRNGIKVGTRIPAGDVIPDYYPAVIDDDLWDRARRVADKRRLGTTPNAGGRQGTRISNLFGMVATCATCGNPMNYRDRGKRSTIVLICSSSRAGTCGNDVRIPYQETEDAVLSWFLQLDLSKADAGEMQRLEQALREAIARRDGLQAEAETLMRAFGRGDRFAEPAIERIRGEVATIEAGITENSATLLALRDAGKSDGREPAIALMLELERANASDEERFAVRIRVRQMLRDTVTSMRCGQDGHIDIVAIDGSGHRFRDGYWLHDGRWHPSGPGLFGFFRKITKKEEERRRAWLEPAVAAYGDP

SEQ ID NO: 55627 - DNA, 50 bp, Methylobacterium brachiatum
  source 1..50: mol_type = genomic DNA
tgccggccaacccttgcacttgtcacgacgattggcagggttggccggca

SEQ ID NO: 55628 - DNA, 40 bp, Methylobacterium brachiatum
  source 1..40: mol_type = genomic DNA
gtgaaggcccgagatggagacgacgtgatagatgcccgcg

SEQ ID NO: 55629 - DNA, 40 bp, Methylobacterium brachiatum
  source 1..40: mol_type = genomic DNA
gtgaaggcccgagatggagaggacgtgatagatgcccgcg

SEQ ID NO: 55630 - DNA, 50 bp, Methylobacterium brachiatum
  source 1..50: mol_type = genomic DNA
ggccagccacccgctgcaccagtgaggacgcttggccttcctgccctggc

SEQ ID NO: 55631 - protein, 511 aa, Pseudomonas umsongensis
MPKAISYIRFSTGKQAKGSSHERQTAMLDSWLTANPDFTLSSESFKDLGISGFSGKHLKSGFGLLLEAVENGSIQSGDVILIEAMDRVGRLEPMDMIPLLSRIVSRGVDIVTLDDGIRYNRESANSNHLFLLVAKVQQAHQYSDTLSRRMKASYSSRRKAAAEGVTPKRNTPVWLTSEGELIPEIAPLVKQAFEDYASGLGERRIFERIFEGNTNPLLARMAPSTVKRWMTNRTAIGEWNGIPGVYPPVIEPELFYRVQKRMEEKFSPRGAPTRHRFTGLVVCAECGKNFNTKHYQATGLTSMECSSRARRGATGCTNNRSIPEPIIELAFQFTKGKHIKKALEGQQLTASQKRGMELDGEIGEVDKKIKRIIGFMQTVEEGDGADLASQYSSLQAERRVLRAEKEGLAVDGPVSIMDQVTNIKDFTKDPIKANALLQSVGYQLVCHIDGRVTFEQETFMYEGWGRAEDVHKVVLPDGRKIKLPIQRKGKTSKLKAVDFSQIGPLDLTKSE

SEQ ID NO: 55632 - DNA, 50 bp, Pseudomonas umsongensis
  source 1..50: mol_type = genomic DNA
aaaccccacattgctgcatgctgggtgaaggaggcggcaatgtggagaag

SEQ ID NO: 55633 - DNA, 40 bp, Pseudomonas umsongensis
  source 1..40: mol_type = genomic DNA
ctcgtagtagaccggctgggtgaaaatcatgtcgtagatc

SEQ ID NO: 55634 - DNA, 40 bp, Pseudomonas umsongensis
  source 1..40: mol_type = genomic DNA
ctcgtagtagaccggctggatgaaaatcatgtcgtagatc

SEQ ID NO: 55635 - DNA, 50 bp, Pseudomonas umsongensis
  source 1..50: mol_type = genomic DNA
agaccccttaggcatacctgctgaatgaaggagtgatcattgtggagtag

SEQ ID NO: 55636 - protein, 534 aa, Vibrio alfacsensis
MTDHNTTHNLPPAKCYSYIRFSTVSQGKEGKDSYIRQTLAAKEYAARMGLEYQDKSFSDLGISGFRTSKKRDGLSSMLEAIQSGAIEPTSTICIDGFDRLSRASFEHTYDTVRLIVGTGVKLHVVQDNMTLDKSSLNDLISIVRLALQSDLAHQESAKKSYLIKQSRLRAREAHRVTGKLPAWIKRDDSTPTGFAFNEMVDCIKELVRLRVEGKSLQSIAKNLNAMGYTTTTGAPWSSAGCRSIIESRALHGSKSYHETDPETGRMLLEPVDIVAGIFPALIDFDVWKSIQQKSKSAPTKVTKVSKKGAYSGLLRCGCCSAGMVMRTTTYTPKESGVPEVRMYRKCIRATEGSCTQTEQVREPETYIDMALSNLKYVTSEKRHVSRVPEIREQIATLERAEDILIQRGMAEKLADLYMKIDDLKTKLVEAQEEDSKHKVPTETSFAKVIEIKDLEHRNMVLRGLLRGVYFTLLWKYKTQSKWKVTIEQINGLKTTFILSQKHGFGNSHIESLADPLRWTSLVQSDLEPWELDQD

SEQ ID NO: 55637 - DNA, 50 bp, Vibrio alfacsensis
  source 1..50: mol_type = genomic DNA
acctatgagactatgtgtagaataaaggttctatacagactctaatacgt

SEQ ID NO: 55638 - DNA, 40 bp, Vibrio alfacsensis
  source 1..40: mol_type = genomic DNA
gtttggttggcacgtagtaaaagtgctgtaccgtacttag

SEQ ID NO: 55639 - DNA, 40 bp, Vibrio alfacsensis
  source 1..40: mol_type = genomic DNA
gtttggttggcacgtagtacaagtgctgtaccgtacttag

SEQ ID NO: 55640 - DNA, 50 bp, Vibrio alfacsensis
  source 1..50: mol_type = genomic DNA
acacatgtattatagtatataatacatgtattatacatagtataatacgt

SEQ ID NO: 55641 - protein, 532 aa, Vibrio owensii; identical to SEQ ID NO: 42316

SEQ ID NO: 55642 - DNA, 50 bp, Vibrio owensii; identical to SEQ ID NO: 42317
  source 1..50: mol_type = genomic DNA

SEQ ID NO: 55643 - DNA, 40 bp, Vibrio owensii
  source 1..40: mol_type = genomic DNA
attcggttggcacgttgtgaaggtgttataccgcacttaa

SEQ ID NO: 55644 - DNA, 40 bp, Vibrio owensii
  source 1..40: mol_type = genomic DNA
attcggttggcacgttgtgcaggtgttataccgcacttaa

SEQ ID NO: 55645 - DNA, 50 bp, Vibrio owensii; identical to SEQ ID NO: 55640
  source 1..50: mol_type = genomic DNA

SEQ ID NO: 55646 - protein, 465 aa, Eisenbergiella tayi
MKGNAGDAIVKKIDLSPELVRVALYIRVSGEEQKIKGLSLEAQQERLEAYARERGWVIVGIYIDAAKTARKNIHKRTDFQRMMDSVKRDEVDILLFCRLDRWFRSVADYYKIMEVLEAHNCDWKTTDEEYDTTTANGRLYINVKLSIAQNEADIDGERIDVVFDSKIAHGTVVSGSAPFGFRVNEEKRLEVVPEDAAIVQDAFNYFETSISQRATVRYIRETYGVNWCDATFRRMLKEKLYTGVYDRGGRFNDHFCPAIISKQQFDRVQALLERNARSVPSGKVYIFTSILTCAECGHKLVGYKSSDYYYYRCNQHFQRGRCSHNHSAREDVVEKWLFEHLAEELERCQLEWEVAAAKKKASVARTDKAALKRKLTKLKELYVNDLIDIEDYKRDYQIYTAALKQIPEPSIEPPPDFAAVRRLLDNDFKTIYENLTREEKRTLWRSVIKEIRIDNDQNITGVVFG

SEQ ID NO: 55647 - DNA, 50 bp, Eisenbergiella tayi
  source 1..50: mol_type = genomic DNA
tgttgtactaatgtgacactacccgtgggctgtgttaagttagtacaaaa

SEQ ID NO: 55648 - DNA, 40 bp, Eisenbergiella tayi
  source 1..40: mol_type = genomic DNA
tctggaatccagattgccggtaggttcatccgcaaggata

SEQ ID NO: 55649 - DNA, 40 bp, Eisenbergiella tayi
  source 1..40: mol_type = genomic DNA
tctggaatccagattgccgtcaggttcatccgcaaggata

SEQ ID NO: 55650 - DNA, 50 bp, Eisenbergiella tayi
  source 1..50: mol_type = genomic DNA
ttttgtattgtggagtcacctccctcaggctgcattttattagtaaaaga

SEQ ID NO: 55651 - protein, 581 aa, Nocardia elegans
MTRNRFEAVGPSMTVADQPLKTAVSYPRVSTKEQAEKDGADPDGYSLPAQRDANRRKAASLGAVVVKEFVERGESAKTADRPKLQEMLAYIEEHPVDYVIVHKIDRLARNRADDVEIHMAIRAAGAELVSATENIDETPSGMLLHGILSSISEFYSRNLATEVLKGMTEKARTGGTPHRAPIGYRNVGIINEQGVEIRTVVVDPERGPLIAWAFQAYATGEWTLKRLAKELETKGLTTRPTPKRPSKTVEYNKLQEILRSPYYKGEVVYRGATHPGRHTPLVDSVTWQLVQALLTSRVNGEKQREHPHYLKSTVFCGGCGSRLIVTHAKNRHGTVYPYFVCLGRHQKVNDCQRRAVLIDRVEELVEEEYKAVQLIPELREQIETSLRGELSSSRLAADREARELDQQKKRLLDERGKLLQAHYAGAIPLDLMKQEQDRIAEQLARIEVRLEASVLNIEVVENNLRTALNYASNCYAGYLEASTSVRRLFNQAFFEKVYLEQDEVRVELAEPFNTLLGGELIGHVASHAEAAAPATEVDSADQRLAEDGVALMDVIRNGSAARAGTKKPAPVGAGLKGNGLV

SEQ ID NO: 55652 - DNA, 50 bp, Nocardia elegans
  source 1..50: mol_type = genomic DNA
aggtttgaaaggcaacggtctggtgcacctaagaggacctctttcaaacc

SEQ ID NO: 55653 - DNA, 40 bp, Nocardia elegans
  source 1..40: mol_type = genomic DNA
agatctaccgggaaacggtgcgcgaggggggacttgaacc

SEQ ID NO: 55654 - DNA, 40 bp, Nocardia elegans
  source 1..40: mol_type = genomic DNA
agatctaccgggaaacggttcgcgaggggggacttgaacc

SEQ ID NO: 55655 - DNA, 50 bp, Nocardia elegans
  source 1..50: mol_type = genomic DNA
aagtttgtagcatttggatctgtttcagctaaaaggcccaatttcaatca

SEQ ID NO: 55656 - protein, 522 aa, Terrisporobacter othiniensis
MLIILHIYYYKRIKHINFICNQVIRGTFIMKTCIYLRKSRADIEAEKEGEYETLHRHKTTLLKVAKERKLNIIDIKEELVSGEYVEHRPRMIELLEEVKNKKYDAVLVMDLDRLGRGNMQDQGLILDTFKQSKTKIITPRKIYNLDDEFDEEYSEFEAFMARKELKLINRRLQRGRAKSIEEGKYISPDAPYGYEFKYDDKGKKYLAINDEQAAAVRLIFDMYLQNNGATKIANKLNSLGYETNNHIEFKAKAVRDILSNITYCGYVKWKTIDRKNHSRPRPANEQIITKGKHEPIIDEFTFNRVQEIRKSKYISPTKTKVSNPLAGIVVCKKCGHNLIQKISRGKIYLNCRHCDNKSSSLKYVEDAIIESLEGWLNKYKVKIELKDDTSDIDKLKFEVKKLQRELNETEKQKSKLFDFLERGIYDDNTFLERSTILSSRIDDLKNRIAECNLSIITYKDNLQAKKQIIPTLEKVLQNYSNSNDAKEQNLLLKSVLDKVLYEKAKDAKKDEFNLEVHPKLPK

SEQ ID NO: 55657 - DNA, 50 bp, Terrisporobacter othiniensis
  source 1..50: mol_type = genomic DNA
tgcagttactatagtacatctaactgattaccagttctattgtaactgta

SEQ ID NO: 55658 - DNA, 40 bp, Terrisporobacter othiniensis
  source 1..40: mol_type = genomic DNA
ggtggttacaccagcaaactggctaccaggcacacctgta

SEQ ID NO: 55659 - DNA, 40 bp, Terrisporobacter othiniensis
  source 1..40: mol_type = genomic DNA
ggtggttacaccagcaaacatgctaccaggcacacctgta

SEQ ID NO: 55660 - DNA, 50 bp, Terrisporobacter othiniensis
  source 1..50: mol_type = genomic DNA
tgcaacttctcccttacatttaaaataattccagttgtagtttgacttta

SEQ ID NO: 55661 - protein, 556 aa, Pseudomonas helleri
MTKAYAYIRYSRAIQATGDSENRQLTALELFETSTGTNVVEVVYDKGKSAFRGDNARSGNFKEMLDRMQSGAIRRGDYLVVESIDRITRQRVLDGVELLQGILKKGINIYTTVDKKTYSYNDPSRDFENLLMISLIAKRANEESETKSGRLLSAWKARKAKAENGEVIIKKGKSIPYGLRVEEGKFVIHKEEQEEIKQLFELLLQFGINTAIAKINETSLKKWNNGTLNKVIKHKTVIGCMATHRVEYTVDGKAKKILTGFIENYYPNLIEPKLFYKAIDVMANRKQKNWSGRRTEQDFNIFKHCIFCAECGGKLYYDHRGSRYKGKIYPFFKCDNARVQKHVCTADNIRFEYVLGSLLDSIKMINRVATEFKRDFKGISTQARFINPKINSLLKADGENNNLVLEEKQKQLISRRTKLDNMNTQMVEADYNVPTKFIQEISKTEKEIEALNKEILLIHSASADEGTIDVQDTKTVIDLFMTDEGRAKLNHFFKTNDIIFLVSHKKVTRETRFSMRRKNELVDEKICNNYIKFPLKDILGNYGLGDLQTMFDLTVS

SEQ ID NO: 55662 - DNA, 50 bp, Pseudomonas helleri
  source 1..50: mol_type = genomic DNA
ccctgtaaacttgtttacctaatcatgatcagatgatatgatttaccgag

SEQ ID NO: 55663 - DNA, 40 bp, Pseudomonas helleri
  source 1..40: mol_type = genomic DNA
cccgcggcgcaaccgaatcatcagcggtttgtcgttgggc

SEQ ID NO: 55664 - DNA, 40 bp, Pseudomonas helleri
  source 1..40: mol_type = genomic DNA
cccgcggcgcaaccgaatccccagcggtttgtcgttgggc

SEQ ID NO: 55665 - DNA, 50 bp, Pseudomonas helleri
  source 1..50: mol_type = genomic DNA
gcctgttaatgccattacataatacctatcaattgataggatttacaagg

SEQ ID NO: 55666 - protein, 556 aa, Pseudomonas savastanoi
MTKAYAYIRYSRAIQATGDSEHRQLTALELFETSTGTNVVEVVYDKGKSAFRGDNARSGNFKEMLDRMQSGAIRRGDYLVVESIDRITRQRVLDGVELLQGILKKGINIYTTVDKKTYSYNDPSRDFENLLMISLIAKRANEESETKSGRLLSAWKARKAKAENGEVIIKKGKSIPYGLRVEEGKFVIHKEEQEEIKQLFDLLLQFGINTAITKINETSLKKWNNGTLNKIIKHKTVIGCMATHRVEYTADGKAKKILTGFIENYYPNLIEPELFYKAIDVMANRKQKNWSGRRTEQDFNIFKHCIFCAECGGKLYYDHRGSRYKGKIYPFFKCDNARVQKHVCTADNIRFEYVLGSLLDSIKMINRVATEFKRDFKGISTQARFINPKINSLLKADGENSNLVLEEKQKQLISKRTKLDNMNTQMVEADYNVPTKFIQEISKTEKEIEALNQEILLIHSAFADEGTIDVQDTKTVIDLFMTDEGRAKLNYFFKTNDIIFLVSHKKATRETRFSMRRKNELIDERICNNFIKFPLKDILGNYGLGDLQTMFDLTVS

SEQ ID NO: 55667 - DNA, 50 bp, Pseudomonas savastanoi
  source 1..50: mol_type = genomic DNA
ccctgtaaattggtttacctaatcatgatcagatgatatgatttaccgag

SEQ ID NO: 55668 - DNA, 40 bp, Pseudomonas savastanoi
  source 1..40: mol_type = genomic DNA
cccgcggcgcaaccgaatcatcagcggcctgtcgctcggc

SEQ ID NO: 55669 - DNA, 40 bp, Pseudomonas savastanoi
  source 1..40: mol_type = genomic DNA
cccgcggcgcaaccgaatccccagcggcctgtcgctcggc

SEQ ID NO: 55670 - DNA, 50 bp, Pseudomonas savastanoi; identical to SEQ ID NO: 55665
  source 1..50: mol_type = genomic DNA

SEQ ID NO: 55671 - protein, 570 aa, Agrobacterium rubi
MKAYSYVRISSKGQMKGDGVRRQVEASHAYAAANGLTIDEELTDIGLSGYHGDHVATGALGGFLELVKTGKIDKGSVLIVESLDRLSREDIITAQSQLMSLLAAGVDVVTLIDNQRYSRSASLGDIVLSLVSMARANEESRTKSERAKAKIAQRRTDAMNGKKTFVLNGPSWIDQIPIGGGQYRFELNERAQTVRDIFEMYDSGIGAHTISKILNAEKRPVFASRGVFALWRDASIMFFLRSEAAIGTYAIGTDFKVPDYYPRLVSDEVWFRIQDRLSANKTKAAGRRGEKFTNLFQGFAVCHNCGTPIRTIRGGNKNAYAYYACQQKFIGGSGCDQQGRKFIRLEAIEEAILDHVHEYHTDSKNGSVGQRENVAMELDSAKAESAEVAKRITNVRSVLETVDNDDDRLAFMGRLSELRKESERHNHTVAVLEKKLREIDENNQQQVDVNKLILDEIRQWPTMDKDTLYRSRAKINQSLSKIISTVRFDLPAKEAYVFVGGMTKAWRINDQGELTGQLDWSHIPWSVLETFSKNELGIDKSKLRDAKAINASIEGSRLPEELFGKHLTGR

SEQ ID NO: 55672 - DNA, 50 bp, Agrobacterium rubi
  source 1..50: mol_type = genomic DNA
tcataattaaaggtactcgccagttcgttggagagtaggattgatttgga

SEQ ID NO: 55673 - DNA, 40 bp, Agrobacterium rubi
  source 1..40: mol_type = genomic DNA
atagcgccatttcgccagctcgtcagaccaggcaaaatga

SEQ ID NO: 55674 - DNA, 40 bp, Agrobacterium rubi; identical to SEQ ID NO: 55673
  source 1..40: mol_type = genomic DNA

SEQ ID NO: 55675 - DNA, 50 bp, Agrobacterium rubi
  source 1..50: mol_type = genomic DNA
tcattattaattttcctctcctcttccaagtagagtttgaatgattttga

SEQ ID NO: 55676 - protein, 515 aa, Bacillus wiedmannii
MKTAIYLRKSRADLEAEARGEGETLAKHRTTLLKIAKEMNLNVLSVREEIVSGESLVKRPEMLALLEEIEDNKYDIVLCMDMDRLGRGGMKEQGIILETFKRSNTKIMTPRKTYDLNDEWDEEYSEFEAFMARKELKIITRRMQRGRVASVEAGNYLGTHAPFGYDIHRLNKRERTLTINPEEASVVRMIFDWYANEDMGANAIRSKLNELGYKSKLGNEWNPYSILDILKNNVYIGKVTWQKRKEVKQPDAVKRSCARQDKSDWIIAAGKHEPIIPESLFEQVQEKLNSRYHVPYNTNGIKNPLAGIIKCSKCGYSMVQRYPKNRKETMDCKHRGCENKSSYTELIEKRLLEALKEWYINYKADFEKHKQDDKLKETQVIQMNEAALRKLEKELVDVQKQKSNLHDLLERGVYTVDMFLERSNVVSDRITEITSTMENLKKEIKTEIKKEKVKKDTIPQVEHVLDLYFKTDDPKKKNSLLKSVLEKAVYKKEKWQRLDDFELVLYPKLPQDGDI

SEQ ID NO: 55677 - DNA, 50 bp, Bacillus wiedmannii
  source 1..50: mol_type = genomic DNA
tgttgtcaccttgttggtgtaattaggttgactccaacagggtaataaca

SEQ ID NO: 55678 - DNA, 40 bp, Bacillus wiedmannii; identical to SEQ ID NO: 52323
  source 1..40: mol_type = genomic DNA

SEQ ID NO: 55679 - DNA, 40 bp, Bacillus wiedmannii
  source 1..40: mol_type = genomic DNA
tgtagccattaggcgcatgccatttactccattcagccct

SEQ ID NO: 55680 - DNA, 50 bp, Bacillus wiedmannii
  source 1..50: mol_type = genomic DNA
agatgttatttagtttttctaactccgttgactacaacaatgtaaaaaca

SEQ ID NO: 55681 - protein, 539 aa, Brevundimonas naejangsanensis
MPVKAYSYMRFSSAAQREGDSLRRQLQAARDWADARPEVELDTTTRDLGVSAYKGEHRVRGALASFLKRIEQGDIQPGSYFLIESFDRLSRETEMVAVNLLTSITLAGIKVVTLVDGHEYHAGSDAMDIMRAVIVMSRAHNENKARAEKLRAAWADKKRRARETGEVLSRRGPAWTKFDERSKKFVLIADRAKIVGRIFDECNQGLGITAISSRLNAEKVPPFVKGSDGWHQGYVLTILRSPSVCGYYQPTLTTNNPGQRMGREADGDIIENYYPRVIEDATFYTAQDMLARRNKRGGGKGRRGKTFANLLLGLGRCEQCGGTLILGSRANSSAVRHFRCYQQSRKHNCDNTTRYLATDVEDRLMYFLMRARMNEDRAAPDTAALVVKLAQIDDVKRRMETLLDQLEERVPGVAERLASRRDELTVLEQEAAELRMSVERRSKTRGDESIRNTIEWLNVVEGEAPDADVYLARAKANAMLNDLFDFIMPADGGIYVGMGDRFRWIGEDMMTFDIPMPNIEGTITGKELGDYRGPVEFAV

SEQ ID NO: 55682 - DNA, 50 bp, Brevundimonas naejangsanensis
  source 1..50: mol_type = genomic DNA
gcttgtgcattagtggggcaaggtatactttgggagactattaaacagca

SEQ ID NO: 55683 - DNA, 40 bp, Brevundimonas naejangsanensis
  source 1..40: mol_type = genomic DNA
gccgatcaactggcagttcatggggaccaagaagttcgat

SEQ ID NO: 55684 - DNA, 40 bp, Brevundimonas naejangsanensis
  source 1..40: mol_type = genomic DNA
gccgatcaactggcagttcccggggaccaagaagttcgat

SEQ ID NO: 55685 - DNA, 50 bp, Brevundimonas naejangsanensis
  source 1..50: mol_type = genomic DNA
tcttcttcacccattggacaaggtccactttggctgctgggtgaagatca

SEQ ID NO: 55686 - protein, 557 aa, Pseudomonas helleri; identical to SEQ ID NO: 47611

SEQ ID NO: 55687 - DNA, 50 bp, Pseudomonas helleri; identical to SEQ ID NO: 47612
  source 1..50: mol_type = genomic DNA

SEQ ID NO: 55688 - DNA, 40 bp, Pseudomonas helleri
  source 1..40: mol_type = genomic DNA
gctgtcgaggttgcccgaggaaatcggcgccatcgacagt

SEQ ID NO: 55689 - DNA, 40 bp, Pseudomonas helleri
  source 1..40: mol_type = genomic DNA
gctgtcgaggttgcccgagccaatcggcgccatcgacagt

SEQ ID NO: 55690 - DNA, 50 bp, Pseudomonas helleri
  source 1..50: mol_type = genomic DNA
tctttagaaatgtttagagcatgtccttacagtaggatgtgtgcttataa

SEQ ID NO: 55691 - protein, 561 aa, Paenibacillus macerans
MVHTVIDPEEKKLYDQYKNEFFSLVAQHKLDMSEEFCIYLRKSRADIEAEARGEGETFIRHLRNLLDLALRQKIYVAEIYKELVSGETIEARPVIQHVISEVEDERWQGVLVMEIERLARGDTIDQGTIAQTFKYSGTKIITPTKTYDPNNEFDEEYFEFGLYMSRREYKTINRRQQRGRVDSAKEGKYTGNINPYGYNRVKLVKTKGYTLEIVPEEARIVRLIYEWYTKGEPDQDGVYHRLGTGLIARKLNNLGIPSAKGGVWTVPTVRDILRNPVYNGKIKFKSRPLIKKKQNGKIIKSRPRAKKEDMILVDGLHPAIIDETTWNLAQEIMSKNPRKPVSLRLKISNPLAGLVVCGVCGRKMIRRPHKGRPATLMCQLPSCGNVSSFLDLVEQRILAGLKEWLKNYKAEWDKNVPVNNDAKNKVMELKIESKINQEKKLAELEQQLENAFDLVEQKVYDVDTFRIRSQQLKSKINDCKEALSKIEQEIALEKERTTARVRVIPQVEHVLDAYYKTDDPEIKNELLKSVLETSIYLKTKKARWNGSLDDFKVTLFPKLPQ

SEQ ID NO: 55692 - DNA, 50 bp, Paenibacillus macerans
  source 1..50: mol_type = genomic DNA
cagtgataacatggtggtaccgattcttcagtaccaccatgttatcactg

SEQ ID NO: 55693 - DNA, 40 bp, Paenibacillus macerans
  source 1..40: mol_type = genomic DNA
catttcgagatgcgcgaattcctccgtgccgatatcgttc

SEQ ID NO: 55694 - DNA, 40 bp, Paenibacillus macerans
  source 1..40: mol_type = genomic DNA
catttcgagatgcgcgaatctctccgtgccgatatcgttc

SEQ ID NO: 55695 - DNA, 50 bp, Paenibacillus macerans
  source 1..50: mol_type = genomic DNA
aagtgacaaaataaagttaccaatcttacagtatcatgtgattagcaggg

SEQ ID NO: 55696 - protein, 542 aa, Sphingomonas paucimobilis
MNAQSPNVALRAALYLRVSTARQAEHDVSIPDQRKQGEAWCAARGYQLVEIFVEPGNTATNDRRPEFQRMIEAGTSKPAPFDVVLVHSFSRFFRDAFDMEYYYRKLAKNDVRLISITQELGDDPIHDMMRRIMSLFDEYQSKENGKHVTRALKENARQGFWNGALPPIGYRIAAAEQRGAKTKKKLEIDPLHAGTIRLIYRLALEGQGDSGQMGVKAIVKHLNAKGIFTRDGGRWGIGQVHRVLTRRTYIGEHEWGKRSKHNDPRSPSEVVIVPVPAIIERETFDAVQSLLQARNPKTELPARVVIGPTLLTGICYCGNCGGAMTIRTGKSGRYRYYACSIKARQGETGCKGRAIPMDKLDTIVVSHIEERLLDPDRLEKLLGSILGRREDQAERRREHIASLQRQAAESESRLKRLYDAIEAGVADLDDPALKERIAGLKVLRDQARVDADRAQALLESPGHSALSPAMIAGFARRARERIRGHEGGYRRDHLRALAQRVEVADDAIRIMGSKTELLKTLIAGQGRQSAAIGVPRGGLKWR

SEQ ID NO: 55697 - DNA, 50 bp, Sphingomonas paucimobilis
  source 1..50: mol_type = genomic DNA
tgcccagaggcggtctgaaatggcgggccatgcgggatagcgatgagaac

SEQ ID NO: 55698 - DNA, 40 bp, Sphingomonas paucimobilis
  source 1..40: mol_type = genomic DNA
atcgcttggcgccggtggcgggtggagtgggattcgaacc

SEQ ID NO: 55699 - DNA, 40 bp, Sphingomonas paucimobilis
  source 1..40: mol_type = genomic DNA
atcgcttggcgccggtggcaggtggagtgggattcgaacc

SEQ ID NO: 55700 - DNA, 50 bp, Sphingomonas paucimobilis
  source 1..50: mol_type = genomic DNA
tgctcaaagagtgtctgagagtctagtccatgggggaagtggatgacaac

SEQ ID NO: 55701 - protein, 538 aa, Alteromonas macleodii
MSQFAISYTRFSSGSQRHGTSLERQQELSNAYCKEHNLTLIQSFHDGGKSGFHGRHLAADGELRRLLKMLDNGDIPKGTHLLIEQTDRLSRQPLMQAFSLVTNLLEKGLVIVTLDDKQKYTYEGDQTQVYMLAGRLHRGYDESRSKSERLSKVWANKQKEMEEGIAPKMRLPFWLARDSSGKVIELSSWVSMIEEVLNLAIEGHGGADIAAKLNGEGRLTKDGVDWNSSKITKLIRNKQLIGWHTRKSDKTTYLCLPPIVSQELFSMAQKALDSRTRTRGNSKQWNSALSGLTTCGACGGTLKLHGRPQSRTAVCRTAVDGGSCTNRKSIRYKALILGSVASLNTSLANLMMNQPIKEQPQEKRELEAKLAKAQVKVSNLTLAIAQLESPAALSAITRELDTASNEIEKIKRSLSELDPVEHPDDKAFRLLWTAREEVPSLVTEVLEGSKAAANKLNTYLHSIDGFKISLQGGVASVLGTNIWFEKKELKIHNEYVGEVSIVKADEATKTSTFVTESGHDIAIEERGTPLGGGYYLAI

SEQ ID NO: 55702 - DNA, 50 bp, Alteromonas macleodii
  source 1..50: mol_type = genomic DNA
atgtcatcatcaaatctcaacaataagaacttccgctaagttgatgacat

SEQ ID NO: 55703 - DNA, 40 bp, Alteromonas macleodii
  source 1..40: mol_type = genomic DNA
aggccaacctttccaatttaagaacttccgcgactaatta

SEQ ID NO: 55704 - DNA, 40 bp, Alteromonas macleodii
  source 1..40: mol_type = genomic DNA
aggccaacctttccaatttgtgaacttccgcgactaatta

SEQ ID NO: 55705 - DNA, 50 bp, Alteromonas macleodii
  source 1..50: mol_type = genomic DNA
tagacataagtatttttctacaatgtaaacttttgcttatataatgacat

SEQ ID NO: 55706 - protein, 491 aa, Mycobacteroides abscessus
MGARVSVLSGPQKVSHEAQIDTATKWANAQDYPVVGVFEDLGVSASVPPHERPDLGPWIRERSHEWEVIIWSKLDRAFRSMRHCSDFIEWAEANKKIVVFAEDGMTLNYLNPSSKIDSILGELFVTIAAAFAQIELNRFKSRAEDMHRAIRPTTRWAAGLPPLGYQVVDHPSGRGKGLAIDPDAANLVREMADKLVDGWSFVRITEWLNESGKLTSQGRSRKARGLEPKGRWTTTNVIEILTGYRSLGIKTHKGQPVLDNDGEPIRLAPPLFTPERWDEVQRAAQLRKGKPRTPSETTNPMLEVGFCGVCGSSLAQQFSKTRPRKSDGHVTHYRYYRCSRTPINCKAVFVVADDLDDLLSEQFLLERGDRRVTERVFIPGEDNSYELDFINQRIELLREDRASGLFPSGEDELVYRNQMKQLLARRDELASVPVRQPGYENVELEKTYREVWPGATPEEKRKMLIDAEISIRLGESPGKSLRAELVIGTPY

SEQ ID NO: 55707 - DNA, 50 bp, Mycobacteroides abscessus
  source 1..50: mol_type = genomic DNA
ccttctcataggtgtactcctcgatcaacagtagcatacactcttgaagc

SEQ ID NO: 55708 - DNA, 40 bp, Mycobacteroides abscessus; identical to SEQ ID NO: 52418
  source 1..40: mol_type = genomic DNA

SEQ ID NO: 55709 - DNA, 40 bp, Mycobacteroides abscessus
  source 1..40: mol_type = genomic DNA
tgatagcgatgctcctggagcaacagattccgatggaggt

SEQ ID NO: 55710 - DNA, 50 bp, Mycobacteroides abscessus; identical to SEQ ID NO: 23370
  source 1..50: mol_type = genomic DNA

SEQ ID NO: 55711 - protein, 540 aa, Blautia massiliensis; identical to SEQ ID NO: 12131

SEQ ID NO: 55712 - DNA, 50 bp, Blautia massiliensis
  source 1..50: mol_type = genomic DNA
ttacccaacaatatctttaattaagggagaacggagtttcccatagttaa

SEQ ID NO: 55713 - DNA, 40 bp, Blautia massiliensis
  source 1..40: mol_type = genomic DNA
actccagcggtgaataaatgggagacggggaactccaatc

SEQ ID NO: 55714 - DNA, 40 bp, Blautia massiliensis
  source 1..40: mol_type = genomic DNA
actccagcggtgaataaataagagacggggaactccaatc

SEQ ID NO: 55715 - DNA, 50 bp, Blautia massiliensis
  source 1..50: mol_type = genomic DNA
ttacacatcttaagctttaaaaagaacagcacggaaaggtacaatgttaa

SEQ ID NO: 55716 - protein, 507 aa, Escherichia coli; identical to SEQ ID NO: 22721

SEQ ID NO: 55717 - DNA, 50 bp, Escherichia coli
  source 1..50: mol_type = genomic DNA
aggtgtatttagaccttgctaatctttattagacacgtttaaatacacca

SEQ ID NO: 55718 - DNA, 40 bp, Escherichia coli; identical to SEQ ID NO: 5188
  source 1..40: mol_type = genomic DNA

SEQ ID NO: 55719 - DNA, 40 bp, Escherichia coli; identical to SEQ ID NO: 55319
  source 1..40: mol_type = genomic DNA

SEQ ID NO: 55720 - DNA, 50 bp, Escherichia coli
  source 1..50: mol_type = genomic DNA
aggtttttcatgatcttgcgaatatctattagtagcttctaaatacaact

SEQ ID NO: 55721 - protein, 507 aa, Escherichia coli
MKRVISYIRFSSERQAKGDSLRRQSKMVNDWLKAHPEYYLDQDLSFRDLGVSGFTGKHLKGGLGDFLTAIEKGLVKAGDTLLIESLDRLSRQHIDIASELLRNILRSGVDVVTLSDGEHYTRESLKDPLALIKSILIMQRSHEESLRKSERIQAAWDAKKEAAKAGIKVSKRCPAWLKLNDDRKSFSVIPEKVETVKRCFQLRLEGKSIWEIVRTLNDEGHQTLNQYKAGKFGQTSVQDLLKNRSVIGYFTPKGCEEIAGYFPPIIPETDFYKVQQLSYSRYGRKPASDKPLSVNLFKGVIRCSECGHALIITGFSDTRSGIYRCPLRNENRCSAKGLSRKQTDGTLLALLSRLDRFDSDTTNTIDTLKLHREHISNNIEKLVQLSLEIEDLSAITSKLKQLKNELSQVDADIEKETQRLKSIDVGCLSDCDLTTKAGRIEAQLIIKSAVKEVVLNTAKRRCKVTFHNSKVIDLPITENPSEDVTEAIQSLSEVTERGLIDVDEVII

SEQ ID NO: 55722 - DNA, 50 bp, Escherichia coli; identical to SEQ ID NO: 55717
  source 1..50: mol_type = genomic DNA

SEQ ID NO: 55723 - DNA, 40 bp, Escherichia coli; identical to SEQ ID NO: 5188
  source 1..40: mol_type = genomic DNA

SEQ ID NO: 55724 - DNA, 40 bp, Escherichia coli; identical to SEQ ID NO: 55319
  source 1..40: mol_type = genomic DNA

SEQ ID NO: 55725 - DNA, 50 bp, Escherichia coli; identical to SEQ ID NO: 55720
  source 1..50: mol_type = genomic DNA

SEQ ID NO: 55726 - protein, 507 aa, Escherichia coli
MKRVISYIRFSSERQAKGDSLRRQSKMVNDWLKAHPEYYLDQDLSFRDLGVSGFTGKHLKGGLGDFLTAIEKGLVKAGDTLLIESLDRLSRQDVDQASELLRNILRSGVDVVTLSDGEHYTKESLRDPLSLIKSILIMQRAHEESLRKAERIQAAWDAKKEAAKAGIKISRRCPAWLKLNDDRKSFSVIPEKVETVKRCFQLRLEGKSIWEIVRTLNAEGHQTLNQYKAGKFGQTSVQDLLKNRSVIGYFTPKGCEEISGYYPAIIDETTFYKVQQLSYARYGRKPASDKPMAVNLFKGVIRCSECGHALIITGFSDTRNGIYRCPLRNENRCSAKGLSRKQTDGTLLALLSRLDRFDSDMTNTIDTLKLHREHISSNIEKLVQLSLEIEDLSAITSKLKQLKGELSQVDADIEKETQRLKSIDVGCLSDCDLTTKAGRIEAQLIIKSAVKEVVLNTAKRRCKVTFHNGKAITLPITENPSDNVTEAIQSLSEVTERSLIDVDEVII

SEQ ID NO: 55727 - DNA, 50 bp, Escherichia coli; identical to SEQ ID NO: 55717
  source 1..50: mol_type = genomic DNA

SEQ ID NO: 55728 - DNA, 40 bp, Escherichia coli; identical to SEQ ID NO: 5188
  source 1..40: mol_type = genomic DNA

SEQ ID NO: 55729 - DNA, 40 bp, Escherichia coli; identical to SEQ ID NO: 55319
  source 1..40: mol_type = genomic DNA

SEQ ID NO: 55730 - DNA, 50 bp, Escherichia coli; identical to SEQ ID NO: 55720
  source 1..50: mol_type = genomic DNA

SEQ ID NO: 55731 - protein, 561 aa, Afipia birgiae
MAEVKKVYSYIRFSTPEQAKGDSLRRQLQKAKDWCDERGLVLDETLRDLGVSAYTGTNRTTGVLRSFLDLVESGKVAKGSILLVESLDRLSREAVIDAAARLFDLIRSGITVVTHADGQEYSSERLRNDWSPLIISITIMARAHEESKNKGRVVGAAWAKKKQAAREEGRPLTRRCPAWIQIVKGKYEIVPEKAQIVQRIFRMAIEGHGTRTILKSLNSDSIPTFMASGKKKSNGWQSSSLRRLLTSRTAIGEYQPHVGRHWNRKPDGDPIKDYYPAIIDEATYWRAQSSMESRRGRGGRKGEGVAHLLQGLAKCGDCGSAMHIINKGPLPRGGTYFECSAARRKFECSNNERWRVDRIEARLLKALTYIDLDAILFGEKHNKEADQVDVFQAQLVDAENRRSRLIALVESGDDAAADRFATVAAQVKDIKQKLAKAKKEAAKSAADPGLQAVVKNAIDLTKLMAVVSDGHRFTVRTRLAHELRKLVRIVEFHSQEGATARLVPQLNLPPGRVPWAIYGTQARSWLIWLNSDDVHGLEFFVEHPEMIEQDTPAPNLKLRRR

SEQ ID NO: 55732 - DNA, 50 bp, Afipia birgiae
  source 1..50: mol_type = genomic DNA
tttagattaatgtggcatcacttgttgaggtgatgctacattaacttctc

SEQ ID NO: 55733 - DNA, 40 bp, Afipia birgiae
  source 1..40: mol_type = genomic DNA
ggccggcgggcatcacctcttgatgatcggctcgcccggc

SEQ ID NO: 55734 - DNA, 40 bp, Afipia birgiae
  source 1..40: mol_type = genomic DNA
ggccggcgggcatcacctcctgatgatcggctcgcccggc

SEQ ID NO: 55735 - DNA, 50 bp, Afipia birgiae
  source 1..50: mol_type = genomic DNA
tttatactagaatattaacagttgctgaggtgatgctgagctcaattttg

SEQ ID NO: 55736 - protein, 589 aa, Klebsiella oxytoca; identical to SEQ ID NO: 47751

SEQ ID NO: 55737 - DNA, 50 bp, Klebsiella oxytoca
  source 1..50: mol_type = genomic DNA
tatacctattacacttcagtgaacactaaggtaaactacatcccattaag

SEQ ID NO: 55738 - DNA, 40 bp, Klebsiella oxytoca
  source 1..40: mol_type = genomic DNA
cggcgtgacaatcggcaataccgacggcaacgttatcgac

SEQ ID NO: 55739 - DNA, 40 bp, Klebsiella oxytoca
  source 1..40: mol_type = genomic DNA
cggcgtgacaatcggcaatctcgacggcaacgttatcgac

SEQ ID NO: 55740 - DNA, 50 bp, Klebsiella oxytoca
  source 1..50: mol_type = genomic DNA
tatacttatataccttcagtaatactgaaagtatacttatacgctttcag

SEQ ID NO: 55741 - protein, 532 aa, Pseudomonas viridiflava
MTIINPLPRAFADVFQGDENINVYSYIRFSSKSQKLGFGEIRQLDQLNRFFDQYPQARQVERYEDLGVSAFKGKNLKSGQLAKFVERIKSREILPNALLLVESFDRISRMGGYDALELIISIIQADCAIYTLFDNRLYSKRKKDSSVDISLIQNILERANDESRAKSERISDAKARNLEKGLNGGIITKRCPFWISFIGGKFVLNENAEAVKKATELCFDFGFQVVAQELNKQGYPKKYSASSIGKFLHSHALYGSFLALKLDENGQRSIVNKEVRNYYPALISEAEFHRISAKLKERLDPKLAGRKADEFKNILRGIVFCKCGSTFRYHAQKSQYVDLVCSASMIGKCEFAKQGKGVRHRYALVEQLFLIFHAQIPFHKIIIKSDDVKALEREHENVSGLIILKEKALANNFAILEKSSESAQKYIMSRIDEVSFELDNLKLDEHRLKVQINSLHIASKSELKVIEIYRLLVTEKGRVRINNFLHSQNVKMIITPILKKYFSIEIMHGENYIDTIDVTPTGYTARINAHLK

SEQ ID NO: 55742 - DNA, 50 bp, Pseudomonas viridiflava
  source 1..50: mol_type = genomic DNA
attctacgaatagcgccattcattgcaatgaagcgcctcattcgtagaaa

SEQ ID NO: 55743 - DNA, 40 bp, Pseudomonas viridiflava
  source 1..40: mol_type = genomic DNA
aatcaggaccccgatgaatgccgtgatcggcatgctcgaa

SEQ ID NO: 55744 - DNA, 40 bp, Pseudomonas viridiflava
  source 1..40: mol_type = genomic DNA
aatcaggaccccgatgaataacgtgatcggcatgctcgaa

SEQ ID NO: 55745 - DNA, 50 bp, Pseudomonas viridiflava
  source 1..50: mol_type = genomic DNA
tttctacgagtgaaaacaaacattaaaatgaaaagctttaaacatataaa

SEQ ID NO: 55746 - protein, 511 aa, Flavonifractor plautii
MNIAAYCRVSTDKADQLNSLEAQKEFFSEYTKRTGDTLVRLYADEGISGTKIKNRKEFLRMMADAEHGLFDMVVVKDISRFARNTVDLLQNVRKLKSLGIETQFLTANMTSMGNSEFVLTIFGALAQEESANTSKRVKFGKKMNAEKGRVPNIVYGYDKTIGDYFNLAINEEEAAVVRQIYEWYIKDGYGAAKISIFLNERGLRTKRNCQWSQNGVCRILTNELYTGKIINGKQEVTDFLTGQRADKDETEWMVVDRPDLRIIEPEVFEQAQQIMQSRGKAFKVDKERQSNKYLFSTLIKCKECGWSFRRTVRTYKNTYVRWVCSGHNGRGADNCPNAVTVDEEELIEVLQEYFAELLKAKKNVIRYVVGEFQRVYKAKDENLNYEKELNAQLTKLQKTRQKYMDMYADDLISREELNDKIGGMRKEIERLENELKMVAYHLTKGEQLESVLGRTFKEIEDITDVHQMTNAQLKRIIQKIEVDKDGNVDIYLRLLGDLGLDETVLIHHDET

SEQ ID NO: 55747 - DNA, 50 bp, Flavonifractor plautii
  source 1..50: mol_type = genomic DNA
ccgttctaattcatcacgacgaaacatacggaagtgataaattagaacgg

SEQ ID NO: 55748 - DNA, 40 bp, Flavonifractor plautii
  source 1..40: mol_type = genomic DNA
catcagcaaatccacggtccacaaggacctaagcgagcgt

SEQ ID NO: 55749 - DNA, 40 bp, Flavonifractor plautii
  source 1..40: mol_type = genomic DNA
catcagcaaatccacggtcgacaaggacctaagcgagcgt

SEQ ID NO: 55750 - DNA, 50 bp, Flavonifractor plautii
  source 1..50: mol_type = genomic DNA
tcgttcaaagagtacaagatgaaagagagggaaaagtaactttataatgg

SEQ ID NO: 55751 - protein, 626 aa, Vibrio alginolyticus
MSVDIEQIHQEKLAYSYIRYSSKRQEFGDSFRRQTQQTKDFCEKYGYTLANQFEDLGVSGFKDDQEALQAFIRDCESGKIKKGSLLIVESLDRLSRKQTKIALRQMLQILEYVDVYSHHEQKFYRSEADNSDNQMIDLMMSIMVMSRAYNESFAKQKRLKEAWDAARNKAKKGIGKVKGSLPHWLSLSPDATKFIIKEDRTDIIFTMFELSASGMGSTQIIKFLNKNIDKYPSPSPKTKLWVRSTVKRILGDKRLLGEHQFFKADPTNVKKKIPAGDVIPDYFPQVIDEELFYEVQSGMRSRKIKAGRVSSTHFPNVFRHILKCGCCGASMSYVNKGLMNAKVRKPTKYLACSVAKRSDECSQSKHFRYEPIEHMLIHLATANGFMPKVESSADLTVRYEKLLATHEKEQKQLEMLLSRDLTSQIIMDKISALDKSVQRISSEIQALEDLIAANKGQYEYKDLYRDLVLLDDEIMKYSNRAQFNSHMQQEIDLAYLYHRYGQPHLVFKMKSGLVHAALLDQQGTFGGCSLEDGSDTFKRLEGKNSLEDDARLWKLLKYVGDISDDVENADLYAHHRSQIHDLMSKLSAKLSKYVQKPTDESLFEEIYELSDRVYAEIGKNEKVFIE

SEQ ID NO: 55752 - DNA, 50 bp, Vibrio alginolyticus; identical to SEQ ID NO: 43927
  source 1..50: mol_type = genomic DNA

SEQ ID NO: 55753 - DNA, 40 bp, Vibrio alginolyticus
  source 1..40: mol_type = genomic DNA
gcaaggcggcgctaggtgaatcaaagctaacccacccagt

SEQ ID NO: 55754 - DNA, 40 bp, Vibrio alginolyticus
  source 1..40: mol_type = genomic DNA
gcaaggcggcgctaggtgatacaaagctaacccacccagt

SEQ ID NO: 55755 - DNA, 50 bp, Vibrio alginolyticus
  source 1..50: mol_type = genomic DNA
aaggtgtgtagaaaaaacagcttgtaagacttaagtgatatgacaatcat

SEQ ID NO: 55756 - protein, 537 aa, Lachnospiraceae bacterium MD335
MRFSALHQNDNSKDDNLDGESASIHNQRDMLETWCQEHGYTVAGVYADDGYSGLYMDRPDFQRMLADCKQGKIDIVVTKDMSRLTRNSTHSGQLRDEFFPKHHIRYIGVTDGVDTGKDDDLIAFRSVFNEIYSKDIGKKVHSSYVIKAKKGKFTGCIAPFGYMKSPEDKNFLIPDKDTAWIVQKIFGWAAEGHGTNWIRRRLEDEKIPAPCWWNRKKGLRNHVTKWEKEYGEKGIYMWDFSTIKQILANPVYIGTIASQKADYRFKVGWIGDKKPEEWIQVENVHEPLVDMDTYNLVQEKVKMRKRPDAWGNYGIFAGFVKCGECGSTMNQRVANAKAKTRILTCAKYNRYGVAHCSQHRLELDTLYQIVLEQIRSCAALALADETKVMEELRKSCQCDSEEESRRIKEKLSESECRLSELDTLISKLYEDWVAGRINETNFTRMMEKAQTEQETLQKKADTMRERLNGAAKEQEDNSKWLSLIRQYADIRELDREMLHLLIKEIVVHEDMAEGKRNTTVEIHFNFMKQGSQLTVKS

SEQ ID NO: 55757 - DNA, 50 bp, Lachnospiraceae bacterium MD335
  source 1..50: mol_type = genomic DNA
ttattcaactatttaggtatgacacacttcatacccaaataggtgtaaca

SEQ ID NO: 55758 - DNA, 40 bp, Lachnospiraceae bacterium MD335
  source 1..40: mol_type = genomic DNA
atccccccttttgacaaaccaccttaacatgggcggcaaa

SEQ ID NO: 55759 - DNA, 40 bp, Lachnospiraceae bacterium MD335
  source 1..40: mol_type = genomic DNA
atccccccttttgacaaacagccttaacatgggcggcaaa

SEQ ID NO: 55760 - DNA, 50 bp, Lachnospiraceae bacterium MD335
  source 1..50: mol_type = genomic DNA
ttgttcagcactttaggtatgtttagcttcattactgggaggctgtaaaa

SEQ ID NO: 55761 - protein, 488 aa, Mycobacteroides abscessus
MKGQAKRALVVTRLSRVTDATTSPERQRETCLELCGQRGYEVVGTAEDLDVSAGKTTPFDRPQLGDWLTNRHHEFDVLVVFRMDRIVRRLLDLADLIRWCQTHDVALVSATEAFLDLTAPFGDVVALLVAKVAEMELAAISERNRSAAQHNMREGKYRGGPPPWGYMPEKIDGDWRFVQDDEQVGVINEVVRRVLDGEPLRQVAADLTDRAVLTPRDRVNQLKGREIKGYSWHSAKLREMLTSKSLLGHAVTASGSIRNDDGSPVIRATPILERDVFEQVQVELAGRENRKEPTKRSSSLLLRVLYCGVCCKPAYKLKGGKGRQDRYRCASAQYKSTCGNGMLLVADANEVLTDAVMFELGDKYRRDRVWDAGSDHSAELSDIDDTLADLTDQLGTGAFRKGTRQRERLDARIADLAERQAQLAAQATRPAGWTWVPTKELFRDWWGSQTIEQQNLWLRQMEVRMTWDHRGPHIDMRQLDKMAEQWAD

SEQ ID NO: 55762 - DNA, 50 bp, Mycobacteroides abscessus
  source 1..50: mol_type = genomic DNA
ggactgtaaaaaggtggtttcgagtattcgatagtttatctttacaccca

SEQ ID NO: 55763 - DNA, 40 bp, Mycobacteroides abscessus; identical to SEQ ID NO: 29268
  source 1..40: mol_type = genomic DNA

SEQ ID NO: 55764 - DNA, 40 bp, Mycobacteroides abscessus; identical to SEQ ID NO: 29268
  source 1..40: mol_type = genomic DNA

SEQ ID NO: 55765 - DNA, 50 bp, Mycobacteroides abscessus
  source 1..50: mol_type = genomic DNA
agagtgtaaattactatttttgtgtattccaaagttatttttaacagcca

SEQ ID NO: 55766 - protein, 458 aa, Staphylococcus epidermidis
MNYERSYLRSCQVSTLEQKEHGYSIEEQERKLKSFCEINDWSVSDVFIDAGFSGAKRERPELQRMMNDIKRFDLVLVYKLDRLTRNVRDLLDLLEVFEQNNVAFRSATEVYDTSTAMGRLFVTLVGAMAEWERETIRERVMMGKRAAIKQGMILTPPPFYYDRVDNTYIPNDYKKVVLWAYDEVMKGNSSKAIARKLNDSDIPPPNGKRWEDRTITRALRNPITRGHYTWGDVFIENSHEPIITEEMYQQIKERLEERINTKIVSHVSVFRGKFICPRCGGTLTLNTVTRKRKKGYVTYKTYYCNTCKAKKQSFGFSENEALRVFRDYLSKLDLEKYEVKTKQKDDVVTIDIDKIMEQRKRYHKLYAKGLMKEEELFGLIKETDETIAEYEKQKELVPRKSLDIDKIKKFKNALLESWEIFSLEDKADFIKMAIKSIDIDYVKLKNRHSIKINDIEFY

SEQ ID NO: 55767 - DNA, 50 bp, Staphylococcus epidermidis
  source 1..50: mol_type = genomic DNA
gtacggaagtatagacacttgattaatatttaatgtgtatacttccgtaa

SEQ ID NO: 55768 - DNA, 40 bp, Staphylococcus epidermidis; identical to SEQ ID NO: 52823
  source 1..40: mol_type = genomic DNA

SEQ ID NO: 55769 - DNA, 40 bp, Staphylococcus epidermidis
  source 1..40: mol_type = genomic DNA
gtatggcggtacatgcattgctatcggatgtataccaact

SEQ ID NO: 55770 - DNA, 50 bp, Staphylococcus epidermidis
  source 1..50: mol_type = genomic DNA
gaagggaaggaaattgacttcattgctatttaagtttgtaatttcagtta

SEQ ID NO: 55771 - protein, 458 aa, Staphylococcus epidermidis
MNYERSYLRSCQVSTLEQKEHGYSIEEQERKLKSFCEINDWSVSDVFIDAGFSGAKRDRPELQRMMKDIKRFDLVLVYKLDRLTRNVRDLLDLLEIFEQNNVAFRSATEVYDTSTAMGRLFVTLVGAMAEWERETIRERVMMGKRAAIKQGMILTPPPFYYDRVDNTYIPNDYKKVVLWAYDEVLKGVSSKGIARKLNDSDIPPPNGKRWEDRTITRALRSPITRGHYTWGDVFIENSHEPIITEEMYQQIKERLEERINTKIVSHVSVFRGKFICPRCGGTLTMNTATRKRKKGYVTYKTYYCNTCKTKKQSFGFAENEALRVFHDYLSKLDLEKYEVKTKQKDDVVTIDIDKIMEQRKRYHKLYAKGLMQEEELFELIKETDETIAEYEKQKELVPSKTLDVDKIKNFKNALLESWEIFSLEDKADFIKMAIKSIDIDYVKLKNRHSIKINDIEFY

SEQ ID NO: 55772 - DNA, 50 bp, Staphylococcus epidermidis; identical to SEQ ID NO: 55767
  source 1..50: mol_type = genomic DNA

SEQ ID NO: 55773 - DNA, 40 bp, Staphylococcus epidermidis; identical to SEQ ID NO: 26028
  source 1..40: mol_type = genomic DNA

SEQ ID NO: 55774 - DNA, 40 bp, Staphylococcus epidermidis; identical to SEQ ID NO: 52369
  source 1..40: mol_type = genomic DNA

SEQ ID NO: 55775 - DNA, 50 bp, Staphylococcus epidermidis; identical to SEQ ID NO: 55770
  source 1..50: mol_type = genomic DNA

SEQ ID NO: 55776 - protein, 458 aa, Staphylococcus epidermidis
MNYERSYLRSCQVSTLEQKEHGYSIEEQERKLKSFCEINDWSVSDVFIDAGFSGAKRERPELKRMMNDIKRFDLVLVYKLDRLTRNVRDLLDLLEVFEQNNVAFRSATEVYDTSTAMGRLFVTLVGAMAEWERETIRERVMMGKRAAIKQGMILTPPPFYYDRIDNTYIPNDYKKVVLWAYDEVLKGVSSKGIARKLNDSDIPPPNGKRWEDRTITRALRSPITRGHYTWGDVFIENSHEPIISEEMYQQIKERLEERINTKIVSHVSVFRGKFICPKCGGTLTMNTATRKRKKGYVTYKTYYCNTCKTKKQSFGFSENEALRVFRDYLSKLDLDKYKVKTKQNDDVVTIDIDKIMEQRKRYHKLYAKGLMQEEELFELIKETDETIAEYEKQKELAPRKTLNVDKIKKFKSVLLESWKIFSLEDKADFIKMAIKSIDIDYVKLKNRHSIKINDIEFY

SEQ ID NO: 55777 - DNA, 50 bp, Staphylococcus epidermidis; identical to SEQ ID NO: 55767
  source 1..50: mol_type = genomic DNA

SEQ ID NO: 55778 - DNA, 40 bp, Staphylococcus epidermidis; identical to SEQ ID NO: 26028
  source 1..40: mol_type = genomic DNA

SEQ ID NO: 55779 - DNA, 40 bp, Staphylococcus epidermidis; identical to SEQ ID NO: 52369
  source 1..40: mol_type = genomic DNA

SEQ ID NO: 55780 - DNA, 50 bp, Staphylococcus epidermidis; identical to SEQ ID NO: 55770
  source 1..50: mol_type = genomic DNA

SEQ ID NO: 55781 - protein, 520 aa, Mycobacteroides chelonae; identical to SEQ ID NO: 36081

SEQ ID NO: 55782 - DNA, 50 bp, Mycobacteroides chelonae
  source 1..50: mol_type = genomic DNA
tccaacttgttgtgtgtgcagccttcacgttgtactgtgccatacatgag

SEQ ID NO: 55783 - DNA, 40 bp, Mycobacteroides chelonae
  source 1..40: mol_type = genomic DNA
gcgacgtgtccggtggctttcacgttgtactgcgccactt

SEQ ID NO: 55784 - DNA, 40 bp, Mycobacteroides chelonae
  source 1..40: mol_type = genomic DNA
gcgacgtgtccggtggcttacacgttgtactgcgccactt

SEQ ID NO: 55785 - DNA, 50 bp, Mycobacteroides chelonae
  source 1..50: mol_type = genomic DNA
ttcatctttcattgtgtgccacctacattttgtacttcaccacacatttg

SEQ ID NO: 55786 - protein, 520 aa, Mycobacteroides abscessus; identical to SEQ ID NO: 36081

SEQ ID NO: 55787 - DNA, 50 bp, Mycobacteroides abscessus; identical to SEQ ID NO: 55782
  source 1..50: mol_type = genomic DNA

SEQ ID NO: 55788 - DNA, 40 bp, Mycobacteroides abscessus; identical to SEQ ID NO: 52223
  source 1..40: mol_type = genomic DNA

SEQ ID NO: 55789 - DNA, 40 bp, Mycobacteroides abscessus
  source 1..40: mol_type = genomic DNA
gcgacgtggccggtggcctacacgttgtactgcgccacct

SEQ ID NO: 55790 - DNA, 50 bp, Mycobacteroides abscessus; identical to SEQ ID NO: 55785
  source 1..50: mol_type = genomic DNA

SEQ ID NO: 55791 - protein, 493 aa, Bacillus cereus
MKEILNVAIYLRLSRDEENKGIESILENHRNKLTELCQQNKWKYDIYQEIASSRTIELREQLVDMLEHVKRNQYDAVVVMDVDRLSRNEFDAPQIFKILSDSNTVIATPTKIYDWSRDEDNLLLGIQSLVAAQEYKQIKKRMTAGKRSASEKGLWVHGIPPLGYDKDPDTRKLVPNEDAKHVKFIFDSIVNGKTVSEVYHELNMMKVKTRTNSTFAFNSVVRIVNNEAYKGTIVSNKYLDKNAMRPKDEWHYVSDVHPAIVDEATWEKANKIVNTYSFSAPRSRNKIYPTTKLIFCGNCRKVQGAQMAGTGKMYLKVCQRCKNRTFLYEPILRTIKDKVANHIPHILKEITAIEQNDNSAEVEYKKQQIHKQMKAIERAIEKIKEAYELDEYTIAEFKDRKAKRENELKQLKAELEHVEQQDPQDKIADLNEIKQRIEYLLQTWQCLDGEGLTDEEVNRNLHFIIERIEWTYGKDGKEPNLNFVWKTDESYAQ

SEQ ID NO: 55792 - DNA, 50 bp, Bacillus cereus
  source 1..50: mol_type = genomic DNA
acgtagtccctaaattccctactaacaagacctgaatttagagactattt

SEQ ID NO: 55793 - DNA, 40 bp, Bacillus cereus; identical to SEQ ID NO: 22328
  source 1..40: mol_type = genomic DNA

SEQ ID NO: 55794 - DNA, 40 bp, Bacillus cereus
  source 1..40: mol_type = genomic DNA
actcgtgtttactggaccggttggatctgggaagacgacg

SEQ ID NO: 55795 - DNA, 50 bp, Bacillus cereus
  source 1..50: mol_type = genomic DNA
ctgtaattcagtgtttccccagtagtaaaacctgaagttgaataaaattt

SEQ ID NO: 55796 - protein, 413 aa, Streptomyces parvulus
MAAVQRGEIDVIIVYMLGRLWRNRRERAEGIELLRKHSVSVLCVKGPELDLTTAAGRLLAGLLGEVDTFEVEQMSEREQREMRQRVERGEVPTGPRCFGYTVDGKEVIDSEAAEVRKMYEAIAAGASLSGIATDLNEREILNRNGLPWTHNAVRYLLQNERYAGLREYNGATYTGKWPTIVSEDQWRQAVSILTDPSRKTSPGPARKWLGSGLYWCGICDDGTTVTSAQAGAKVIKGVRYEGARAYKCRGPVKHLMRTAEPIDRLIAGTEPGEPLGLVPQLLVREDAGQLLRDGERPDMDELNAKAAVLRARLKNMTDAFADDDEADALEFKRAVRRVRDRLADIEQQMTSPARAAVLGDLVRSDDAVAAWAALPLDRKRAVIDLLMTVTVLKGRPGRAPFDPETVRIVPKDA

SEQ ID NO: 55797 - DNA, 50 bp, Streptomyces parvulus
  source 1..50: mol_type = genomic DNA
tagagtcattagctgaagtacacgcatctatacttccggctgtgactctg

SEQ ID NO: 55798 - DNA, 40 bp, Streptomyces parvulus
  source 1..40: mol_type = genomic DNA
cctcgcgaagcagtagacgcacgcgtgcgtgcagccccgg

SEQ ID NO: 55799 - DNA, 40 bp, Streptomyces parvulus
  source 1..40: mol_type = genomic DNA
cctcgcgaagcagtagacgagcgcgtgcgtgcagccccgg

SEQ ID NO: 55800 - DNA, 50 bp, Streptomyces parvulus
  source 1..50: mol_type = genomic DNA
tagagtcatattctgaggtacaaaagtttttgcttcaacacatgaatttt

SEQ ID NO: 55801 - protein, 543 aa, Pseudomonas aeruginosa
MGKNGARVYSYLRFSDPRQATGSSADRQLAYASAWASKHGMELDATLTLRDEGLSAYHETHVKQGALGAFLRAVDEGRIPVGSVLIVEGLDRLSRAEPLLAQAQLGQIVNAGITVVTASDGREYNREGLKAEPMNLVYSLLVMIRAHEESDTKSKRVKAAVRRQCEAWVTGSYRGRIVSGKDPQWLAWDGDSWQFIPERVEAVRFALDAYRSGIGAARLVRLMHEKGMVLSDWGIAAQQVYRLVRLPALRGAKRISIDGEDFMLEDYYPRLLSDEEFSELETLVGQRYRRRGKDEIVGIVTGIGITRCGYCGTALVAQNLMQRVKADGSLEDGHRRLHCVSYSKNGGCNGGSCSSVPIERAVLAYCSDQMNLQRLLEPSSAGEDLRLRLVEAQKGVAEIERQLGRVTDALLADDSGAAPLAFVRKARELEEDLERRRSAVQALEQELVAKSASAPAAGASKWAELAERAKSMADAEAREQARQLVMDTFETLVVYMRGVIPNPKGRYIDVMMKSRAGQTRWIRVDRRTGVWKEGADRPTTRRP

SEQ ID NO: 55802 - DNA, 50 bp, Pseudomonas aeruginosa
  source 1..50: mol_type = genomic DNA
agtttacttttgcagtcattggggcaccctaacgaaacccatcctatact

SEQ ID NO: 55803 - DNA, 40 bp, Pseudomonas aeruginosa; identical to SEQ ID NO: 54108
  source 1..40: mol_type = genomic DNA

SEQ ID NO: 55804 - DNA, 40 bp, Pseudomonas aeruginosa
  source 1..40: mol_type = genomic DNA
gtcgaccagcgccttgggggctccaagactgacgaagccg

SEQ ID NO: 55805 - DNA, 50 bp, Pseudomonas aeruginosa
  source 1..50: mol_type = genomic DNA
gatttactttctatgtcatgaggagcccctaaagatttttttgatctact

SEQ ID NO: 55806 - protein, 543 aa, Pseudomonas aeruginosa
MGKNGARVYSYLRFSDPRQATGSSADRQLAYASAWASKHGMELDATLTLRDEGLSAYHETHVKQGALGAFLRAVDEGRIPAGSVLIVEGLDRLSRAEPLLAQAQLGQIVNAGITVVTASDGREYNREGLKAEPMNLVYSLLVMIRAHEESDTKSKRVKAAVRRQCEAWVAGSYRGRIVSGKDPQWLAWDGDSWQFIPERVEAVRFALDAYRSGIGAARLVRLMHEKGMVLSDWGIAAQQVYRLVRLPALRGAKRISIDGEDFMLEDYYPRLLSDEEFSELETLVGQRYRRRGKDEIVGIVTGIGITRCGYCGTALVAQNLMQRVKADGSLEDGHRRLHCVSYSKNGGCNGGSCSSVPIERAVLAYCSDQMNLQRLLEPTSAGEDLRPRLVEAQKGVAEIERQLERVTDALLADDSGAAPLAFVRKARELEEDLERRRSAVRALEQELVAKSASAPAAGASKWAELAERAKSMADVDAREQARQLVMDTFETLVVYMRGVIPNPKGRYIDVMMKSRAGQTRWIRVDRRTGVWKEGADRPTTRRP

SEQ ID NO: 55807 - DNA, 50 bp, Pseudomonas aeruginosa; identical to SEQ ID NO: 55802
  source 1..50: mol_type = genomic DNA

SEQ ID NO: 55808 - DNA, 40 bp, Pseudomonas aeruginosa; identical to SEQ ID NO: 54108
  source 1..40: mol_type = genomic DNA

SEQ ID NO: 55809 - DNA, 40 bp, Pseudomonas aeruginosa; identical to SEQ ID NO: 55804
  source 1..40: mol_type = genomic DNA

SEQ ID NO: 55810 - DNA, 50 bp, Pseudomonas aeruginosa; identical to SEQ ID NO: 55805
  source 1..50: mol_type = genomic DNA

SEQ ID NO: 55811 - protein, 543 aa, Pseudomonas aeruginosa
MGKNGARVYSYLRFSDPRQATGSSADRQLAYASAWASKHGMELDATLTLRDEGLSAYHETHVKQGALGAFLRAVDEGRIPVGSVLIVEGLDRLSRAEPLLAQAQLGQIVNAGITVVTASDGREYNREGLKAEPMNLVYSLLVMIRAHEESDTKSKRVKAAVRRQCEAWVTGSYRGRIVSGKDPQWLAWDGDSWQFIPERVEAVRFALDAYRSGIGAARLVRLMHEKGMVLSDWGIAAQQVYRLVRLPALRGAKRISIDGEDFMLEDYYPRLLSDEEFSELETLVGQRYRRRGKDEIVGIVTGIGITRCGYCGTALVAQNLMQRVKADGSLEDGHRRLHCVSYSKNGGCNGGSCSSVPIERAVLAYCSDQMNLQRLLEPSSAGEDLRLRLVEAQKGVAEIERQLGRVTDALLADDSGAAPLAFVRKARELEEDLERRRSAVQALEQELVAKSASAPAAGASKWAELAERAKSMADAEAREQARQLVMDTFETLVVYTRGVIPNPKGRYIDVMMKSRAGQTRWIRVDRRTGVWKEGADRPTTRRP

SEQ ID NO: 55812 - DNA, 50 bp, Pseudomonas aeruginosa; identical to SEQ ID NO: 55802
  source 1..50: mol_type = genomic DNA

SEQ ID NO: 55813 - DNA, 40 bp, Pseudomonas aeruginosa; identical to SEQ ID NO: 54108
  source 1..40: mol_type = genomic DNA

SEQ ID NO: 55814 - DNA, 40 bp, Pseudomonas aeruginosa; identical to SEQ ID NO: 55804
  source 1..40: mol_type = genomic DNA

SEQ ID NO: 55815 - DNA, 50 bp, Pseudomonas aeruginosa; identical to SEQ ID NO: 55805
  source 1..50: mol_type = genomic DNA

SEQ ID NO: 55816 - protein, 543 aa, Pseudomonas aeruginosa
MGKNGARVYSYLRFSDPRQATGSSADRQLAYASAWASKHGMELDATLTLRDEGLSAYHETHVKQGALGAFLRAVDEGRIPAGSVLIVEGLDRLSRAEPLLAQAQLGQIVNAGITVVTASDGREYNREGLKAEPMNLVYSLLVMIRAHEESDTKSKRVKAAVRRQCEAWVAGSYRGRIVSGKDPQWLAWGGDSWQFIPERVEAVRFALDAYRSGIGAARLVRLMHEKGMVLSDWGIAAQQVYRLVRLPALRGAKRISIDGEDFILEDYYPRLLSDEEFSELETLVGQRYRRRGKDEIVGIVTGIGITRCGYCGTALVAQNLMQRVKADGSLEDGHRRLHCVSYSKNGGCNGGSCSSVPIERAVLAYCSDQMNLQRLLEPSSAGEDLRPRLVEAQKGVAEIERQLERVTDALLADDSGAAPLAFVRKARELEEDLERRRSAVRALEQELVAKSASAPAAGASKWAELAERAKSMADVDAREQARQLVMDTFETLVVYMRGVIPNPKGRYIDVMMKSRAGQTRWIRVDRRTGVWKEGADRPTTRRP

SEQ ID NO: 55817 - DNA, 50 bp, Pseudomonas aeruginosa; identical to SEQ ID NO: 55802
  source 1..50: mol_type = genomic DNA

SEQ ID NO: 55818 - DNA, 40 bp, Pseudomonas aeruginosa; identical to SEQ ID NO: 54108
  source 1..40: mol_type = genomic DNA

SEQ ID NO: 55819 - DNA, 40 bp, Pseudomonas aeruginosa; identical to SEQ ID NO: 55804
  source 1..40: mol_type = genomic DNA

SEQ ID NO: 55820 - DNA, 50 bp, Pseudomonas aeruginosa; identical to SEQ ID NO: 55805
  source 1..50: mol_type = genomic DNA

SEQ ID NO: 55821 - protein, 543 aa, Pseudomonas aeruginosa
MGKNGARVYSYLRFSDPRQATGSSADRQLAYASAWASKHGMELDATLTLRDEGLSAYHETHVKQGALGAFLRAVDEGRIPAGSVLIVEGLDRLSRAEPLLAQAQLGQIVNAGITVVTASDGREYNREGLKAEPMNLVYSLLVMIRAHEESDTKSKRVKAAVRRQCEGWVTGSYRGRIVSGKDPQWLAWDGDSWQFIPERVEAVRFALDAYRSGIGAARLVRLMHEKGMVLSDWGIAAQQVYRLVRLPALRGAKRISIDGEDFMLEDYYPRLLSDEEFSELETLVGQRYRRRGKDEIVGIVTGIGITRCGYCGTALVAQNLMQRVKSDGSLEDGHRRLHCVSYSKNGGCNGGSCSSVPIERAVLAYCSDQMNLQRLLEPSSAGEDLRPRLVEAKKGVAEIERQLERVTDALLADDTGAAPMAFVRKARELEEDLERRRSAVRALEQELVTKSASTPAAGASKWAELAERAKSMTDVEAREQARQLVMDTFETLVVYMRGVMPTPKGRYIDLMMRSRAGQTRWLRVDRRSGVWRESGDSSRRLEG

SEQ ID NO: 55822 - DNA, 50 bp, Pseudomonas aeruginosa; identical to SEQ ID NO: 55802
  source 1..50: mol_type = genomic DNA

SEQ ID NO: 55823 - DNA, 40 bp, Pseudomonas aeruginosa; identical to SEQ ID NO: 54108
  source 1..40: mol_type = genomic DNA

SEQ ID NO: 55824 - DNA, 40 bp, Pseudomonas aeruginosa; identical to SEQ ID NO: 55804
  source 1..40: mol_type = genomic DNA

SEQ ID NO: 55825 - DNA, 50 bp, Pseudomonas aeruginosa; identical to SEQ ID NO: 55805
  source 1..50: mol_type = genomic DNA

SEQ ID NO: 55826 - protein, 543 aa, Pseudomonas aeruginosa
MGKNGARVYSYLRFSDPRQATGSSADRQLAYASAWASKHGMELDATLTLRDEGLSAYHETHVKQGALGAFLRAVDEGRILAGSVLIVEGLDRLSRAEPLLAQAQLGQIVNAGITVVTASDGREYNREGLKAEPMNLVYSLLVMIRAHEESDTKSKRVKAAVRRQCEAWVAGSYRGRIVSGKDPQWLAWDGDSWQFIPERVEAVRFALDAYRSGIGAARLVRLMHEKGMVLSDWGIAAQQVYRLVRLPALRGAKRISIDGENFMLEDYYPRLLSDEEFSELETLVGQRYRRRGKDEIVGIVTGIGITRCGYCGTALVAQNLMQRVKADGSLEDGHRRLHCVSYSKNGGCNGGSCSSVPIERAVLAYCSDQMNLQRLLEPSSAGEDLRPRLVEAQKGVAEIERQLERVTDALLADDSGAAPLAFVRKARELEEDLERRRSAVQALEQELVAKSASAPAAGASKWAELAERAKSMADVDAREQARQLVMDTFETLVVYMRGVIPNPKGRYIDVMMKSRAGQTRWIRVDRRTGVWKKGADRPTTRRP

SEQ ID NO: 55827 - DNA, 50 bp, Pseudomonas aeruginosa; identical to SEQ ID NO: 55802
  source 1..50: mol_type = genomic DNA

SEQ ID NO: 55828 - DNA, 40 bp, Pseudomonas aeruginosa; identical to SEQ ID NO: 54108
  source 1..40: mol_type = genomic DNA

SEQ ID NO: 55829 - DNA, 40 bp, Pseudomonas aeruginosa; identical to SEQ ID NO: 55804
  source 1..40: mol_type = genomic DNA

SEQ ID NO: 55830 - DNA, 50 bp, Pseudomonas aeruginosa; identical to SEQ ID NO: 55805
  source 1..50: mol_type = genomic DNA

SEQ ID NO: 55831 - protein, 543 aa, Pseudomonas aeruginosa
MGKNGARVYSYLRFSDPRQATGSSADRQLAYASAWASKHGMELDATLTLRDEGLSAYHETHVKQGALGAFLRAVDEGRIPAGSVLIVEGLDRLSRAEPLLAQAQLGQIVNAGITVVTASDGREYNREGLKAEPMNLVYSLLVMIRAHEESDTKSKRVKAAVRRQCEAWVAGSYRGRIVSGKDPQWLAWDGDSWQFIPERVEAVRFALDAYRSGIGAARLVRLMHEKGMVLSDWGIAAQQVYRLVRLPALRGAKRISIDGEDFMLEDYYPRLLSDEEFSELETLVGQRYRRRGKDEIVGIVTGIGITRCGYCGTALVAQNLMQRVKADGSLEDGHRRLHCVSYSKNGGCNGGSCSSVPIERAVLAYCSDQMNLQRLLEPSSAGEDLRPRLVEAQKGVAEIERQLERVTDALLADDSGAAPLAFVRKARELEEDLERRRSAVRALEQELVAKSASAPAAGASKWAELAERAKSMADVDAREQARQLVMDTFETLVVYMRGVIPNPKGRYIDVMMKSRAGQTRWIRVDRRTGVWKEGADRPTTRRP

SEQ ID NO: 55832 - DNA, 50 bp, Pseudomonas aeruginosa; identical to SEQ ID NO: 55802
  source 1..50: mol_type = genomic DNA

SEQ ID NO: 55833 - DNA, 40 bp, Pseudomonas aeruginosa; identical to SEQ ID NO: 54108
  source 1..40: mol_type = genomic DNA

SEQ ID NO: 55834 - DNA, 40 bp, Pseudomonas aeruginosa; identical to SEQ ID NO: 55804
  source 1..40: mol_type = genomic DNA

SEQ ID NO: 55835 - DNA, 50 bp, Pseudomonas aeruginosa; identical to SEQ ID NO: 55805
  source 1..50: mol_type = genomic DNA

SEQ ID NO: 55836 - protein, 461 aa, Shigella flexneri
MRTVITYLRFSSATQGAEGADSTRRQNELFKQWLRKNSDAQVVASFNDEGLSGYKGKHLSGQFGDMLSRIESGEFPEGTILLVEAIDRIGRLEHLETEALMNRIIAHGIEIHTLQDGLIYTRDALSDDLGISIIQRVKSYIAHQESKQKSFRVSQKWEQRAKLALAGEQRLTRNVPGWIDPETFKLNEHAETVRLIFKLLLDGESLHNIARHLQANNISSFSRRKDANGFSVHSVRTILRSETTIGTLPASQRNDRPAIPNYYEAAIDAATFNKAQEILDKNRKGRTPASDNPLTINIFKGLFRCQCGASVHPTGTKNKYAGVYRCNNHLDGRCDVPPLKRKPFDRWMIDNFLGMIDVGNDGESERKIAALQHEVEIVTARIKKATALLLEMDDIDELKIQLKELNQKRTELQTTIDTMKRKASLTDKELPQLKDIDLKWSTKTGHRVRVFPVSIFRFVWG

SEQ ID NO: 55837 - DNA, 50 bp, Shigella flexneri; identical to SEQ ID NO: 38512
  source 1..50: mol_type = genomic DNA

SEQ ID NO: 55838 - DNA, 40 bp, Shigella flexneri
  source 1..40: mol_type = genomic DNA
ggggaagcggcgaggtaaatcaagtgttattgaagtcata

SEQ ID NO: 55839 - DNA, 40 bp, Shigella flexneri
  source 1..40: mol_type = genomic DNA
ggggaagcggcgaggtaaaataagtgttattgaagtcata

SEQ ID NO: 55840 - DNA, 50 bp, Shigella flexneri
  source 1..50: mol_type = genomic DNA
cctcaaaataccagtaaactgaaaataaagggcattgaaaaggacctatt

SEQ ID NO: 55841 - protein, 638 aa, Klebsiella oxytoca
MKPKLYSYVRFSSVKQREGNSLERQQDTALRIASRYDLELDTTAFHDLGMSAFKGKNAHEGKLSEFIKQIGVKVPVGSWLVVENLDRISRDDAWSALDIFKSILSKGIVVVTGMDEKVYKYADVKNNPTDLIISLLMFTRAHDESLTKKNRVESQARSLIRHNLTREPGTPARAIESVGQNVWWVDTKSGYVTPHPTYFAAAQKIIELKQGGETLLGIQRYLNEHYPAPKKRVYKDQAGQALTSKTEQWGKHLIRTFLNPTVHGQKVFTLDKRDESGIVIYDPDSEKPLKETFTIPDYYPVLMSEIDYLTLSKLDRHRAVTRSSSKYPEGNPEPEIPLLSGLGILFCGKCGSFMFKSGSNKNKYRYICGSKIVQGKPCGKKGFTSYQLEHTILQLIADHVWNNHQEDKTAWYESEITKASESIDKLLKLATLTDSLEELAEQINSNKHKKVTLEREFHQYKINRSEIQTTGWEQFQHFDVHDTKNPNRKQIRLKVKQAIKRIDCYDIDGRHGHFEVTFADKTKQRIVIKFNRNRSPGVSYVEAQTVNDHDLLKMQGLVLHSFIDELISPDKFAKHIKEKHEVSLLNPTYITELENSTSRGKGNGMAIIVDGSTSKTYATIKGTKYEINSLEDLEKLSH

SEQ ID NO: 55842 - DNA, 50 bp, Klebsiella oxytoca
  source 1..50: mol_type = genomic DNA
actatgaataattgacaattaggcttgcctaatatacgattactcattgt

SEQ ID NO: 55843 - DNA, 40 bp, Klebsiella oxytoca; identical to SEQ ID NO: 32863
  source 1..40: mol_type = genomic DNA

SEQ ID NO: 55844 - DNA, 40 bp, Klebsiella oxytoca
  source 1..40: mol_type = genomic DNA
acagcgggtatttgccggtctgccctgcggcatacccggg

SEQ ID NO: 55845 - DNA, 50 bp, Klebsiella oxytoca
  source 1..50: mol_type = genomic DNA
actatggattttaccccattaaggctgccaaatttataagacctcattta

SEQ ID NO: 55846 - protein, 518 aa, Mycobacteroides abscessus
MGAEQERAVLYARISYDRRGEQVGVTRQLEAMRKLAERQGWLVVDEIAENDISATKGLHRPGYDRVWALVTAGQVDHVVVWQSSRLMRSRKDRAAVIETFGRHRVDVVAVEGPSLDLRSAYGRGVADLLTSFDSLEGEVKAERVAEALADLKQRGKPWGLTPYGWDRSGGGYDAEQTINQHEAEVVRELVDRLLAGESLNELYRDMNARGEPAPGWVVWHKRSPESREASLRKGRSEPTKLWAKSTIRTLVSRDINAGIRDRRDDDTTITGDWPPIVDPEKHELVRALLTASTVNVTRSGRTWQQARRSHSGPRPGARKHLLTNGIGRCGVCGDLLRVAKRSGRKTIQTIYMCRGVGCTGRVQENVDNLVSTVVIARLQRPDALDWLMGDEQEVRRLDNRCVELQARLDDAADMFAVGKITASQLDRITAGVMPDLEAAQRDRDAAVGATDLAAVRPLAGAKAEARWGELSVAQRRAVLETMGVEVVLMPRKLHGPGFEADTVRISMGGVQVWPSKPL

SEQ ID NO: 55847 - DNA, 50 bp, Mycobacteroides abscessus
  source 1..50: mol_type = genomic DNA
agttccccctaacgaaagaccagacatctagtatttcgttagggggaata

SEQ ID NO: 55848 - DNA, 40 bp, Mycobacteroides abscessus; identical to SEQ ID NO: 20213
  source 1..40: mol_type = genomic DNA

SEQ ID NO: 55849 - DNA, 40 bp, Mycobacteroides abscessus
  source 1..40: mol_type = genomic DNA
acggtcggcgcattccaggctactggtgataccgggcagc

SEQ ID NO: 55850 - DNA, 50 bp, Mycobacteroides abscessus
  source 1..50: mol_type = genomic DNA
agtttcctcaaaagaaagagcaggcttcaggtatttctgttgctggattt

SEQ ID NO: 55851 - protein, 519 aa, Eubacterium ramulus
MNIAAYCRVSTDKADQLNSLEAQKEFFSEYTKRTGDMLVRLYADEGISGTKIKNRKEFLRMMADAEHGLFDLVVVKDISRFARNTVDLLQNIRKLKSLGIETQFLTADMKSMENSEFVLTIFGAMAQEESANTSKRIKFGKKVNAEKGRVPNIVYGYDKSIGDYFNLAINKEESKVVKQIYKWYTEEGYGAAKISNMLNEKGYTTKRNCKWSQNAICRILTNEIYTGKIINGKQEISDFLTGQRREKDETEWMVVERPELRIIEDETFELAQEILRGRHDAFNLTHERQSNKHLFSTLIKCKECGWSFRRTVRTYKNTYVRWVCSGRNGRGADSCPNKTVVDEEELIEVLQEYFTNVLKQKKKVINHVVNEFQRVYKAKDENVEYEKELNAKLAKLQKTRQKYMDMYTDDLISREELNDKIGGMRQEADRLENELKMVSYHLTKGEQLENILNNTFKEIEDITDVHQMTNQQLKRLIQRIEVDKDGNVDIYLRLLGDLGLDESVLIDENETILNCNDHT

SEQ ID NO: 55852 - DNA, 50 bp, Eubacterium ramulus
  source 1..50: mol_type = genomic DNA
ccattctaaattgtaacgaccatacatgcggttgtaacaatatagaacgg

SEQ ID NO: 55853 - DNA, 40 bp, Eubacterium ramulus
  source 1..40: mol_type = genomic DNA
aattagtaagtcgacggtacataaagacatcaccgaacgt

SEQ ID NO: 55854 - DNA, 40 bp, Eubacterium ramulus
  source 1..40: mol_type = genomic DNA
aattagtaagtcgacggtatctaaagacatcaccgaacgt

SEQ ID NO: 55855 - DNA, 50 bp, Eubacterium ramulus
  source 1..50: mol_type = genomic DNA
acattctgacaaggaataagcatatctgtggtggaaacccaatagtaggg

SEQ ID NO: 55856 - protein, 519 aa, Eubacterium ramulus; identical to SEQ ID NO: 55851

SEQ ID NO: 55857 - DNA, 50 bp, Eubacterium ramulus; identical to SEQ ID NO: 55852
  source 1..50: mol_type = genomic DNA

SEQ ID NO: 55858 - DNA, 40 bp, Eubacterium ramulus
  source 1..40: mol_type = genomic DNA
aattagtaagtcgacggtacataaagacatcaccgaacgc

SEQ ID NO: 55859 - DNA, 40 bp, Eubacterium ramulus
  source 1..40: mol_type = genomic DNA
aattagtaagtcgacggtatctaaagacatcaccgaacgc

SEQ ID NO: 55860 - DNA, 50 bp, Eubacterium ramulus; identical to SEQ ID NO: 55855
  source 1..50: mol_type = genomic DNA

SEQ ID NO: 55861 - protein, 554 aa, Rhizobium leguminosarum
MKPKAYSYIRMSTDVQLKGDSLRRQSEESRRYADENDLDLVEDFRLEDIGVSAFHGKNVAQGALGDFLVLCEQQIIQAGSYLIVESLDRISRQNPQVATSLFLQILGAGINIVTLTDRHVYRAGSSDFTDIIVSVVIMSRAYEESRTKSLRVGAAWENKRRNIHDQKLTQVAPIWLRLSADRTAFETVPERVAVLRWIFDEADQGKGSLQISRALNQQGVPTFAPSKGWYESYVSKVLTNRAVLGEFQPHRYIDGKRMRSGEPIPNYFPAIVTREQFERIQVGRAVRRVRGAGRKGQNNINLFQGVATCGYCSARMMIVNKGTGPKGGVYLRCDRARRSADCSASGWPLNHFEGAFLWFVEELDIGAIVQGSASEEARKALEGQAATISADLETQKKIRERAFDLLGEPTSATAFVRGKIDDASMKIEELESKLAAINEAAMIAAASQKRPLEEVRLMIKEIGGWQTADGDTRSRVANWIKRNVNELLLFADGLDQSDQVAADAKQRQFSVSLTGGEFRTVQITGNDPTGASYSIHANDDRWVLSEPLKVTVFD

SEQ ID NO: 55862 - DNA, 50 bp, Rhizobium leguminosarum
  source 1..50: mol_type = genomic DNA
ctcgaattaatccaccccataatgcagatgttgaggtggattaattaata

SEQ ID NO: 55863 - DNA, 40 bp, Rhizobium leguminosarum; identical to SEQ ID NO: 51998
  source 1..40: mol_type = genomic DNA

SEQ ID NO: 55864 - DNA, 40 bp, Rhizobium leguminosarum
  source 1..40: mol_type = genomic DNA
tcccggtaaggtcggcatgtagatcgtcggcctgcctgac

SEQ ID NO: 55865 - DNA, 50 bp, Rhizobium leguminosarum
  source 1..50: mol_type = genomic DNA
actgaattatgtccccccaaaatgtatatgttgaagtcctaacactagta

SEQ ID NO: 55866 - protein, 496 aa, Niallia circulans
MRVAGYIRVSTNKEGQKESPENQKQMILDFITENHFDLFDFYTDVQTGTTDNREGLKRLIQDAENKEFDVIIAKELSRLGRNVELLYQLRRVADNKGVRLITLDGKVDTQDFSKQAMFGLYAWIYESESQRISDRIKSVFHMKYKNGKFLGSIPPYGYELKDKRLVIRDDYTVDIVRDIFNKYLEGWGHDKIARYLTNRDIPTPSQVVGKSNAGLYWQGSTVKKILKNPHYVGDLVQGRETTMNVTNKTRRVNDQSEWITISDAHKPIISRDMFEQVQSLLEQKAKRGRGGTRKRKHLFTNIAYCSDCGKAMHYRINRKGYICGSYAKHGKKACSSHVIKEQLLKEIILDDLKKMADDLEHPNLESKIEKRVRATAKQNESRLQSIEKQIQKQMELKHNALQKYIADDISKQDYDDFVNTVQGKLQQFEIEKAEIKRATDEKKAAIKISAILEQLKAFLNFNALTTEMLLRFVERIEVTESKDVKIYYKFAQVEGL

SEQ ID NO: 55867 - DNA, 50 bp, Niallia circulans
  source 1..50: mol_type = genomic DNA
actaactgtgaaatgcactcaacatgtgttgaatacttttcacagtcaca

SEQ ID NO: 55868 - DNA, 40 bp, Niallia circulans
  source 1..40: mol_type = genomic DNA
ctgcgatactacctcaacatgcgccgtatgcggaaacata

SEQ ID NO: 55869 - DNA, 40 bp, Niallia circulans
  source 1..40: mol_type = genomic DNA
ctgcgatactacctcaacatacgccgtatgcggaaacata

SEQ ID NO: 55870 - DNA, 50 bp, Niallia circulans
  source 1..50: mol_type = genomic DNA
agtcactgtattaggaactcttcatatgtgaaataattctcacagtaacc

SEQ ID NO: 55871 - protein, 526 aa, Rhodocyclus tenuis
MHVALYARVSTTRQADNDLSIPDQLRQLREWCAANGHPVIREYVEPGASATDDKRPVFQQMVGDAMEKPPAFEAIIVHSLSRFFRDLIEFGVYEKRLKRNGVKIVSITQQTSEDSAGEMARRLFSLFDEYQSKENAKHTSRAMCENARQGFYNGSKAPFGYRTLQTDVSGSRGRKKKRLDVDPGEALIVREIYDLFLRGHAGKTYGIKEIVKHLAQRGHTMRGAPWSIQKVHKILSSPAYIGEHYFNVINSKTGQKRPRSEWIMVKAEPIIAREQFERVAALREARSPKHTPPRVVSSPTLLTGLLKCACGHSVTLVTGKSGRYRYYKCSNRQSKGNHACQSRNFPEDKLDRLIIEQLADRVCAPDRLHELIAELRKRTRDTKDAEQHKINELNRLLKKAEAAQRNLYAAIENGLPFDETLQKRAQELKAERESLMIELAGVRRTHALPVERILPSNIEAFSKAIRTKLADKAFAKRYLQALVDEIVVSGDTATMRGSCAALANAVAEMKKGTSEEVPRFMFDWRA

SEQ ID NO: 55872 - DNA, 50 bp, Rhodocyclus tenuis
  source 1..50: mol_type = genomic DNA
ccagattcatgttcgattggcgcgcccgaggcgacgagtcagggcactgg

SEQ ID NO: 55873 - DNA, 40 bp, Rhodocyclus tenuis
  source 1..40: mol_type = genomic DNA
ttacttgttcattggcgcgcccggagcgattcgaacgccc

SEQ ID NO: 55874 - DNA, 40 bp, Rhodocyclus tenuis
  source 1..40: mol_type = genomic DNA
ttacttgttcattggcgcggccggagcgattcgaacgccc

SEQ ID NO: 55875 - DNA, 50 bp, Rhodocyclus tenuis
  source 1..50: mol_type = genomic DNA
ccagcttgagccatgactggggcagctgaggagactgcactggggaatgg

SEQ ID NO: 55876 - protein, 461 aa, Staphylococcus aureus; identical to SEQ ID NO: 10486

SEQ ID NO: 55877 - DNA, 50 bp, Staphylococcus aureus
  source 1..50: mol_type = genomic DNA
ggaagttcggaataactatgcagctacctgatacacacttccaacaaaaa

SEQ ID NO: 55878 - DNA, 40 bp, Staphylococcus aureus
  source 1..40: mol_type = genomic DNA
ggcggatgaggtatccagatacctcgttcgccaattattt

SEQ ID NO: 55879 - DNA, 40 bp, Staphylococcus aureus
  source 1..40: mol_type = genomic DNA
ggcggatgaggtatccagattcctcgttcgccaattattt

SEQ ID NO: 55880 - DNA, 50 bp, Staphylococcus aureus
  source 1..50: mol_type = genomic DNA
ggaagttatacctcactctacaggttcctaagccactcctacaagaagaa

SEQ ID NO: 55881 - protein, 461 aa, Staphylococcus aureus; identical to SEQ ID NO: 10486

SEQ ID NO: 55882 - DNA, 50 bp, Staphylococcus aureus
  source 1..50: mol_type = genomic DNA
ggaagttcggaataactatgcagttacctgatacacacttccaacaaaaa

SEQ ID NO: 55883 - DNA, 40 bp, Staphylococcus aureus; identical to SEQ ID NO: 55878
  source 1..40: mol_type = genomic DNA

SEQ ID NO: 55884 - DNA, 40 bp, Staphylococcus aureus; identical to SEQ ID NO: 55879
  source 1..40: mol_type = genomic DNA

SEQ ID NO: 55885 - DNA, 50 bp, Staphylococcus aureus; identical to SEQ ID NO: 55880
  source 1..50: mol_type = genomic DNA

SEQ ID NO: 55886 - protein, 526 aa, Mycobacterium paraintracellulare
MTLRALVVIRLSRVTDETTSPERQREACEQLCRERGFEIVDVATDLDVSGSVDPFTRPVLGRWLAERHDKFDCLVAWRVDRLTRSIRHLRRLVDWAEDHGKLIVSATEPHFDMASPFAAVLIALLGTVAEMELAAISERNRSAARHNIKAGKYRGGLPPWGYVPDKSSGEWRLIKDDEQVVVIEEVVKRVLRREPLRSIAHDLTERGVPTPKDSFAKRQGREAKGLGWSSGRLKQSLTSEALLGYAMSGGQPVRAEDGSPIIRAEPILTRDKFDRLRKELESRENRKEPYARTTALLLRVIYCGCGKQMYSLKGGKGRQYRYRCASAQYKTNCGGPSCLAPEADQLVETSILQLLGDSERLEKEWDAGDDHSAELADVDAELADLAGQLGTAAFRPGTPQRLRLNDRIERLSQRQAELSRDVSRPAGWVWRPTGERFGDWWASQDVVGRNVWLRDAGVRLIFDGRYNLDLGDVETMTKQLQPAGAIAEYQRMFAAMTESGIAGTEINGDDVVIHYRDGTTERVTLA

SEQ ID NO: 55887 - DNA, 50 bp, Mycobacterium paraintracellulare
  source 1..50: mol_type = genomic DNA
attgagtaattcgatttagtcgagtactcgatatcatcaaaataacacca

SEQ ID NO: 55888 - DNA, 40 bp, Mycobacterium paraintracellulare
  source 1..40: mol_type = genomic DNA
cgcgatggtgccgatggcgtactcgaccgtcgacatgccc

SEQ ID NO: 55889 - DNA, 40 bp, Mycobacterium paraintracellulare
  source 1..40: mol_type = genomic DNA
cgcgatggtgccgatggcgttctcgaccgtcgacatgccc

SEQ ID NO: 55890 - DNA, 50 bp, Mycobacterium paraintracellulare
  source 1..50: mol_type = genomic DNA
attgagaaaagacatttaatcaaattctatatatattcatgataaaaaca

SEQ ID NO: 55891 - protein, 508 aa, Rossellomorea vietnamensis
MIALYARVSTEEQAKSGYSLQDQIRQCREKAGKNAECIEYVDDGYSGGFLERPALSKLRNDLREGLIDKVIVYDPDRLSRKLANQLIVTEEIEKRAKLIFVNSEYKNTPEGILFYQMRGAFSEFEKAKIKERMTNGRRAKARKNKVVKDVKVYGYKFNKESQELEIYEPEAKIVRLIFELFTDPRGRVQGINGIAHYLTDKGIPTKKRKGVWHRQVVRQILMNETYTGVFYHNKWNTEGMLVNKYKDTDDEKVSMTLRPKEEWIPVEVPVIIEKETFKFAQKLLKESRRRWAGTSKNKYLLSGLVRCGDCGNTMTGRRAKNWGTYVFEYSDAKNTAGAKHKGCGNRVKCEDLEVYVWNHFVNVITTEGESAYSEVAATTETQDSIPFEESELQRIEAELIRIKSGRKRLLDFMTNNADIVDEEDIRNQLKELKEKEDHLLKLKEETAALLEERKNNEVNDEIRAKAVERYFENENPESMSIEERQELLRMLYREIRVYSNGKIDFISL

SEQ ID NO: 55892 - DNA, 50 bp, Rossellomorea vietnamensis
  source 1..50: mol_type = genomic DNA
atgcacacatttgacattagaatcgaaattgtaaagtcaatagtgttgcg

SEQ ID NO: 55893 - DNA, 40 bp, Rossellomorea vietnamensis
  source 1..40: mol_type = genomic DNA
ggcacgatgtatcgagaatgaaatcctcatgcacctccgt

SEQ ID NO: 55894 - DNA, 40 bp, Rossellomorea vietnamensis
  source 1..40: mol_type = genomic DNA
ggcacgatgtatcgagaatataatcctcatgcacctccgt

SEQ ID NO: 55895 - DNA, 50 bp, Rossellomorea vietnamensis
  source 1..50: mol_type = genomic DNA
atgcacacacacactttttcaagcataactataatggtagaattgttggg

SEQ ID NO: 55896 - protein, 576 aa, Streptomyces parvulus
MTTAQIPATFKRTKLAPYVGYIRVSTWKEEKISPEIQRAAILEWAKRHGAEITEWIEDLDTTGRNFKRKIMRAIEIVEKGKEKGIAVWRYSRFGRDRAGNAINLARVESIGGQLVSATEPVDATTAIGRFQRGMILEFAAFESDRIGEAWSETHQHRRAQGLPATGRPRFGYIWHRRWDARTEKLQDEKYEPHPEVGPIVAELYRMYTHPTKPKGFASLCGWLNNSGHRTTRGTLWTTQTLTRYMDGGFPAGLLRIHDDDCKCNGRRTNGSCPNYFFAQGAHEELIDYDLWQKYRARRTEVQNTPPRARNAIYELTGIVRHDACRGGTSMTTNRWRNAAGEVINLNGHAYRCSQRAASGGTKCEGIWIQRVPVEKEVEKWLMREAAPGVDTAPPTEKDEPKVDERALAKLARAKLTAEYETAEAALTRLIMDQAEHPEKYPAGAFERARDTYVQRQERIKRELEKQADVAEAPRRSDFDRLVVSIAAEWKTFNTSERNAMIKQLVRRVVLSRKKDENGEPIPGGEGVAVTVHPLWEPDPWERARICRGPFGTATAGLWLSAELWTRPDTWEQIPPR

SEQ ID NO: 55897 - DNA, 50 bp, Streptomyces parvulus
  source 1..50: mol_type = genomic DNA
tcggatgttttgggcactctcatgtggaacagagtgcccaaaacatccgg

SEQ ID NO: 55898 - DNA, 40 bp, Streptomyces parvulus
  source 1..40: mol_type = genomic DNA
acgggtcgcgacgctcgcctggaacaacgccgagcacgtc

SEQ ID NO: 55899 - DNA, 40 bp, Streptomyces parvulus
  source 1..40: mol_type = genomic DNA
acgggtcgcgacgctcgcctagaacaacgccgagcacgtc

SEQ ID NO: 55900 - DNA, 50 bp, Streptomyces parvulus
  source 1..50: mol_type = genomic DNA
tcttatgtgtttctcactctaaagtagaagagagtagatggagaatcctg

SEQ ID NO: 55901 - protein, 584 aa, Pseudomonas haemolytica
MPTAYAYIRYSSKAQGEAGRDSVDRQMASIQAITKQQGIELPPENIYSDTGISAHDGSNKRKGKLKELIDMISDMHIKEGDYIFVESIDRLSRQRLLQAKELVNGILEKGVILITTIDGQRYEKPNETNRIDDLQQDILLSVIAKRAYEESKTKSVRRKSAWNRAKKLAEEEKVIFNAHNPPYGIRYNTELNCFEIEEEEAQEIRDFFESLKYVGVSLSIKKLNAYSKRKWSSRNIKHLIDTKYVLGAYMAQRRDENKKKVFERYIENYYPQIVSYELFNEAIAAMKNRAQRKNYGNQSVGSLNIFRHSIKCDCCEASMLFEKQTNPKGVVYPYFQCYTRKELKNGCDQPRFRFDLAFGLFLELIYQSTTDEDFDVHPWQNEMPDTEIEYEWITRESGMRYRLPTQEDIDEEERVENFKELLIKLLSNRENQTKDNKIIVELSNLLLEQKSYRDNLMKSFAGFTSGVIPQEFLQVVSKTEATINDIEQNLAELQTQINIKKTTINIYSENDIIDLYKTEDGRLKINQFFVANDITFKFKFDKTTRTLFAKIFQNGFEIDRIAKHFSLHNPLKEFGINNLNEYFN

SEQ ID NO: 55902 - DNA, 50 bp, Pseudomonas haemolytica
  source 1..50: mol_type = genomic DNA
gtgtggaatacccccctaccattcgagagcggccggtgttattctcacac

SEQ ID NO: 55903 - DNA, 40 bp, Pseudomonas haemolytica
  source 1..40: mol_type = genomic DNA
agtgctgcgcgagccattggagtcggggtatatcgtgatc

SEQ ID NO: 55904 - DNA, 40 bp, Pseudomonas haemolytica
  source 1..40: mol_type = genomic DNA
agtgctgcgcgagccattgccgtcggggtatatcgtgatc

SEQ ID NO: 55905 - DNA, 50 bp, Pseudomonas haemolytica
  source 1..50: mol_type = genomic DNA
ctgtggtatgtgagcctcctttccccgagctgccggcctgtttctttccc

SEQ ID NO: 55906 - protein, 525 aa, Clostridium jeddahense
MNSASIQQFDFEGDFDAENGDVVIYARYSSEKQNEQSIEGQLRCCYEYAARRGFRVVGEYIDKALSGTKAETRPEFQRLIADSRKRQFKFVLVWKLDRFARNRYDSAIYKNELKKSGVRVVSVTEGVGDGNESVILEAILEAMAEEYSRQLSQNVRRGLHETALKGNSVGGRLPLGYRVENKKLVIDEHEAEIVRYIFKEYAAGIGKKEIVRAMNSRGWRTRQGAPFTMNALGRTLTNKKYIGIYTYNSEIQIEGGCPAIVDEDTFNKVSRIVENTKKSPAHNKTREEDYILSGKLFCGYCGAPMVGESGKSKGGTVYHYYACGKRKKSHSCHKKNEKKGFIEWYIVEQVVEYVLTPSRIDLIAERVVEEYNKGFNSSGVKALEAELREIDRDLDKLIESLIKTDSKAALAKINERITAQEARKETCELELAKLKIAASISITQDEVKAWLRQFCTGDTLNDEDFRRRIIDVFINSIYLYDDKVVMYFNIRDGKQISYIEMLESTEEPGAEVGDRCSDLKHDGSP

SEQ ID NO: 55907 - DNA, 50 bp, Clostridium jeddahense
  source 1..50: mol_type = genomic DNA
tgttcggatttgaagcacgatggttcaccaatgacagacttatccgaaca

SEQ ID NO: 55908 - DNA, 40 bp, Clostridium jeddahense
  source 1..40: mol_type = genomic DNA
ggttcgaatccccgatggttcaccaataagagaagctccc

SEQ ID NO: 55909 - DNA, 40 bp, Clostridium jeddahense; identical to SEQ ID NO: 55908
  source 1..40: mol_type = genomic DNA

SEQ ID NO: 55910 - DNA, 50 bp, Clostridium jeddahense
  source 1..50: mol_type = genomic DNA
tgttcagatcacagccgttatttttcacttatgacaggtttatcggaaca

SEQ ID NO: 55911 - protein, 538 aa, Paenibacillus amylolyticus
MYNASDSVDEYCLYLRKSRSDIEAETRGEGETLARHEKQLLDLGKRLKINITYIFREVVSGETIDDRPEIQKLLHQVELGKWKGVLVVEVERLARGDTIDQGVVAQAFKYAGTKIITPVKTYDPNNEYDEEYFEFGLFMSRREFKTINRRLQNGRRTSVSEGKYIGSVPPYGYEKIKLKGSKGYSLKPLEDQANVVRMIYELYTIGQADENGIVKRVGPSLISKKLNTLKVPPAKGSLWTRDSVSSILRNPVYNGKIKWGTRTLKKQRRNGVVKKSRPRNSEQNIVLVDGLHDRLVSEETWNLAKSYLINKASKPIPDRHKVKNPLAGLAECAKCGRKLIRKPGQKHEPLLYCQIPECKNVSSFLSVVEKKVVEALEVWLKSYKTKWRQSEIKTKSSTDLENLQISALKAIEKEITELTKQLSNLHDLLEQGIYSTETFLDRSQKLSQRLAAAQKNKADIKVSITTSSERNVAKEILIPKFEHVIDTYYLTDDPELRNNLLKEVLEKFTYEKNKGTRWHGSPDDFVLKIFPKIPHPDH

SEQ ID NO: 55912 - DNA, 50 bp, Paenibacillus amylolyticus
  source 1..50: mol_type = genomic DNA
cactgacaacatgttggtgcaaatgtatctgatccatcatgttatcagta

SEQ ID NO: 55913 - DNA, 40 bp, Paenibacillus amylolyticus
  source 1..40: mol_type = genomic DNA
catttccgttggtacaaacgtatccgcctctccgtggatg

SEQ ID NO: 55914 - DNA, 40 bp, Paenibacillus amylolyticus
  source 1..40: mol_type = genomic DNA
catttccgttggtacaaactcatccgcctctccgtggatg

SEQ ID NO: 55915 - DNA, 50 bp, Paenibacillus amylolyticus
  source 1..50: mol_type = genomic DNA
cacttagaataatgttttcaagattcatctgattaaaatacgtatcagta

SEQ ID NO: 55916 - protein, 584 aa, Streptococcus pyogenes
MNTKVKLIKASNTGARNRNALDLELKRVAAYCRVSTDSKDQLESYKSQVDYYTNLIKNNKNWTLAGIYADEATTGTTATKRADFMRLISDCQNGDIDMIITKSISRFARNTLDTLKYVRLLKENNVGVVFEEENIDTLTMDGELLLTILSSVAQQEVENTSAHVKKGLKMKMEKGELIGFQGCLGYDYDPITKTISINEEEAKIVRYIFKRYLEGNGGSVIGRELEEQGYLTPRGKTKWSDTTVLGIIKNEKYIGDILMGKTFTVDPITKRRLANFGESDKYHIENHHEPIISKEDFEKAQEIRLRRAQNRNTIANKDRKREKLSRQYAFSSMLECGFCGEILSRRTWHTSSIYKKINWQCVRSTKKGKKYCPHSKGIQEAAIEKAFVESYRQLCHADSTVIDDFLKIVEEEINDNTLVKDLKKIESQLNRIISQERKLVDLHLEDSIDEVVYAKKYKKLTKQKEELLDEKKTLELTIKDENSIKERLKQFKKVLENREIIEEFNRTVFESIVDKVVVGRIDKDGTVHPYDLTFYFKTGVKDSQDSNNFKDKRKNAKDNDINKLCSYKNDEDKKLCSQSKDNAR

SEQ ID NO: 55917 - DNA, 50 bp, Streptococcus pyogenes
  source 1..50: mol_type = genomic DNA
atgttcccaatcaaaagacaacgcacgtggaagctatagcgttgatacaa

SEQ ID NO: 55918 - DNA, 40 bp, Streptococcus pyogenes; identical to SEQ ID NO: 23708
  source 1..40: mol_type = genomic DNA

SEQ ID NO: 55919 - DNA, 40 bp, Streptococcus pyogenes; identical to SEQ ID NO: 23708
  source 1..40: mol_type = genomic DNA

SEQ ID NO: 55920 - DNA, 50 bp, Streptococcus pyogenes; identical to SEQ ID NO: 23680
  source 1..50: mol_type = genomic DNA

SEQ ID NO: 55921 - protein, 584 aa, Streptococcus pyogenes
MNTKVKLIKASNTGARNRNALHLDLKRVAAYCRVSTDSKDQLESYKSQVDYYTNLIKNNKNWTLAGIYADEATTGTTATKRADFMRLISDCQNGDIDMIITKSISRFARNTLDTLKYVRLLKENNVGVVFEEENIDTLTMDGELLLTILSSVAQQEVENTSAHVKKGLKMKMEKGELIGFQGCLGYDYDPITKSISINEEEAKIVRYIFKRYLEGNGGSVIGRELEEQGYLTPRGKTKWSDTTVLGIIKNEKYIGDILMGKTFTVDPITKRRLANFGESDKYHIENHHEPIISREDFEKAQEIRLRRAQNRNTIANKDRKREKLSRQYAFSSMLECGFCGEILSRRTWHTSSIYKKINWQCVKSTKKGKKYCPHSKGIQEAAIEKAFVESYRQLCHADSTVIDDFLKIVEEEINDNTLVKDLKKIENQLNRVISQERKLVDLHLEDSIDEEVYAKKYKKLTKQKEELLDEKKTLELTIKDENSIKERLKQFKKVLENREIIEEFNRTVFESIVDKVVVGRIDKDGTVHPYDLTFYFKTGVKDSQDSNNFKDKRKNAKDNDINKLCSYKNDEDKKLCSQSKDNAR

SEQ ID NO: 55922 - DNA, 50 bp, Streptococcus pyogenes; identical to SEQ ID NO: 55917
  source 1..50: mol_type = genomic DNA

SEQ ID NO: 55923 - DNA, 40 bp, Streptococcus pyogenes; identical to SEQ ID NO: 23708
  source 1..40: mol_type = genomic DNA

SEQ ID NO: 55924 - DNA, 40 bp, Streptococcus pyogenes; identical to SEQ ID NO: 23708
  source 1..40: mol_type = genomic DNA

SEQ ID NO: 55925 - DNA, 50 bp, Streptococcus pyogenes; identical to SEQ ID NO: 23680
  source 1..50: mol_type = genomic DNA

SEQ ID NO: 55926 - protein, 550 aa, Streptococcus agalactiae; identical to SEQ ID NO: 45751

SEQ ID NO: 55927 - DNA, 50 bp, Streptococcus agalactiae
  source 1..50: mol_type = genomic DNA
gtttggacaatgatgaacaagttgagacggtagtactgctttcccacaaa

SEQ ID NO: 55928 - DNA, 40 bp, Streptococcus agalactiae
  source 1..40: mol_type = genomic DNA
ccaatgacacatcatgtggagtgcgtagcgttgctacaac

SEQ ID NO: 55929 - DNA, 40 bp, Streptococcus agalactiae
  source 1..40: mol_type = genomic DNA
ccaatgacacatcatgtgggttgcgtagcgttgctacaac

SEQ ID NO: 55930 - DNA, 50 bp, Streptococcus agalactiae
  source 1..50: mol_type = genomic DNA
gttcagacatattctaacaagttagtacagtattattttaatgtcccaaa

SEQ ID NO: 55931 - protein, 550 aa, Streptococcus agalactiae; identical to SEQ ID NO: 45751

SEQ ID NO: 55932 - DNA, 50 bp, Streptococcus agalactiae
  source 1..50: mol_type = genomic DNA
gtttggacaatgatgaacaagttgagacggtagtacttctttcccacaaa

SEQ ID NO: 55933 - DNA, 40 bp, Streptococcus agalactiae; identical to SEQ ID NO: 55928
  source 1..40: mol_type = genomic DNA

SEQ ID NO: 55934 - DNA, 40 bp, Streptococcus agalactiae; identical to SEQ ID NO: 55929
  source 1..40: mol_type = genomic DNA

SEQ ID NO: 55935 - DNA, 50 bp, Streptococcus agalactiae; identical to SEQ ID NO: 55930
  source 1..50: mol_type = genomic DNA

SEQ ID NO: 55936 - protein, 550 aa, Sinorhizobium fredii
MVGTTDPYFFESFCDMRLTMNDLTTTKPKAYSYIRFSTPEQERGDSLRRQTEAAVRYAALHRLELDDKLTFRDLGVSAFTGANEETGRLGEFLAAVHHGDIQRGSYLLVESLDRLSRQKPRKAVKVLERICEAGITVVTLDDGRQYTEETLDEDPLALMVALLVASRAHEESAKKGRRVAAAWANKRDKAQAGNKPLTALCPGWLRLNADHTGFDVIPERADIVRRVFALTLDGVGQHSIAQRLNRDGVPVFGRGKMWQRSYVNKMLADHAVIGNFTPHRAERVNGRKVRIPTETIEGYFPAVVEREAFERVASMISARPASTRAPVANILAGLARCPQCDASMTRINKGSGTKQGRPYLVCSRAKVGAGCDYKQVRMENVEHAIFYHVEELLGGLPSPHEGLQSKWEILLDHRGVIHEEIERLVEAIARAGHSRALLSRLRRMEHERDEIGKKLEEIEELIADSLTNRVQNTVKELVSRTQDEERDVAKINATMRQLFSKVVVDYREGQLWFHWKHAEGEQTGVVYAMPQETELNEGHAAPNPKLPNAA

SEQ ID NO: 55937 - DNA, 50 bp, Sinorhizobium fredii
  source 1..50: mol_type = genomic DNA
gagaggtctttcgttcacatcgtgagcatggtagggacaacagacccata

SEQ ID NO: 55938 - DNA, 40 bp, Sinorhizobium fredii
  source 1..40: mol_type = genomic DNA
ccctggcgggccgaccatcagtagattgtggtttcccgcc

SEQ ID NO: 55939 - DNA, 40 bp, Sinorhizobium fredii
  source 1..40: mol_type = genomic DNA
ccctggcgggccgaccatcgttagattgtggtttcccgcc

SEQ ID NO: 55940 - DNA, 50 bp, Sinorhizobium fredii
  source 1..50: mol_type = genomic DNA
gaggaggccttaattcacatatttgtcatggaagaggagtcagatccata

SEQ ID NO: 55941 - protein, 493 aa, Bacillus wiedmannii
MKCAVYIRVSTDKEEQKQSLTNQRDLFIKYISERGWDIHEFYEDVETGTTDKREQLQRLITDAKEKKFDVILAKELSRLARNGGLSYQIRDLAEQKGIHIITLENAINTLEGNNNMFGLFAWMYEQESQNVSNRVKSALKTRAEKGLFKGSIPPYGYSLINRKLFIKQDGTADTVRRIFTSYLSGNGFDKIAKDLYNDGIPTPSQINGKLNANDKWQGSTIRLILTNPNYTGDLVQGRSTTKSVTSKVREFLNKEQYIIVPNTHEAIISKEDFEAVQLLIESRKRTRPQSEAHLFTNTLYCHECGKGMHFKNTRKGYVCGSFNRHGKKACTPHFIKESELTLLVLNEFESLSSVLKNDSFIPMLESKLKAKKQKINHDISKYTKEIEALKKSKTRTISLLVEEIITKDDYNAFTLDTNKQIEALSLKIKNLMSIIEISNDQLAIAEMKKQLDSVTLFNELTPTILHRLIDKIEIKACGTPRIHYRFSVPLFTI

SEQ ID NO: 55942 - DNA, 50 bp, Bacillus wiedmannii
  source 1..50: mol_type = genomic DNA
tttagccacgcacagcattctacgtgactggtatgctgaatatagacaaa

SEQ ID NO: 55943 - DNA, 40 bp, Bacillus wiedmannii
  source 1..40: mol_type = genomic DNA
ccaagctacacactccacatgagtcgtatgcgggaacata

SEQ ID NO: 55944 - DNA, 40 bp, Bacillus wiedmannii
  source 1..40: mol_type = genomic DNA
ccaagctacacactccacaacagtcgtatgcgggaacata

SEQ ID NO: 55945 - DNA, 50 bp, Bacillus wiedmannii
  source 1..50: mol_type = genomic DNA
tctagccccaaagtccattctcctacagtggtttaatcaccatagacaca

SEQ ID NO: 55946 - protein, 520 aa, Mycobacteroides chelonae; identical to SEQ ID NO: 37231

SEQ ID NO: 55947 - DNA, 50 bp, Mycobacteroides chelonae
  source 1..50: mol_type = genomic DNA
cttctcataggtgtacttctcgatcaacacgaacatatactcttgagatc

SEQ ID NO: 55948 - DNA, 40 bp, Mycobacteroides chelonae; identical to SEQ ID NO: 20143
  source 1..40: mol_type = genomic DNA

SEQ ID NO: 55949 - DNA, 40 bp, Mycobacteroides chelonae
  source 1..40: mol_type = genomic DNA
gatcgccatgctcctcgatttacagatcccgatggaagtg

SEQ ID NO: 55950 - DNA, 50 bp, Mycobacteroides chelonae
  source 1..50: mol_type = genomic DNA
attctcctagattaactcctggatttagactgccatgggatgatgagatc

SEQ ID NO: 55951 - protein, 423 aa, Vibrio cidicii
MSLRIRLIVEMEQAFKESEWRSAKVKASYIRREKLAKEEGKAPRIRKPFWLNPDGTLNHLHQAVKDMFNWYLEGLGQQRIVVRLREKYTDTAIQKINPSTVMRWIQSEIVRGYWRGNRVYEPAVDDQLFFDVQAIHKSRLYKNVKPDRQWPLSGLMQCGVCGRGMSIQKSGKSNPVVRCSSKQRDHSCNRKTTFPYFIVHMYMMTHVLQHAIRLHSDKSSNKGLQIELGKVERKLATTRKKLNDEKEFYNKASNEGQNTTMILQLMNETYQKIEELEEQEKSLKASLKQSNRAVSAESRDLLFTPETFNLEMHKLGFKIVVGEEVLSTIGFDKPVSKMVYLGYCRKERAYKYADASSDFVKVWPSSLVTDELLNMQMLKNYINSSSGLKYIWDHIYDDDLEEKLKKRSNEKKEKEKKLKEKGE

SEQ ID NO: 55952 - DNA, 50 bp, Vibrio cidicii; identical to SEQ ID NO: 14432
  source 1..50: mol_type = genomic DNA

SEQ ID NO: 55953 - DNA, 40 bp, Vibrio cidicii
  source 1..40: mol_type = genomic DNA
gatcgatcacttactgtgtgagttgaaagcaggccaatct

SEQ ID NO: 55954 - DNA, 40 bp, Vibrio cidicii
  source 1..40: mol_type = genomic DNA
gatcgatcacttactgtgtcagttgaaagcaggccaatct

SEQ ID NO: 55955 - DNA, 50 bp, Vibrio cidicii
  source 1..50: mol_type = genomic DNA
aatgtgcaccttttatctcttagtcagcaatatgcagtttacttctgctt

SEQ ID NO: 55956 - protein, 587 aa, Pseudomonas aeruginosa
MPTAYAYIRYSSKAQGEAGRDSVDRQMASIQAIVKARNLHLPPENIFSDSGISAFTGSNKTKGKLKDLIDMIGDLRVKSGDYIFVESIDRLSRQRLLQAKELVNGILEKGIVLITTIDGQRYEKPNDHNGIDDLQQDILLSVIAKRAYEESKTKSVRRKSAWNRAKKLAEEEQQIFNGHNPPYGIRYDKENNCFEIVEEEAKEIRDIFESLKYVGVSLSIKKVNAYSKRRWTNRNVKIMLDTKYVLGAYMAQRRDENRKKVFERYIEGYYPQIIPHELFNEAVSAMKLRADRKNYGNQSVGSLNIFRHCIKCDCCNASLLFEKQTNPKGVIYPYFHCHTRKEIRNGCDAPRFRFDLAFGLLLKLIYKSTTKDDYNPHPFELMEDEIDDKEYIQTPSGMKYRFLSQEEMKDEDVFFEKYEDFKHLLIDLLNSKTAIKEDNAKEIALKNDLLQQRSYRENLIKSFESFSDGIIPPEFIKRISDTDQKIKSLEDEVVKLQTSINMKKTTIDIYSEKDIIELYKTEDGRLKINNFFIMNEITFRFSFDTKSRNLSCRVLKNGIEIDRVAEKFHLHNPLRDYGIANLNTYFN

SEQ ID NO: 55957 - DNA, 50 bp, Pseudomonas aeruginosa
  source 1..50: mol_type = genomic DNA
gtttggtatagcccccttccgttcgagaagggtagatggtattctcacac

SEQ ID NO: 55958 - DNA, 40 bp, Pseudomonas aeruginosa; identical to SEQ ID NO: 22678
  source 1..40: mol_type = genomic DNA

SEQ ID NO: 55959 - DNA, 40 bp, Pseudomonas aeruginosa
  source 1..40: mol_type = genomic DNA
ggtcctgcgcgagccgctgataagcggcgagatcgtcatt

SEQ ID NO: 55960 - DNA, 50 bp, Pseudomonas aeruginosa
  source 1..50: mol_type = genomic DNA
ggttggtatatggtgcttcaatacatgtagggaagatttcagtaacacac

SEQ ID NO: 55961 - protein, 463 aa, Mycobacteroides chelonae
MRVLGRIRLSRLTDESTSAARQRELIEQWSQMHEHEIVGWAEDLDVSGSVDPFDTPSLGPWLSEDKRGDWDILVAWKLDRVGRRAIPLNHLFGWVMEHNKTLVCVSDNIDLSTWVGRLVANVIAGVAEGELEAIKERTKASRKRLLESGRWPGGTVPYGFRAQEIETGGWRLTTDPVTSAVVVRIAGDIINGLPIEAVSKALNEEGVPGPAGGRWIPESVWKIVEGKVLIGHATYKGNTVRDQAGRPVLYADPILEQETWDRMQAAIEQRKHPEAERYNQTSPLLGVLFCSECGQKMYYRVYRRRTRDYRYYFCRKHKQLLKADELEDLLAKRFIEEVGHFNAEDRFFVPAENHQMELEEATRAVEELTALLGTLTSTTMRSSITGQLQALDSRISQLEKLPSRDAHWEYRNMDYTYAEEWESSDTDGRRRLLLRSEMTAQASKRYFHFHVPEDMLERLRSSK

SEQ ID NO: 55962 - DNA, 50 bp, Mycobacteroides chelonae
  source 1..50: mol_type = genomic DNA
ggtatacaatggctctatgccgatagatcggatgctatgctttgtatatg

SEQ ID NO: 55963 - DNA, 40 bp, Mycobacteroides chelonae
  source 1..40: mol_type = genomic DNA
cgtcgaaatctgttcggacagatcggcggccgggtagatc

SEQ ID NO: 55964 - DNA, 40 bp, Mycobacteroides chelonae; identical to SEQ ID NO: 55963
  source 1..40: mol_type = genomic DNA

SEQ ID NO: 55965 - DNA, 50 bp, Mycobacteroides chelonae
  source 1..50: mol_type = genomic DNA
gatattcaaatatgctatggctatagataacaagcttatacttatttatg

SEQ ID NO: 55966 - protein, 461 aa, Kocuria rhizophila
MDAVIYARISRDAEGTSLGVNRQLEDCRKAASARGWTVVHEYVENDTSATRAKVRPQYQQMLRDLANGTAGALIVWDVDRLTRTPRELEDVIDLADAHNIALVSIGGEIDLATPQGRMTARIKGSVARHETDQMARRIRRKQRERAEQGLPNGLCPFGWRRVYNDQEHRSGARDVAYPPEADQIRDGVSRLLAGESVRSISMRWNTEGLPTQRGNPWSTGTVRQTLRRAANAGLREHKGEIFPSEVIEPLITEDELHRVRSLLADPGRRVQHGTTPAYLLTGIAECGRCGGKMRYLKPRGRHNIPSYGCRDCTRVARSMGLVDAVVEGAILGRLQRPDVLETLPTMDPKRGDDLRSQAEALEAKLSEAADLFTAGTITGEQLSRITAGVRPQLERTRTQLADLTPASAAAAIAGDDAVARWEDATLLVKREIVDTLMTVTVLPTGPGRGRDPESVRIEWKS

SEQ ID NO: 55967 - DNA, 50 bp, Kocuria rhizophila
  source 1..50: mol_type = genomic DNA
agaaacctaaacccgttttacgcaggtgtcaagactgagctagaatctct

SEQ ID NO: 55968 - DNA, 40 bp, Kocuria rhizophila
  source 1..40: mol_type = genomic DNA
ggcgatgtagatctcggtcgggccgttgatccagatctcc

SEQ ID NO: 55969 - DNA, 40 bp, Kocuria rhizophila
  source 1..40: mol_type = genomic DNA
ggcgatgtagatctcggtcttgccgttgatccagatctcc

SEQ ID NO: 55970 - DNA, 50 bp, Kocuria rhizophila; identical to SEQ ID NO: 23845
  source 1..50: mol_type = genomic DNA

SEQ ID NO: 55971 - protein, 461 aa, Kocuria indica
MDAVIYARISRDAEGTSLGVNRQLEDCRQAASARGWTVVHEYVENDTSATRAKVRPQYQQMLRDLANGPAGALIVWDVDRLTRTPRELEDVIDLADAHNIALVSIGGEIDLATPQGRMTARIKGSVARHETDQMARRIRRKQRERAEQGLPNGLCPFGWRRVYDDQGRRAGSRDVAYAPEAEQIRDGVSRLLAGESVRSISMRWNTEGLPTQRGNPWSTGTVRQTLRRAANAGLREHKGEIFPSKVIEPLITEDELHRVRALLADPGRRVQHGTTPAYLLTGIAECGRCGGKMRYLKSRGRDGMPSYGCRDCYRVARSMGLVDAVVEGAVLGRLQQPDVLETLPTVNPARGDDLRSQAEALEAKLSEAADLFTAGTITGEQLSRITAGVRPQLDKTRAQLADLTPASAAAAIAGEDAVARWEDATLLVKREIVDTLMTVTLLPVGPGRGRDPKSVRIDWKA

SEQ ID NO: 55972 - DNA, 50 bp, Kocuria indica
  source 1..50: mol_type = genomic DNA
agaaacctaaacgcgttttacgcaggtgtcaagactgagatagaatctct

SEQ ID NO: 55973 - DNA, 40 bp, Kocuria indica; identical to SEQ ID NO: 55968
  source 1..40: mol_type = genomic DNA

SEQ ID NO: 55974 - DNA, 40 bp, Kocuria indica; identical to SEQ ID NO: 55969
  source 1..40: mol_type = genomic DNA

SEQ ID NO: 55975 - DNA, 50 bp, Kocuria indica; identical to SEQ ID NO: 23845
  source 1..50: mol_type = genomic DNA

SEQ ID NO: 55976 - protein, 461 aa, Kocuria rhizophila
MDAVIYARISRDTEGTQLGVNRQLEDCRQAASARRWTVVHEYVENDTSATRAKVRPQYQQMLRDLANGIAGALIVWDVDRLTRTPRELEDVIDLADAHNIALVSIGGEIDLATPQGRMTARIKGSVARHETDQMARRIRRKQRERAEQGLPNGLCPFGWRRVYDDQVRRAGARDVAYPPEADQIRDGVSRLLAGESVRSIALRWNTEGLPTQRGNGWRTGTVRQTLRRAANAGLREHKGEIFPSDVIEPLITEDELHRVRALLADPGRRVHHGTTPAYLLTGIAECGRCGGKMRYLKSRGRDGMPSYGCRDCTRVARSMGLVDAVVEGAVLGRLQRPDVLETLPTMDPKRGDDLRSQAATLEAKLSEAADLFTAGTITGEQLSRITAGVRPQLERTRAQLADLTPASAAAAIAGEDAVARWEDATLLVKREIVDTLMTVTILPAGPGRGRDPESVEIEWKS

SEQ ID NO: 55977 - DNA, 50 bp, Kocuria rhizophila
  source 1..50: mol_type = genomic DNA
agaaacctaaacgcgttttacgcaggtgtcaagactgagctagaatctct

SEQ ID NO: 55978 - DNA, 40 bp, Kocuria rhizophila
  source 1..40: mol_type = genomic DNA
ggccacgtagatctcggtgggcccgttgatccagatctcc

SEQ ID NO: 55979 - DNA, 40 bp, Kocuria rhizophila
  source 1..40: mol_type = genomic DNA
ggccacgtagatctcggtgttcccgttgatccagatctcc

SEQ ID NO: 55980 - DNA, 50 bp, Kocuria rhizophila; identical to SEQ ID NO: 23845
  source 1..50: mol_type = genomic DNA

SEQ ID NO: 55981 - protein, 541 aa, Klebsiella oxytoca
MPKAISYIRFSTKIQSVGDSTKRQSKYINDWLKRNPDYYLDESLRFQDLGISGFSGANAKSGAFGEFLAAVESGYIEAGSVLLVESLDRVSRQDIDTAGEQLRKILRSGVEVVTLVDNEWYTKESLKDSLSMIKAMLVMERAHEESAMKSTRLRSMWAAKRERAANGEIMSKRCAAWLRVSEDRSHFEFIHENVKAVQRVFQLRLEGLSHIKIAKKMNDEGFYTLNQHKSIKGGWSQSSVTELLSNRSVIGFKVPSKSMAVKGVSEIPNYYPSIITDEQFYAVQQLKQGSGRKPSSDLPLLTNLFKGVLRCSECGFIVVVAGVSAKRSGIYKCSMKSEGRCNSVGFSRLQTDRALVQGLLYNTNRLSLNRDNGSAIGSLQSELEQLQKQRERLIKLAMLADDTESMAKDLKALNSQIKDAENAVSEVHQREQSSQLETISHLDLTVKKDRIEAQIIIKRIVKEIRLNTAGKKCDVFLHNGLKLLNFPLDRVVDGAQWLEILPLIDGDEFDFEGFTTKPRHIALEEAPEWVKEMEEQPSQPL

SEQ ID NO: 55982 - DNA, 50 bp, Klebsiella oxytoca
  source 1..50: mol_type = genomic DNA
gtgtatcaatagaaaggtctcttcaggattacacttttcttatgatacac

SEQ ID NO: 55983 - DNA, 40 bp, Klebsiella oxytoca; identical to SEQ ID NO: 8143
  source 1..40: mol_type = genomic DNA

SEQ ID NO: 55984 - DNA, 40 bp, Klebsiella oxytoca
  source 1..40: mol_type = genomic DNA
atgaaccggacggctatccttgatcacgcggttgacgttt

SEQ ID NO: 55985 - DNA, 50 bp, Klebsiella oxytoca
  source 1..50: mol_type = genomic DNA
gtgaaagaataaggaggaccctacttgatcacactttagacatggtagag

SEQ ID NO: 55986 - protein, 641 aa, Vibrio parahaemolyticus
MIYAYCRVSSGKQLEGLSMSLQGDEALLSKLAKDYNTTVSERVYRDEGKSAYKGEHLRGELGKLLADIDSGVIKDGDIIVMRHLDRLSRLDFSKSMNLFNGILGAGIGIYTTMDSRLYSNKLGNSEQAIYNALAGFAFSTANEESVRKSYYINKNALAQIERFQRGERTACGHAYDIGVGHHPFWVTTRTDDGVGIKNPPVRVHTENYSIAKELVQYALQGNGITRCQQLLEKRGLSYTKQGIRNIFESAALYGCLKISIDDKQGARTEFELDGYYPAVCSKEEFYKLRAERKKRTVSNGNRKEYSLLSGARMLHCGCKQSLNVHHSKNGAKYYICASQNHNMINCYTLDNLVLNALKSKVFNTEIDDTRLKALEAELDVISTAYRKKQKFVFDNIELFGDAIKSELSTMKAGVAKLESKVEAERQAVMSAKPAEILDLSTYDKWVHQISEIVDADSEIKRIYSQKIKQLVNDIVLHDDGLVVIEYVDRSKDYYYFPENKRKKQGEFWAVKLLVTDDDTTREMVLADEKMAVFVFSTEEIKARKYVNDISDFKAGLTLFSRKRTTDTAQKRFANQIKEYLGNHGELEYKRSEVVKLGISESRWQKLKDTDLTKYGIGFKSKESEMVNGKSSVSKLAFLMEE

SEQ ID NO: 55987 - DNA, 50 bp, Vibrio parahaemolyticus
  source 1..50: mol_type = genomic DNA
agttgcaactaaaacaatattgctccattaaacttgttctagttgcaatc

SEQ ID NO: 55988 - DNA, 40 bp, Vibrio parahaemolyticus
  source 1..40: mol_type = genomic DNA
cattacggtcaatttggccccggcagatttacctaaagaa

SEQ ID NO: 55989 - DNA, 40 bp, Vibrio parahaemolyticus; identical to SEQ ID NO: 55988
  source 1..40: mol_type = genomic DNA

SEQ ID NO: 55990 - DNA, 50 bp, Vibrio parahaemolyticus
  source 1..50: mol_type = genomic DNA
agttgcaccatttctaattttattcctttaaactttcttagctggcattc

SEQ ID NO: 55991 - protein, 499 aa, Dorea longicatena
MKQPYNTTIYNTALYLRLSRDDELQGESGSIQTQRMMLRQYAAEHGLTVVDEYIDDGWSGTNFERPSFQRMIDDIEDGKINCVVTKDLSRLGRNYILTGQYTEIYFPSKGVRYIAINDNVDTINGESELAPFLNILNEMHARQTSKKVKAAMHTRFANGAHYGAYAPLGYVKDPDKKGHLLIDPETRWIVEKIFDLAVHGRGAASITRILVEEKVPTPGWLNYERYGTFANIYAGAPAEKAYAWTIAQVKSILKEETYIGHSVHNKQSNISFKNKKKVRKPQEEWYRVENTHEAIISEEVFQKVQELIASRRRKRRNGTTQIFAGLIKCADCGWSLAYGENKQNKNPYGYYHCSKNGQGLRQCSMHYIRYDVLYAYVLARLQYWSMLAQKDEDKLLKRLLNASDRERNSAKKKQAAELKKAEKRKAEVDGLFAKMYEDWSAGRITEYNFNMLSEKYQNEQKELETKIRQLHETMEAAVQTAADAEKWIALMKQYVNPVE

SEQ ID NO: 55992 - DNA, 50 bp, Dorea longicatena
  source 1..50: mol_type = genomic DNA
aaacagtatgtcaaccctgtggagctatccgaagcggaattttattccct

SEQ ID NO: 55993 - DNA, 40 bp, Dorea longicatena
  source 1..40: mol_type = genomic DNA
tgcaccacagacaaaggagctgaccgccgaacttctgaac

SEQ ID NO: 55994 - DNA, 40 bp, Dorea longicatena
  source 1..40: mol_type = genomic DNA
tgcaccacagacaaaggagtcgaccgccgaacttctgaac

SEQ ID NO: 55995 - DNA, 50 bp, Dorea longicatena
  source 1..50: mol_type = genomic DNA
aaagaagatggccaccctgtggtgtcatgagatgagctgacttaatcctt

SEQ ID NO: 55996 - protein, 499 aa, Dorea longicatena
MKQPYNTTIYNTALYLRLSRDDELQGESGSIQTQRMMLRQYAAEHGLTVVDEYIDDGWSGTNFERPSFQRMIDDIEDGKINCVVTKDLSRLGRNYILTGQYTEIYFPSKGVRYIAINDNVDTINGESELAPFLNILNEMHARQTSKKVKAAMHTRFANGAHYGAYAPLGYVKDPDKKGHLLIDPETRWIVEKIFDLAVHGRGAASITRILVEEKVPTPGWLNYERYGTFANIYAGAPAEKAYAWTIAQVKSILKEETYIGHSIHNKQSNISFKNKKKVRKPQEEWYRVENTHEAIISEEVFQKVQELIASRRRKRRNGTTQIFAGLIKCADCGWSLAYGENKQNKNPYGYYHCSKNGQGLRQCSMHYIRYDVLYAYVLARLQYWSMLAQKDEDKLLKRLLNASDRERNSAKKKQAAELKKAEKRKAEVDGLFAKMYEDWSAGRITEYNFNMLSEKYQNEQKELETKIRQLHETMEAAVQTAADAEKWIALMKQYVNPVE

SEQ ID NO: 55997 - DNA, 50 bp, Dorea longicatena; identical to SEQ ID NO: 55992
  source 1..50: mol_type = genomic DNA

SEQ ID NO: 55998 - DNA, 40 bp, Dorea longicatena; identical to SEQ ID NO: 55993
  source 1..40: mol_type = genomic DNA

SEQ ID NO: 55999 - DNA, 40 bp, Dorea longicatena; identical to SEQ ID NO: 55994
  source 1..40: mol_type = genomic DNA

SEQ ID NO: 56000 - DNA, 50 bp, Dorea longicatena; identical to SEQ ID NO: 55995
  source 1..50: mol_type = genomic DNA

SEQ ID NO: 56001 - protein, 499 aa, Dorea longicatena
MKQPYNTTIYNTALYLRLSRDDELQGESGSIQTQRMMLRQYAAEHGLTVVDEYIDDGWSGTNFERPSFQRMIDDIEDGKINCVVTKDLSRLGRNYILTGQYTEIYFPSKGVRYIAINDNVDTINGESELAPFLNILNEMHARQTSKKVKAAMHTRFANGAHYGAYAPLGYVKDPDKKGHLLIDPETRWIVEKIFDLAVHGRGAASITRILVEEKVPTPGWLNYERYGTFANIYAGAPAEKAYAWTIAQVKSILKEETYIGHSVHNKQSNISFKNKKKVRKPQEEWYRVENTHEAIISEEVFQKVQELIASRRRRQKNGTTQIFSGLVKCADCGWSLAYGVNSQNKNPYAHYHCSKYGQGLRQCSMHYIRYDVLYAYVLARLQYWSMMVQKDEDKLLKRLLNASDRERNSAKKKQAAELKKAEKRKAEVDGLFAKMYEDWSAGRITEYNFNMLSEKYQNEQKELETKIRQLHETMEAAVQTAADAEKWIALMKQYVNPVE

SEQ ID NO: 56002 - DNA, 50 bp, Dorea longicatena; identical to SEQ ID NO: 55992
  source 1..50: mol_type = genomic DNA

SEQ ID NO: 56003 - DNA, 40 bp, Dorea longicatena
  source 1..40: mol_type = genomic DNA
tgcgccacagacaaaggagctgaccgccgaacttctgaac

SEQ ID NO: 56004 - DNA, 40 bp, Dorea longicatena
  source 1..40: mol_type = genomic DNA
tgcgccacagacaaaggagtcgaccgccgaacttctgaac

SEQ ID NO: 56005 - DNA, 50 bp, Dorea longicatena; identical to SEQ ID NO: 55995
  source 1..50: mol_type = genomic DNA

SEQ ID NO: 56006 - protein, 499 aa, Dorea longicatena
MKQPYNTTIYNTALYLRLSRDDELQGESGSIQTQRMMLRQYAAEHGLTVVAEYIDDGWSGTNFERPSFQRMIDDIEDGKINCVVTKDLSRLGRNYILTGQYTEIYFPSKGVRYIAINDNVDTINGESELAPFLNILNEMHARQTSKKVKAAMHTRFANGAHYGAYAPLGYVKDPDKKGHLLIDPETRWIVEKIFDLAVHGRGAASITRILVEEKVPTPGWLNYERYGTFANIYAGAPAEKAYAWTIAQVKSILKEETYIGHSIHNKQSNISFKNKKKVRKPQEEWYRVENTHEAIISEEVFQKVQELIASRRRKRRNGTTQIFAGLIKCADCGWSLAYGENKQNKNPYGYYHCSKNGQGLRQCSMHYIRYDVLYAYVLARLQYWSMLAQKDEDKLLKRLLNASDRERNSAKKKQAAELKKAEKRKAEVDGLFAKMYEDWSAGRITEYNFNMLSEKYQNEQKELETKIRQLHETMEAAVQTAADAEKWIALMKQYVNPVE

SEQ ID NO: 56007 - DNA, 50 bp, Dorea longicatena; identical to SEQ ID NO: 55992
  source 1..50: mol_type = genomic DNA

SEQ ID NO: 56008 - DNA, 40 bp, Dorea longicatena; identical to SEQ ID NO: 55993
  source 1..40: mol_type = genomic DNA

SEQ ID NO: 56009 - DNA, 40 bp, Dorea longicatena; identical to SEQ ID NO: 55994
  source 1..40: mol_type = genomic DNA

SEQ ID NO: 56010 - DNA, 50 bp, Dorea longicatena; identical to SEQ ID NO: 55995
  source 1..50: mol_type = genomic DNA

SEQ ID NO: 56011 - protein, 478 aa, Glutamicibacter protophormiae
MVELVALRKTNEVAAYVRASMDRKGDRWTVDTQLRKIRALAEAKDWTVVEVYEDNAVSATKKRRAGTRWAEMLDDARAGRFSMVVAVDMDRLLRSTKDLNTLIDLGLRVVTVDGEIDLSTADGEFRATMLAALARFEARRKAERQIRSNERRRAEGIPASTWKAFGWTREGEVIEEEAAAVRRAFDAFLGEPSLSIRRIREDLNNAGHLTARGSEFSVDAVRYLLANSLYAGFIRHYKTGELYPVQGEAFPPIVGEQTWRAAVAKLEDNVRRSARQGNQPKYLLSTIGLCGKCGATLVSGTNSRKQPTYRCGEQFHLTRQREPVDAMVTEAVLTRLSSVDVHDLVMPQEDDGPDREELLTERNALVERVKELSPLLRDIHQPVLEITAAINEVKARIDEIDTELLDRSVSVAAKLLAGGEEAVGTAERREVVESKWKALDMDRRRMLVDELVTVTIEPIMPGHVKFDPDLVRIEPRSD

SEQ ID NO: 56012 - DNA, 50 bp, Glutamicibacter protophormiae
  source 1..50: mol_type = genomic DNA
ctgacaacaagtgctacaacccaggcatgcgttagcgcatatcgtggtta

SEQ ID NO: 56013 - DNA, 40 bp, Glutamicibacter protophormiae
  source 1..40: mol_type = genomic DNA
gttggcaccggagtgatcgacatgcgctacgagaacccgc

SEQ ID NO: 56014 - DNA, 40 bp, Glutamicibacter protophormiae
  source 1..40: mol_type = genomic DNA
gttggcaccggagtgatcggcatgcgctacgagaacccgc

SEQ ID NO: 56015 - DNA, 50 bp, Glutamicibacter protophormiae
  source 1..50: mol_type = genomic DNA
ctgtcatcatttcatacattacaggcatgctttggagatattcttggttt

SEQ ID NO: 56016 - protein, 674 aa, Vibrio nigripulchritudo
MKLSKIASSIGVKPVVITYTRFSSSMQKDGLSEYRQDELTQRHVIDFCEEHDVDLDEVISLRDRGVSAYRGKNMTQGSLSEIISKFKSGELPKVYNEKGEINTFLFIESLDRLTRAKLFKANKLFLDLVEYCNIVVVAESEQKIYSMNQLSSDTGMLDLFSALLTMSRSHNESRMKELRTKANWNKKRQSVIDYFDLPEEERKKAEYPLNATKTCPWWLKPKSDNRGFEFIEENRKAMMFFLNLMLEGYGLTSAIRRLNEEIEAKTFKVVFSAKQKNIKGFATHTFYQLLTNDSNETLIGNLIFHQDFYPEESDVAQETFEAKDLGKRIRVPIYNAKGYYPALLSEIEYETLQYKISQRKQSQSKPTKKVANIAQGILKCPKCGYSYVHNVDNRQGRHPHLVCRSSRSKLCRAFTYRYEFLEHNFLTFCRNLNIAKVLGKDMPDDSVERMILETESKIEKLKIVRNKQDHDMELLVSNIARLTIPSLVEKMQDEYVNFEIKIKQTQQELESAFRDLETLRVKTVSLNNVSLTINELIDAMKDKSDVQLRETLNVELKKIIKGMGILHHSDHNNPFGRNVIYVEFFDGYLRFIAIDKKLDSDELYNLLPVVELSKIDESFDFSENVILPSDYITGLEKGKYPPVEEMAKYYHENPAKLLIVMDEMKSSDVVMNFE

SEQ ID NO: 56017 - DNA, 50 bp, Vibrio nigripulchritudo
  source 1..50: mol_type = genomic DNA
tgcgtgttttgtttttttacgatcttaaacgtgacaaaaagagtatgtca

SEQ ID NO: 56018 - DNA, 40 bp, Vibrio nigripulchritudo
  source 1..40: mol_type = genomic DNA
cgcaatcttcatcacgcagttgatcatccagaccatagcg

SEQ ID NO: 56019 - DNA, 40 bp, Vibrio nigripulchritudo; identical to SEQ ID NO: 56018
  source 1..40: mol_type = genomic DNA

SEQ ID NO: 56020 - DNA, 50 bp, Vibrio nigripulchritudo
  source 1..50: mol_type = genomic DNA
tgtgtatttgaatgttgtaccatcttaaactggacaagtccaaaatggaa

SEQ ID NO: 56021 - protein, 516 aa, Vibrio gazogenes
MSNNKALAFLYIRFSTKKQEQGDSIRRQIDAAEAWCKEKDIELSAQTFEDLGVSAFKEGGKRPALEDMLFAIEQGRIPRNSYLLLEDHDRLSRRGWLHTQTLVHKVVKLGVKIVMLRSRTVYDQSNINNISDNIMLMFSADRAFQESERKSQLIKASRNNARNNREVTGKLPAWIARNGDEFIFNDKLITIQELIDCKLSGKSHQATAKHLNSLGMTTGSGSVWSASGVRAIIQNHALYGAKAYFDTGADGRMNAKPIEIVSDIFPQLISFQQYQSLNVKKASGRTSKRGAFTQLLKCGRCGSAMTTRSSNYKGQPRTYKMCVRATEGSCSQVERVREPERYLNDVLRKLTYQISKGAYVSRTGEYEKQLETLNETKDKLISLGLTDALTDVYVDMNRVRELIEDSKIADQANIEPDVDFAYVCDIENIEERNTELRKLLSKIVFYCISKRGQTSQWKVVIHQVNGFTISFLLDQQYGFGNTNVKFVADKKQYIKDTQVDMYAWEDEYAEATLGNV

SEQ ID NO: 56022 - DNA, 50 bp, Vibrio gazogenes
  source 1..50: mol_type = genomic DNA
gtgcattgaaatgaacacgtgattaaagtactatacagattatgatgcac

SEQ ID NO: 56023 - DNA, 40 bp, Vibrio gazogenes
  source 1..40: mol_type = genomic DNA
atttggctggcacgtgattaaagtgttgtaccggacgtga

SEQ ID NO: 56024 - DNA, 40 bp, Vibrio gazogenes
  source 1..40: mol_type = genomic DNA
atttggctggcacgtgatttcagtgttgtaccggacgtga

SEQ ID NO: 56025 - DNA, 50 bp, Vibrio gazogenes; identical to SEQ ID NO: 5480
  source 1..50: mol_type = genomic DNA

SEQ ID NO: 56026 - protein, 535 aa, Bacillus pumilus
MELKHIVNSYNVTKIIGYLRRSRQDVEREKRTGEDTLTEQKELMNKILTGIEIPYETRTEIGSGESIEGRPVFKSCLADLRSGKFQAIAVKEITRLSRGSYSDAGEIVNLLNEKRIIIITPYKIYDPRNPVDARQIRFELFMAREEFEMTRERMNGAKFTYAAQGKWISGLAPFGYKLNKRTSRLEPVDEDKVVVQLIFDIFLNGLDGKDLSYTAIATHLTKLQFTTPRGGKRWSKDSVRNILQNEAYMGRVRYKARETTKDGKKVFRPESEHIIVDDAHEPIINKEDFEAVQAKIKNKVPLLPVVTSYEPNELAGICVCSVCGKSLQKFESEYNRKNKDGTSSYFHVKLLICKINRCTSVRYEYVEEAILEYLEQLISLENNKLKTIIEKSMEAAETNNSEKTSEQMLVQANQKQKELENKLTFIFEKFESGIYTDEMFLQRKAAIEKEIADIKKLKQELSMTFEVKEKDVNEFRVNISDVVKFYKESKSRGLKNEKLRSIFDFIVLEMTEKRRGPIPAKFNIYPVLRIPSVVN

SEQ ID NO: 56027 - DNA, 50 bp, Bacillus pumilus
  source 1..50: mol_type = genomic DNA
aattgagtaccaagataaaccgacaaagcggtatatcatgatgcttaata

SEQ ID NO: 56028 - DNA, 40 bp, Bacillus pumilus
  source 1..40: mol_type = genomic DNA
tgtcaacatttcaaccgacaaagcggtttctccgacaaat

SEQ ID NO: 56029 - DNA, 40 bp, Bacillus pumilus; identical to SEQ ID NO: 56028
  source 1..40: mol_type = genomic DNA

SEQ ID NO: 56030 - DNA, 50 bp, Bacillus pumilus
  source 1..50: mol_type = genomic DNA
atatcagtaattcaataaattgacaaagatatatataggcatatttaata

SEQ ID NO: 56031 - protein, 535 aa, Bacillus altitudinis
MELKHIVNSYNVTKIIGYLRRSRQDVEREKRTGEDTLTEQKELMNKILTGIEIPYETRTEIGSGESIEGRPVFKSCLADLKSGKFQAIAVKEITRLSRGSYSDAGEIVNLLNEKRIIIITPYKIYDPRNPVDARQIRFELFMAREEFEMTRERMNGAKFTYAAQGKWISGLAPFGYKLNKRTSRLEPVDEDKVVVQLIFDIFLNGLDGKDLSYTAIATHLTKLQFTTPRGGKRWSKDSVRNILQNEAYMGRVRYKARETTKDGKKVFRPESEHIIVDDAHEPIINKEDFEAVQAKIKNKVPLLPVVTSYEPNELAGICVCSVCGKSLQKFESEYNRKNKDGTSSYFHVKLLICKINRCTSVRYEYVEEAILEYLEQLISLENNKLKAIIEKSMEAAETNNSEKTSEQMLVQANQKQKELENKLTFIFEKFESGIYTDEMFLQRKAAIEKEIADIKKLKQELSMTFEVKEKDVNEFRVNISDVVKFYKESKSRGLKNEKLRSIFDFIVLEMTEKRRGPIPAKFNIYPVLRIPSVVN

SEQ ID NO: 56032 - DNA, 50 bp, Bacillus altitudinis; identical to SEQ ID NO: 56027
  source 1..50: mol_type = genomic DNA

SEQ ID NO: 56033 - DNA, 40 bp, Bacillus altitudinis; identical to SEQ ID NO: 56028
  source 1..40: mol_type = genomic DNA

SEQ ID NO: 56034 - DNA, 40 bp, Bacillus altitudinis; identical to SEQ ID NO: 56028
  source 1..40: mol_type = genomic DNA

SEQ ID NO: 56035 - DNA, 50 bp, Bacillus altitudinis; identical to SEQ ID NO: 56030
  source 1..50: mol_type = genomic DNA

SEQ ID NO: 56036 - protein, 616 aa, Nocardia brasiliensis
MNENLDELAESYPSAFLGAVDDWQLPTITSDTVAEDATFVSDDEAPPGTRALLYLRVSTPGQVKTDFDPEGISIPAQRVAGQRKADQMELNIIGEYIEPGRSATEITKRVAFQRMLDRIRRERDVDYIIVYELSRFARNRLDDAIIMADLKKRGVTLISATESIDDTPVGQLMHGILAAFNEYRSRKDGADISYKMGQKAQKGGTLGQASIGYLNVMLELDDGRKIRTVEIDPVRGPLIRTGFELYATGDHSTIDIARIMADRGLRTRRTPKRASKPVSHKEWARILRSRYYIGIVSYKGEEIPGRHEPLVDEEVFNRVQRVLDEHGVAGERRRVHHHYLKGTMFCGNCRREGRIRRMVLQKTTNRHGTEYQYLFCTGTRTDGCKASFSNLERVEDLVVEHYKTIAFTPEFIELMRSAMEKTVAESQAATRLYRKQLQDQLKELDTKEANLLELAEDGAMPKARIKTRLTEIQRTREKLATELGQVAENLNAGVEYITGCLELLRDPHGMYTGASDKVRRRLNQAIFKRIYVFNEEITGHELQPALAELHAVQAGVAAIQRREDPGKAVMLARSVLKRHLPETELATRRGGESLKLVEALTCGFSLGQGFNTDHVV

SEQ ID NO: 56037 - DNA, 50 bp, Nocardia brasiliensis
  source 1..50: mol_type = genomic DNA
gttttaatacggaccatgtggtggacttactgaggcgacagtcaaacaat

SEQ ID NO: 56038 - DNA, 40 bp, Nocardia brasiliensis
  source 1..40: mol_type = genomic DNA
aacacccgccttatggtggagctaaggggaatcgaacccc

SEQ ID NO: 56039 - DNA, 40 bp, Nocardia brasiliensis
  source 1..40: mol_type = genomic DNA
aacacccgccttatggtggtgctaaggggaatcgaacccc

SEQ ID NO: 56040 - DNA, 50 bp, Nocardia brasiliensis
  source 1..50: mol_type = genomic DNA
gttttaatagccatcatatggttttgttaaagagacttcaattaaaagtt

SEQ ID NO: 56041 - protein, 538 aa, Azospira oryzae
MFNEWLARNQGSYYESNLSAKDEGLSAYKGKNKEGGLGAILEAIQQGLVRSGDVLVVEAIDRLSRAQAMDALRLLGDIVRAGIPILTLEDNQTYTEESLNGPQLFLLAAKVQGAHEYSKRLGSRVKAAWKVKEEKAKAGDKPKKLQNIPCWVDRETLKLNDLAPAIKQLIDLYLEGEGIREVCYFARESLSFKVAARTFTRWLDSEVLLGHWRGIECFEALLSEKEFFELQRQRKARTRTPKQPNFRPLSGLVVCGKCGGSFNFRIQKPAATIAAPKGSEAYAAKPLIVYGNCRNYLHEKSCSNGATVPEEVAMLVYNATVDRLLFDLAYVAAMDVKSREDLAGIVERRARLETEYNNRESLYIKGIKNSEDDAARLALLKQQLAECDKEISASLDKQQQFESYKEHIQEMRKLLAKGKRLDAVDAVFGWGFAENEDLKKAVEQQIARIEASPFLMRLALKNAGYRIVVDRTKDGRVRLTCKDSDEPGEEWIIQKRSQKLGCYLVENRFFGPVDIEEYSNGDYGFIEGENSRVIEARR

SEQ ID NO: 56042 - DNA, 50 bp, Azospira oryzae
  source 1..50: mol_type = genomic DNA
attcatgttaactaggcaagcttctggaagctatgatgaattgtactaat

SEQ ID NO: 56043 - DNA, 40 bp, Azospira oryzae
  source 1..40: mol_type = genomic DNA
attcatggccgccaccagctggaagcgggcagggaaatcg

SEQ ID NO: 56044 - DNA, 40 bp, Azospira oryzae
  source 1..40: mol_type = genomic DNA
attcatggccgccaccagccagaagcgggcagggaaatcg

SEQ ID NO: 56045 - DNA, 50 bp, Azospira oryzae
  source 1..50: mol_type = genomic DNA
attaattttttgtgtgcaagcttccagaaattttctttgtctgtacaaaa

SEQ ID NO: 56046 - protein, 526 aa, Mycobacteroides chelonae
MKQQLRAVVGSRVSHLDDDKATTRKVSHKAQTEEGERWAKSQGYEVVGAFEDLGVSAGKTTPFERPDLGKWLAPERLHEWDVLVFSKIDRAFRSTSDCVDFARWTKENRKILAFSGDGVVLDYLHPKGESLDQMMSEFFIYVGSFFAAIELNRFRTRATDRLSYLRMTDRVSHGVPPLGFRTVPHPSGQGKALERDPEGYALLHEIKDKLLHEHYSMTALVKWLHDPRCLANKETDPTTGRSRSVHLTKCACRQTNAASARGGDKWWTATTLRRVLTSERTQGIRMSGGKPVLDSQGTPIRMAEPTFTDDEWEQIQQAVNQRSTSGRARYMTDNPFAGIVYCVCGYAVALHRRMSSSGKEHTYVRCGQGCRGAWKLLDVHEQLGISFLAGYGDQEMSKLVFVPGEDRSDELSGIERSIARLRWESDNDLVDDEDLYQSRMASLLSRKREIGQIVVPARWERQGTGKTYRELWAEPDTDRRQVMRDARIRLVLHFIPKGSDAPFVTHAHFVDMWNPEEELNVVPGRR

SEQ ID NO: 56047 - DNA, 50 bp, Mycobacteroides chelonae
  source 1..50: mol_type = genomic DNA
gttgttgtgtgtgcagccttcacgttgtaccgtgccatacatgaaacaac

SEQ ID NO: 56048 - DNA, 40 bp, Mycobacteroides chelonae
  source 1..40: mol_type = genomic DNA
gtgtccggtggctttcacgttgtactgtgccacttcgatc

SEQ ID NO: 56049 - DNA, 40 bp, Mycobacteroides chelonae; identical to SEQ ID NO: 56048
  source 1..40: mol_type = genomic DNA

SEQ ID NO: 56050 - DNA, 50 bp, Mycobacteroides chelonae
  source 1..50: mol_type = genomic DNA
tttgttatgtttttagttttgactttgtctagtgccatccttgaaaccac

SEQ ID NO: 56051 - protein, 502 aa, Mycobacteroides chelonae
MKQQLRAVVGSRVSHLDDDKATTRKVSHKAQTEEGERWAKSQGYEVVGAFEDLGVSAGKTTPFERPDLGKWLAPERLHEWDVLVFSKIDRAFRSTSDCVDFARWTKENRKILAFSGDGVVLDYLHPKGESLDQMMSEFFIYVGSFFAAIELNRFRTRATDRISYLRMTDRVSHGVPPLGFRTVPHPSGQGKALERDPEGYALLHEIKDKLLQENYSLTGVVQWLNETGRQTAVAKARKGDAKWSVTSLKRTLTNERTQGLRMSGGKAVLDSQGIPIRMAEPTFTDDEWEQIQQAVNQRSTSGRARYMTDNPFAGIVYCVCGYAVAQHRRKSSSGKEHTYVRCGQGCRGAWKLADVHEQLDISFLAGYGEQEMSKLMFVPGEDRSDELAGIERSITRLRWESDNDLVDDEDLYQSRMASLLSRKREIGQIVVPARWERQGTGKTYQELWADPETDRRQAMRDARIRLVLHFIPKGSDAPFVTQANFVDMWNPSEEGKAALTKV

SEQ ID NO: 56052 - DNA, 50 bp, Mycobacteroides chelonae; identical to SEQ ID NO: 56047
  source 1..50: mol_type = genomic DNA

SEQ ID NO: 56053 - DNA, 40 bp, Mycobacteroides chelonae
  source 1..40: mol_type = genomic DNA
gtgtccggtggctttcacgttgtactgcgccacctcgatc

SEQ ID NO: 56054 - DNA, 40 bp, Mycobacteroides chelonae; identical to SEQ ID NO: 56053
  source 1..40: mol_type = genomic DNA

SEQ ID NO: 56055 - DNA, 50 bp, Mycobacteroides chelonae; identical to SEQ ID NO: 56050
  source 1..50: mol_type = genomic DNA

SEQ ID NO: 56056 - protein, 498 aa, Mycobacteroides abscessus
MKQQLRAVVGSRVSHLDDDKATTRKVSHKAQTEEGERWAKTQGYEVVGAFEDLGVSAGKTTPFERPDLGKWLAPERLHEWDVLVFSKIDRAFRSTSDCVDFARWTKENRKILAFSGDGVVLDYLHPKGESLDQMMSEFFIYVGSFFAAIELNRFRTRATDRLSYLRMTDRVSHGVPPLGFRTVPHPSGQGKALERDPEGYALLHEIKDKLLHENYSLTGVVQWLNETGRQTAVAKARKGDAKWSVTSLKRTLTNERTQGLRMSGGKAVLDSQGIPIRMAEPTFTDDEWEQIQQAVNQRSTSGRARYMTDNPFAGIVYCVCGYAVAQHRRKSSSGKEHTYVRCGQGCRGAWKLADVHEQLDISFLAGYGEQEMSKLVFVPGEDRSDELAGIERSITRLRWESDNDLVDDEDLYQSRMASLLSRKREIGQIVVPARWERQGTGKTYRELWADPDTDRRQVMRDARIRLVLHFIPKGSDVPFVTHAHFVDMWNPKEEPKAL

SEQ ID NO: 56057 - DNA, 50 bp, Mycobacteroides abscessus; identical to SEQ ID NO: 56047
  source 1..50: mol_type = genomic DNA

SEQ ID NO: 56058 - DNA, 40 bp, Mycobacteroides abscessus
  source 1..40: mol_type = genomic DNA
gtggccggtggccttcacgttgtactgcgccacctcgatg

SEQ ID NO: 56059 - DNA, 40 bp, Mycobacteroides abscessus; identical to SEQ ID NO: 56058
  source 1..40: mol_type = genomic DNA

SEQ ID NO: 56060 - DNA, 50 bp, Mycobacteroides abscessus; identical to SEQ ID NO: 56050
  source 1..50: mol_type = genomic DNA

SEQ ID NO: 56061 - protein, 502 aa, Mycobacteroides abscessus
MKQQLRAVVGSRVSHLDDDKATTRKVSHKAQTEEGERWAKSQGYEVVGAFEDLGVSAGKTTPFERPDLGKWLAPERLHEWDVLVFSKIDRAFRSTSDCVDFARWTKENRKILAFSGDGVVLDYLHPKGESLDQMMSEFFIYVGSFFAAIELNRFRTRATDRLSYLRMTDRVSHGVPPLGFRTVPHPSGQGKALERDPEGYALLHEIKDKLLHENYSLTGVVQWLNETGRQTAVAKARKGDAKWSVTSLKRTLTNERTQGLRMSGGKAVLDSQGIPIRMAEPTFTDDEWEQIQQAVNQRSTSGRARYMTDNPFAGIVYCVCGYAVAQHRRKSSSGKEHTYVRCGQGCRGAWKLADVHELLDISFLAGYGDQEMSKLVFVPGEDRSDELSGIERSIARLRWESDNDLVDDEDLYQSRMASLLSRKREIGRIVVPARWERQGTGKTYQELWADPETDRRQVMRDARIRLVLHFIPKGSDAPFVTHAHFVDMWNPEEELNVVPGRR

SEQ ID NO: 56062 - DNA, 50 bp, Mycobacteroides abscessus; identical to SEQ ID NO: 56047
  source 1..50: mol_type = genomic DNA

SEQ ID NO: 56063 - DNA, 40 bp, Mycobacteroides abscessus; identical to SEQ ID NO: 56058
  source 1..40: mol_type = genomic DNA

SEQ ID NO: 56064 - DNA, 40 bp, Mycobacteroides abscessus; identical to SEQ ID NO: 56058
  source 1..40: mol_type = genomic DNA

SEQ ID NO: 56065 - DNA, 50 bp, Mycobacteroides abscessus; identical to SEQ ID NO: 56050
  source 1..50: mol_type = genomic DNA

SEQ ID NO: 56066 - protein, 507 aa, Escherichia coli
MKRAISYIRFSSEKQSRGDSLRRQAKMVTDWLKAHPEYYLDESLTFRDLGVSGFTGKHLKGGLGDFLTAIEKGLVKAGDTLLIESLDRLSRQDVDQASELLRNILRSGVDVVTLSDGEHYTSESLKDPLALIKSILIMQRAHEESLRKSERIQAAWDAKKEAAKAGIKVSKRCPAWLKLNDDRKSFSVIPEKVETVKRCFQLRLEGKSIWEIVRTLNAEGHQTLNQYKAGKFGQTSVQDLLKNRSVIGYFTPKGCEEISGYYPAIIDETTFYKVQQLSHSRYGKRSVSDKPLSVNLFKGVIRCSECGHALIITGFSDTRNGIYRCPLRNENRCSAKGLSRKQTDGTLLTLLSRLDRFDSDTTNTIDTLKLHREHISSNIEKLVQLSLEIEDLNAITNKLKQLKNELSQVDADIEKETQRLKSIDVGCLSDCDLTTKAGRIEAQLIIKSAVKEVVLNTAKRRCKVTFHNGKVIDLSITENPSEDVTEAIQSLSEVTERGLIDVDEVII

SEQ ID NO: 56067 - DNA, 50 bp, Escherichia coli; identical to SEQ ID NO: 44957
  source 1..50: mol_type = genomic DNA

SEQ ID NO: 56068 - DNA, 40 bp, Escherichia coli; identical to SEQ ID NO: 5188
  source 1..40: mol_type = genomic DNA

SEQ ID NO: 56069 - DNA, 40 bp, Escherichia coli; identical to SEQ ID NO: 35039
  source 1..40: mol_type = genomic DNA

SEQ ID NO: 56070 - DNA, 50 bp, Escherichia coli
  source 1..50: mol_type = genomic DNA
aagtgcatttctctgatgattaatgatattgagcaccttttaatatacct

SEQ ID NO: 56071 - protein, 507 aa, Escherichia coli
MKRAISYIRFSSEKQSRGDSLRRQAKMVTDWLKAHPEYYLDESLTFRDLGVSGFTGKHLKGGLGDFLTAIEKGLVKAGDTLLIESLDRLSRQDVDQASELLRNILRSGVDVVTLSDGEHYTRESLKDPLALIKSILIMQRAHEESLRKAERIQAAWNRKKELISEGIKISKRCPAWLKLNDDRKSFSVIPDKVETVKRCFQLRLEGKSIWEIVRTLNAEGHRSMNQYKPGKFGQTSVQDLLKNRSVIGYFTPKGCGEIAGYFPSIIPETDFYKVQQLSYSRYGRKPASDKPLSVNLFKGVIRCSECGHALIITGFSDTRSGIYRCPLRNENRCSAKGLSRKQTDGTLLTLLSRLDRFDSDMTNTIDTLKLHREHISSNIEKLVQLSLEIEDLNAITNKLKQLKNELSQVDADIEKETQRLKSIDTGSLSDCDLSTKAGRIEAQLIIKSAVKEVVLNTAKRRCKVTFHNGRAITLPITENPSKDVTEAIQSLSEVTERGLIDVDEVII

SEQ ID NO: 56072 - DNA, 50 bp, Escherichia coli; identical to SEQ ID NO: 44957
  source 1..50: mol_type = genomic DNA

SEQ ID NO: 56073 - DNA, 40 bp, Escherichia coli; identical to SEQ ID NO: 5188
  source 1..40: mol_type = genomic DNA

SEQ ID NO: 56074 - DNA, 40 bp, Escherichia coli; identical to SEQ ID NO: 35039
  source 1..40: mol_type = genomic DNA

SEQ ID NO: 56075 - DNA, 50 bp, Escherichia coli; identical to SEQ ID NO: 56070
  source 1..50: mol_type = genomic DNA

SEQ ID NO: 56076 - protein, 507 aa, Escherichia coli
MKRAISYIRFSSEKQSRGDSLRRQAKMVTDWLKAHPEYYLDESLTFRDLGVSGFTGKHLKGGLGDFLTAIEKGLVKAGDTLLIESLDRLSRQDVDQASELLRNILRSGVDVVTLSDGEHYTRESLKDPLALIKSILIMQRAHEESLRKAERIQAAWDAKKEAAKAGIKISRRCPAWLKLNDDRKSFSVIPEKVETVKRCFQLRLEGKSIWEIVRTLNAEGHQTLNQYKAGKFGQTSVQDLLKNRSVIGYFTPKGCEEISGYYPAIIDETTFYKVQQLSYARYGRKPASDKPMAVNLFKGVIRCSECGHALIITGFSDTRNGIYRCPLRNENRCSAKGLSRKQTDGTLLALLSRLDRFDSDMTNTIDTLKLHREHISSNIEKLVQLSLEIEDLSAITSKLRQLKNELSQVDADIEKETQRLKSIDVGCLSDCDLTTKAGRIEAQLIIKSAVKEVVLNTAKRRCKVTFHNGKAITLPITENPSDNVTEAIQSLSEVTERGLIDVDEVII

SEQ ID NO: 56077 - DNA, 50 bp, Escherichia coli; identical to SEQ ID NO: 44957
  source 1..50: mol_type = genomic DNA

SEQ ID NO: 56078 - DNA, 40 bp, Escherichia coli; identical to SEQ ID NO: 5188
  source 1..40: mol_type = genomic DNA

SEQ ID NO: 56079 - DNA, 40 bp, Escherichia coli; identical to SEQ ID NO: 35039
  source 1..40: mol_type = genomic DNA

SEQ ID NO: 56080 - DNA, 50 bp, Escherichia coli; identical to SEQ ID NO: 56070
  source 1..50: mol_type = genomic DNA

SEQ ID NO: 56081 - protein, 507 aa, Escherichia coli
MKRAISYIRFSSEKQSRGDSLRRQAKMVTDWLKAHPEYYLDESLTFRDLGVSGFTGKHLKGGLGDFLTAIEKGLVKAGDTLLIESLDRLSRQDVDQASELLRNILRSGVDVVTLSDGEHYTRESLKDPLALIKSILIMQRSHEESLRKSERIQAAWDAKKEAAKAGIKISRRCPAWLKLNDDRKSFSIIPEKVVTVKRCFQLRLEGKSIWEIVRTLNDEGHQTLNQYKAGKFGQTSVQDLLKNRSVIGYFTPKGCEEIAGYYPSIIPETDFYKVQQLSYSRYGRKPASDKPLSVNLFKGVIRCSECGHALIITGFSDTRSGIYRCPLRNENRCSAKGLSRKQTDGTLLALLSRLDRFDSDTTNTIDTLKLHREHISSNIEKLVQLSLEIEDLSAITSKLRQLKGELSQVDADIEKETQRLKSIDVGCLSDCDLTTKAGRIEAQLIIKSAVKEVVLNTAKRRCKVTFHNGKAITLPITENPSDNVTEAIQSLSEVTERGLIDVDEVII

SEQ ID NO: 56082 - DNA, 50 bp, Escherichia coli; identical to SEQ ID NO: 44957
  source 1..50: mol_type = genomic DNA

SEQ ID NO: 56083 - DNA, 40 bp, Escherichia coli; identical to SEQ ID NO: 5188
  source 1..40: mol_type = genomic DNA

SEQ ID NO: 56084 - DNA, 40 bp, Escherichia coli; identical to SEQ ID NO: 35039
  source 1..40: mol_type = genomic DNA

SEQ ID NO: 56085 - DNA, 50 bp, Escherichia coli; identical to SEQ ID NO: 56070
  source 1..50: mol_type = genomic DNA

SEQ ID NO: 56086 - protein, 507 aa, Escherichia coli; identical to SEQ ID NO: 53861

SEQ ID NO: 56087 - DNA, 50 bp, Escherichia coli; identical to SEQ ID NO: 44957
  source 1..50: mol_type = genomic DNA

SEQ ID NO: 56088 - DNA, 40 bp, Escherichia coli; identical to SEQ ID NO: 5188
  source 1..40: mol_type = genomic DNA

SEQ ID NO: 56089 - DNA, 40 bp, Escherichia coli; identical to SEQ ID NO: 35039
  source 1..40: mol_type = genomic DNA

SEQ ID NO: 56090 - DNA, 50 bp, Escherichia coli; identical to SEQ ID NO: 56070
  source 1..50: mol_type = genomic DNA

SEQ ID NO: 56091 - protein, 507 aa, Escherichia coli
MKRVISYIRFSSERQAKGDSLRRQSKMVNDWLKAHPEYYLDQDLSFRDLGVSGFTGKHLKGGLGDFLTAIEKGLVKAGDTLLIESLDRLSRQDIDIASELLRRILRAGVDVVTLSDGEHYTKESLKDPLALIKSILIMQRAHEESLRKAERIQAAWDAKKEAAKAGIKISRRCPAWLKLNDDRKSFSVIPEKVETVKRCFQLRLEGKSIWEIVRTLNAEGHRSMNQYKPGKFGQTSVQDLLKNRSVIGYFTPKGCEEISGYYPAIIDETTFYKVQQLSHSRYGKRSVSDKPLSVNLFKGVIRCSECGHALIITGFSDTRNGIYRCPLRNENRCNAKGLSRKQTDGTLLALLSRLDRFDSDMTNVIDALKLHREHISNNIEKLVQLSLEIEDLSAITIKLKQLKGELSQVDADIEKETQRLKSIDVGCLSDCDLTTKAGRIEAQLIIKSAVKEVVLNAAKRRCKVTFHNSKSITLPITENPSDNVTEAIQSLSEVTERGLIDVDEVII

SEQ ID NO: 56092 - DNA, 50 bp, Escherichia coli; identical to SEQ ID NO: 44957
  source 1..50: mol_type = genomic DNA

SEQ ID NO: 56093 - DNA, 40 bp, Escherichia coli; identical to SEQ ID NO: 5188
  source 1..40: mol_type = genomic DNA

SEQ ID NO: 56094 - DNA, 40 bp, Escherichia coli; identical to SEQ ID NO: 35039
  source 1..40: mol_type = genomic DNA

SEQ ID NO: 56095 - DNA, 50 bp, Escherichia coli; identical to SEQ ID NO: 56070
  source 1..50: mol_type = genomic DNA

SEQ ID NO: 56096 - protein, 507 aa, Escherichia coli
MKRAISYIRFSSEKQSRGDSLRRQAKMVTDWLKAHPEYYLDESLTFRDLGVSGFTGKHLKGGLGDFLTAIEKGLVKAGDTLLIESLDRLSRQDVDQASELLRNILRSGVDVVTLSDGEHYTRESLKDPLALIKSILIMQRAHEESLRKAERIQAAWDAKKEAAKAGIKISRRCPAWLKLNDDRKSFSVIPEKVETVKRCFQLRLEGKSIWEIVRTLNAEGHQTLNQYKAGKFGQTSVQDLLKNRSVIGYFTPKGCEEISGYYPAIIDETTFYKVQQLSYARYGRKPASDKPMAVNLFKGVIRCSECGHALIITGFSDTRNGIYRCPLRNENRCSAKGLSRKQTDGTLLALLSRIDRFDSDMTNTIDTLKLHREHISSNIEKLVQLSLEIEDLSAITSKLKQLKGELSQVDADIEKETQRLKSIDVGCLSDCDLTTKAGRIEAQLIIKSAVKEVVLNTAKRRCKVTFHNGKVIDLPITEDPSEDVTEAIQSLSEVTERGLIDVDEVII

SEQ ID NO: 56097 - DNA, 50 bp, Escherichia coli; identical to SEQ ID NO: 44957
  source 1..50: mol_type = genomic DNA

SEQ ID NO: 56098 - DNA, 40 bp, Escherichia coli; identical to SEQ ID NO: 5188
  source 1..40: mol_type = genomic DNA

SEQ ID NO: 56099 - DNA, 40 bp, Escherichia coli; identical to SEQ ID NO: 35039
  source 1..40: mol_type = genomic DNA

SEQ ID NO: 56100 - DNA, 50 bp, Escherichia coli; identical to SEQ ID NO: 56070
  source 1..50: mol_type = genomic DNA

SEQ ID NO: 56101 - protein, 507 aa, Escherichia coli
MKRAISYIRFSSEKQSRGDSLRRQSKMVNDWLKAHPEYYLDQDLSFRDLGVSGFTGKHLKGGLGDFLTAIEKGLVKAGDTLLIESLDRLSRQNVDRASELLRNILRSGVDVVTLSDGEHYTRESLKDPLALIKSILIMQRAHEESLRKAERIQAAWDAKKEAAKAGIKISRRCPAWLKLNDDRKSFSVIPEKVETVKRCFQLRLEGKSIWEIVRTLNAEGHQTLNQYKAGKFGQTSVQDLLKNRSVIGYFTPKGCEEISGYYPAIIDETTFYKVQQLSHYRYGRKPVSDKPLSVNLFKGVIRCSECGHALIITGFSDTRNGIYRCPLRNENRCSAKGLSRKQTDGTLLTLLSRLDRFDSDMTNTLDTLKLHREHISSNIEKLVQLSLEIEDLSAITIKLKQLKGELSQVDADIEKETQRLKSIDVGCLSDCDLTTKAGRIEAQLIIKSAVKEVVLNTAKRRCKVTFHNGRAITLPITENPSEDVTEAIQSLSEVTERGLIDVDEVII

SEQ ID NO: 56102 - DNA, 50 bp, Escherichia coli; identical to SEQ ID NO: 44957
  source 1..50: mol_type = genomic DNA

SEQ ID NO: 56103 - DNA, 40 bp, Escherichia coli; identical to SEQ ID NO: 21333
  source 1..40: mol_type = genomic DNA

SEQ ID NO: 56104 - DNA, 40 bp, Escherichia coli; identical to SEQ ID NO: 35044
  source 1..40: mol_type = genomic DNA

SEQ ID NO: 56105 - DNA, 50 bp, Escherichia coli; identical to SEQ ID NO: 56070
  source 1..50: mol_type = genomic DNA

SEQ ID NO: 56106 - protein, 507 aa, Escherichia coli
MKRAISYIRFSSEKQSRGDSLRRQAKMVTDWLKAHPEYYLDESLTFRDLGVSGFTGKHLKGGLGDFLTAIEKGLVKAGDTLLIESLDRLSRQDVDQASELLRNILRSGVDVVTLSDGEHYTRESLKDPLALIKSILIMQRAHEESLRKAERIQAAWDAKKEAAKAGIKISRRCPAWLKLNDDRKSFSVIPEKVETVKRCFQLRLEGKSIWEIVRTLNAEGHQTLNQYKAGKFGQTSVQDLLKNRSVIGYFTPKGCEEIAGYFPPIIPETDFYKVQQLSYSRYGRKPASDKPLSVNLFKGVIRCSECGHALIITGFSDTRNGIYRCPLRNENRCSAKGLSRKQTDGTLLALLSRIDRFDSDMTNTIDTLKLHREHISSNIEKLVQLSLEIEDLSAITSKLKQLKGELSQVDADIEKETQRLKSIDVGCLSDCDLTTKAGRIEAQLIIKSAVKEVVLNTAKRRCKVTFHNGKAITLPITENPSDNVTEAIQSLSEVTERGLIDVDEVIV

SEQ ID NO: 56107 - DNA, 50 bp, Escherichia coli; identical to SEQ ID NO: 44957
  source 1..50: mol_type = genomic DNA

SEQ ID NO: 56108 - DNA, 40 bp, Escherichia coli; identical to SEQ ID NO: 5188
  source 1..40: mol_type = genomic DNA

SEQ ID NO: 56109 - DNA, 40 bp, Escherichia coli; identical to SEQ ID NO: 35039
  source 1..40: mol_type = genomic DNA

SEQ ID NO: 56110 - DNA, 50 bp, Escherichia coli; identical to SEQ ID NO: 56070
  source 1..50: mol_type = genomic DNA

SEQ ID NO: 56111 - protein, 507 aa, Escherichia coli
MKRVISYIRFSSERQAKGDSLRRQSKMVNDWLKAHPEYYLDQDLSFRDLGVSGFTGKHLKGGLGDFLTAIEKGLVKAGDTLLIESLDRLSRQAVDRASELLRNILRSGVDVVTLSDGEHYTSESLKDPLALIKSILIMQRAHEESLRKSERIQAAWDAKKEAAKAGIKVSKRCPAWLRLNDDRKSFSVIPDKVETVKRCFQLRLEGKSIWEIVRTMNAEGRQTLHQYKAGSFGQSSVQDLLKNRSVIGYFTPKGCEEISGYYPAIIDETTFYKVQQLSYARHGRKPASAKPLSVNLFKGVIRCSECGHALIITGFSDTRNGIYRCPLRNENRCSAKGLSRKQTDGTLLALLSRLDRFDSDMTNTIDTLKLHREHISSNIEKLVQLSLEIEDLNAITNKLKQLKNELSQVDADIEKETQRLKSIDVGCLSDCDLTTKAGRIEAQLIIKSAVKEVVLNTAKRRCKVTFHNGKSITLPITENPSEDVTEAIQSLSEVTERGLIDVDVVAI

SEQ ID NO: 56112 - DNA, 50 bp, Escherichia coli; identical to SEQ ID NO: 44957
  source 1..50: mol_type = genomic DNA

SEQ ID NO: 56113 - DNA, 40 bp, Escherichia coli; identical to SEQ ID NO: 5188
  source 1..40: mol_type = genomic DNA

SEQ ID NO: 56114 - DNA, 40 bp, Escherichia coli; identical to SEQ ID NO: 35039
  source 1..40: mol_type = genomic DNA

SEQ ID NO: 56115 - DNA, 50 bp, Escherichia coli; identical to SEQ ID NO: 56070
  source 1..50: mol_type = genomic DNA

SEQ ID NO: 56116 - protein, 507 aa, Escherichia coli
MKRVISYIRFSSERQAKGDSLRRQSKMVTDWLKAHPEYYLDQDLSFRDLGVSGFTGKHLKGGLGDFLTAIEKGLVKAGDTLLIESLDRLSRQNVDRASELLRNILRSGVDVVTLSDGEHYTRESLKDPLALIKSILIMQRSHEESLRKSERIQAAWNRKKELISEGIKISKRCPAWLRLNDDRKTFSVIPEKVETVKRCFQLRLEGKSIWEIVRTMNAEGHQTLNQYKAGSFGQTSVQDLLKNRSVIGYFTPKGREEISGYYPAIIDETTFYKVQQLSYARYGRKPASDKPLSVNLFKGVIRCSECGHALIITGFSDTRSGIYRCPLRNENRCSAKGLSRKQTDGTLLTLLSRLDRFDSDTTNIIDMLRLHREHISSNIEKLVQLSLEIEDLNAITSKLKQLKGELSQVDADIEKETQRLKSIDVGCLSDCDLTTKAGRIEAQLIIKSAVKEVVLNTAKRRCKVTFHNGKTITLSITENPSEDVTEAIQSLSEVTERGLIDVDEVII

SEQ ID NO: 56117 - DNA, 50 bp, Escherichia coli; identical to SEQ ID NO: 44957
  source 1..50: mol_type = genomic DNA

SEQ ID NO: 56118 - DNA, 40 bp, Escherichia coli; identical to SEQ ID NO: 5188
  source 1..40: mol_type = genomic DNA

SEQ ID NO: 56119 - DNA, 40 bp, Escherichia coli; identical to SEQ ID NO: 35039
  source 1..40: mol_type = genomic DNA

SEQ ID NO: 56120 - DNA, 50 bp, Escherichia coli; identical to SEQ ID NO: 56070
  source 1..50: mol_type = genomic DNA

SEQ ID NO: 56121 - protein, 507 aa, Escherichia coli
MKRAISYIRFSSEKQSRGDSLRRQAKMVTDWLKAHPEYYLDESLTFRDLGVSGFTGKHLQGGLGDFLTAIEKGLVKAGDTLLIESLDRLSRQDVDQASELLRNILRSGVDVVTLSDGEHYTKESLKDPLALIKSILIMQRAHEESLRKSERIQAAWDAKKEAAKAGIKISKRCPAWLKLNDDRKSFSVIPEKVETVKRCFQLRLEGKSIWEIVRILNDEGHQTLNQYKAGKFGQTAVQDLLKNRSVIGYFTPKGCEEIAGYYPAIIDETTFYKVQQLSYSRYGRKPASDKPMAVNLFRGVIRCSECGHALIITGFSDTRSGIYRCPLRNENRCYAKGLSRKQTDGTLLALLSRLDRFDSDTTNTIDTLKLHREHISSNIEKLVQLSLEIEDLNAITNKLKQLKNELSQVDADIEKETQRLKSIDTGSLSDCDLSTKAGRIEAQLIIKSAVKEVVLNTAKRRCKVTFHNGKAITLPITENPSDNVTEAIQSLSEVTERGLIDVDEVII

SEQ ID NO: 56122 - DNA, 50 bp, Escherichia coli; identical to SEQ ID NO: 44957
  source 1..50: mol_type = genomic DNA

SEQ ID NO: 56123 - DNA, 40 bp, Escherichia coli; identical to SEQ ID NO: 5188
  source 1..40: mol_type = genomic DNA

SEQ ID NO: 56124 - DNA, 40 bp, Escherichia coli; identical to SEQ ID NO: 35039
  source 1..40: mol_type = genomic DNA

SEQ ID NO: 56125 - DNA, 50 bp, Escherichia coli; identical to SEQ ID NO: 56070
  source 1..50: mol_type = genomic DNA

SEQ ID NO: 56126 - protein, 507 aa, Escherichia coli; identical to SEQ ID NO: 56076

SEQ ID NO: 56127 - DNA, 50 bp, Escherichia coli; identical to SEQ ID NO: 44957
  source 1..50: mol_type = genomic DNA

SEQ ID NO: 56128 - DNA, 40 bp, Escherichia coli; identical to SEQ ID NO: 21333
  source 1..40: mol_type = genomic DNA

SEQ ID NO: 56129 - DNA, 40 bp, Escherichia coli; identical to SEQ ID NO: 35044
  source 1..40: mol_type = genomic DNA

SEQ ID NO: 56130 - DNA, 50 bp, Escherichia coli; identical to SEQ ID NO: 56070
  source 1..50: mol_type = genomic DNA

SEQ ID NO: 56131 - protein, 507 aa, Escherichia coli
MKRAISYIRFSSEKQSRGDSLRRQAKMVTDWLKAHPEYYLDESLTFRDLGVSGFTGKHLKGGLGDFLTAIEKGLVKAGDTLLIESLDRLSRQDVDQASELLRNILRSGVDVVTLSDGEHYTRESLKDPLALIKSILIMQRAHEESLRKAERIQAAWDAKKEAAKAGIKISRRCPAWLKLNDDRKSFSVIPEKVETVKRCFQLRLEGKSIWEIVRTLNAEGHQTLNQYKAGKFGQTSVQDLLKNRSVIGYFTPKGCEEISGYYPAIIDETTFYKVQQLSYSRYGRKPASDKPMAVNLFKGVIRCSECGHALIITGFSDTRNGIYRCPLRNENRCSAKGLSRKQTDGTLLALLSRLDRFDSDMTNTIDTLKLHREHISSNIEKLVQLSLEIEDLSAITSKLRQLKNELSQVDADIEKETQRLKSIDVGCLSDCDLTTKAGRIEAQLIIKSAVKEVVLNTAKRRCKVTFHNGKAITLPITENPSDNVTEAIQSLSEVTERGLIDVDEVII

SEQ ID NO: 56132 - DNA, 50 bp, Escherichia coli; identical to SEQ ID NO: 44957
  source 1..50: mol_type = genomic DNA

SEQ ID NO: 56133 - DNA, 40 bp, Escherichia coli; identical to SEQ ID NO: 5188
  source 1..40: mol_type = genomic DNA

SEQ ID NO: 56134 - DNA, 40 bp, Escherichia coli; identical to SEQ ID NO: 35039
  source 1..40: mol_type = genomic DNA

SEQ ID NO: 56135 - DNA, 50 bp, Escherichia coli; identical to SEQ ID NO: 56070
  source 1..50: mol_type = genomic DNA

SEQ ID NO: 56136 - protein, 507 aa, Escherichia coli
MKRVISYIRFSSERQAKGDSLRRQSKMVNDWLKAHPEYYLDQDLSFRDLGVSGFTGKHLKGGLGDFLTAIEKGLVKAGDTLLIESLDRLSRQAVDRASELLRNILRSGVDVVTLSDGEHYTSESLKDPLALIKSILIMQRAHEESLRKSERIQAAWNRKKELISEGIKISKRCPAWLRLNDDRKSFSVIPEKVETVKRCFQLRLEGKSIWEIVRTLNDEGHQSMSQYKPGKFGQTSVQDLLKNRSVIGYFTPKGCEEISGYYPAIIDETTFYKVQQLSHYRYGRKPVSDKPLSVNLFKGVIRCSECGHALIITGFSDTRNGIYRCPLRNENRCSAKGLSRKQTDGTLLTLLSRLDRFDSDTTNIIDMLRLHREHISSNIEKLVQLSLEIEDLNAITSKLKQLKGELSQVDADIEKETQRLKSIDVGCLSDCDLTTKAGRIEAQLIIKSAVKEVVLNTAKRRCKVTFHNSKSITLSITENPSEDVTEAIQSLSEVTERGLIDVDEVII

SEQ ID NO: 56137 - DNA, 50 bp, Escherichia coli; identical to SEQ ID NO: 44957
  source 1..50: mol_type = genomic DNA

SEQ ID NO: 56138 - DNA, 40 bp, Escherichia coli; identical to SEQ ID NO: 5188
  source 1..40: mol_type = genomic DNA

SEQ ID NO: 56139 - DNA, 40 bp, Escherichia coli; identical to SEQ ID NO: 35039
  source 1..40: mol_type = genomic DNA

SEQ ID NO: 56140 - DNA, 50 bp, Escherichia coli; identical to SEQ ID NO: 56070
  source 1..50: mol_type = genomic DNA

SEQ ID NO: 56141 - protein, 507 aa, Escherichia albertii
MKRAISYIRFSSEKQSRGDSLRRQAKMVTDWLKAHPEYYLDESLTFRDLGVSGFTGKHLKGGLGDFLTAIEKGLVKAGDTLLIESLDRLSRQDVDQASELLRNILRSGVDVVTLSDGEHYTRESLKDPLALIKSILIMQRAHEESLRKAERIQAAWDAKKEAAKAGIKISRRCPAWLKLNDDRKSFSVIPEKVETVKRCFQLRLEGKSIWEIVRTLNAEGHQTLNQYKAGKFGQTSVQDLLKNRSVIGYFTPKGCEEISGYYPAIIDETTFYKVQQLSYARYGRKPASDKPMAVNLFKGVIRCSECSHALIITGFSDTRNGIYRCPLRNENRCSAKGLSRKQTDGTLLALLSRLDRFDSDMTNTIDTLKLHREHISSNIEKLVQLSLEIEDLSAITSKLRQLKNELSQVDADIEKETQRLKSIDVGCLSDCDLTTKAGRIEAQLIIKSAVKEVVLNTAKRRCKVTFHNGKAITLPITENPSDNVTEAIQSLSEVTERGLIDVDEVII

SEQ ID NO: 56142 - DNA, 50 bp, Escherichia albertii
  source 1..50: mol_type = genomic DNA
tagtgcatttagaccttgatgattcttattagacacgtttaaatacacca

SEQ ID NO: 56143 - DNA, 40 bp, Escherichia albertii; identical to SEQ ID NO: 54048
  source 1..40: mol_type = genomic DNA

SEQ ID NO: 56144 - DNA, 40 bp, Escherichia albertii
  source 1..40: mol_type = genomic DNA
tggcgttaatagggtaatagaggacagccgcccggttcat

SEQ ID NO: 56145 - DNA, 50 bp, Escherichia albertii; identical to SEQ ID NO: 56070
  source 1..50: mol_type = genomic DNA

SEQ ID NO: 56146 - protein, 507 aa, Escherichia coli
MKRAISYIRFSSEKQSRGDSLRRQSKMVNDWLKAHPEYYLDQDLSFRDLGVSGFTGKHLKGGLGDFLTAIEKGLVKAGDTLLIESLDRLSRQNVDRASELLRNILRSGVDVVTLSDGEHYTRESLKDPLALIKSILIMQRAHEESLRKAERIQAAWNRKKELISEGIKVSRRCPAWLRLNDDRKTFSVIPEKVETVKRCFQLRLEGKSIWEIVRTMNAEGHQTLNQYKAGKFGQTSVQDLLKNRSVIGYFTPKGCEEISGYYPAIIDETTFYKVQQLSHYRYGRKPVSDKPLSVNLFKGVIRCSECGHALIITGFSDTRNGIYRCPLRNENRCSAKGLSRKQTDGTLLTLLSRLDRFDSDMTNTLDTLKLHREHISSNIEKLVQLSLEIEDLSAITIKLKQLKGELSQVDADIEKETQRLKSIDVGCLSDCDLTTKAGRIEAQLIIKSAVKEVVLNTAKRRCKVTFHNGRAITLPITENPSEDVTEAIQSLSEVTERGLIDVDVVAI

SEQ ID NO: 56147 - DNA, 50 bp, Escherichia coli; identical to SEQ ID NO: 44957
  source 1..50: mol_type = genomic DNA

SEQ ID NO: 56148 - DNA, 40 bp, Escherichia coli; identical to SEQ ID NO: 5188
  source 1..40: mol_type = genomic DNA

SEQ ID NO: 56149 - DNA, 40 bp, Escherichia coli; identical to SEQ ID NO: 35039
  source 1..40: mol_type = genomic DNA

SEQ ID NO: 56150 - DNA, 50 bp, Escherichia coli; identical to SEQ ID NO: 56070
  source 1..50: mol_type = genomic DNA

SEQ ID NO: 56151 - protein, 507 aa, Escherichia coli
MKRAISYIRFSSEKQSRGDSLRRQAKMVTDWLKAHPEYYLDESLTFRDLGVSGFTGKHLKGGLGDFLTAIEKGLVKAGDTLLIESLDRLSRQDVDQASELLRNILRSGVDVVTLSDGEHYTRESLKDPLALIKSILIMQRAHEESLRKAERIQAAWDAKKEAAKAGIKISRRCPAWLKLNDDRKSFSVIPEKVETVKRCFQLRLEGKSIWEIVRTLNAEGHQTLNQYKAGKFGQTSVQDLLKNRSVIGYFTPKGCEEISGYYPAIIDETTFYKVQQLSYARYGRKPASDKPMAVNLFKGVIRCSECGHALIITGFSDTRNGIYRCPLRNENRCSAKGLSRKQTDGTLLALLSRLDRFDSDMTNTIDTLKLHREHISSNIEKLVQLSLEIEDLSAITSKLRQLKNELSQVDADIEKETQRLKSIDVGCLSDCDLTTKAGRIEAQLIIKSAVKEVVLNTAKRRCKVTFHNGKLIDLPITENPSEDVTEAIQSLSEVTERGLIDVDEVII

SEQ ID NO: 56152 - DNA, 50 bp, Escherichia coli; identical to SEQ ID NO: 44957
  source 1..50: mol_type = genomic DNA

SEQ ID NO: 56153 - DNA, 40 bp, Escherichia coli; identical to SEQ ID NO: 5188
  source 1..40: mol_type = genomic DNA

SEQ ID NO: 56154 - DNA, 40 bp, Escherichia coli; identical to SEQ ID NO: 35039
  source 1..40: mol_type = genomic DNA

SEQ ID NO: 56155 - DNA, 50 bp, Escherichia coli; identical to SEQ ID NO: 56070
  source 1..50: mol_type = genomic DNA

SEQ ID NO: 56156 - protein, 507 aa, Escherichia coli
MKRVISYIRFSSERQAKGDSLRRQSKMVNDWLKAHPEYYLDQDLSFRDLGVSGFTGKHLKGGLGDFLTAIEKGLVKAGDTLLIESLDRLSRQDIDIASELLRRILRAGVDVVTLSDGEHYTKESLRDPLALIKSILIMQRAHEESLRKSERIQAAWDAKKEAAKAGIKISKRCPAWLKLNDDRKSFSVIPDKVETVKRCFQLRLEGKSIWEIVRTLNDECHQSMNQYKPGKFGQTSVQDLLKNRSVIGYFTPKGREEIAGYFPSIIHETDFYKVQQLSYARHGRKPASAKPLSVNLFKGVIRCSECGHALIITGFSDTRNGIYRCPLRNENRCSAKGLSRKQTDGTLLALLSRLDRFDSDTTNTIDMLRLHREHISSNIEKLVQLSLEIEDLNAITNKLKQLKNELSQVDADIEKETQRLKSIDVGCLSDCDLTTKAGRIEAQLIIKSAVKEVVLNTAKRRCKVTFHNGKSITLPITENPSEDVTEAIQSLSEVTERGLIDVDVVAI

SEQ ID NO: 56157 - DNA, 50 bp, Escherichia coli; identical to SEQ ID NO: 44957
  source 1..50: mol_type = genomic DNA

SEQ ID NO: 56158 - DNA, 40 bp, Escherichia coli; identical to SEQ ID NO: 5188
  source 1..40: mol_type = genomic DNA

SEQ ID NO: 56159 - DNA, 40 bp, Escherichia coli; identical to SEQ ID NO: 35039
  source 1..40: mol_type = genomic DNA

SEQ ID NO: 56160 - DNA, 50 bp, Escherichia coli; identical to SEQ ID NO: 56070
  source 1..50: mol_type = genomic DNA

SEQ ID NO: 56161 - protein, 507 aa, Escherichia coli
MKRVISYIRFSSERQAKGDSLRRQSKMVNDWLKAHPEYYLDQDLSFRDLGVSGFTGKHLKGGLGDFLTAIEKGLVKAGDTLLIESLDRLSRQDIDIASELLRRILRAGVDVVTLSDGEHYTKESLKDPLALIKSILIMQRAHEESLRKAERIQAAWDAKKEAAKAGIKISRRCPAWLKLNDDRKSFSVIPEKVETVKRCFQLRLEGKSIWEIVRTLNAEGHRSMNQYKPGKFGQTSVQDLLKNRSVIGYFTPKGCEEISGYYPAIIDETTFYKVQQLSHSRYGKRSVSDKPLSVNLFKGVIRCSECGHALIITGFSDTRNGIYRCPLRNENRCSAKGLSRKQTDGTLLALLSRLDRFDSDMTNVIDMLRLHREHISSNIEKLVQLSLEIEDLSAITIKLKQLKGELSQVDADIEKETQRLKSIDVGCLSDCDLTTKAGRIEAQLIIKSAVKEVVLNTAKRRCKVTFHNSKSITLPITENPSEDVTEAIQSLSEVTERGLIDVDEVII

SEQ ID NO: 56162 - DNA, 50 bp, Escherichia coli; identical to SEQ ID NO: 44957
  source 1..50: mol_type = genomic DNA

SEQ ID NO: 56163 - DNA, 40 bp, Escherichia coli; identical to SEQ ID NO: 5188
  source 1..40: mol_type = genomic DNA

SEQ ID NO: 56164 - DNA, 40 bp, Escherichia coli; identical to SEQ ID NO: 35039
  source 1..40: mol_type = genomic DNA

SEQ ID NO: 56165 - DNA, 50 bp, Escherichia coli; identical to SEQ ID NO: 56070
  source 1..50: mol_type = genomic DNA

SEQ ID NO: 56166 - protein, 507 aa, Escherichia coli
MKRVISYIRFSSERQAKGDSLRRQSKMVNDWLKAHPEYYLDQDLSFRDLGVSGFTGKHLKGGLGDFLTAIEKGLVKAGDTLLIESLDRLSRQAVDRASELLRNILRSGVDVVTLSDGEHYTKESLRDPLSLIKSILIMQRAHEESLRKSERIQAAWNRKKELISEGIKISKRCPAWLRLNDDRKSFSVIPDKVETVKRCFQLRLEGKSIWEIVRTLNDEGHQTLNQYKAGKFGQTSVQDLLKNRSVIGYFTPKGCEEISGYYPSIIHETDFYKVQQLSYARHGRKPASAKPLSVNLFKGVIRCSECGHALIITGFSDTRNGIYRCPLRNENRCSAKGLSRKQTDGTLLTLLSRLDRFDSDTTNTIDMLRLHREHISSNIEKLVQLSLEIEDLSAITIKLKQLKGELSQVDADIEKETQRLKSIDVGCLSDCDLTTKAGRIEAQLIIKSAVKEVVLNTAKRRCKVTFHNGKSITLPITENPSEDVTEAIQSLSEVTERGLIDVDEVII

SEQ ID NO: 56167 - DNA, 50 bp, Escherichia coli; identical to SEQ ID NO: 44957
  source 1..50: mol_type = genomic DNA

SEQ ID NO: 56168 - DNA, 40 bp, Escherichia coli; identical to SEQ ID NO: 5188
  source 1..40: mol_type = genomic DNA

SEQ ID NO: 56169 - DNA, 40 bp, Escherichia coli; identical to SEQ ID NO: 35039
  source 1..40: mol_type = genomic DNA

SEQ ID NO: 56170 - DNA, 50 bp, Escherichia coli; identical to SEQ ID NO: 56070
  source 1..50: mol_type = genomic DNA

SEQ ID NO: 56171 - protein, 507 aa, Escherichia coli; identical to SEQ ID NO: 47646

SEQ ID NO: 56172 - DNA, 50 bp, Escherichia coli; identical to SEQ ID NO: 44957
  source 1..50: mol_type = genomic DNA

SEQ ID NO: 56173 - DNA, 40 bp, Escherichia coli; identical to SEQ ID NO: 5188
  source 1..40: mol_type = genomic DNA

SEQ ID NO: 56174 - DNA, 40 bp, Escherichia coli; identical to SEQ ID NO: 35039
  source 1..40: mol_type = genomic DNA

SEQ ID NO: 56175 - DNA, 50 bp, Escherichia coli; identical to SEQ ID NO: 56070
  source 1..50: mol_type = genomic DNA

SEQ ID NO: 56176 - protein, 507 aa, Escherichia coli
MKRAISYIRFSSEKQSRGDSLRRQAKMVTDWLKAHPEYYLDESLTFRDLGVSGFTGKHLQGGLGDFLTAIEKGLVKAGDTLLIESLDRLSRQDVDQASELLRNILRSGVDVVTLSDGEHYTKESLKDPLALIKSILIMQRAHEESLRKAERIQAAWDAKKEAAKAGIKISRRCPAWLKLNDDRKTFSVIPEKVATVKRCFQLRLEGKSIWEIVRTLNAEGHQTLNQYKAGSFGQSSVQDLLKNRSVIGYFTPKGCEEISGYYPEVIDETTFYKVQQLSYSRYGRKPASDKPLSVNLFKGVIRCSECGHALIITGFSDTRSGIYRCPLRNENRCSAKGLSRKQTDGTLLALLSRLDRFDSDTTNTIDTLKLHREHISSNIEKLVQLSLEIEDLSAITIKLKQLKGELSQVDADIEKETQRLKSIDVGCLSDCDLTTKAGRIEAQLIIKSAVKEVVLNTAKRRCKVTFHNGKSITLPITETPSEDVTEAIQSLSEVTERGLIDVDVVAI

SEQ ID NO: 56177 - DNA, 50 bp, Escherichia coli; identical to SEQ ID NO: 44957
  source 1..50: mol_type = genomic DNA

SEQ ID NO: 56178 - DNA, 40 bp, Escherichia coli; identical to SEQ ID NO: 5188
  source 1..40: mol_type = genomic DNA

SEQ ID NO: 56179 - DNA, 40 bp, Escherichia coli; identical to SEQ ID NO: 35039
  source 1..40: mol_type = genomic DNA

SEQ ID NO: 56180 - DNA, 50 bp, Escherichia coli; identical to SEQ ID NO: 56070
  source 1..50: mol_type = genomic DNA

SEQ ID NO: 56181 - protein, 507 aa, Escherichia coli
MKRAISYIRFSSEKQSRGDSLRRQAKMVTDWLKAHPEYYLDESLTFRDLGVSGFTGKHLKGGLGDFLTAIEKGLVKAGDTLLIESLDRLSRQNVDRASELLRNILRSGVDVVTLSDGEHYTKESLRDPLSLIKSILIMQRSHEESLRKSERIQAAWNRKKELISEGIKISKRCPAWLKLNDDRKSFSVIPEKVETVKRCFQLRLEGKSIWEIVRTLNAEGHQTLNQYKAGSFGQTSVQDLLKNRSVIGYFTPKGCEEISGYYPSIIHETDFYKVQQLSYSRYGRKPASDKPMAVNLFKGVIRCSECGHALIITGFSDTRSGIYRCPLRNENRCSAKGLSRKQTDGTLLALLSRLDRFDSDMTNTIDTLKLHREHISSNIEKLVQLSLEIEDLNAITSKLKQLKGELSQVDADIEKETQRLKSIDVGCLSDCDLTTKAGRIEAQLIIKSAVKEVVLNTAKRRCKVTFHNGRAITLPITENPSEDVTEAIQSLSEVTERGLIDVDEVII

SEQ ID NO: 56182 - DNA, 50 bp, Escherichia coli; identical to SEQ ID NO: 44957
  source 1..50: mol_type = genomic DNA

SEQ ID NO: 56183 - DNA, 40 bp, Escherichia coli; identical to SEQ ID NO: 5188
  source 1..40: mol_type = genomic DNA

SEQ ID NO: 56184 - DNA, 40 bp, Escherichia coli; identical to SEQ ID NO: 35039
  source 1..40: mol_type = genomic DNA

SEQ ID NO: 56185 - DNA, 50 bp, Escherichia coli; identical to SEQ ID NO: 56070
  source 1..50: mol_type = genomic DNA

SEQ ID NO: 56186 - protein, 507 aa, Escherichia coli
MKRAISYIRFSSEKQSRGDSLRRQAKMVTDWLKAHPEYYLDESLTFRDLGVSGFTGKHLKGGLGDFLTAIEKGLVKAGDTLLIESLDRLSRQDVDQASELLRNILRSGVDVVTLSDGEHYTRESLKDPLALIKSILIMQRSHEESLRKSERIQAAWDAKKEAAKAGIKISRRCPAWLKLNDDRKSFSIIPEKVETVKRCFQLRLEGKSIWEIVRTLNDEGHQTLNQYKAGKFGQTSVQDLLKNRSVIGYFTPKGREEIAGYFPPIIPETDFYKVQQLSYSRYGRKPASDKPMAVNLFKGVIRCSECGHALIITGFSDTRNGIYRCPLRNENRCSAKGLSRKQTDGTLLALLSRLDRFDSDTTNTIDTLKLHREHISSNIEKLVQLSLEIEDLSAITSKLKQLKGELSQVDADIEKETQRLKSIDVGCLSDCDLTTKAGRIEAQLIIKSAVKEVVLNTAKRRCKVTFHNGKAITLPITENPSDNVTEAIQSLSEVTERSLIDVDEVII

SEQ ID NO: 56187 - DNA, 50 bp, Escherichia coli; identical to SEQ ID NO: 44957
  source 1..50: mol_type = genomic DNA

SEQ ID NO: 56188 - DNA, 40 bp, Escherichia coli; identical to SEQ ID NO: 5188
  source 1..40: mol_type = genomic DNA

SEQ ID NO: 56189 - DNA, 40 bp, Escherichia coli; identical to SEQ ID NO: 35039
  source 1..40: mol_type = genomic DNA

SEQ ID NO: 56190 - DNA, 50 bp, Escherichia coli; identical to SEQ ID NO: 56070
  source 1..50: mol_type = genomic DNA

SEQ ID NO: 56191 - protein, 507 aa, Escherichia coli
MKRAISYIRFSSEKQSRGDSLRRQAKMVTDWLKAHPEYYLDESLTFRDLGVSGFTGKHLKGGLGDFLTAIEKGLVKAGDTLLIESLDRLSRQDVDQASELLRNILRSGVDVVTLSDGEHYTRESLKDPLALIKSILIMQRAHEESLRKAERIQAAWDAKKEAAKAGIKISRRCPAWLKLNDDRKSFSVIPEKVETVKRCFQLRLEGKSIWEIVRTLNAEGHQTLNQYKAGKFGQTSVQDLLKNRSVIGYFTPKGCEEISGYYPAIIDETTFYKVQQLSYARYGRKPASDKPMAVNLFKGVIRCSECGHALIITGFSDTRNGIYRCPLRNENRCSAKGLSRKQTDGTLLTLLSRLDRFDSDTTNTIDTLKLHREHISSNIEKLVQLSLEIEDLSAITSKLKQLKNELSQVDADIEKETQRLKSIDVGCLSDCDLTTKAGRIEAQLIIKSAVKEVVLNTAKRRCKVTFHNGKVIDLPITETPSEDVTEAIQSLSEVTERGLIDVDEVII

SEQ ID NO: 56192 - DNA, 50 bp, Escherichia coli; identical to SEQ ID NO: 44957
  source 1..50: mol_type = genomic DNA

SEQ ID NO: 56193 - DNA, 40 bp, Escherichia coli; identical to SEQ ID NO: 5188
  source 1..40: mol_type = genomic DNA

SEQ ID NO: 56194 - DNA, 40 bp, Escherichia coli; identical to SEQ ID NO: 35039
  source 1..40: mol_type = genomic DNA

SEQ ID NO: 56195 - DNA, 50 bp, Escherichia coli; identical to SEQ ID NO: 56070
  source 1..50: mol_type = genomic DNA

SEQ ID NO: 56196 - protein, 507 aa, Escherichia coli
MKRAISYIRFSSEKQSRGDSLRRQAKMVTDWLKAHPEYYLDESLTFRDLGVSGFTGKHLKGGLGDFLTAIEKGLVKAGDTLLIESLDRLSRQDVDQASELLRNILRSGVDVVTLSDGEHYTRESLKDPLALIKSILIMQRSHEESLRKSERIQAAWDAKKEAAKAGIKISKRCPAWLKLNDDRKTFSVIPEKVETVRRCFQLRLEGKSIWEIVRTMNAEGHQTLNQYKAGSFGQTSVQDLLKNRSVIGYFTPKGCEEIAGYYPAIIDETTFYKVQQLSYARHGRKPASAKPLSVNLFKGVIRCSECGHALIITGFSDTRSGIYRCPLRNENRCSAKGLSRKQTDGTLLALLSRLDRFDSDTTNTIDTLKLHREHISSNIEKLVQLSLEIEDLNAITNKLKQLKNELSQVDADIEKETQRLKSIDVGCLSDCDLSTKAGRIEAQLIIRSAVKEVVLNTAKRRCKVTFHNGKVIDLPITENPSEDVTEAIQSLSEVTERGLIDVDEVII

SEQ ID NO: 56197 - DNA, 50 bp, Escherichia coli; identical to SEQ ID NO: 44957
  source 1..50: mol_type = genomic DNA

SEQ ID NO: 56198 - DNA, 40 bp, Escherichia coli; identical to SEQ ID NO: 5188
  source 1..40: mol_type = genomic DNA

SEQ ID NO: 56199 - DNA, 40 bp, Escherichia coli; identical to SEQ ID NO: 35039
  source 1..40: mol_type = genomic DNA

SEQ ID NO: 56200 - DNA, 50 bp, Escherichia coli; identical to SEQ ID NO: 56070
  source 1..50: mol_type = genomic DNA

SEQ ID NO: 56201 - protein, 507 aa, Escherichia coli
MKRAISYIRFSSEKQSRGDSLRRQAKMVTDWLKAHPEYYLDESLTFRDLGVSGFTGKHLKGGLGDFLTAIEKGLVKAGDTLLIESLDRLSRQDVDQASELLRNILRSGVDVVTLSDGEHYTRESLKDPLALIKSILIMQRAHEESLRKAERIQAAWDAKKEAAKAGIKISRRCPAWLKLNDDRKSFSVIPEKVETVKRCFQLRLEGKSIWEIVRTLNAEGHQTLNQYKAGKFGQTSVQDLLKNRSVIGYFTPKGCEEISGYYPAIIDETTFYKVQQLSYARYGRKPASDKPMAVNLFKGVIRCSECGHALIITGFSDTRNGIYRCPLRNENRCSAKGLSRKQTDGTLLALLSRLDRFDSDMTNIIDTLKLHREHISSNIEKLVQLSLEIEDLSAITSKLRQLKNELSQVDADIEKETQRLKSIDVGCLSDCDLTTKAGRIEAQLIIKSAVKEVVLNTAKRRCKVTFHNGKAITLPITENPSDNVTEAIQSLSEVTERGLIDVDEVII

SEQ ID NO: 56202 - DNA, 50 bp, Escherichia coli; identical to SEQ ID NO: 44957
  source 1..50: mol_type = genomic DNA

SEQ ID NO: 56203 - DNA, 40 bp, Escherichia coli; identical to SEQ ID NO: 5188
  source 1..40: mol_type = genomic DNA

SEQ ID NO: 56204 - DNA, 40 bp, Escherichia coli; identical to SEQ ID NO: 35039
  source 1..40: mol_type = genomic DNA

SEQ ID NO: 56205 - DNA, 50 bp, Escherichia coli; identical to SEQ ID NO: 56070
  source 1..50: mol_type = genomic DNA

SEQ ID NO: 56206 - protein, 507 aa, Escherichia coli
MKRAISYIRFSSEKQSRGDSLRRQSKMVNDWLKAHPEYYLDQDLSFRDLGVSGFTGKHLKGGLGDFLTAIEKGLVKAGDTLLIESLDRLSRQNVDRASELLRNILRSGVDVVTLSDGEHYTKESLRDPLSLIKSILIMQRSHEESLRKSERIQAAWNRKKELISEGIKISKRCPAWLRLNDDRKSFSVIPEKVETVKRCFQLRLEGKSIWDIVRTLNDEGHLSLNQYKAGKFGQTSVQDLLKNRSVIGYFTPKGREEIAGYFPPIIPETDFYKVQQLSYSRYGRKPASDKPLSVNLFKGVIRCSECGHALIITGFSDTRSGIYRCPLRNENRCSAKGLSRKQTDGTLLTLLSRLDRFDSDTTNTIDTLKLHREHISSNIEKLVQLSLEIEDLSAITIKLKQLKGELSQVDADIEKETQRLKSIDVGCLSDCDLTTKAGRIEAQLIIKSAVKEVVLNTAKRRCKVTFHNSKSITLPITENPSEDVTEAIQSLSEVTERGLIDVDVVAI

SEQ ID NO: 56207 - DNA, 50 bp, Escherichia coli; identical to SEQ ID NO: 44957
  source 1..50: mol_type = genomic DNA

SEQ ID NO: 56208 - DNA, 40 bp, Escherichia coli; identical to SEQ ID NO: 5188
  source 1..40: mol_type = genomic DNA

SEQ ID NO: 56209 - DNA, 40 bp, Escherichia coli; identical to SEQ ID NO: 35039
  source 1..40: mol_type = genomic DNA

SEQ ID NO: 56210 - DNA, 50 bp, Escherichia coli; identical to SEQ ID NO: 56070
  source 1..50: mol_type = genomic DNA

SEQ ID NO: 56211 - protein, 507 aa, Escherichia coli
MKRVISYIRFSSERQAKGDSLRRQSKMVNDWLKAHPEYYLDQDLSFRDLGVSGFTGKHLKGGLGDFLTAIEKGLVKAGDTLLIESLDRLSRQDIDIASELLRRILRAGVDIVTLSDGEHYTRESLKDPLALIKSILIMQRAHEESLRKAERIQAAWDAKKEAAKAGIKISKRCPAWLKLNDDRKTFSVIPEKVETVKRCFQLRLEGKSIWEIVRTLNDEGHQSMSQYKAGKFGQTSVQDLLKNRSVIGYFTPKGCEEIAGYYPAIIDETTFYKVQQLSHSRYGKRSVSDKPLSVNLFKGVIRCSECGHALIITGFSDTRNGIYRCPLRNENRCSAKGLSRKQTDGTLLALLSRIDRFDSDMTNTIDTLKLHREHISSNIEKLVQLSLEIEDLSAITSKLKQLKGELSQVNADIEKETQRLKSIDVGCLSDCDLTTKAGRIEAQLIIKSAVKEVVLNTAKRRCKVTFHNGKVIDLPITENPSEDVTEAIQSLSEVTERGLIDVDEVII

SEQ ID NO: 56212 - DNA, 50 bp, Escherichia coli; identical to SEQ ID NO: 44957
  source 1..50: mol_type = genomic DNA

SEQ ID NO: 56213 - DNA, 40 bp, Escherichia coli; identical to SEQ ID NO: 5188
  source 1..40: mol_type = genomic DNA

SEQ ID NO: 56214 - DNA, 40 bp, Escherichia coli; identical to SEQ ID NO: 35039
  source 1..40: mol_type = genomic DNA

SEQ ID NO: 56215 - DNA, 50 bp, Escherichia coli; identical to SEQ ID NO: 56070
  source 1..50: mol_type = genomic DNA

SEQ ID NO: 56216 - protein, 458 aa, Staphylococcus epidermidis
MNYERSYLRSCQVSTLEQKEHGYSIEEQERKLKSFCEINDWSVSDVFIDAGFSGAKRERPELQRMMNDIKRFDLIFVYKLDRLTRNVRDLLDLLEIFEQNNVAFRSATEVYDTSTAMGRLFVTLVGAMAEWERETIRERVMMGKRAAIKQGMILTPPPFYYDRVDNTYIPNDYKKVVLWAYDEVLKGVSSKGIARKLNDSDIPPPNGKRWEDRTITRALRSPITRGHYTWGDVFIENSHEPIITEEMYQQIKERLEERINTKIVSHVSVFRGKFICPRCGGTLTMNTATRKRKKGYVTYKTYYCNTCKVKKESFGFAENEALRVFRDYLSKLDLEEYEVKTKQKDDVVTIDIDKIMEQRKRYHKLYAKGLMQEEELFELIKETDETIAEYEKQKELAPRKTLNVDKIKKFKNALLESWKIFSLEDKADFIKMAIKSIDIDYVKLKNRHSIKINDIEFY

SEQ ID NO: 56217 - DNA, 50 bp, Staphylococcus epidermidis
  source 1..50: mol_type = genomic DNA
gtacggaagtatagacactctattaatatttaatgtgtatacttccgtaa

SEQ ID NO: 56218 - DNA, 40 bp, Staphylococcus epidermidis; identical to SEQ ID NO: 26028
  source 1..40: mol_type = genomic DNA

SEQ ID NO: 56219 - DNA, 40 bp, Staphylococcus epidermidis
  source 1..40: mol_type = genomic DNA
gtatggcggtacatgcatttttatcggatgtataccgact

SEQ ID NO: 56220 - DNA, 50 bp, Staphylococcus epidermidis
  source 1..50: mol_type = genomic DNA
gaaaggaggacaaaatactatattttgcactaatgtgcaatcttccttaa

SEQ ID NO: 56221 - protein, 458 aa, Staphylococcus epidermidis
MNYERSYLRSCQVSTLEQKEHGYSIEEQERKLKSFCEINDWNVSDVFIDAGFSGAKRDRPELQRLMNNIKRFDLVLVYKLDRLTRNVRDLLDLLEIFEKHNVAFRSATEVYDTSTAMGRLFVTLVGAMAEWERETIRERVMMGKRAAIKQGMILTPPPFYYDRVDNTYVPNDYKKVVLWAYDEVLKGVSSKGIARKLNDSDIPPPNGKRWEDRTITRALRSPITRGHYTWGDVFIENSHEPIITEEMYQQIKERLEERINTKIVSHVSVFRGKFICPRCGGTLTMNTATRKRKKGYVTYKTYYCNTCKVKKESFGFAENEALRVFRDYLSKLDLEEYEVKTKQKDDVVTIDIDKIMEQRKRYHKLYAKGLMQEEELFELIKETDETIAEYEKQKELAPRKTLNVDKIKKFKNALLESWKIFSLEDKADFIKMAIKSIDIDYVKLKNRHSIKINDIEFY

SEQ ID NO: 56222 - DNA, 50 bp, Staphylococcus epidermidis; identical to SEQ ID NO: 56217
  source 1..50: mol_type = genomic DNA

SEQ ID NO: 56223 - DNA, 40 bp, Staphylococcus epidermidis; identical to SEQ ID NO: 26028
  source 1..40: mol_type = genomic DNA

SEQ ID NO: 56224 - DNA, 40 bp, Staphylococcus epidermidis; identical to SEQ ID NO: 56219
  source 1..40: mol_type = genomic DNA

SEQ ID NO: 56225 - DNA, 50 bp, Staphylococcus epidermidis; identical to SEQ ID NO: 56220
  source 1..50: mol_type = genomic DNA

SEQ ID NO: 56226 - protein, 458 aa, Staphylococcus epidermidis; identical to SEQ ID NO: 29616

SEQ ID NO: 56227 - DNA, 50 bp, Staphylococcus epidermidis; identical to SEQ ID NO: 56217
  source 1..50: mol_type = genomic DNA

SEQ ID NO: 56228 - DNA, 40 bp, Staphylococcus epidermidis; identical to SEQ ID NO: 26028
  source 1..40: mol_type = genomic DNA

SEQ ID NO: 56229 - DNA, 40 bp, Staphylococcus epidermidis; identical to SEQ ID NO: 56219
  source 1..40: mol_type = genomic DNA

SEQ ID NO: 56230 - DNA, 50 bp, Staphylococcus epidermidis; identical to SEQ ID NO: 56220
  source 1..50: mol_type = genomic DNA

SEQ ID NO: 56231 - protein, 458 aa, Staphylococcus epidermidis
MNYERSYLRSCQVSTLEQKEHGYSIEEQERKLKSFCEINDWSISDVFIDAGFSGAKRDRPELQRMMKDIKRFDLVLVYKLDRLTRNVRDLLDLLEVFEQNNVAFRSATEVYDTSTAMGRLFVTLVGAMAEWERETIRERVMMGKRAAIKQGMILTPPPFYYDRIDNTYIPNDYKKVVLWAYDEVLKGVSSKGIARKLNDSDIPPPNGKKWEDRTITRALRSPITRGHYTWGDVFIENSHEPIISEEMYQQIKERLEERINTKIVSHVSVFRGKFICPRCGGTLTMNTATRKRKKGYVTYKTYYCNTCKVKKESFGFAENEALRVFRDYLSKLDLEEYEVKTKQKDDVVTIDIDKIMEQRKRYHKLYAKGLMQEEELFELIKETDETIAEYEKQKELAPRKTLNVDKIKKFKNALLESWKIFSLEDKADFIKMAIKSIDIDYVKLKNRHSIKINDIEFY

SEQ ID NO: 56232 - DNA, 50 bp, Staphylococcus epidermidis; identical to SEQ ID NO: 56217
  source 1..50: mol_type = genomic DNA

SEQ ID NO: 56233 - DNA, 40 bp, Staphylococcus epidermidis; identical to SEQ ID NO: 26028
  source 1..40: mol_type = genomic DNA

SEQ ID NO: 56234 - DNA, 40 bp, Staphylococcus epidermidis; identical to SEQ ID NO: 56219
  source 1..40: mol_type = genomic DNA

SEQ ID NO: 56235 - DNA, 50 bp, Staphylococcus epidermidis; identical to SEQ ID NO: 56220
  source 1..50: mol_type = genomic DNA

SEQ ID NO: 56236 - protein, 523 aa, Streptococcus equi
MNLAKNITIIPARKIVGTQKVTEKVQKVRVAAYARVSTEFEEQESSYDVQVEHYTSYINSNPEWELVEIYADDGISATSTTKREAFNRMIQDARDGKIDMILTKSISRFSRNTVDCLKYTRELKDLNIAVFFEKENINTLDAKGEVLMTIMAALAQQESESLSANVRLGIQFRNQQGKVQVNHNRFLGYTKDADGNLVIVPEEAKIVRRIYAEYMDGSSFLQIKRSLEKDGILNGAKHTKWHESNIRQILTNEKYIGDALLQKTFTHNTLEKKRVANNGIAPKYYVEGSHEAIIDRDVFLRVQAEISRRANILSGGKKRIYSSKYALSSIVFCGHCGDIFRRIKWNNRGCKSTVWRCVSRVLKKTSGIDCPARTIREEDLQAAVLTAINDTFNRKDEIIPTLMEIIQDVIDENLQESVEQLDIKIKDLQIKLLEAGKEQKIIDEIGEGIIALRKEKYDIMTEAAKNIELQERINDMFSFLEEQTQAITEYSDTLVRRLIEKITVFDNKAVVEFKSGLQSEVEI

SEQ ID NO: 56237 - DNA, 50 bp, Streptococcus equi
  source 1..50: mol_type = genomic DNA
gacattcataatggtgtctcaacacatgtggagacgatagttcttctgtc

SEQ ID NO: 56238 - DNA, 40 bp, Streptococcus equi
  source 1..40: mol_type = genomic DNA
cttgtttccaatgacacatcatgtcgagtgcatagcgttg

SEQ ID NO: 56239 - DNA, 40 bp, Streptococcus equi
  source 1..40: mol_type = genomic DNA
cttgtttccaatgacacattttgtcgagtgcatagcgttg

SEQ ID NO: 56240 - DNA, 50 bp, Streptococcus equi
  source 1..50: mol_type = genomic DNA
gacatttataaatctgtcacaacattagtggagaaagaatattttcatag

SEQ ID NO: 56241 - protein, 540 aa, Faecalitalea cylindroides
MKQPYNTTIYNTALYMRLSRDDENYGDSVSIETQRTILQQYAKEQGLHVVGEYVDDGWSGTNFERPDFQRMMDDVEAGKVNCIVTKDLSRFGREHVMMDYYLEFLFPEKRVRYIAVAENEDTEKGLSDFVPFKNLFNEWFAKDTSRKVKAAFKAKFATGQRIGAYAPIGYRKHPEIKNKLIIDEETRWIVEKIFDLAFHGRGAASITSILIAEKVPTPGFINFQRDGTFANIYAGAPEEKSYAWTIAQVKSIMKDETYIGHTIHYRETNISFKNKRRVRKPQSEWVRVENTQEPIISEQVFRQVQEQIANRRRKCKDGTTQIFSGLVKCADCGWSLSYGENRQNSKPYGHYHCSKYGQGTRQCSMHYIRYDVLYAYVLSRLQYWSGLVQHDEERLLKRLLNANDKGQAAARKKQAAELKKVEKRKSEVDTLFARMYEDWVAGRITEYNFSMLSGKYQSEQAELDEKIERLQSAIAAESQNAADAEKWIALMKECVNPTELTAELLNTLIEKIVVHEAVKGEDGSREQEVEIFYRFIGKID

SEQ ID NO: 56242 - DNA, 50 bp, Faecalitalea cylindroides; identical to SEQ ID NO: 47047
  source 1..50: mol_type = genomic DNA

SEQ ID NO: 56243 - DNA, 40 bp, Faecalitalea cylindroides
  source 1..40: mol_type = genomic DNA
cgtttcaaaatgggaacagggtttatcggttccggattct

SEQ ID NO: 56244 - DNA, 40 bp, Faecalitalea cylindroides
  source 1..40: mol_type = genomic DNA
cgtttcaaaatgggaacagcctttatcggttccggattct

SEQ ID NO: 56245 - DNA, 50 bp, Faecalitalea cylindroides
  source 1..50: mol_type = genomic DNA
ctatatcttcttgattgagtgacccctttatcactttggttgagatagaa

SEQ ID NO: 56246 - protein, 509 aa, Vibrio alginolyticus
MVQRKQAISYQRFSSDRQRNNSSLDRQSDSIKSWLKQNPDVDLIDQYVDEAMSGWSGKHIEQGSLGKLLQAIEEGIVQPETLILVEHFSRLSRQNIDKTEELLRKIWQHGITIVTIRDNGLYPPSTINDMPLRIRLIVEIEQAFKESEWRSAKVKGSYVKREKDAKNGLTPRMRRPFWLNRDGTLNDHHVVIKDIFNWYMEGLGQQRIIVKLKEKYQSVPSVQKMNPSTVMRWLTSDVVRGLWRGCKVYEAAVDDTLYFNVQTVHNSRLYHNVKPDRNWPLSGLLQCGVCGRGMSIQKSKGSLPVIRCSSKQRDKSCQRKTTFPYALTHLYMFNTVRKRASRLYTQKTVTKENALRLGQIDNDLVKLRTQLKEEKQLYDEASSEGKSGRLILKIMLETDERIQDLERERDSIQSSIEASNNLFISDEANNLVLTPRNFNLEMHKLGFKIVVGEYSLNTEGLSDKAPEWQYLGYSRKKRAYEWEVLGKKYFMPTASFNEEVLMLEDKEEI

SEQ ID NO: 56247 - DNA, 50 bp, Vibrio alginolyticus
  source 1..50: mol_type = genomic DNA
cacatgcacacctattcttttagtgagctaatagcgtaggtgtgcatatg

SEQ ID NO: 56248 - DNA, 40 bp, Vibrio alginolyticus; identical to SEQ ID NO: 55098
  source 1..40: mol_type = genomic DNA

SEQ ID NO: 56249 - DNA, 40 bp, Vibrio alginolyticus
  source 1..40: mol_type = genomic DNA
gttagaccacctactgtgctaactaaaagctggccaatct

SEQ ID NO: 56250 - DNA, 50 bp, Vibrio alginolyticus
  source 1..50: mol_type = genomic DNA
cacacacaaaattttttttttaattagctgagcgtggtggcgtgcatctg

SEQ ID NO: 56251 - protein, 502 aa, Anaerobutyricum hallii
MLRYYSKEKGFEIIDEYVDDGYSGTTFNRPDLNRMIEDAMEDTQPSGIMVKDMSRFGRNNAMFMYYVEEIFPNNDILFIALNDDVDTRYEDNEMMPFKSIMNEYYARDTSKKIRSVKKTTALSGGFCGSFAPYGYRVDPNNKRKLLIDPETAPIVKRIFEMSKQGNSVHQIARTLCEEKILIPRAYRAMKNGTLETSTGFRFPTDWVGKNVKMILENQVYLGHMVSHKTQTKSFKNRKLVAVPKEDWIVVKNTHEAIIDEETFELVQKFISVKKRPNKTGRPNMFVGLVKCPDCGRNMAFSNPNGREPRFRCRTYARNSNLCTTHAISYDALVKIVMDDIQKHIKNMETLGDQFIEEMRVLSESGGGKKIKQFKQELELAEKRIAEIDSIIMKLFEQNVAGKISDGRFEKMSVTYENEQRELEERRKALKEKIEAEDYKTKNTNQFLETIRKYENVTELNRSMLVELIDSIYVYQAEGTGKERTQKVEINYRFLCESQCGIA

SEQ ID NO: 56252 - DNA, 50 bp, Anaerobutyricum hallii; identical to SEQ ID NO: 2817
  source 1..50: mol_type = genomic DNA

SEQ ID NO: 56253 - DNA, 40 bp, Anaerobutyricum hallii
  source 1..40: mol_type = genomic DNA
aagaatacatccgtttcaagatggaaacggtcgcgttgga

SEQ ID NO: 56254 - DNA, 40 bp, Anaerobutyricum hallii
  source 1..40: mol_type = genomic DNA
aagaatacatccgtttcaaggtggaaacggtcgcgttgga

SEQ ID NO: 56255 - DNA, 50 bp, Anaerobutyricum hallii
  source 1..50: mol_type = genomic DNA
aggaatcctggtacggtattggttggtggaaatgtaaattagcacaacca

SEQ ID NO: 56256 - protein, 550 aa, Streptococcus pyogenes
MSKEKIKVYLYTRVSTSIQIEGYSLEAQKSRMKAFAIYNDYEIVGEYEDAGKSGKSIEGRIQFNRMMEDIKSGKDGVSFVLVFKLSRFARNAADVLSTLQIMQDYGVNLICVEDGIDSSKDAGKLMISVLSAVAEIERENIRIQTMEGRIQKAREGKWNGGFAPYGYKLEDGKLFINEEEAVAIRTIFDQYVNTTIGANGLSKYLENHGIRKIPRQNGKNPLFDAGLIRKILKNPVYNGKIAFGRRTLEKVHGTRNEYKQVEKDEYLISEGIHEAIVSNEVWQAAQVKLKSQAKKYEHVNKGKDTRTHLLSGIVKCPICGVGMFGNKCTKKKKDGTKYKDFYYYGCKHRQMIRGHKCTFRKQIREELLDDAVAEVIVKIVSNPKFASMMQEKINMKVDTSEIEKEIDNYQKELRKSHSTKFKLIEEIDNLDVEDKHYKRRKQDLDDRLYRMYDKIDELESSLIDAKAKKQTIEAEKLTGDNIYKVLIYFDKLYKVMNDVERRQLITALISEIQIYEEKQPNGQWLKSITFKLPIIEENLNIGLDNDEQVE

SEQ ID NO: 56257 - DNA, 50 bp, Streptococcus pyogenes
  source 1..50: mol_type = genomic DNA
ggtttggacaatgatgaacaagttgagacggtagcgcttttgtccaaact

SEQ ID NO: 56258 - DNA, 40 bp, Streptococcus pyogenes; identical to SEQ ID NO: 32898
  source 1..40: mol_type = genomic DNA

SEQ ID NO: 56259 - DNA, 40 bp, Streptococcus pyogenes
  source 1..40: mol_type = genomic DNA
tccgcaaacgcatcacgtccagtgcgtagtgttgctaatc

SEQ ID NO: 56260 - DNA, 50 bp, Streptococcus pyogenes
  source 1..50: mol_type = genomic DNA
ggtggggacacagctaaaccatttcagacggtataggtagagcacagact

SEQ ID NO: 56261 - protein, 587 aa, Paenibacillus ihbetae
MLIGYTRISRDEDRKNYATIIAQKKIISNHAKEVFGKEISEKNLYEDDNYSGYSFNRPDFARMLKDINFAIENGYKVVLLVKDISRIGRHNAHTLLFLEDMQRLGVRVILISDNYDSFVDDDSILGIKTWYNERYVKDISTKIKDNNKTKMIDGKYLSAVPYGYKRDPLNREKVIIDEETAWVVKKIFEMYLQGDGYRKICIYLTENEVPTPSMVIQRNKEAEGKVYKKDVTHVWVQRMVQRIVRNDFYIGVLRQGKYKLAEINGKILRVDPSQHYVFTNNHEPLVSVEDFELAQEIAEKRLTMHYRGSGHKHVNLFTGFLVCADCGRGFVALNKEGKHKSYICGTYRRVGKIACTTHYILDRTLLLAIKAHLVVLREKLSNAISGFDGKLKDQVKRTDNLDKSLQRLNSSLKQLSDELKVTMKQRINEVARRPEDEEIISEAYAEIEAEKRLLIKDIQRQIDDLTEIKKQSSRFQEGSVTALSVLDELIGKEMFDRKDLSLLVDKIIVNEDGEPTIYLKANIEKLLQYEGGDHDPDGNGDGYKATVTYKAGAVIKTLVSTLASNFYGGELVNDTVSLKEPSCTTRL

SEQ ID NO: 56262 - DNA, 50 bp, Paenibacillus ihbetae
  source 1..50: mol_type = genomic DNA
agaaccatcgtgcactacaaggctggggactacgacaccacaatgcacct

SEQ ID NO: 56263 - DNA, 40 bp, Paenibacillus ihbetae
  source 1..40: mol_type = genomic DNA
cgaaccgatggacaaggccggtgcgtatgcgattcagggc

SEQ ID NO: 56264 - DNA, 40 bp, Paenibacillus ihbetae
  source 1..40: mol_type = genomic DNA
cgaaccgatggacaaggcccttgcgtatgcgattcagggc

SEQ ID NO: 56265 - DNA, 50 bp, Paenibacillus ihbetae; identical to SEQ ID NO: 24110
  source 1..50: mol_type = genomic DNA

SEQ ID NO: 56266 - protein, 554 aa, Pseudomonas glycinae
MPKVFSYIRFSSAKQSAGDSEARQMRAAKEFAIERGLELADPKEYLFFDRGRSAYNGRHVDDTSELARFLGYVEDGTIPPGSFLVVESLDRLSREKVRDALPRFLDLLAKGISVYTSTDKRLYTHDYNEIDLFISVISMSRAHEESATKGSRVSSAWRKKQADARTTGKPLGKLRPLWLDVTPEGYTLNPNHAQVVRRIFDLSTQGHGSRNIAAMLNQEGIPAFSAGRKNFSGLWGFSTVRHILDSRTTLGEYQPHIFIDGVRTPDGDPIKGFFPAVVDEETFYRAQAARGSRRLHKITKQTTNFNVMAGIFFCFDCGAVMHLQSQRGHKYYKCSHTIRGMCGAGVVSATRTETVFREILAKLDSLSLVQDSAGAIRKKLDVAEGRGEELRAKLAAAEDAHNEYPSRTTAKLLHELESQLASMDAEKDSLLQQMAVDRVVSKSDFFEKLDLTSFEGRNAANNLTKRLGTRIYVRKNGRCNEMYLIAVTTPDESEQSIIGAIYHMNKGIRIESASDAFDELQKLHGDSPKWQRKAKHWMKEIKVPALPPLKSQHR

SEQ ID NO: 56267 - DNA, 50 bp, Pseudomonas glycinae
  source 1..50: mol_type = genomic DNA
ggtagtgaactgttgcaatacatcaagaaatgctgctacaactacctaca

SEQ ID NO: 56268 - DNA, 40 bp, Pseudomonas glycinae
  source 1..40: mol_type = genomic DNA
cgccagcggccagaagttcaagaaatgctgcgcggggtat

SEQ ID NO: 56269 - DNA, 40 bp, Pseudomonas glycinae
  source 1..40: mol_type = genomic DNA
cgccagcggccagaagttcacgaaatgctgcgcggggtat

SEQ ID NO: 56270 - DNA, 50 bp, Pseudomonas glycinae
  source 1..50: mol_type = genomic DNA
cagagagaatacctgcaagacatgaccaacagctgcctcccccacctaca

SEQ ID NO: 56271 - protein, 478 aa, Brevibacterium aurantiacum
MAELVSLRKTNEVAAYVRSSIDRKGDRWAVETQLRKIRALAEAKDWVVVDVYDDSAVSATKKRRAGTRWAEMLDDARAGRFSMVVAVDMDRLLRSTKDLNTLIDLGLRVVTVDGEIDLSTADGEFRATMLAALARFEARRKAERQIRSNERRRAEGIPTSAWKAFGWTREGELIEEEAEAVRRAFDAFLGEPSLSIRRIREDLNSAGHLTARGSEFSVDAVRYLLANPLYCGYIKHYASGELHPVQGEAFPPIVGEQTWRAAVAKLEDNVRRSARQGNQPKYLLSTIGLCGKCGATLVSGTNSRKQPTYRCGEQFHLTRQREPVDAMVTEAVLTRLSSVDVHDLVMPQEGDVLDREELLTERNALVERVKELSPLLRDIHQPVLEITAAINDVKARIDEIDAELLDRSVSVAAKLLADVEEAVGTAERREVVESKWKALDVDRRRILVDELVTVTIEPIVPGHVKFDPELIRIEPRRD

SEQ ID NO: 56272 - DNA, 50 bp, Brevibacterium aurantiacum
  source 1..50: mol_type = genomic DNA
caacgtcttaacccagacatgcgctagcgcatgttggggttgaaacactc

SEQ ID NO: 56273 - DNA, 40 bp, Brevibacterium aurantiacum; identical to SEQ ID NO: 27918
  source 1..40: mol_type = genomic DNA

SEQ ID NO: 56274 - DNA, 40 bp, Brevibacterium aurantiacum
  source 1..40: mol_type = genomic DNA
cagatagagagggttctcgatgcgcatgtcgatgacaccg

SEQ ID NO: 56275 - DNA, 50 bp, Brevibacterium aurantiacum
  source 1..50: mol_type = genomic DNA
caaccttgtactccagacatgggcattctcatgttgaccctggaaaggtc

SEQ ID NO: 56276 - protein, 518 aa, Lentzea guizhouensis
MASKAKTRTGVLRVLGAVRLSRTTDESTSPERQKQRIHYWAGGNDARVVQVTEDLDVSGAVSPFDRPGLGEWLTDGKANEWDVLVSWKLDRISRSAEDTLRLLKWCEKHGKRIVCVDDGIDSETQMGRVWIQLAAIFAEVERNTIKERALASREQLRKSGRWHGEAVPYGYMPEPIPTGGWRLVIDPTAQEHVDRIVSDVLAGKSVQSIADGLTEQGVLSPRDHFRNVRGLKVKGAKWNPQTIFKTLESRAWLGVVSHEGNPVLDPEGNEITKAEPLISLETWHRIQSALQERRIGKVNNRTSDASPLLGVIGCKECQANMHHRAQMMSGKQYRYYYCPKKHGKSVKAVEFENAFEQTFLTLLGDKTVMRREYVAAENHTVELMDAKATLNSLMASMMSAQSNTVREALTQQIASVDLRIAHLESLPQREAEWRMVPTGKTYAQEWDYADQEGRRQLLINSGIRALTINLGKGKTPVSFYIPANILERMEDQDASDFRSEESPWELTVQELNELINNN

SEQ ID NO: 56277 - DNA, 50 bp, Lentzea guizhouensis
  source 1..50: mol_type = genomic DNA
cttgtaggatgggcccacttgaagaggtcaaagtggttgaaacctacaag

SEQ ID NO: 56278 - DNA, 40 bp, Lentzea guizhouensis
  source 1..40: mol_type = genomic DNA
cttgtaggcccacttgaagaggtccatgttcgcgtgcagg

SEQ ID NO: 56279 - DNA, 40 bp, Lentzea guizhouensis
  source 1..40: mol_type = genomic DNA
cttgtaggcccacttgaaggggtccatgttcgcgtgcagg

SEQ ID NO: 56280 - DNA, 50 bp, Lentzea guizhouensis
  source 1..50: mol_type = genomic DNA
gttgttgcatgcatcaatttcaagggattaaagtatattttacctacaag

SEQ ID NO: 56281 - protein, 642 aa, Anaerobutyricum hallii
MNAGYVRLSRDDDKRNYVSIENQKLIINQYATDHGVVIDRWYEDDGISGYIFDRPGFQQMMADLDKDIDTVYVKDFSRLGRHNAKVLLLLDEFQERGKHLVVIDDNYDSMDSSDDTIGIKTWFNERYVKDTSKKIKRAIGARQKEGTLITRPPFGYCRNEKDKTVLEIVPKEAEYIKKIYDLYLSGSGYRKIATYLTEQGAPTPSMIQREREIEEGRLSKRQVASKWSDAMIKEILDNDFYIGTFRLKKRARNTVHGKDKRVPKEEQCIFENHHPAIIDKATFALIQELKGKRNRTNYRGSRGQWLGSEIPNPFGSCLFCKDCGSRLTPIKRKTSSKERKYYICTTYNTKGRRYCSKAHLIEEDDLMEDVLTYIKMCRNALCEVISTYDLKDFEAEKKTIAEKRQELHTAINERKSQLKVLLTQKVKDLAVAAGNEDLINETYDSMQKDLFAQIHGLEMQIKELNETAIETPDVKDKLKNALEVVDKIIAGGSLDRRDIELLIEKIVVDEDGMPEITLKYGLSNLISYSPADEMNRRENTMIAIVMKLIAEDERGFSSAKYLSEHITDLGFKKTKQSILPYIELMKELGILEVTDNPLKPYNIVKSKEEITQLTKDYLPDVSAETTAKHLADDYLHGISDDR

SEQ ID NO: 56282 - DNA, 50 bp, Anaerobutyricum hallii; identical to SEQ ID NO: 13667
  source 1..50: mol_type = genomic DNA

SEQ ID NO: 56283 - DNA, 40 bp, Anaerobutyricum hallii
  source 1..40: mol_type = genomic DNA
agtacttggcggtcgaaaaggcggcatgccggaaatggtt

SEQ ID NO: 56284 - DNA, 40 bp, Anaerobutyricum hallii
  source 1..40: mol_type = genomic DNA
agtacttggcggtcgaaaattcggcatgccggaaatggtt

SEQ ID NO: 56285 - DNA, 50 bp, Anaerobutyricum hallii; identical to SEQ ID NO: 5540
  source 1..50: mol_type = genomic DNA

SEQ ID NO: 56286 - protein, 550 aa, Streptococcus pyogenes
MSKEKIKVYLYTRVSTSIQIDGYSLEAQKSRMKAFALYNDYEIVGEYEDAGKSGKSIEGRIQFTRMMEDIKSGKDGVSFVLVFKLSRFARNAADVLSTLQIMQDFGVNLICVEDGIDSSKDAGKLMISVLSAVAEIERENIRVQTMEGRIQKAREGKWNGGFAPYGYQLIDGKLLINEEEAIAIRAIFDQYVNTSIGANGLSKYLENHGIRKIPRQNGKNPLFDAGLIRKILKNPVYNGKIAFGRRTLEKVHGTRNEYKQVEQDEYLISEGIHEAIVSDEVWQAAQVKLKSQAKKYEHVNKGKDTRTHLLSGIVKCPICGVGMFGNKCIKKKKDGTKYKDFYYYGCKHRQMIRGHKCTFSKQIREELLDDAVAEVIIKLVSNPKFASMMQEKINMKVDTSAIENEIDNYQKELRKNHSTKFKLIEEIDNLDVDDKHYKRRKQDLDDRLYRMYDKIEELESLLIDAKAKKQTIEAEKLTGDNIYKVLIYFDKLYKVMNDVERRQLISALISEIQIFEEKQPNGQWLKSITFKLPIIEENLNIGLDNDEHVE

SEQ ID NO: 56287 - DNA, 50 bp, Streptococcus pyogenes
  source 1..50: mol_type = genomic DNA
ggtttggacaacgatgaacatgttgagacggtagcacttttgtccaaact

SEQ ID NO: 56288 - DNA, 40 bp, Streptococcus pyogenes; identical to SEQ ID NO: 32898
  source 1..40: mol_type = genomic DNA

SEQ ID NO: 56289 - DNA, 40 bp, Streptococcus pyogenes
  source 1..40: mol_type = genomic DNA
tccgcaaacgcatcacgtctggtgcgtagtgttgctaatc

SEQ ID NO: 56290 - DNA, 50 bp, Streptococcus pyogenes
  source 1..50: mol_type = genomic DNA
gatctgggcattagtgaccatttttggaaggaatcacttttgtccaagtt

SEQ ID NO: 56291 - protein, 477 aa, Streptomyces sp 21142
MARKVGVYTRISRDDEGESLGVARQQQDCERLADLRSWQVVKTYEDNDVSAFKRNVVRDEFELMLRDLRAGLIDGIVAYDLDRLARQPRDLERLIEIFDERPRLEFATVTNDINLGSPDGRTMARIMVAFANKSSHDASRRIKRKHLELAQQGKDSGGPAPYGWSKDDRTKVDPKAAEAIREAQREVLAGVRIGTIRTRWQQQGLGNPRAGTKRMAHHHVEQILTNPRLVGYRTYHGEILVGEDGEPVKGNWEQINSLEEWEAVCAAVAERKQKHPGKSLARKYLLSGIARCGLCKTKIRGQINNRWQPGSKAAKYTYQCSVVNGGCGKVGRVGEPVDRLIVQLALEEQRARAEVTAVPVDQRWPREDELQQVSQDITQLVDAERSKQITVATLLQLLPAKERLRDELKLERARFYKEQKQAEAKGDAANLTVEEFFALPVERQQEIVLHSLSAVIIHPAGRGRRKFDPSLIEPVWR

SEQ ID NO: 56292 - DNA, 50 bp, Streptomyces sp 21142
  source 1..50: mol_type = genomic DNA
ttatgtactggaggcaagacactccaggctgacttgactcgatgacggta

SEQ ID NO: 56293 - DNA, 40 bp, Streptomyces sp 21142
  source 1..40: mol_type = genomic DNA
gacgggcggctgaacgctccacgggaagttgatccagtca

SEQ ID NO: 56294 - DNA, 40 bp, Streptomyces sp 21142
  source 1..40: mol_type = genomic DNA
gacgggcggctgaacgctcagcgggaagttgatccagtca

SEQ ID NO: 56295 - DNA, 50 bp, Streptomyces sp 21142
  source 1..50: mol_type = genomic DNA
tgatgtgggctaatcaggaaacacagagctgacttgtaatcatcatggta

SEQ ID NO: 56296 - protein, 516 aa, Clostridium botulinum
MKRIAIYSRKSRETDTGESIKNQIDMCKTYFNRADDDCLFEIFQDEGFSGGNINRPSFQRMLELAKHKQFDIIAVYKVDRVARNIVDFVNIYDELENHDVKLVSITEGFDPSTPIGKMMMMLLASFAEMERMNIAERVRDNMKGLAKIGRWSGGTPPTGYKNKTIINDNGKKESYLELIPEKKQLIISIFRKAADGYTTYQIGKMFNMSPKTVSNILCNPTYVKSDELSANYLKSIGYSVFGELNGNGYLSYNRRPKKKGKKLSNAKGMFTAVSNHEAPIDSKTWIKANNNLKDRATEAKPRISSNSFLAHLVKCSCGSGMYIHTGHAKKDGTKNLYFVCSKKKGGSKCTSRWLRVDGVEKKVLNVFKKISLNPKLLESYLKQKNKHVDYTESIKNIKKQINKNDEKINSLTDKIIFLKGAAIDIVSKKINNLADENSRLNEQLLALERKKMFSEVDGENIKLLTVNINQFLQNFDKIDTTERQIFIKSIIKKIVWNSNANNNKGKKGKISIEFLE

SEQ ID NO: 56297 - DNA, 50 bp, Clostridium botulinum
  source 1..50: mol_type = genomic DNA
agcatcaattttagatgtaccggatgtgcaatacatctaaaattgatgca

SEQ ID NO: 56298 - DNA, 40 bp, Clostridium botulinum
  source 1..40: mol_type = genomic DNA
cggtggcggttgggccggatgtgcagcagctataagcgct

SEQ ID NO: 56299 - DNA, 40 bp, Clostridium botulinum
  source 1..40: mol_type = genomic DNA
cggtggcggttgggccggatttgcagcagctataagcgct

SEQ ID NO: 56300 - DNA, 50 bp, Clostridium botulinum
  source 1..50: mol_type = genomic DNA
aacatctaaataaaaagaaaaggatttccaataaataatctaatgatgca

SEQ ID NO: 56301 - protein, 407 aa, Clostridium botulinum
MKRIAIYSRKSRETDTGESIKNQIDMCKTYFNRADDDCLFEIFQDEGFSGGNINRPSFQRMLELAKHKQFDIIAVYKVDRVARNIVDFVNIYDELENHDVKLVSITEGFDPSTPIGKMMMMLLASFAEMERMNIAERVRDNMKGLAKIGRWSGGTPPTGYKNKTIINDNGKKESYLELIPEKKQLIISIFRKAADGYTTYQIGKMFNMSPKTVSNILCNPTYVKSDELSANYLKSIGYSVFGELNGNGYLSYNRRPKKKGKKLSNAKGMFTAVSNHEAPIDSKTWIKANNNLKDRATEAKPRISSNSFLAHLVKCSCGSGMYIHTGHAKKDGTKNLYFVCSKKKGGSKCTSRWLRVDGVEKKVLNVFKKISLNPKLLESYLKQKNKHVDYTESIKNIKNKLIKMTKK

SEQ ID NO: 56302 - DNA, 50 bp, Clostridium botulinum; identical to SEQ ID NO: 56297
  source 1..50: mol_type = genomic DNA

SEQ ID NO: 56303 - DNA, 40 bp, Clostridium botulinum; identical to SEQ ID NO: 56298
  source 1..40: mol_type = genomic DNA

SEQ ID NO: 56304 - DNA, 40 bp, Clostridium botulinum; identical to SEQ ID NO: 56299
  source 1..40: mol_type = genomic DNA

SEQ ID NO: 56305 - DNA, 50 bp, Clostridium botulinum; identical to SEQ ID NO: 56300
  source 1..50: mol_type = genomic DNA

SEQ ID NO: 56306 - protein, 544 aa, Burkholderia cepacia
MANLQCGSERAVAYSYVRFSTAKQELGDSLRRQVSMAEDYCAKYGLELHPLSFRDLGVSAFKRKNLERGALAAFIDAVKTGKIQKGSYLVIEQFDRLTRAEIDFALKLLLDLVHSGITVVTLVDERIWNSETVKDLQNLMLAIVFMSRANNESATKADRLSRVWGEKKKAAAESGKIMSRECPRWLAVNEDKSAFLVLEDRVESVRKVFAMRIAGHGVVSIVNRANKEKWPVPGKGETWHISLVGRLLRNRALLGEYQPHSSGLDEDGRVAIGDPVAGYYPAILDEQTFLRAQATRERKAQFPGRRDVNYRNWLQGLLKCTCGQSFVRKNKTSAKQPGYARYYCAARSRGASDCASVGAKEVETAVIYAVSQIAPQFWNGSDRLAELVSLVDVQQVNLTAAQQRRDRFLEAIGMSEEAIPSLLQRLTAAEAEVVAAESVLAATRAEISEMNVNGHDVFENIVKAVANVESLDARAQLREDLSRVLLKCVIDAEAGVVHVHVRGESRPIVIPLRLDANLPGAVMGQMSEEQYVAEYGRSLEQVEQ

SEQ ID NO: 56307 - DNA, 50 bp, Burkholderia cepacia
  source 1..50: mol_type = genomic DNA
tggtgcaattactatttgactatctcattcgttgggtgataattgcacca

SEQ ID NO: 56308 - DNA, 40 bp, Burkholderia cepacia
  source 1..40: mol_type = genomic DNA
caacggcttgccgtcgttctccatcgtcggcctgcccgat

SEQ ID NO: 56309 - DNA, 40 bp, Burkholderia cepacia
  source 1..40: mol_type = genomic DNA
caacggcttgccgtcgttcttcatcgtcggcctgcccgat

SEQ ID NO: 56310 - DNA, 50 bp, Burkholderia cepacia
  source 1..50: mol_type = genomic DNA
tagagcaatgggaactcgcatatattattggttgggtgtaaattgatcca

SEQ ID NO: 56311 - protein, 587 aa, Klebsiella pneumoniae; identical to SEQ ID NO: 17381

SEQ ID NO: 56312 - DNA, 50 bp, Klebsiella pneumoniae
  source 1..50: mol_type = genomic DNA
caatctttttcttgatgtttagggcaccctaatgataaaaatccaatctt

SEQ ID NO: 56313 - DNA, 40 bp, Klebsiella pneumoniae; identical to SEQ ID NO: 5518
  source 1..40: mol_type = genomic DNA

SEQ ID NO: 56314 - DNA, 40 bp, Klebsiella pneumoniae; identical to SEQ ID NO: 24194
  source 1..40: mol_type = genomic DNA

SEQ ID NO: 56315 - DNA, 50 bp, Klebsiella pneumoniae; identical to SEQ ID NO: 24195
  source 1..50: mol_type = genomic DNA

SEQ ID NO: 56316 - protein, 521 aa, Streptomyces alboflavus
MHEVEWSAAELKELEELSLREAQLPPEAPRALLSVRLSVLTDETTSPVRQELDLRRFALLRGCRVVGVARDLNVSATKVPPWKRPELGDWINNRAPEFDQILFWKLDRFVRRISDLHLMIEWCKEFRKILAADKDPIDLDSAYGEMMVTMIAGMARIEAANMEVRLESLWKYARTTERWVIGKPVYGYKSIETQDGRKLVHAPEKVRILRWVFSMLKRKKSMHKITQILNRAQIPAASGGQWHSANLWKILTNPALKGVRTVRPPGAKSKDISRIVYGTDGQPMRVAKHIFTDAEFNEIQNILKSRAKNGAGKNSKTSLFIGVVKCGTCGDNMYKHVTKKKRKSGKVAMYSAIRCASRTKTPCGGPSFPRADDIYGALSDTVLDQIGDYAVVHREYSRGAETLARTTELKESIKHYMSGLAPGGIYHDSGYVTKQAEETLQKLNAELGTIDPDSTVDRWTYNSKGVTYRQHWSSLGVQQMEEDLVRAGITFVLHEGHADLLIPEDVKKRLVVKKDYFKKKI

SEQ ID NO: 56317 - DNA, 50 bp, Streptomyces alboflavus
  source 1..50: mol_type = genomic DNA
ggtgtacagtccgtgtggttcttgggccagatccacacgcgctgtagacg

SEQ ID NO: 56318 - DNA, 40 bp, Streptomyces alboflavus
  source 1..40: mol_type = genomic DNA
ggggcgcatgtggatgtcgggccagaagtccgagtacgcg

SEQ ID NO: 56319 - DNA, 40 bp, Streptomyces alboflavus
  source 1..40: mol_type = genomic DNA
ggggcgcatgtggatgtcgacccagaagtccgagtacgcg

SEQ ID NO: 56320 - DNA, 50 bp, Streptomyces alboflavus
  source 1..50: mol_type = genomic DNA
ggtctcccatttcactgattctggacccagatccagtcagcctgtacccg

SEQ ID NO: 56321 - protein, 537 aa, Streptococcus sobrinus
MQVEGFSLDAQETRIHQYANAFDIEIVKTYQDAGKSGKTMLGRTEFMAMISDIEAEKDKVDYVLVFKLSRFGRNAADTLKSLAIMESHGVNLICVDDGLDSSKDSGKLVITILSAVAEMERENIISQAMEGRRQKARAGQWNGGFAPVGYSLVNGQLQVNHEEAESVKMIFDLFANSDMGTIAIAKHLANLDIKKPIRHNSTLPYFSSSGIARILDNPVYNGKIAFGRRESTRDKISGETKVTQSENYILTDGIHEAIIDDETWKKVRKKREANAHKYKRENPSKNDSIYVLSGLIKCPLCNAGLYGNKSIKRNKNKKDEYYKNYYYYACKHRKHVDGHKCTFNKQLKTGNLDHEVLSIISKLVSRPDFARKLQEKINIQVDTSRIDSEIEQYKSLFRQLNATKLNLIQQIDSLNFEDPHFQQKSIDLDIRLNTIYDKLADVEMLIETSESKREVILKDKMTADNIYKILVNFASFMDVMEDIDKKRLCQMLIEKVEIYDDKNKAGCWVKAIHFKLPIIEEDLEISLDNSTPIEAVV

SEQ ID NO: 56322 - DNA, 50 bp, Streptococcus sobrinus
  source 1..50: mol_type = genomic DNA
agtttggacaatagtacaccgattgaggcggttgttaaattgtccaaacg

SEQ ID NO: 56323 - DNA, 40 bp, Streptococcus sobrinus
  source 1..40: mol_type = genomic DNA
tcctcataccgctcgagttgaggcggttgttaagttgagg

SEQ ID NO: 56324 - DNA, 40 bp, Streptococcus sobrinus
  source 1..40: mol_type = genomic DNA
tcctcataccgctcgagttctggcggttgttaagttgagg

SEQ ID NO: 56325 - DNA, 50 bp, Streptococcus sobrinus
  source 1..50: mol_type = genomic DNA
agcttgcaaaaattttctcccattctgtaggttgtttatttgtcctgacg

SEQ ID NO: 56326 - protein, 538 aa, Streptococcus suis
MQVEGFSLDAQEAKIQQYANAFDIEIVKTYQDAGKSGKTMLGRTEFMNMISDIEAEKDKVDYVLVFKLSRFGRNAADTLKSLAIMESHGVNLICVDDGLDSSKDSGKLVITILSAVAEMERENIISQAMEGRRQKARAGQWNGGFAPVGYSLVNGQLQVNHEEAESVKMIFDLFANSDMGTIAIAKHLANLDIKKPIRHNSTLPYFSSSGIARILDNPVYNGKIAFGRRESTRDKISGETKVTQSENYILTDGIHEAIIDDETWKKVRKKREANAHKYKRENPNKGDSIYILSGLIKCPLCHAGLYGNKSIKRNKNKKDEYYKNYYYYACKHRKHVDGHKCTFNKQLKTGNLDHEVLSIISKLVSRPDFARKLQEKINIQVDTSRIDSEIEQYKSLFRQLSATKMNLIQQIDSLNFEDPHFQQKSIDLDMRLNTIYDKLADVERLIETSESKREVILKDKMTADNIYKILVNFASFMDVMEDIDKKRLCQMLIEKVEIYDDKNKAGRWVKAIHFKLPIIEEDLEISLDNSTPVEAVVK

SEQ ID NO: 56327 - DNA, 50 bp, Streptococcus suis
  source 1..50: mol_type = genomic DNA
agtttggacaatagtacaccggttgagtcggttgttaaattgtccaaacg

SEQ ID NO: 56328 - DNA, 40 bp, Streptococcus suis
  source 1..40: mol_type = genomic DNA
tcctcacacagcacggaccgaggctgttgttaaactaagc

SEQ ID NO: 56329 - DNA, 40 bp, Streptococcus suis
  source 1..40: mol_type = genomic DNA
tcctcacacagcacggaccctggctgttgttaaactaagc

SEQ ID NO: 56330 - DNA, 50 bp, Streptococcus suis; identical to SEQ ID NO: 56325
  source 1..50: mol_type = genomic DNA

SEQ ID NO: 56331 - protein, 452 aa, Listeria seeligeri; identical to SEQ ID NO: 39246

SEQ ID NO: 56332 - DNA, 50 bp, Listeria seeligeri; identical to SEQ ID NO: 39247
  source 1..50: mol_type = genomic DNA

SEQ ID NO: 56333 - DNA, 40 bp, Listeria seeligeri; identical to SEQ ID NO: 21013
  source 1..40: mol_type = genomic DNA

SEQ ID NO: 56334 - DNA, 40 bp, Listeria seeligeri
  source 1..40: mol_type = genomic DNA
ttttggttcaagctacgatctacggaaagagggaaccaag

SEQ ID NO: 56335 - DNA, 50 bp, Listeria seeligeri
  source 1..50: mol_type = genomic DNA
tttggttattttctttctctctctcttcctagaataccaggtaaaataga

SEQ ID NO: 56336 - protein, 538 aa, Butyricicoccus pullicaecorum
MLRQATQNLITALYPRLSKDDDLQGESNSISNQKRILEAYAKQNGFTNLHWYTDDGYSGANFQRPGFQAMLADIEAGKVGTVIVKDMSRLGRNYLQVGFYTEMLFPQKGVRFIAVNDNVDSANGGMDNDFTPLRNLFNEWLVRDTSKKIKAVKKSKGMSGKPVTSKPVYGYLMDGDENFIIDEEAAPVVQQIYQLCLAGNGPTKIARMLTEQQIPTPGTLEYQRTGSTRRYHPGYECKWATNTVVHILENREYTGCLVNFKTEKPSYKVKHSVENPIEKQAIFENHHEPIIDKETWERVQELRKQRKRPNRYDEVGLFSGILFCADCGHVLYQQRYQNKDRKQDCYICGSYKKRTRNCTAHFIRTDLLTAGVLANLRQVTEYAAKHESRFVKLLVQQNEIGGKRKTAAATKQLEQAQERISEISRMIKRLYEDNVNGKISDERFIELSQDYEAEQAELKKRAAALQAELDKSQAATVNAEKFMGIVRKHLAFEELTPTLLREMIEKIVVHECSYDENGTRRQDIEIYYSFVGKIDLPE

SEQ ID NO: 56337 - DNA, 50 bp, Butyricicoccus pullicaecorum
  source 1..50: mol_type = genomic DNA
ttgcttctttatcacacacaagaaaatgctcatgtacggtaaggaagcaa

SEQ ID NO: 56338 - DNA, 40 bp, Butyricicoccus pullicaecorum
  source 1..40: mol_type = genomic DNA
caatgacaaccccggcgcgaagtcccagggtatgaagcag

SEQ ID NO: 56339 - DNA, 40 bp, Butyricicoccus pullicaecorum
  source 1..40: mol_type = genomic DNA
caatgacaaccccggcgcggggtcccagggtatgaagcag

SEQ ID NO: 56340 - DNA, 50 bp, Butyricicoccus pullicaecorum
  source 1..50: mol_type = genomic DNA
tgttctcttttgtacctacaacaaggtgctcatatagaagatggaagaaa

SEQ ID NO: 56341 - protein, 467 aa, Brevibacterium casei
MNAEANDPTIKAAIYARISRDRAGAGLGVERQERDCRQLADRLGWTVAEVYVDNDISAYSGRTRPQYRQMLRDVEAGKITGIIAWHTDRLHRRTVELEEFVAVAEEHGTKVQTVTSGTVDLSTASGRMVARMLGAAAQHEIDHARERMKAKKAQMAREGKYRGGQRPYGFEKDGATVRDDEAEVIRRATKGIIAGRSLRGIADELNAEELTTSTGRSWTYARLRDVLVRPRNAGKLSTGDPGHGEPGILGDAEWPAIVSEEEWTAAYKILTDPSRRIQQGNATRWLGSGIYICGKCGTAMRPAPTRGKYLYRCTAQAHLTVMTEQTDSYVRAVVADLVRDPRIVAALDDDGEEANADRARRAELATRLETFEADYMDGTISGKILRASTDKVQAQIDEIDQRLTASMQRSASSKVTSAEDPGAAFLDAPIDIQRAVLAAVARVEIRPADRAGVRWSEDRVRITPADN

SEQ ID NO: 56342 - DNA, 50 bp, Brevibacterium casei
  source 1..50: mol_type = genomic DNA
gtatgtcaaaagcttggttttgagaggtcaaaaccttagaattgacatat

SEQ ID NO: 56343 - DNA, 40 bp, Brevibacterium casei
  source 1..40: mol_type = genomic DNA
gtcgacgaacggctgtgagaggtcgacgcggcggccggag

SEQ ID NO: 56344 - DNA, 40 bp, Brevibacterium casei
  source 1..40: mol_type = genomic DNA
gtcgacgaacggctgtgagatgtcgacgcggcggccggag

SEQ ID NO: 56345 - DNA, 50 bp, Brevibacterium casei
  source 1..50: mol_type = genomic DNA
gtatgtgacatttatggctttgttatctcaaaagctatctgtggacaaaa

SEQ ID NO: 56346 - protein, 518 aa, Klebsiella variicola
MPKAISYIRFSTKIQSVGDSTKRQSKYINDWLKRNPDYYLDESLRFQDLGISGFSGANAKSGAFAEFLAAVDSGYIEAGSVLLVESLDRVSRQDIDTAGEQLRKILRAGVEVVTLVDNEWYTKESLKDSLSMIKAMLVMERAHEESAMKSTRLRSVWAAKRERAAKGEIMSKRCAAWLKVSEDRSHFDFIPENVKAVQRVFQLRLEGLSHVKIAKQMNDEGFSTLNQFKSVTGGWSQSSVTELLSNRSVIGFKVPSKSMAVKGVAEIPNYYPSIITDEQFYAVQQLKQGSGRRPSSEKPLLTNLFKGVLRCSECGFIMVVAGVSAKRSGIYKCSMKSEGRCNSVGFSRLQTDKALVQGLLYNTNRLLLNRDNGSAIGALQSELEQLQKQRERLIKLSMLADDTESMAKDLKALNSQIKDAEKAVSEVHQREQSSQLETISHLDLTVKKDRIEAQIIIKRIVKEIRLNTAAKKCDVFLHNGLRLLNFPLDRVVDGEIFLEVLPVLDCDEFDFDTYRMIE

SEQ ID NO: 56347 - DNA, 50 bp, Klebsiella variicola
  source 1..50: mol_type = genomic DNA
gtgtatcattagaaaggttatttaaggaatagaccctcttatgatacact

SEQ ID NO: 56348 - DNA, 40 bp, Klebsiella variicola; identical to SEQ ID NO: 33068
  source 1..40: mol_type = genomic DNA

SEQ ID NO: 56349 - DNA, 40 bp, Klebsiella variicola
  source 1..40: mol_type = genomic DNA
gtggaccgggcggctatcgacgatcacgcggttaacgttg

SEQ ID NO: 56350 - DNA, 50 bp, Klebsiella variicola
  source 1..50: mol_type = genomic DNA
atgtatcactgtgaaaattatttaacaaataaatatgcattcgatacact

SEQ ID NO: 56351 - protein, 518 aa, Raoultella ornithinolytica
MPKAISYIRFSTKIQSVGDSTKRQSKYINDWLKRNPDYYLDESLRFQDLGISGFSGANAKSGAFGEFLAAVDSGYIEANSVLLVESLDRVSRQDIDTAGEQLRKILRAGVEVVTLVDNEWYTKESLKDSLSMIKAMLVMERAHEESAMKSTRLRSVWAAKRERAANGEIMSKRCAAWLKVSEDRSHFEFIPENVKAVQRVFQLRLEGLSHVKIAKQMNDEGFSTLNQFKSVTGGWSQSSVTELLSNRSVIGFKVPSKSMAVKGVSEIPNYYPSIITDEQFYAVQQLKQGSGRRPSSEKPLLTNLFKGVLRCSECGFIMVVAGVTAKRSGIYKCSMKSEGRCNSVGFSRLQTDKALVQGLLYNTNRLLLNRDNGSAIGALQSELEQLQKQRERLIKLSMLTDDTESMARDLKALNSQIKDAEKAVSEVHQREQSSQLETISHLDLTVKKDRIEAQIIIKRIVKEIRLNTAAKKCDVFLHNGLKLVNFPLDRVVDGEIFLEVLPVLDCDEFDFDTYRMIE

SEQ ID NO: 56352 - DNA, 50 bp, Raoultella ornithinolytica; identical to SEQ ID NO: 56347
  source 1..50: mol_type = genomic DNA

SEQ ID NO: 56353 - DNA, 40 bp, Raoultella ornithinolytica; identical to SEQ ID NO: 33093
  source 1..40: mol_type = genomic DNA

SEQ ID NO: 56354 - DNA, 40 bp, Raoultella ornithinolytica
  source 1..40: mol_type = genomic DNA
atgcaccgggcggctgtcgacgatggcgcgattcacgtga

SEQ ID NO: 56355 - DNA, 50 bp, Raoultella ornithinolytica; identical to SEQ ID NO: 56350
  source 1..50: mol_type = genomic DNA

SEQ ID NO: 56356 - protein, 518 aa, Klebsiella pneumoniae; identical to SEQ ID NO: 21381

SEQ ID NO: 56357 - DNA, 50 bp, Klebsiella pneumoniae
  source 1..50: mol_type = genomic DNA
gtgtatcattagaaaggttatttaaggaatataccctcttatgatacact

SEQ ID NO: 56358 - DNA, 40 bp, Klebsiella pneumoniae; identical to SEQ ID NO: 8148
  source 1..40: mol_type = genomic DNA

SEQ ID NO: 56359 - DNA, 40 bp, Klebsiella pneumoniae
  source 1..40: mol_type = genomic DNA
atggaccgggcggctgtcgacgatcacgcggttgacgtta

SEQ ID NO: 56360 - DNA, 50 bp, Klebsiella pneumoniae; identical to SEQ ID NO: 56350
  source 1..50: mol_type = genomic DNA

SEQ ID NO: 56361 - protein, 518 aa, Escherichia coli; identical to SEQ ID NO: 25816

SEQ ID NO: 56362 - DNA, 50 bp, Escherichia coli; identical to SEQ ID NO: 56357
  source 1..50: mol_type = genomic DNA

SEQ ID NO: 56363 - DNA, 40 bp, Escherichia coli; identical to SEQ ID NO: 28658
  source 1..40: mol_type = genomic DNA

SEQ ID NO: 56364 - DNA, 40 bp, Escherichia coli
  source 1..40: mol_type = genomic DNA
tgaaccgggcggctgtctaacatcacccgattaacgccgc

SEQ ID NO: 56365 - DNA, 50 bp, Escherichia coli; identical to SEQ ID NO: 56350
  source 1..50: mol_type = genomic DNA

SEQ ID NO: 56366 - protein, 518 aa, Klebsiella variicola
MPKAISYIRFSTKIQSVGDSTKRQSKYINDWLKRNPDYYLDESLRFQDLGISGFSGANAKSGAFGEFLAAVDSGYIEANSVLLVESLDRVSRQDIDTAGEQLRKILRAGVEVVTLVDNEWYTKESLKDSLSMIKAMLVMERAHEESAMKSTRLRSVWAAKRERAANGEIMSKRCAAWLKVSEDRSHFEFIPENVKAVQRVFQLRLEGLSHVKIAKQMNDEGFSTLNQFKSVTGGWSQSSVTELLSNRSVIGFKVPSKSMAVKGVSEIPNYYPSIITDEQFYAVQQLKQGSGRRPSSEKPLLTNLFKGVLRCSECGFIMVVAGVTAKRSGIYKCSMKSEGRCNSVGFSRLQTDKALVQGLLYNTNRLLLNRDNGSAIGALQSELEQLQKQRERLIKLSMLTDDTESMARDLKALNSQIKDAEKAVSEVHQREQSSQLETISHLDLTVKKDRIEAQIIIKRIVKEIRLNTAAKKCDVFLHNGLKLLNFPLDRVVDGEIFLEVLPVLDCDEFDFDTYRMIE

SEQ ID NO: 56367 - DNA, 50 bp, Klebsiella variicola; identical to SEQ ID NO: 56347
  source 1..50: mol_type = genomic DNA

SEQ ID NO: 56368 - DNA, 40 bp, Klebsiella variicola; identical to SEQ ID NO: 33068
  source 1..40: mol_type = genomic DNA

SEQ ID NO: 56369 - DNA, 40 bp, Klebsiella variicola; identical to SEQ ID NO: 56349
  source 1..40: mol_type = genomic DNA

SEQ ID NO: 56370 - DNA, 50 bp, Klebsiella variicola; identical to SEQ ID NO: 56350
  source 1..50: mol_type = genomic DNA

SEQ ID NO: 56371 - protein, 489 aa, Faecalibacterium prausnitzii
MTAVIYARYSSDSQREASIEGQLRDCKDYAEKNGITVVGTYIDRAYSAKTDDRPDFQRMIKDSGKKIFDVVLVWKLDRFARNRFDAVNYKYQLEKNGVHLVSAMEPISQGPEGIMVESMLIGMAEYYSAELALKVARGERENALQCKYNGGVVPLGFTIGKEDRLYHIDPETAPIVQEIFSRYANGEPAEKIAASLNERGLRTRTGKPFVKNSFFQIFRNRRYIGEYRYKDIVTPGGIPAIVDQDLFDRVQQRFEQNRIAHGRPAKEDVSYLLTTKLFCGKCGTLMGGESGTSHMGNTYYYYKCGKAKRHGKAHCDLKAIRKEPLERFVVETAIKVIFSDEIIERLIDLIMEAQQQENTRLPVLKEQLRDTEKRLANLLEAIEQGILTPTTKQRLDELEAQKEALNTSILEEELKKPVLTREWIRFWLEKFRKGDVGSTEHQRQIIDTFVNSVYVFDDRVVLNFNFTDDAKMVTREEVLGSSAVENAPP

SEQ ID NO: 56372 - DNA, 50 bp, Faecalibacterium prausnitzii; identical to SEQ ID NO: 42612
  source 1..50: mol_type = genomic DNA

SEQ ID NO: 56373 - DNA, 40 bp, Faecalibacterium prausnitzii
  source 1..40: mol_type = genomic DNA
ggttcgaatccctcatggcccaccaaaaaagcacgagatt

SEQ ID NO: 56374 - DNA, 40 bp, Faecalibacterium prausnitzii
  source 1..40: mol_type = genomic DNA
ggttcgaatccctcatggcgaaccaaaaaagcacgagatt

SEQ ID NO: 56375 - DNA, 50 bp, Faecalibacterium prausnitzii
  source 1..50: mol_type = genomic DNA
ggttctactggtctggagaacgctgactcatacattgactaataggatcc

SEQ ID NO: 56376 - protein, 547 aa, Ruthenibacterium lactatiformans
MNTYPDNITALYARLSQEAALDGESNSIANQKKILLKYATNNGFPNLTFFIDDGISGVTFDRPGWNEMIRLAEAGKVKMVIVKGISRMGRDYLKVGYYTESFFAERDIRYIAINDGVDSDKGDNDFTPFRNLFNNFYARDTSKKIRAIMRAKGNAGEYLCSNPPYGYVKDPTDKKKWIVDEEAAEIVKRIFDLCVARKGLMQIAKVLTADKVLTVNAYYAKRDGKPMPDNLYRWSVETIRGILERPEYMGCTVNFKTYSKSHKLKKRLQNALENYRIFPDTQPAIVNRNVFERVQELRANKRRPAKQTERQGLFSDLLYCADCGSKLHFATGKNMTPEQDCYRCARYKSNPGDCTMHFIREETLKRFMLRRIFDVTAMFFEDIMSFQKAVYEQRFEEAEKTTKKRKREISQAEKRIAELDRIFKRIYEDDISGVISHERFLKLSAEYEAEQKELTEKVRVGWEMVSTYEQDKADFDSFAAVIRKYVGITELTPTIVNEFVKKIIVHALDKSSGHRRQKIQIIWNFVGELKQDEDRQTIERERKSRTA

SEQ ID NO: 56377 - DNA, 50 bp, Ruthenibacterium lactatiformans
  source 1..50: mol_type = genomic DNA
ttacttccttatgagtgtgttgctaatgtcaaccaccgataaggaagtat

SEQ ID NO: 56378 - DNA, 40 bp, Ruthenibacterium lactatiformans
  source 1..40: mol_type = genomic DNA
ataaaagcgcggcgtctcgaatgagacgccgcgcttattt

SEQ ID NO: 56379 - DNA, 40 bp, Ruthenibacterium lactatiformans
  source 1..40: mol_type = genomic DNA
ataaaagcgcggcgtctcgtttgagacgccgcgcttattt

SEQ ID NO: 56380 - DNA, 50 bp, Ruthenibacterium lactatiformans
  source 1..50: mol_type = genomic DNA
tttcttccctccatgagtgttccttttatctgctacaccaccggaaatat

SEQ ID NO: 56381 - protein, 698 aa, Faecalibacterium prausnitzii
MPKEPKITALYERLSRDDDLAGESNSITNQKKYLEDYAQKNGFKNIRHFTDDGFSGVNFNRPGFQSLIKEVEAGNVETLIVKDMSRLGRNYLQVGFYTEILFPQKNVRFLAINNSIDSNNASDNDFAPFLNIMNEWYAKDTSNKIKAVFDARMKDGKRCSGSIPYGYNRLPNDKQTLVVDPVASEVVKRIFLLANEGKSPRTIAELLTEEKVLIPAAYAKKYHPEQYNGTKFSNPYLWGTSSVRTILGRQEYLGHTVLRKSVSTNFKLHKRKETDEDEQYVFQNTHEPIISQELWDSVQKRRCRVNRASAWGTHTNRLSGYLYCADCGRRLTLQTHYSKKDGSTQYSYRCGGYASRVNGCTAHSISADNVEALILASVKRFSRFVLKDEETFALELQSLWKEKREEKPKQNQSELKRCQKRYDELSALIRSLYENLMAGLLPERQYKQLMAQYDGEQAELESKMETMKSEIAEDKSSSADIRHFISLIRKCKNPTEISDSMFNELVDKIVVYEAEGAGNARTQKVDIYFNYVGQVDIAYTEEELAELKAQKEQEERQRMEKQRKREKAYREKRKAKKIAKNGGEIIKTKTCPHCGKVFTPTSNRQLFCSRECWNQARLEQKKADREAERGTHYYRQCTCAVCGHSYWPTHSQQEFCSDECRRINHNRKTLEFYHKKKGNLKPNPEATPTPKPKEDNAA

SEQ ID NO: 56382 - DNA, 50 bp, Faecalibacterium prausnitzii
  source 1..50: mol_type = genomic DNA
aaacctcttgacgaagtccagcccgaaggctatacttaatcaggacaata

SEQ ID NO: 56383 - DNA, 40 bp, Faecalibacterium prausnitzii
  source 1..40: mol_type = genomic DNA
tgccatcgaacttgccccagaaggcaccggataccgtgcg

SEQ ID NO: 56384 - DNA, 40 bp, Faecalibacterium prausnitzii
  source 1..40: mol_type = genomic DNA
tgccatcgaacttgccccaacaggcaccggataccgtgcg

SEQ ID NO: 56385 - DNA, 50 bp, Faecalibacterium prausnitzii
  source 1..50: mol_type = genomic DNA
aaacatcttcccgcagtccaagctacttgacaggctgagataggacaata

SEQ ID NO: 56386 - protein, 511 aa, Burkholderia vietnamiensis
MKPTRPRAYSYLRFSTPEQLKGDSYRRQTTMALEYAARHGLALDQDLTFEDLGVSAYRGANAEAGRLGEFLEAVRVGLVPRGSYLLVEALDRLSRLSPRKAVRVLEDIVEEGITVVTLNDGREYTEGNLDDDPTSLLIAIVLFMRVNEESATKSRRLKAAWEGKRQNIDDRPLTAVTPAWVYLNETTGKLELIPDRAAIVRRIFDMYVAGVGYASIAETFNREGIACFGRAQHWHRTYVRKILTNDAVIGNFTPHRIVHEGGKKVRVPLEKVPGYFPPVVSNEVFARAQAQLGGGSRPAPKHRGTGVSNLIAGLARCPLCGSTMTRVTKGSGPKGGKPKLICTKAKAGAGCQYHAVPLENVETAIVENASFIAGTVPSGREGLDADLDAAEVRIAATQDEIENLLQALAAAPSTAIAERIRDLELSLDALRTERDGLAGQLVAANGPLLAKRVEDLRVTLEADPMDRAKANAALRLLLSSVTVDYEHGKLMLEWKHGGETGVVYAMPRDVR

SEQ ID NO: 56387 - DNA, 50 bp, Burkholderia vietnamiensis
  source 1..50: mol_type = genomic DNA
gcagggtcttgtgaagacaacatgagcatggtattttcaaaggacccctt

SEQ ID NO: 56388 - DNA, 40 bp, Burkholderia vietnamiensis; identical to SEQ ID NO: 52028
  source 1..40: mol_type = genomic DNA

SEQ ID NO: 56389 - DNA, 40 bp, Burkholderia vietnamiensis
  source 1..40: mol_type = genomic DNA
gccgggcggaccgatcatctccatgtggtggccgcccgcg

SEQ ID NO: 56390 - DNA, 50 bp, Burkholderia vietnamiensis
  source 1..50: mol_type = genomic DNA
gcagagtttagttgtgacaagaagtcaatggtatttactatctggccctt

SEQ ID NO: 56391 - protein, 607 aa, Streptococcus pneumoniae; identical to SEQ ID NO: 10731

SEQ ID NO: 56392 - DNA, 50 bp, Streptococcus pneumoniae; identical to SEQ ID NO: 9827
  source 1..50: mol_type = genomic DNA

SEQ ID NO: 56393 - DNA, 40 bp, Streptococcus pneumoniae; identical to SEQ ID NO: 32783
  source 1..40: mol_type = genomic DNA

SEQ ID NO: 56394 - DNA, 40 bp, Streptococcus pneumoniae
  source 1..40: mol_type = genomic DNA
tctatttcctcaaacgcatagcgtcgagacggtagcactt

SEQ ID NO: 56395 - DNA, 50 bp, Streptococcus pneumoniae
  source 1..50: mol_type = genomic DNA
tgtattcctccaacaaagaaaataagtatgaattgccaaagagtgataga

SEQ ID NO: 56396 - protein, 607 aa, Streptococcus pneumoniae; identical to SEQ ID NO: 37106

SEQ ID NO: 56397 - DNA, 50 bp, Streptococcus pneumoniae; identical to SEQ ID NO: 9827
  source 1..50: mol_type = genomic DNA

SEQ ID NO: 56398 - DNA, 40 bp, Streptococcus pneumoniae; identical to SEQ ID NO: 32783
  source 1..40: mol_type = genomic DNA

SEQ ID NO: 56399 - DNA, 40 bp, Streptococcus pneumoniae; identical to SEQ ID NO: 56394
  source 1..40: mol_type = genomic DNA

SEQ ID NO: 56400 - DNA, 50 bp, Streptococcus pneumoniae; identical to SEQ ID NO: 56395
  source 1..50: mol_type = genomic DNA

SEQ ID NO: 56401 - protein, 567 aa, Rahnella aquatilis
MAIKKIKSYLYTRISSLQQQAGYGIERQINTVMDFLSEASLPAGLGYELDPNDYELLESDLGKSAYKGHNFTKGELGRFKEKVVKGEITEGILLIENVDRFSRLPDYEAIEHFNALIKRGIDVLEVESGQVFSTKLDGTLSKLAVSIERSHQESKRKARLTTRNWEKMKRNALETGKALKNNCPNWLSIRDEQYEIDEPMVAIMKVAFERFAEGYSAASVVRFMNDSNQLINNRKWSTMNIYHMFRNRRLIGYIDKVKYYPAVIELELFNRVQSMIGSSNKSQKTTQHQRSIFNGITKCALCGSGMIVHSTGKGILYLRCIGERSQNGCKNGLIRYPVVERILLNHINKLDLSRIYNSGNDVSVIGELHNKLASLNHSIQEYQSELEGADDIVVLQLARVLKKLNTERDELASKIAGHNLTSYEKVDYDIESIVNQENWELRQKANIELKKIIKQIQVQRRGDEKVLYLINIQYYTDILKHVLIMNNSGSLISEITITEKENERIYQVREDGETVFKVESDGDAWVLNASRTKKIDDLLTYISVMMVGREPEGFVYQLNEDQIEWID

SEQ ID NO: 56402 - DNA, 50 bp, Rahnella aquatilis
  source 1..50: mol_type = genomic DNA
gtatgtaaaagattgttgtgcttcttcaagcgttgcgtataatgacatac

SEQ ID NO: 56403 - DNA, 40 bp, Rahnella aquatilis
  source 1..40: mol_type = genomic DNA
gggcggcatcaatagcttcttcaagcgttgcatacatgct

SEQ ID NO: 56404 - DNA, 40 bp, Rahnella aquatilis
  source 1..40: mol_type = genomic DNA
gggcggcatcaatagcttccccaagcgttgcatacatgct

SEQ ID NO: 56405 - DNA, 50 bp, Rahnella aquatilis
  source 1..50: mol_type = genomic DNA
ggaagtcaaagactgttgtgcttccctaatcgtggtagggaatgaatgac

SEQ ID NO: 56406 - protein, 561 aa, Pantoea sp PSNIH1
MCKKLVIFYKRVSTQAQVTDRDGLLRQQRAFDEWWSKLPDRGDYDLEEYADEGVSAFSGANVNGGNLGKINQRVFNGEIPRDSILVIHDSSRFSRRDRRETLSDLWRYHALGVSIFSLMENRFINGDDIGTDLITMLGADSNHSYSDRISKFVGAAKAKEQHEVRLQKKGVFRGSVPHWLKRKDGEYQTQPEHFEVSPDASRVIQRIFEMRYNRMSMIAIAATLNSEGVPTITQRDFRRKSNPVGWTPSTIKNLLRNVAVIGTLAESSRKGSVYPAVPDYYPAIVDSALFEAVQLTLTKGKQTSLADGDESNPYAIRIFKSLLICKFCGQKMDVNGARGALSSRGTPFAGSLICRNARNLSCMHGKDGGRTPTVPMRIVENALTEGLFQQLNQTNIRNDITRQIAKKRQQLDTLKNTIDRGAEDLMKDGLPDIMRNAILERMTFAGKHYEELQSELLEMESKQRLQSVDNLGGLDLMTRDGRIAAYNTIVKTISKIVVDTVEQKCDVHLLNGNMITGFSFQPHPLYPEDAETYAKNQMSQLADDEFGLLTGLTGQSSVKLD

SEQ ID NO: 56407 - DNA, 50 bp, Pantoea sp PSNIH1
  source 1..50: mol_type = genomic DNA
caggtattataaagaacatcaatccagattgagtatccgcttgatagcaa

SEQ ID NO: 56408 - DNA, 40 bp, Pantoea sp PSNIH1
  source 1..40: mol_type = genomic DNA
ctgatacgcgttaactatccagattgattcagccgggctg

SEQ ID NO: 56409 - DNA, 40 bp, Pantoea sp PSNIH1
  source 1..40: mol_type = genomic DNA
ctgatacgcgttaactatctggattgattcagccgggctg

SEQ ID NO: 56410 - DNA, 50 bp, Pantoea sp PSNIH1
  source 1..50: mol_type = genomic DNA
gagctattaatagttacagcaatttggacaaagtatgctcttgtgagcaa

SEQ ID NO: 56411 - protein, 559 aa, Flavonifractor plautii; identical to SEQ ID NO: 3161

SEQ ID NO: 56412 - DNA, 50 bp, Flavonifractor plautii; identical to SEQ ID NO: 18022
  source 1..50: mol_type = genomic DNA

SEQ ID NO: 56413 - DNA, 40 bp, Flavonifractor plautii
  source 1..40: mol_type = genomic DNA
aaattaggggtatcaggcgtaggtttgatgtccttgatgt

SEQ ID NO: 56414 - DNA, 40 bp, Flavonifractor plautii; identical to SEQ ID NO: 56413
  source 1..40: mol_type = genomic DNA

SEQ ID NO: 56415 - DNA, 50 bp, Flavonifractor plautii
  source 1..50: mol_type = genomic DNA
tgttttccaaagaacaaacatctatatgattgtttatttgctgaatttct

SEQ ID NO: 56416 - protein, 507 aa, Salmonella enterica
MKRVISYIRFSSERQAKGDSLRRQSKMVNDWLKAHPEYYLDQDLSFRDLGVSGFTGKHLKGGLGDFLTAIEKGLVKAGDTLLIESLDRLSRQDIDIASELLRNILRSGVDVVTLSDGEHYTKESLKDPLALIKSILIMQRAHEESLRKSERVQAAWDAKKEAAKAGIKISKRCPAWLKLNDDRKSFSIIPEKVETIKRCFELRLEGRSIWDIVRTLNDEGHQTMNQYKPGKFGQTSVQDLLKNRSVIGYFTPKGYEEIAGYYPSVIDETTFYRVQQLAYSRYGRKPVSENPMAVNLFKGIIRCSKCGHALIITGFSEKRSGIYRCPCKQENRCDAKGLSRKQTDGTLLALLSRIDRFEPEQVNLVDGLKLQREGILKNIEKLVELSLVVDDMTAITSKLKQLKSDLSLIESDIEKENQRIKSIDTGALSDCDMSKKAGRIEAQLIIRGVVKEAILDTANKRCKVIFHNSKVIELPISENPSEDVTDAIQSITEIAEKDLLEVDGFQL

SEQ ID NO: 56417 - DNA, 50 bp, Salmonella enterica
  source 1..50: mol_type = genomic DNA
aggtgtatttagaccttgctaatcctcgacagacacgtttaaatacacca

SEQ ID NO: 56418 - DNA, 40 bp, Salmonella enterica; identical to SEQ ID NO: 22693
  source 1..40: mol_type = genomic DNA

SEQ ID NO: 56419 - DNA, 40 bp, Salmonella enterica; identical to SEQ ID NO: 52449
  source 1..40: mol_type = genomic DNA

SEQ ID NO: 56420 - DNA, 50 bp, Salmonella enterica
  source 1..50: mol_type = genomic DNA
atgtgtattaataaattgctagtacatgactgacaattaaaaattatcca

SEQ ID NO: 56421 - protein, 512 aa, Roseovarius sp
MIVLNPNQPKKRCVIYLRVSSVKQTSDGAGLSSQERSCREYAERNRYEVVEVFKDVISGRFAERPGMNALLAYLKSVDASNYVVVVDDISRFARAVSTHAALRDKIIASGAKIESPNQKFGEDSGSRFIETIMAAIAEHDRERNAEQSHRRTIARLQNGYWVFHAPLGYRYEKAPGGGKMMVRDEPLASIVTEALEGYASGRFQTQVEVKRFLDAKPEFPKSYRGTEVHFDKVKRLLNNVLYAGYLQFPKWDIPLTMAKHEALISYSTHQIIVERLAEKSVAPARKDISADFPLRGFLLCDECGRRLTACWAQSHTGKKYPYYLCHHRSCARKGKSIPRDQIERQFEELLKRLTPARTTLELARSMFKEAWEVRSANASAEAKRLLQRSRNIQREIDGFLARLVKTENERLISAYEDRISELEQERALCEDEASRVATPAHPFDEMFELAMRFLSSPFDIWKNGDLAVKKTVLRLAFSQPLVVSSNKGVQTGETTFPFKALEFLSASNSKVV

SEQ ID NO: 56422 - DNA, 50 bp, Roseovarius sp
  source 1..50: mol_type = genomic DNA
ctatcagcctcaaattctaaggtggtgcacctaaagcgacaaacttcaaa

SEQ ID NO: 56423 - DNA, 40 bp, Roseovarius sp
  source 1..40: mol_type = genomic DNA
cttcggccacaaggccgtggtgcgggcggccggacttgaa

SEQ ID NO: 56424 - DNA, 40 bp, Roseovarius sp
  source 1..40: mol_type = genomic DNA
cttcggccacaaggccgtgcagcgggcggccggacttgaa

SEQ ID NO: 56425 - DNA, 50 bp, Roseovarius sp
  source 1..50: mol_type = genomic DNA
ctatcagtcaattttactatgaagcatcaattaaatacttaaatttcaaa

SEQ ID NO: 56426 - protein, 525 aa, Aeromonas veronii; identical to SEQ ID NO: 25906

SEQ ID NO: 56427 - DNA, 50 bp, Aeromonas veronii
  source 1..50: mol_type = genomic DNA
gtttcccactaaaatcagttaactgtggtatactgctattggtagagaac

SEQ ID NO: 56428 - DNA, 40 bp, Aeromonas veronii
  source 1..40: mol_type = genomic DNA
ggcgggggccagattgacggtgatgtgtttgctcgggaac

SEQ ID NO: 56429 - DNA, 40 bp, Aeromonas veronii
  source 1..40: mol_type = genomic DNA
ggcgggggccagattgacgaggatgtgtttgctcgggaac

SEQ ID NO: 56430 - DNA, 50 bp, Aeromonas veronii
  source 1..50: mol_type = genomic DNA
gtcttccattgactttagctaactagcctatactgggaaacttagataac

SEQ ID NO: 56431 - protein, 469 aa, Glutamicibacter nicotianae
MPKNPQKTAVIYARISKDEQGTFSGVERQRQDCLDLAQQRGLQVTQIYIDNDISAYSGAVRPQYRRMLEELQTRKPDYVIAWHTDRLHRHPKELEEYIELTDKADASTLTVKAGELDLSTPSGKAVARTLGAWARFESEHKSDRIKRKKLQLAKDGRYVGGPVPYGYSKLPDKTLVLHPEESKDVAKAFKRFLNGASIDSIVRDFNSRGLKTRRGLEWNHTAMRNMLKRATYAGKSTHQGQVIGDGLQPAIVSEADWLAACQILQDPSRRRNAESKVRRLLAGIVQCAECGTPMKGSTRSSKAAVKNKDYYKCPSRGYGHSFQTADPIDTMITELVLERLSDNDVRRKLSAPDNPERVAELQTELVTLRSRLEQASESFAEGLIEKSQLATITATLRGKIQGAQNELATLSSGSAVPPVDDGEIRGWWEKASIEARRAVIKSMMAITLSPVKVSAPRRFDPRRVVIDWK

SEQ ID NO: 56432 - DNA, 50 bp, Glutamicibacter nicotianae
  source 1..50: mol_type = genomic DNA
tgctgtgtcctaacgtagtcgccactaggtagaaatgtcaagacacagca

SEQ ID NO: 56433 - DNA, 40 bp, Glutamicibacter nicotianae
  source 1..40: mol_type = genomic DNA
cgtcttgatggtgaagtcgctggtgatgttcggtccggca

SEQ ID NO: 56434 - DNA, 40 bp, Glutamicibacter nicotianae
  source 1..40: mol_type = genomic DNA
cgtcttgatggtgaagtcggaggtgatgttcggtccggca

SEQ ID NO: 56435 - DNA, 50 bp, Glutamicibacter nicotianae
  source 1..50: mol_type = genomic DNA
tgatatgtccaggtggagtctcctgaaggtagcaattttaagaaagagat

SEQ ID NO: 56436 - protein, 537 aa, Enterococcus faecium; identical to SEQ ID NO: 36661

SEQ ID NO: 56437 - DNA, 50 bp, Enterococcus faecium; identical to SEQ ID NO: 45192
  source 1..50: mol_type = genomic DNA

SEQ ID NO: 56438 - DNA, 40 bp, Enterococcus faecium
  source 1..40: mol_type = genomic DNA
atacccctgctttacatgatccgacgttcgattttgatat

SEQ ID NO: 56439 - DNA, 40 bp, Enterococcus faecium
  source 1..40: mol_type = genomic DNA
atacccctgctttacatgaggcgacgttcgattttgatat

SEQ ID NO: 56440 - DNA, 50 bp, Enterococcus faecium
  source 1..50: mol_type = genomic DNA
ctgtgtccacacagcatacattcgggtgacgaaaagagatgtataagcaa

SEQ ID NO: 56441 - protein, 629 aa, Edwardsiella piscicida
MPQLYSYIRWSSDRQDKGTTKSRQVAAAKAYAEEAGLEMVEIIEPGVSAFRGKNRAGKLGDFIDAVKNNAIPADSWLYCENLDRLSRDQVDEALRLFLELIGLGLTIVTGMDRKVYNRESIRQNPTDLMISILMFIRGNEESETKSNRTIGNVVALVERHKAGLPVNIKSVGRHPFWLDDSGSQYEAVKEHPVYWSIAREAIDMFLAGNGIYTVKRYLDDKYPNGLKGKEWDYQVLKKMRDNRALIGERTITAGGATYKLDNYYPWLCRDEAEFLTLAERKQQNNYKAKKDKAEEIKLLSGLQVLRCSKCGGTMHSFMNHGSVRYICTNGVHLQKKCSGWSISAPLVEHCTMISLLIGYMDKSRKDGINNTAIEEEISRKATLLSDLKSRISNMAKAIAIAPEVSELAVQLNLFDLERKQAVLELDKLKERLHSLKGKGSLEVDITDFLMLIQWSVFTNMEDTDRNKIRKIISSIIESIVVDKTDGCITIKIKCHHKDEWLVFGGVNRKPFWAFTIEYSTNDAIDIEGEDSSYFVSNPLFQKAIEQLDSIKQSYLNLFETANTMLGVVGYSDIRGASFWPNTGQYERANVEYEGITYSIAMNGRVPKAITAALEATGLSRKDFIEYYRV

SEQ ID NO: 56442 - DNA, 50 bp, Edwardsiella piscicida
  source 1..50: mol_type = genomic DNA
agctttatttcttgattcttaggacaccctaatgatataaatccaatctt

SEQ ID NO: 56443 - DNA, 40 bp, Edwardsiella piscicida
  source 1..40: mol_type = genomic DNA
gtcgaccaggttttttgggcagccgagggagacaaaaccg

SEQ ID NO: 56444 - DNA, 40 bp, Edwardsiella piscicida
  source 1..40: mol_type = genomic DNA
gtcgaccaggttttttgggtggccgagggagacaaaaccg

SEQ ID NO: 56445 - DNA, 50 bp, Edwardsiella piscicida
  source 1..50: mol_type = genomic DNA
agctttattattgaattcttactatgttccaaacattgtgcttagatctt

SEQ ID NO: 56446 - protein, 529 aa, Salmonella enterica; identical to SEQ ID NO: 35296

SEQ ID NO: 56447 - DNA, 50 bp, Salmonella enterica
  source 1..50: mol_type = genomic DNA
gtacttactataccaattgtagcagttgatgtataatgtacgccacagta

SEQ ID NO: 56448 - DNA, 40 bp, Salmonella enterica; identical to SEQ ID NO: 20888
  source 1..40: mol_type = genomic DNA

SEQ ID NO: 56449 - DNA, 40 bp, Salmonella enterica
  source 1..40: mol_type = genomic DNA
ccatcagcagcatggaacaaacggtggtgccgccgccaat

SEQ ID NO: 56450 - DNA, 50 bp, Salmonella enterica
  source 1..50: mol_type = genomic DNA
gaacttactcaagaaattgtagctaattaaatataattatcatcactatt

SEQ ID NO: 56451 - protein, 575 aa, Vibrio parahaemolyticus
MTKMAYSYTRLSTEKQINGHGFTRQREAIEKVCCQYGWQLSDQTFNDLGVSAWKGANATTGALSQFIDLAKKGAIRPNSVLIVESVDRLSRQQVDKSLRLMLELLEVGVSIFTLSDSKLYTTNSDSVMLDLMMWLMTAQRAHEESEIKSLRVRAAKKKNKELIRKGVIVTRKCPEWLTVSDDKSCFLVNNERAEIVRKIFTWYSQGFSTKPIALKLNELGIPYWGKSSTWSYRHIRSLLKHRGVIGEIQLLKRIDGRDVSDGDPVEDYYPAIIDRGLWATCQQIKSSKTTAKGRIVERGMANLFRGLLKCECGSGLAINSSTVKGRTYRFLRCSQLKTTGCQAKNWHYEKTERILLIALRHSLSSFCEEDHAVSLRESQHYLARINEELQEKERQAENAINYLLDKPSRLLEARLQTLEDDIARLKAIQEQAEHRLEAVHYEKSTALDKVEELQRVLEDIANDDDSRHKANGLLRRLIDTVTLGSISNPRSKEFMELSGNECHGLIVIKRRDGLEVRVEVLKNYELSISWEGDEFTVIECSPTQQPNSQHVPQKFINVGEQTVDLWDDEGWVASS

SEQ ID NO: 56452 - DNA, 50 bp, Vibrio parahaemolyticus; identical to SEQ ID NO: 38652
  source 1..50: mol_type = genomic DNA

SEQ ID NO: 56453 - DNA, 40 bp, Vibrio parahaemolyticus; identical to SEQ ID NO: 4428
  source 1..40: mol_type = genomic DNA

SEQ ID NO: 56454 - DNA, 40 bp, Vibrio parahaemolyticus
  source 1..40: mol_type = genomic DNA
atttggctggcatgtggtccaggttctctacagaacatag

SEQ ID NO: 56455 - DNA, 50 bp, Vibrio parahaemolyticus
  source 1..50: mol_type = genomic DNA
gtttgggaacctttaactaggtttcagcagatgtatggaaatgcctggac

SEQ ID NO: 56456 - protein, 479 aa, Mycobacterium avium; identical to SEQ ID NO: 50666

SEQ ID NO: 56457 - DNA, 50 bp, Mycobacterium avium
  source 1..50: mol_type = genomic DNA
tccactaaacggggtcaagcccaacactggggttgacccctgatggtgga

SEQ ID NO: 56458 - DNA, 40 bp, Mycobacterium avium
  source 1..40: mol_type = genomic DNA
cgcactcaaatgcggtcaacaccacaggtacgtcggctga

SEQ ID NO: 56459 - DNA, 40 bp, Mycobacterium avium
  source 1..40: mol_type = genomic DNA
cgcactcaaatgcggtcaatgccacaggtacgtcggctga

SEQ ID NO: 56460 - DNA, 50 bp, Mycobacterium avium
  source 1..50: mol_type = genomic DNA
tccactaagatgaggaaaaaccagtgtaggggttcagtcaggatggtggg

SEQ ID NO: 56461 - protein, 552 aa, Pseudomonas aeruginosa
MARLISYLRMSTSEQLKGFSLERQRKLIADFAAKNGLSLDESHSIEDIGRSSFSDDAEQKQLARFFEDLDAGKFSPGDVFALENIDRLTRRGAIDALLKVNTILSKGLKLAIISDREQRILEEIDVFSIITLSIDAARSHSESKNKSDKGLLNWEEKRNLAATQKIAMTAQAPAWLDTETFYVMDESKGKQIKRRRYVLNPEKAGTVKLIFELFQNGNGSLKIKNILNDRKIPTFKGAEYWEPSVISKILRNPATHGFYQPQKQRTGKRDLVPAGDPIEDYFPAIVSRETFEQCQRITAANSTRKGRKGKVFTNLFTGLLRCVDCGGPVHLLNPGIDKRAKVPKSVNYIVCKKGKFTRECILKRLRYDDFEAAMLKAIQEINLADVLNENNPLEQLIKQIRAIETRIEKNNTMLENFRLAFRESGTLPSFMIEEANNAENDNKALEIERTELQAQMAQLNVYNTNIENAIEELKTSGTYETRAKINLVLHEIIKTINIDFELVDFAIIFKNGVKRFVNDGIVQNVFTTKTGSDQYYSEIEEILNHTNTPPEK

SEQ ID NO: 56462 - DNA, 50 bp, Pseudomonas aeruginosa
  source 1..50: mol_type = genomic DNA
tacaggttaaacgcttccgacttgatcaagtccggcgtataatacccgta

SEQ ID NO: 56463 - DNA, 40 bp, Pseudomonas aeruginosa; identical to SEQ ID NO: 4693
  source 1..40: mol_type = genomic DNA

SEQ ID NO: 56464 - DNA, 40 bp, Pseudomonas aeruginosa; identical to SEQ ID NO: 4694
  source 1..40: mol_type = genomic DNA

SEQ ID NO: 56465 - DNA, 50 bp, Pseudomonas aeruginosa; identical to SEQ ID NO: 5715
  source 1..50: mol_type = genomic DNA

SEQ ID NO: 56466 - protein, 487 aa, Bacillus enclensis
MKAAIYVRVSTAEQAAEGYSIRAQTDRLKAYCVSQGWEILEFYVDDGYSAKDTNRPNLKRMMKHIEEGLIDCVLVYRLDRLTRSVRDLYTILETFDKYDCKFKSATEVYDTTTAMGRMFITIVAALAQWERENTGERIRMGMEQKAREGNWVINQAPYGYEIDKENKTLIINDREAMLVKRIYDDYLSGKTMRNIAIDFNKSNITTKSGAIWNDFKIKYILSNPLYIGTMRYNYRTNKENYFEVEDAHPAIISKETFENVQKIKESRRIVHPRSATSKFIFSGIAKCARCGSPLAGKYGYYKSKTKKDHISRPRSYYCTKRRLGKCDLPNIGENHLEVQFLNYLNTFKIDPDIIEDVSHEKEDNANEQQKKALQKELKEIDNRRKKWQYAWVNEMISDEDFSNRIEEENSKENDIKNQLTSLEPRGEKMNTEDLYGILLDIKSNWNQLEALEKKTLLQMFMKKIVVNRDKKSSGDPNSISILDVEFY

SEQ ID NO: 56467 - DNA, 50 bp, Bacillus enclensis
  source 1..50: mol_type = genomic DNA
ttgagtcctattatatttactgggtggctagtgataatgatagaacccag

SEQ ID NO: 56468 - DNA, 40 bp, Bacillus enclensis
  source 1..40: mol_type = genomic DNA
taaggtagttaaaaccaggtggccggtaagcgctgccctt

SEQ ID NO: 56469 - DNA, 40 bp, Bacillus enclensis
  source 1..40: mol_type = genomic DNA
taaggtagttaaaaccaggtagccggtaagcgctgccctt

SEQ ID NO: 56470 - DNA, 50 bp, Bacillus enclensis
  source 1..50: mol_type = genomic DNA
ttgcctcctaagaaacgtacaggctagctagtgatattttaaaaaacttg

SEQ ID NO: 56471 - protein, 544 aa, Bacillus glycinifermentans
MNLKNALENHNVSNILGYIRKSRQDIEREKRTGEDTLAEQTKLMNNVLMSIELPYELKSEIGSGESIDGRPVFQECLKDLENGKYQAIAVKELARLSRGSYSDAGRIIELITEKRIPIITPYKVFDPRNVMDMKQIRFELFLAREEYELIRERLTGARYTYAAQGKWVAGKAPYGYRYNKNTRNLEINEEQAKVIIMIYDLFLYGLNGVDMSYTAIATHLTKMGIPTPRGKKAWSYFYVKRVLENDLYIGTIRFRTHERNKKGQRIPRPENEHIVVEDAHPAIIEKGKFEKVQTKIKNKPIAPHNPLDFDPCELASVCTCSVCGGKLVRNCGKHRYKKKDGSESIYIKEFLKCQKERCMSVKYRDVEEAILEVLKNIESMDEDQLKIFFEAQINEQKNADGSQTQERMLQQIEQKEKELKSRESFIFEKFEQGIYTDEIFLQRKAVIDKEREELKKAKSELEQAPVLTKNESIPTIKENMKTFREAYMEQTEKTIKNEYLRTIFDHVEIEIIEKGRGTRPSKFRIVPYFKYKALTNKNLRTLVK

SEQ ID NO: 56472 - DNA, 50 bp, Bacillus glycinifermentans
  source 1..50: mol_type = genomic DNA
ttgggggtatgataaatgacagacgagtcagttttatatctcacccccaa

SEQ ID NO: 56473 - DNA, 40 bp, Bacillus glycinifermentans
  source 1..40: mol_type = genomic DNA
ggccgccattaaaaccggagagtccgtgatcgcgtttgcg

SEQ ID NO: 56474 - DNA, 40 bp, Bacillus glycinifermentans
  source 1..40: mol_type = genomic DNA
ggccgccattaaaaccggaaggtccgtgatcgcgtttgcg

SEQ ID NO: 56475 - DNA, 50 bp, Bacillus glycinifermentans
  source 1..50: mol_type = genomic DNA
ttgggggtagttttattgccaaacaggtcaggcatatagggcttcgccat

SEQ ID NO: 56476 - protein, 540 aa, Coprococcus catus; identical to SEQ ID NO: 12131

SEQ ID NO: 56477 - DNA, 50 bp, Coprococcus catus; identical to SEQ ID NO: 2472
  source 1..50: mol_type = genomic DNA

SEQ ID NO: 56478 - DNA, 40 bp, Coprococcus catus
  source 1..40: mol_type = genomic DNA
cgtttccaagtgggagcggggcatctgtctgccggatgtt

SEQ ID NO: 56479 - DNA, 40 bp, Coprococcus catus; identical to SEQ ID NO: 56478
  source 1..40: mol_type = genomic DNA

SEQ ID NO: 56480 - DNA, 50 bp, Coprococcus catus
  source 1..50: mol_type = genomic DNA
caaactcataaatcaagggagactggagtttcaccttagttaatacactg

SEQ ID NO: 56481 - protein, 540 aa, Gemmiger formicilis
MKQPYNTTIYNTALYLRLSRDDELQGESGSIQTQRMMLRQYAAEHGLTVVDEYIDDGWSGTNFERLSFQRMIDDIEDGKINCVVTKDLSRLGRNYILTGQYTEIYFPSKGVRYIAINDNVDTINGESELAPFLNILNEMHARQTSKKVKAAMHTRFANGAHYGAYAPLGYVKDPDKKGHLLIDPETRWIVEKIFELAVHGRGAASITRILVEEKVPTPGWLNYERYGTFANIYAGAPAEKAYAWTIAQVKSILKEETYIGHSIHNKQSNISFKNKKKVRKPQEEWYRVENTHEAIISEEVFQKVQELIASRRRKRRNGTTQIFAGLIKCADCGWSLAYGENKQNKNPYGYYHCSKNGQGLRQCSMHYIRYDVLYAYVLARLQYWSMLAQKDEDNLLKRLLNASDRERNSAKKKQAAELKKAEKRKAEVDGLFAKMYEDWSAGRITEYNFNMLSEKYQNEQKELETKIRQLHETMEAAVQTAADAEKWIALMKQYVNPVELTAELLNTLIEKITVHEAVKGEDGSREQEVEIYYRFIGKID

SEQ ID NO: 56482 - DNA, 50 bp, Gemmiger formicilis; identical to SEQ ID NO: 2472
  source 1..50: mol_type = genomic DNA

SEQ ID NO: 56483 - DNA, 40 bp, Gemmiger formicilis
  source 1..40: mol_type = genomic DNA
cctctcgaagtacgaaaccggcgaaagcctgcccgacatt

SEQ ID NO: 56484 - DNA, 40 bp, Gemmiger formicilis; identical to SEQ ID NO: 56483
  source 1..40: mol_type = genomic DNA

SEQ ID NO: 56485 - DNA, 50 bp, Gemmiger formicilis; identical to SEQ ID NO: 56480
  source 1..50: mol_type = genomic DNA

SEQ ID NO: 56486 - protein, 540 aa, Faecalibacterium prausnitzii; identical to SEQ ID NO: 13311

SEQ ID NO: 56487 - DNA, 50 bp, Faecalibacterium prausnitzii; identical to SEQ ID NO: 2472
  source 1..50: mol_type = genomic DNA

SEQ ID NO: 56488 - DNA, 40 bp, Faecalibacterium prausnitzii
  source 1..40: mol_type = genomic DNA
agtgtccaagtgggaaaacggcacctcggagccgaacacc

SEQ ID NO: 56489 - DNA, 40 bp, Faecalibacterium prausnitzii; identical to SEQ ID NO: 56488
  source 1..40: mol_type = genomic DNA

SEQ ID NO: 56490 - DNA, 50 bp, Faecalibacterium prausnitzii; identical to SEQ ID NO: 56480
  source 1..50: mol_type = genomic DNA

SEQ ID NO: 56491 - protein, 518 aa, Serratia marcescens
MKKTVYCYARVSSRGQAKDGFGMSRQQKMLNDYVSTYDDSLHKRGYELGAVNWLFAEGISAYSGKNIEDGSVLKSFIDDVLDRKIINAVLVIENLDRFSRAEPIKAANLFLNLITAGCDIHEVETETIHHSSSDLSIITGGLQRAHNESKRKARLSIKNWDERIKNAIDGKAVLTHRVPSWLEVKDNGYVIKEGEKEKYNLIFQMYADGFGPAAIRDVLKERNMLINDSEPTIAHLNKIIKDERLIGKFNSTGRKKLSGLVIYPVVVDLSLFHIVDQLRKQRNPVGKIHRKANNLFAGLCICMECGRYVQVNSIEPNGESYFRCGGSLVKSDRCQERGFKYKFFENALLQHIRNFDFSSLNANESEVQIKVNHLSMELLAHIKYRDEILQDIEKEDIPDPIDRRILKNLQKKIGDIESEISNLKRLNVNVSAFDELKQYSEELRDPLNTDIRLDFNIKIKRVIKNIIIKRYSDTIFLVINYIAINEKQAIVINSKNGEVMYMGVQNDDLKTVEHLIGN

SEQ ID NO: 56492 - DNA, 50 bp, Serratia marcescens
  source 1..50: mol_type = genomic DNA
aacagtaatttactgcttatcaccaccatgatatacttctttttactgtt

SEQ ID NO: 56493 - DNA, 40 bp, Serratia marcescens
  source 1..40: mol_type = genomic DNA
ggcgatgatggcgatcaccaccatcagttctatcagggta

SEQ ID NO: 56494 - DNA, 40 bp, Serratia marcescens
  source 1..40: mol_type = genomic DNA
ggcgatgatggcgatcacctacatcagttctatcagggta

SEQ ID NO: 56495 - DNA, 50 bp, Serratia marcescens; identical to SEQ ID NO: 920
  source 1..50: mol_type = genomic DNA

SEQ ID NO: 56496 - protein, 547 aa, Pseudomonas syringae
MPVAFSYVRYSSLRQAHGDSLRRQTAMVAEWLKHHPEYVLSADDAYQDLGRSGFSGAHLDNAFGRLRAAVSTGIIKPGDCILIEAIDRAGRLAPSIMLNLLTEIVNAGVSLISLDDGITYDSDPYKSNNLFLLVAKVQQAYQFSDALSRRVKSAYERKRETARAGEATGRRAPIWIKTEYPNGKKAQPVVSLREDLAPLVAQAFQDYADGLGERRIHHRLRDQHPELAKLSTTSLKRWMRNPTAIGNWNDIPDVYPAVVSKELWYRVQKRLNQKSKPKSAASNHLLVGLVKCAKCRANFHTHVTPDNAAMKCGQRHRLGDQGCSNKKSLPMAVLDFIRSQTTYKALQRASLSRNLTTSEKRALEIEGELAELNRQAATAAEGAVKYGMSAFGPALDRITAQIGVLEDEKLTLVSKAAPSTEGEMIDLQEELLDVDEMRLNALLQEAEYVMWCDDRTITIEEPSIEFSADRQVITYLGKDRVRGVFRITWNGARIDLPDLLSAPQRAELEQHMTQEARYKSGELERTVMRYNSETGDMDHVSGPPLKS

SEQ ID NO: 56497 - DNA, 50 bp, Pseudomonas syringae
  source 1..50: mol_type = genomic DNA
aaagtacgcaacgcaactaattgcgcgctataggttgcaatgttatgatt

SEQ ID NO: 56498 - DNA, 40 bp, Pseudomonas syringae
  source 1..40: mol_type = genomic DNA
aatccgcacgcccatgaatgcggtgatcggcatgctggaa

SEQ ID NO: 56499 - DNA, 40 bp, Pseudomonas syringae
  source 1..40: mol_type = genomic DNA
aatccgcacgcccatgaatagggtgatcggcatgctggaa

SEQ ID NO: 56500 - DNA, 50 bp, Pseudomonas syringae; identical to SEQ ID NO: 24515
  source 1..50: mol_type = genomic DNA

SEQ ID NO: 56501 - protein, 507 aa, Escherichia coli
MKRVISYIRFSSEKQAKGDSLRRQSKMVTDWLKAHPEYYLDESLTFRDLGVSGFTGKHLKGGLGDFLTAIEKGLVKAGDTLLIESLDRLSRQAVDRASELLRNILRSGVDVVTLSDGEHYTRESLKDPLSLIKSILIMQRAHEESLRKSERIQAAWDAKKEAAKAGIKISRRCPAWLKLNDDRKSFSVIPEKVETVKRCFQLRLEGKSIWEIVRTLNDEGHQSMSQYKPGSFGQSSVQDLLKNRSVIGYFTPKGCEEIAGYYPAIIDETTFYKVQQLSHSRYGKRSVSDKPLSVNLFKGVIRCSECGHALIITGFSDTRSGIYRCPLRNENRCSAKGLSRKQTDGTLLALLSRLDRFDSDMTNTIDTLKLHREHISSNIEKLVQLSLEIEDLSAITSKLKQLKNELSQVDADIEKETQRLKSIDVGCLSDCDLTTKAGRIEAQLIIKSAVKEVVLNTAKRRCKVTFHNSKSITLPITENPSEDVTEAIQSLSEVTERGLIDVDEVII

SEQ ID NO: 56502 - DNA, 50 bp, Escherichia coli
  source 1..50: mol_type = genomic DNA
tagtgtatttagaccttgatgatttttattagacacgtttaaatacgcca

SEQ ID NO: 56503 - DNA, 40 bp, Escherichia coli; identical to SEQ ID NO: 5188
  source 1..40: mol_type = genomic DNA

SEQ ID NO: 56504 - DNA, 40 bp, Escherichia coli; identical to SEQ ID NO: 5749
  source 1..40: mol_type = genomic DNA

SEQ ID NO: 56505 - DNA, 50 bp, Escherichia coli; identical to SEQ ID NO: 5750
  source 1..50: mol_type = genomic DNA

SEQ ID NO: 56506 - protein, 507 aa, Escherichia coli
MKRVISYIRFSSEKQAKGDSLRRQSKMVTDWLKAHPEYYLDESLTFRDLGVSGFTGKHLKGGLGDFLTAIEKGLVKAGDTLLIESLDRLSRQAVDRASELLRNILRSGVDVVTLSDGEHYTRESLKDPLSLIKSILIMQRAHEESLRKSERIQAAWDAKKEAAKAGIKISRRCPAWLKLNDDRKSFSVIPEKVETVKRCFQLRLEGKSIWEIVRTLNDEGHQSMSQYKPGSFGQSSVQDLLKNRSVIGYFTPKGCEEIAGYYPAIIDETTFYKVQQLSYARHGRKPASAKPLSVNLFKGVIRCSECGHALIITGFSDTRNGIYRCPLRNENRCSAKGLSRKQTDGTLLALLSRLDRFDSDTTNTIDTLKLHREHISSNIEKLVQLSLEIEDLSAITSKLRQLKGELSQVDADIEKETQRLKSIDVGCLSDCDLTTKAGRIEAQLIIKSAVKEVVLNTAKRRCKVTFHNGKLIDLPITETPSDNVTEAIQSLSEVTERGLIDVDEVII

SEQ ID NO: 56507 - DNA, 50 bp, Escherichia coli; identical to SEQ ID NO: 56502
  source 1..50: mol_type = genomic DNA

SEQ ID NO: 56508 - DNA, 40 bp, Escherichia coli; identical to SEQ ID NO: 5188
  source 1..40: mol_type = genomic DNA

SEQ ID NO: 56509 - DNA, 40 bp, Escherichia coli; identical to SEQ ID NO: 5749
  source 1..40: mol_type = genomic DNA

SEQ ID NO: 56510 - DNA, 50 bp, Escherichia coli; identical to SEQ ID NO: 5750
  source 1..50: mol_type = genomic DNA

SEQ ID NO: 56511 - protein, 507 aa, Escherichia coli
MKRVISYIRFSSEKQAKGDSLRRQSKMVTDWLKAHPEYYLDESLTFRDLGVSGFTGKHLKGGLGDFLTAIEKGLVKAGDTLLIESLDRLSRQAVDRASELLRNILRSGVDVVTLSDGEHYTKESLRDPLSLIKSILIMQRAHEESLRKSERIQAAWDAKKEAAKAGIKVSKRCPAWLKLNDDRKSFSVIPEKVETVRRCFQLRLEGKSIWEIVRTMNAEGHQTLHQHKPGSFGQSSVQDLLKNRSVIGYFTPKGCEEIAGYYPAIIDETTFYKVQQLSHSRYGKRSVSDKPLSVNLFKGVIRCSECGHALIITGFSDTRSGIYRCPLRNENRCSAKGLSRKQTDGTLLTLLSRLDRFDSDTTNTIDMLRLHREHISSNIEKLVQLSLEIEDLSAITIKLKQLKGELSQVDADIEKETQRLKSIDTGSLSDCDLSTKAGRIEAQLIIKSAVKEVVLNTAKRRCKVTFHNSKAITLPITENPSEDVTEAIQSLSEVTERGLIDVDVVEI

SEQ ID NO: 56512 - DNA, 50 bp, Escherichia coli; identical to SEQ ID NO: 56502
  source 1..50: mol_type = genomic DNA

SEQ ID NO: 56513 - DNA, 40 bp, Escherichia coli; identical to SEQ ID NO: 5188
  source 1..40: mol_type = genomic DNA

SEQ ID NO: 56514 - DNA, 40 bp, Escherichia coli; identical to SEQ ID NO: 5749
  source 1..40: mol_type = genomic DNA

SEQ ID NO: 56515 - DNA, 50 bp, Escherichia coli; identical to SEQ ID NO: 5750
  source 1..50: mol_type = genomic DNA

SEQ ID NO: 56516 - protein, 507 aa, Escherichia coli
MKRVISYIRFSSEKQAKGDSLRRQSKMVTDWLKAHPEYYLDESLTFRDLGVSGFTGKHLKGGLGDFLTAIEKGLVKAGDTLLIESLDRLSRQAVDRASELLRNILRSGVDVVTLSDGEHYTRESLKDPLSLIKSILIMQRAHEESLRKSERIQAAWDAKKEAAKAGIKISRRCPAWLKLNDDRKSFSVIPEKVETVKRCFQLRLEGKSIWEIVRTLNDEGHQSMSQYKPGSFGQSSVQDLLKNRSVIGYFTPKGCEEIAGYYPAIIDETTFYKVQQLSHSRYGKRSVSDKPLSVNLFKGVIRCSECGHALIITGFSDTRSGIYRCPLRNENRCSAKGLSRKQTDGTLLTLLSRLDRFDSDTTNIIDMLRLHREHISSNIEKLVQLSLEIEDLSAITSKLKQLKNELSQVDADIEKETQRLKSIDVGCLSDCDLTTKAGRIEAQLIIKSAVKEVVLNTAKRRCKVTFHNGRAITLPITETPSEDVTEAIQSLSEVTERGLIDVDEVII

SEQ ID NO: 56517 - DNA, 50 bp, Escherichia coli; identical to SEQ ID NO: 56502
  source 1..50: mol_type = genomic DNA

SEQ ID NO: 56518 - DNA, 40 bp, Escherichia coli; identical to SEQ ID NO: 5188
  source 1..40: mol_type = genomic DNA

SEQ ID NO: 56519 - DNA, 40 bp, Escherichia coli; identical to SEQ ID NO: 5749
  source 1..40: mol_type = genomic DNA

SEQ ID NO: 56520 - DNA, 50 bp, Escherichia coli; identical to SEQ ID NO: 5750
  source 1..50: mol_type = genomic DNA

SEQ ID NO: 56521 - protein, 525 aa, Pseudomonas aeruginosa
MPSAFSYVRFSSGKQAKGSSEQRQRSMLGQWLEQHPSFTLSDLRFEDLGRSGFSGEHLDHGLGQLLAAIDSGAIKSGDVILVEAVDRIGRLEPLEMLPLFSRIVRAGVSVITLEDGHIYSKDSVNETSLFLLVAKVQQAHDYSNRLSRRINASYTARREKARAGLGVKRETPVWLTTDGQLVPHVAPHIAQAFQDYADGLGERRICRKLRESGVEEFSKTNATTVRRWLKNRTAIGYWNDIPDVYPHVVDPALFYRVQQRLDAPKVDRAKPSAHYLTGLVKCAVCGRNYNFKQRKHTDPAMLCTSRARLAGEGCTNSKTYPVIVLDQVRKLTSLPFLQHAMENASSQADPSSQRLAVIDGEIGELSRKISEATKALLVLGFTPEIQESLEQLKTAREALEEERATLLLPQAEKLTAAQLEAFSNGLLDDSPMKLNHVLQTAGYSMVVHPDGSIDVDGKRFVYEGASRKEKVYKLRLLGEDKQWSLPILTPARAESLAKSVAGGYLPPDTPEDVARYFEKVKHLVR

SEQ ID NO: 56522 - DNA, 50 bp, Pseudomonas aeruginosa
  source 1..50: mol_type = genomic DNA
cgtgtccatcttgagtcttctttctcgcaagacgatacgaaatagacaca

SEQ ID NO: 56523 - DNA, 40 bp, Pseudomonas aeruginosa; identical to SEQ ID NO: 20278
  source 1..40: mol_type = genomic DNA

SEQ ID NO: 56524 - DNA, 40 bp, Pseudomonas aeruginosa; identical to SEQ ID NO: 28459
  source 1..40: mol_type = genomic DNA

SEQ ID NO: 56525 - DNA, 50 bp, Pseudomonas aeruginosa
  source 1..50: mol_type = genomic DNA
cttgaccatctcttatcttctttcttgctaaactttctgcaatacacatg

SEQ ID NO: 56526 - protein, 525 aa, Pseudomonas aeruginosa
MPSAFSYVRFSSGKQAKGSSEQRQRSMLGQWLEQHPSFTLSDLRFEDLGRSGFSGEHLDHGLGQLLAAIDSGAIKSGDVILVEAVDRIGRLEPLEMLPLFSRIVKAGVSVITLEDGHVYDRSSVNETSLFLLVAKIQQAHEYSNRLSRRINASYTARREKAKAGLGIKRETPVWLTTDGQLVPHVAPHIAQAFQDYADGLGERRICRKLRESGLEEFSKTNATTVRRWLKNRTAIGYWNDIPDVYPHVVDPALFYRVQQRLDAPKVDRAKPSAHYLTGLVKCAVCGRNYNYKQRKHTDPAMLCTSRARLAGEGCTNSKTFPVIVLDQVRKLTSLPFLQHAMESASSQADPSSQRLAVIDGEIGELSRKIGEATKALLVLGFTPEIQESLEQLKTAREALEEERATLLLPQAEKLTAAQLEAFSNGLLDDEPMKLNHVLQTAGYSMVVHPDGSIDVDGKRFVYEGANRKKKVYKLRLLGEDRQWEPPILSPEQAASLARSVAGAYLPPNSSEEVARYYEKVKHLVR

SEQ ID NO: 56527 - DNA, 50 bp, Pseudomonas aeruginosa; identical to SEQ ID NO: 56522
  source 1..50: mol_type = genomic DNA

SEQ ID NO: 56528 - DNA, 40 bp, Pseudomonas aeruginosa; identical to SEQ ID NO: 20278
  source 1..40: mol_type = genomic DNA

SEQ ID NO: 56529 - DNA, 40 bp, Pseudomonas aeruginosa; identical to SEQ ID NO: 28459
  source 1..40: mol_type = genomic DNA

SEQ ID NO: 56530 - DNA, 50 bp, Pseudomonas aeruginosa; identical to SEQ ID NO: 56525
  source 1..50: mol_type = genomic DNA

SEQ ID NO: 56531 - protein, 525 aa, Pseudomonas aeruginosa
MPSAFSYVRFSSGKQAKGSSEQRQRSMLGQWLEQHPSFTLSDLRFEDLGRSGFSGEHLDHGLGQLLAAIDSGAIQSGDVILVEAVDRIGRLEPLEMLPLFSRIVRAGVSVITLEDGHIYSKDSVNETSLFLLVAKVQQAHDYSNRLSRRINASYTARREKARAGLGVKRETPVWLTTDGQLVPHVAPHIAQAFQDYADGLGERRICRKLRESGLEEFSKTNATTVRRWLKNRTAIGYWNDIPDVYPHVVDPALFYRVQQRLDAPKVDRAKPSAHYLTGLVKCAVCGRNYNFKQRKHTDPAMLCTSRARLAGEGCTNSKTYPVIVLDQVRKLTSLPFLQHAMENASSQADPSSQRLAVIDGEIGELSRKISEATKALLVLGFTPEIQESLEQLKTAREALEEERATLLLPQAEKLTAAQLEAFSNGLLDDSPMKLNHVLQTAGYSMVVHPDGSIDVDGKRFVYEGASRKEKVYKLRLIGEDKQWSLPILTPARAESLAKSVAGGYLPPNTPEDVARYFEKVRHLVR

SEQ ID NO: 56532 - DNA, 50 bp, Pseudomonas aeruginosa; identical to SEQ ID NO: 56522
  source 1..50: mol_type = genomic DNA

SEQ ID NO: 56533 - DNA, 40 bp, Pseudomonas aeruginosa; identical to SEQ ID NO: 20278
  source 1..40: mol_type = genomic DNA

SEQ ID NO: 56534 - DNA, 40 bp, Pseudomonas aeruginosa; identical to SEQ ID NO: 28459
  source 1..40: mol_type = genomic DNA

SEQ ID NO: 56535 - DNA, 50 bp, Pseudomonas aeruginosa; identical to SEQ ID NO: 56525
  source 1..50: mol_type = genomic DNA

SEQ ID NO: 56536 - protein, 525 aa, Pseudomonas aeruginosa
MPSAFSYVRFSSGKQAKGSSEQRQRSMLGQWLEQHPSFTLSDLRFEDLGRSGFSGEHLDHGLGQLLAAIDSGAIQSGDVILVEAVDRIGRLEPLEMLPLFSRIVRAGVSVITLEDGHIYSKDSVNETSLFLLVAKVQQAHDYSNRLSRRINASYTARRENARAGLGVKRETPVWLTTDGQLVPHVAPHIAQAFQDYADGLGERRICRKLRESGLEEFSKTNATTVRRWLKNRTAIGYWNDIPDVYPHVVDPALFYRVQQRLDAPKVDRAKPSAHYLTGLVKCAVCGRNYNFKQRKHTDPAMLCTSRARLAGEGCTNSKTYPVIVLDQVRKLTSLPFLQHAMENASSQADPSSQRLAVIDGEIGELSRKISEATKALLVLGFTPEIQESLEQLKTAREALEEERATLLLPQAEKLTAAQLEAFSNGLLDDEPMKLNHVLQTAGYSMVVHPDGSIDVDGKRFVYEGASRKEKVYKLRLLGEDKQWSLPILTPARAESLAKSVAGGYLPPNTPEDVARYFEKVRHLVR

SEQ ID NO: 56537 - DNA, 50 bp, Pseudomonas aeruginosa; identical to SEQ ID NO: 56522
  source 1..50: mol_type = genomic DNA

SEQ ID NO: 56538 - DNA, 40 bp, Pseudomonas aeruginosa; identical to SEQ ID NO: 20278
  source 1..40: mol_type = genomic DNA

SEQ ID NO: 56539 - DNA, 40 bp, Pseudomonas aeruginosa; identical to SEQ ID NO: 28459
  source 1..40: mol_type = genomic DNA

SEQ ID NO: 56540 - DNA, 50 bp, Pseudomonas aeruginosa; identical to SEQ ID NO: 56525
  source 1..50: mol_type = genomic DNA

SEQ ID NO: 56541 - protein, 525 aa, Pseudomonas aeruginosa
MPSAFSYVRFSSGKQAKGSSEQRQRSMLGQWLEQHPSFTLSDLRFEDLGRSGFSGEHLDHGLGQLLAAIDSGAIQSGDVILVEAVDRIGRLEPLEMLPLFSRIVRAGVSVITLEDGHIYSKDSVNETSLFLLVAKVQQAHDYSNRLSRRINASYTARREKAKAGLGVKRETPVWLTTDGQLVPHVAPHIAQAFQDYADGLGERRICRKLRESGLEEFSKTNATTVRRWLKNRTAIGYWNDIPDVYPHVVDPALFYRVQQRLDAPKVDRAKPSAHYLTGLVKCAVCGRNYNFKQRKHTDPAMLCTSRARLAGEGCTNSKTYPVIVLDQVRKLTSLPFLQHAMENASSQADPSSQRLAVIDGEIGELSRKISEATKALLVLGFTPEIQESLEQLKTAREALEEERATLLLPQAEKLTAAQLEAFSNGLLDDSPMKLNHVLQTAGYSMVVHPDGSIDVDGKRFVYEGASRKEKVYKLRLLGEDKQWSLPILTPARAESLAKSVAGGYLPPNTPEDVARYFEKVKHLVR

SEQ ID NO: 56542 - DNA, 50 bp, Pseudomonas aeruginosa
  source 1..50: mol_type = genomic DNA
cgtgtccatcttgagtcttctttctcgcaagacggtacgaaatagacaca

SEQ ID NO: 56543 - DNA, 40 bp, Pseudomonas aeruginosa; identical to SEQ ID NO: 20278
  source 1..40: mol_type = genomic DNA

SEQ ID NO: 56544 - DNA, 40 bp, Pseudomonas aeruginosa; identical to SEQ ID NO: 28459
  source 1..40: mol_type = genomic DNA

SEQ ID NO: 56545 - DNA, 50 bp, Pseudomonas aeruginosa; identical to SEQ ID NO: 56525
  source 1..50: mol_type = genomic DNA

SEQ ID NO: 56546 - protein, 525 aa, Pseudomonas aeruginosa
MPSAFSYVRFSSGKQAKGSSEQRQRSMLGQWLEQHPSFTLSDLRFEDLGRSGFSGEHLDHGLGQLLAAIDSGAIQSGDVILVEAVDRIGRLEPLEMLPLFSRIVRAGVSVITLEDGHIYSKDSVNETSLFLLVAKVQQAHDYSNRLSRRINASYTARREKARAGLGVKRETPVWLTTDGQLVPHVAPHIAQAFQDYADGLGERRICRKLRESGLEEFSKTNATTVRRWLKNRTAIGYWNDIPDVYPHVVDPALFYRVQQRLDAPKVDRAKPSAHYLTGLVKCAVCGRNYNFKQRKHTDPAMLCTSRARLAGEGCTNSKTYPVIVLDQVRKLTSLPFLQHAMENASSQADPSSQRLAVIDGEIGELSRKISEATKALLVLGFTPEIQESLEQLKTAREALEEERATLLLPQAEKLTAAQLEAFSNGLLDDSPMKLNHVLQTAGYSMVVHPDGSIDVDGKRFVYEGASRKEKVYKLRLLGEDKQWSLPILTPARAESLAKSVAGGYLPPNTPEDVARYFEKVKHLVR

SEQ ID NO: 56547 - DNA, 50 bp, Pseudomonas aeruginosa; identical to SEQ ID NO: 56522
  source 1..50: mol_type = genomic DNA

SEQ ID NO: 56548 - DNA, 40 bp, Pseudomonas aeruginosa; identical to SEQ ID NO: 20278
  source 1..40: mol_type = genomic DNA

SEQ ID NO: 56549 - DNA, 40 bp, Pseudomonas aeruginosa; identical to SEQ ID NO: 28459
  source 1..40: mol_type = genomic DNA

SEQ ID NO: 56550 - DNA, 50 bp, Pseudomonas aeruginosa; identical to SEQ ID NO: 56525
  source 1..50: mol_type = genomic DNA

SEQ ID NO: 56551 - protein, 525 aa, Pseudomonas aeruginosa
MPSAFSYVRFSSGKQAKGSSEQRQRSMLGQWLEQHPSFTLSDLRFEDLGRSGFSGEHLDHGLGQLLAAIDSGAIKSGDVILVEAVDRIGRLEPLEMLPLFSRIVRAGVSVITLEDGHIYSKDSVNETSLFLLVAKVQQAHDYSNRLSRRINASYTARREKAKAGLGVKRETPVWLTTDGQLVPHVAPHIAQAFQDYADGLGERRICRKLRESGLEEFSKTNATTVRRWLKNRTAIGYWNDIPDVYPHVVDPALFYRVQQRLDAPKVDRAKPSAHYLTGLVKCAVCGRNYNFKQRKHTDPAMLCTSRARLAGEGCTNSKTYPVIVLDQVRKLTSLPFLQHAMENASSQADPSSQRLAVIDGEIGELSRKISEATKALLVLGFTPEIQESLEQLKTAREALEEERATLLLPQAEKLTAAQLEAFSNGLLDDEPMKLNHVLQTAGYSMVVHPDGSIDVDGKRFVYEGASRKEKVYKLRLLGEDKQWSLPILTPARAESLAKSVAGGYLPPDTPEDVARYFEKVKHLVR

SEQ ID NO: 56552 - DNA, 50 bp, Pseudomonas aeruginosa; identical to SEQ ID NO: 56522
  source 1..50: mol_type = genomic DNA

SEQ ID NO: 56553 - DNA, 40 bp, Pseudomonas aeruginosa; identical to SEQ ID NO: 20278
  source 1..40: mol_type = genomic DNA

SEQ ID NO: 56554 - DNA, 40 bp, Pseudomonas aeruginosa; identical to SEQ ID NO: 28459
  source 1..40: mol_type = genomic DNA

SEQ ID NO: 56555 - DNA, 50 bp, Pseudomonas aeruginosa; identical to SEQ ID NO: 56525
  source 1..50: mol_type = genomic DNA

SEQ ID NO: 56556 - protein, 629 aa, Klebsiella pneumoniae
MPQLYSYIRWSTDRQDKGTTRTRQVAAAKAYAEEAGLEMVEIIEPGVSAFRGKNRAGKLGDFIDAVKNAAIPSDSWLYCENLDRLSRDQVDEALRLFLELIGLGLTIVTGMDRKVYNRDTIRQNPTDLMISILMFIRGNEESETKSNRTVGNVVALVERHKEGLPVNIKSVGRHPFWIDDTGSQYQAVKKHPFYWNIAREIIDMFLSGNGVYSVKKYLDEKYPNGLKGREWDYQVLKKMRDNRALIGERTINLRGVPYKLENYYPWLCKDEAEFFLLEKRKQQNNYKSKKDGADTIKLLSGLSILRCSKCGGTMHSFMNHGKARYICTNGVHLQKNCSGWSITAQLVEHCTMIALLIGYMDKSRKNGSDTTLIEEELNEKEKLIKALDSKISNLVTAIAIAPDVNSLAHSLNEINSKRKELVLSVEKLKERLVSLQGKGSFEVDIMEFLILIQWAVFTNMEDNDRDKIRKIIDAIIEYIVVDKTNDCITIKIKYYGNDEVLVFGGVDRKPHWRFSIDFDTGKEGALTVLENDLMDVPEIQKAVSYLHKLEKGYLAMYDSAVTMLAEVGYPEIKGTQFWPNTGKHEKVTVAFDGVEHTISFNGRLPKAIASAIEKTGLTRQQFIEKFKIQ

SEQ ID NO: 56557 - DNA, 50 bp, Klebsiella pneumoniae; identical to SEQ ID NO: 17587
  source 1..50: mol_type = genomic DNA

SEQ ID NO: 56558 - DNA, 40 bp, Klebsiella pneumoniae; identical to SEQ ID NO: 5518
  source 1..40: mol_type = genomic DNA

SEQ ID NO: 56559 - DNA, 40 bp, Klebsiella pneumoniae
  source 1..40: mol_type = genomic DNA
gtccacgaggtttttcgggtagcccagggagacgaagccg

SEQ ID NO: 56560 - DNA, 50 bp, Klebsiella pneumoniae
  source 1..50: mol_type = genomic DNA
gaacttattgccttattgtaatgctaccataatgtttatggtgcaacctg

SEQ ID NO: 56561 - protein, 538 aa, Pseudomonas fluorescens
MPVAYSYIRFSSAQQQHGASLARQQEMVGKWLVANPTYTRSELSFQDLGRSGWSGAHLDNAFGRLLAAVEKGVIKAGDVVLIEAIDRAGRLEPMEMLPLLSKIVNAGVDIVSLDDGITYNRESVNSNHLFLLVAKVQQAYTYSDNLSRRVKDAYARKRVKAAEGEFTERRTPLWLENTGTEVRLVKDLQPWIVQIFQDYAAGIGERRILARVRGQHPLLETLNPTTIKKWLRNPTAIGRWQPWPVNGVEQAPIDDVYPAVVSKELWYRVQKQLASGAKIKSASKVYLLSGLVVCGRCGKNFGVVDVKRSPAVMLCMSRHRLGDAGCPNSKSIPYSVLDYILSVTYYEPLERALAGQHLTAGEKREIEIEGELVELRKQSENAAEGLVKYGMLKAITDVLDKVTASIQALEEERALLKTAPAPTTLIAMMTVEDDLRSNDPVKLNALLRGAGYKIVCDGGDIVVNEPRSNVNDLPVQNFHYSGFNRKTCLYELTDNGVPITHLLGVGTAGYEKILAGYSEEFEKTGWMEVEDDLTPLRG

SEQ ID NO: 56562 - DNA, 50 bp, Pseudomonas fluorescens
  source 1..50: mol_type = genomic DNA
catcaacacactgccgactatatcccgaataaatcggcaatgttatgatg

SEQ ID NO: 56563 - DNA, 40 bp, Pseudomonas fluorescens
  source 1..40: mol_type = genomic DNA
gattttcaatgccacgacgccgctgatgggggtgttgatc

SEQ ID NO: 56564 - DNA, 40 bp, Pseudomonas fluorescens
  source 1..40: mol_type = genomic DNA
gattttcaatgccacgacgtcgctgatgggggtgttgatc

SEQ ID NO: 56565 - DNA, 50 bp, Pseudomonas fluorescens
  source 1..50: mol_type = genomic DNA
cataaacaccagcccgagtatatttcaaagaaatcttgtgaaatttaatg

SEQ ID NO: 56566 - protein, 551 aa, Rhizobium leguminosarum
MKPKAYSYIRMSTDIQLRGDSLRRQTEASRKYADEHGLELIEDFKLEDIGVSAFHGRNANQGALGRFLTLCEEGSIKPGSYLIVESLDRISRQNPRSATTLFLQILEAGIDIVTLTDRHVYRADNADFMDIIVSVLIMSRAHEESRTKSLRVGAAWENKRQNIPIKKLTRVAPVWLTLSEDRTYFELVPERVAVVRSMFDEADLGKGSLQISRRLNSEGVPTFAPSKGWYESYVSKVLTSRAVIGEFQPHRYIDGKRVPHGDPIQDYFPAVVAREQFERIQIGRAVRRVRGAGRKGINNVNLFQGVAQCGYCDGRMMVVNKGQGPKGGVYFRCDRARRGADCNASSWPLEHFEAAFLWFVDELDIRAIAEGADAEAMRKEAEGRIAVVLADIDKEKRVRESAFELIGENLSVAAYVKDKIGQSTLKIDALEKELRDLRMRTNSAGSSTSRSLDEMKEIIQNFGKWHTADSDARIKVANWVKHNIKELLVYSDGLDEPTTGGPRPRQLSVSLISGEFRTVQISGSDPTVAAYSVYANDDVWKITEGRVCKST

SEQ ID NO: 56567 - DNA, 50 bp, Rhizobium leguminosarum
  source 1..50: mol_type = genomic DNA
cctgcattaatcaaccccacaatccagatgttgaggtgtattaattgaca

SEQ ID NO: 56568 - DNA, 40 bp, Rhizobium leguminosarum
  source 1..40: mol_type = genomic DNA
tcccggaaaggtcggcatgcagatcgtcggcctgcccgac

SEQ ID NO: 56569 - DNA, 40 bp, Rhizobium leguminosarum
  source 1..40: mol_type = genomic DNA
tcccggaaaggtcggcatgctgatcgtcggcctgcccgac

SEQ ID NO: 56570 - DNA, 50 bp, Rhizobium leguminosarum
  source 1..50: mol_type = genomic DNA
ccttcattactacttcccacctgcctgaaattgagaacatctaactcaca

SEQ ID NO: 56571 - protein, 514 aa, Rhizobium anhuiense
MTMSKTRRPKAYSYIRFSTPEQMKGDSLRRQTAATALYAKTHGLDLDDKSFEDFGISAYRGANEETGRLGDFLEAIKHGDISKGSYLLVESLDRISRKTPRKAVRILEAICEAGITVVTLADQRVYTEETLDEDPMAIMYALMVAQRANEESAMKSRRLKQAWIGKRLNAATAPLTAICPAWLKLNDQRTAYDVIPERADVVRSIFAMCLEGLGQHSIATRLTETGIPTFKHSDMWHRSYVKKLLENPSVVGRFIPHTSSVVAGRKVRTPLEPVEGYFPAIVDVEVFEKVAAMSSRRGLNLSAGNTGTAAPANVLAGLAKCPTCGATMTRVNKGGRKGGKPYLVCTKAKAGAGCRYKQVKLEAIEEAVVSLGTYLHHLTPSPNAENEANYRDKLILAEVVEEQIQNLVEAVARGDTSKAVTKAITDHEAQLDHIRGELEELSQLAADAITNRIENTVADFCRLTEGGDIAKINATMRQLFDKAVVDYDAGYLRLYWRHTEQNPVEVLYTFVETA

SEQ ID NO: 56572 - DNA, 50 bp, Rhizobium anhuiense
  source 1..50: mol_type = genomic DNA
ctgaggtctgttgtaaataacatgagtctgttattgacaacagaccctca

SEQ ID NO: 56573 - DNA, 40 bp, Rhizobium anhuiense
  source 1..40: mol_type = genomic DNA
gccgggaggcccgaccatcaggagattatggccgccggcg

SEQ ID NO: 56574 - DNA, 40 bp, Rhizobium anhuiense
  source 1..40: mol_type = genomic DNA
gccgggaggcccgaccatcttgagattatggccgccggcg

SEQ ID NO: 56575 - DNA, 50 bp, Rhizobium anhuiense
  source 1..50: mol_type = genomic DNA
ctggggtctgcctttaataacactttaatgttaataggtgtggaccatca

SEQ ID NO: 56576 - protein, 575 aa, Vibrio parahaemolyticus; identical to SEQ ID NO: 44121

SEQ ID NO: 56577 - DNA, 50 bp, Vibrio parahaemolyticus; identical to SEQ ID NO: 44122
  source 1..50: mol_type = genomic DNA

SEQ ID NO: 56578 - DNA, 40 bp, Vibrio parahaemolyticus; identical to SEQ ID NO: 4428
  source 1..40: mol_type = genomic DNA

SEQ ID NO: 56579 - DNA, 40 bp, Vibrio parahaemolyticus; identical to SEQ ID NO: 4884
  source 1..40: mol_type = genomic DNA

SEQ ID NO: 56580 - DNA, 50 bp, Vibrio parahaemolyticus
  source 1..50: mol_type = genomic DNA
gtattattatattgctaagtaattatgtttctttatagtactcttaaatc

SEQ ID NO: 56581 - protein, 575 aa, Vibrio parahaemolyticus; identical to SEQ ID NO: 43506

SEQ ID NO: 56582 - DNA, 50 bp, Vibrio parahaemolyticus; identical to SEQ ID NO: 44122
  source 1..50: mol_type = genomic DNA

SEQ ID NO: 56583 - DNA, 40 bp, Vibrio parahaemolyticus; identical to SEQ ID NO: 4428
  source 1..40: mol_type = genomic DNA

SEQ ID NO: 56584 - DNA, 40 bp, Vibrio parahaemolyticus; identical to SEQ ID NO: 4884
  source 1..40: mol_type = genomic DNA

SEQ ID NO: 56585 - DNA, 50 bp, Vibrio parahaemolyticus; identical to SEQ ID NO: 56580
  source 1..50: mol_type = genomic DNA

SEQ ID NO: 56586 - protein, 492 aa, Bacillus tropicus
MLFNNENIRHVAIYLRLSRDEENLGIEQILDNHRQTLIALCNENNWSHEIFEEVASSSTIIKREQMVKLLERVQQDYFDAVVVMDIDRLSRDEYDASDIKRILYQTETFIVTPYKMYDLSKDDDSLLLGITNLIASGEYKQILKRMRRGKEYAQKQGHWTNGIAPLGYTKDTKTKKLLPNERAKDIQFIFSEIIRGTTIPSLIRQLNNMGIKTRQGYDFKYNSIVRIVNNEAYKGTIAGNKTIGQYKPRPKEEWVMVHNVHPAIVDEATWDSANRIVNEYSFKAPRSKNRIYPTSNLIYCANCGKIQGCNNHKRLNKIYIKHCKCGNRSFYYNPVLAIIKEEVLGYKENILKALETLEEGKREDDSQYRKEKLFSQLNKSKRALNKINILFEEDEIDIITYRERKAKRQEEIRLIEEQMMALEREDKSVKIETLQEQIKSIEKLVDKWELLDGEGYSDEQVNRLLHGLISGILWSFKKGAESPTLTIIYNEG

SEQ ID NO: 56587 - DNA, 50 bp, Bacillus tropicus
  source 1..50: mol_type = genomic DNA
tagttatccctaaaaactgggccaactggttgagttgttagggacaacta

SEQ ID NO: 56588 - DNA, 40 bp, Bacillus tropicus
  source 1..40: mol_type = genomic DNA
actcgtatttactggaccgactggttctgggaagacaaca

SEQ ID NO: 56589 - DNA, 40 bp, Bacillus tropicus
  source 1..40: mol_type = genomic DNA
actcgtatttactggaccgaatggttctgggaagacaaca

SEQ ID NO: 56590 - DNA, 50 bp, Bacillus tropicus
  source 1..50: mol_type = genomic DNA
tatttagccaccatacctaagccaaactttggaatttgatgggacaacta

SEQ ID NO: 56591 - protein, 655 aa, Vibrio vulnificus
MKPTIITYLRYSSKQQADGLSEFRQSEINRKFVEKFCAEHDVDLNEVISLKDLGVSAYRGLNLTLGSFSQTIKKFKSGEIKKRFNEDGEINTYLIVESLDRITRTGPFKSTQIFTELLEYTNIVVLADGEKKIYSKKSIDSTHGMMDLFMALISLQRSHTESLMKEFRSRKSWEKKREDLLNYFTLPEEERVGLERPKNATAMCPFWLTAKKDGRGYDFIPENKKVMDFLIEKLLDGNGMTRAVRLLNDEIDAGNLKPKLKKANRKTRHFRAAAYSGLFNSEISTVKGDYLLTESYYPTEDDIEQGKYPEKHLGKRVRKEIAVLKNYYPALMTESQAAYIRKMMDERRSAGTKPNKSIKNLAQGILRCPHCNSTYIKAKDRKNVYLRCNLSREGLCNAKVIKHGVFEHNLLQFCKGLNINKIISNQSSDQVIDSSLKELEQKMMPLKVKKSQLEDDIEQIVKNISNIKIPSLLEKVQDDYLKKENELKKVIQEIDLIETSIMKLQQQIAMSDGDNSLQELIDLTLDEQADDEIRQRFNVELKKVVKSMTVLYADTDDNPFGYHMISIQFLDGVHRLIPVHEKMTDKIHNILPYQDAVKVDSVDFSENVILPEDYVEGREKGKYPNLDGMAKYYQENPTKYLRLKHKMDQVHEIHA

SEQ ID NO: 56592 - DNA, 50 bp, Vibrio vulnificus; identical to SEQ ID NO: 46337
  source 1..50: mol_type = genomic DNA

SEQ ID NO: 56593 - DNA, 40 bp, Vibrio vulnificus
  source 1..40: mol_type = genomic DNA
aacggcgccaagccctatggaaatggtgctaatggccgcg

SEQ ID NO: 56594 - DNA, 40 bp, Vibrio vulnificus
  source 1..40: mol_type = genomic DNA
aacggcgccaagccctatgaaaatggtgctaatggccgcg

SEQ ID NO: 56595 - DNA, 50 bp, Vibrio vulnificus
  source 1..50: mol_type = genomic DNA
tacagccgtgttttgagaccaaggaagatggatgattttaatgtgcagct

SEQ ID NO: 56596 - protein, 655 aa, Vibrio vulnificus
MKPTIITYLRYSSKQQADGLSEFRQSEINRKFVEKFCAEHDVDLNEVISLKDLGVSAYRGLNLTLGSFSQTIKKFKSGEIKKRFNEDGEINTYLIVESLDRITRTGPFKSTQIFTELLEYTNIVVLADGEKKIYSKKSIDSTHGMMDLFMALISLQRSHTESLMKEFRSRKSWEKKREDLLNYFTLPEEERVGLERPKNATAMCPFWLTAKKDGRGYDFIPENKKVMDFLIEKLLDGNGMTRSVRLLNDEIDKGTLKPKLKKANRKTRHFRAAAYSGLFNSEISTVKGDYLLTESYYPTEDDIEQGKYPEKHLGKRVRKEIAVLKNYYPALMTESQAAYIRKMMDERRSAGTKPNKSIKNLAQGILRCPLCNSTYIKSKDRKNVYLRCNLAREGLCNAKVIKHGVFEHNLLQFCKGLNINKIISNQSSDQVIDSSLKELEQKMMPLKVRKSELEDDIEQIVKNISSIKIPSLLEKVQDDYLKKENELKKVVQEIDLIETSIMKLQHQIAMSDGDSSLQDLIDLTLDENANDEIRQRFNVELKKVVKSMTVLYADTDDNPFGYHMISIQFLDGVHRLIPVHEKMTDKIHNILPYQDAVKVDSVDFSETVILPTDYLEGLESGKYPHLDGMAKYYQENPTKYLRLKHKIDQVHEIHA

SEQ ID NO: 56597 - DNA, 50 bp, Vibrio vulnificus; identical to SEQ ID NO: 46337
  source 1..50: mol_type = genomic DNA

SEQ ID NO: 56598 - DNA, 40 bp, Vibrio vulnificus; identical to SEQ ID NO: 56593
  source 1..40: mol_type = genomic DNA

SEQ ID NO: 56599 - DNA, 40 bp, Vibrio vulnificus; identical to SEQ ID NO: 56594
  source 1..40: mol_type = genomic DNA

SEQ ID NO: 56600 - DNA, 50 bp, Vibrio vulnificus; identical to SEQ ID NO: 56595
  source 1..50: mol_type = genomic DNA

SEQ ID NO: 56601 - protein, 523 aa, Klebsiella pneumoniae; identical to SEQ ID NO: 38381

SEQ ID NO: 56602 - DNA, 50 bp, Klebsiella pneumoniae
  source 1..50: mol_type = genomic DNA
aacccgaatagcctatattcaagggtcattgtatttgagctattcggcaa

SEQ ID NO: 56603 - DNA, 40 bp, Klebsiella pneumoniae; identical to SEQ ID NO: 54543
  source 1..40: mol_type = genomic DNA

SEQ ID NO: 56604 - DNA, 40 bp, Klebsiella pneumoniae
  source 1..40: mol_type = genomic DNA
gcggcgaggtaaatcaaggaacattgcgctcatagtcgtt

SEQ ID NO: 56605 - DNA, 50 bp, Klebsiella pneumoniae
  source 1..50: mol_type = genomic DNA
aaccagagacaaatatatttaaggaacatagaagttatgttactcaacaa

SEQ ID NO: 56606 - protein, 523 aa, Klebsiella michiganensis
MRQVITYLRFSSKPQERGDSIRRQKGLFERWLKDNPDAKVVDEFSDEGASAYHGHHLKGDFGRMLQKIQDGKYLSGQTVLLVESETRLNRQKARNTENLVDLITGKGVDVICLESGKIYTSTNIDDLDTSIQLKIAAHIAHQQSKEKSIKVSAAWEHRAQLALEGKQQLTKNVPGWIDPDTRKLNEHSSTVVTIFDLLLSGESLHNIARYLQANNFKSFSRREKANGFSVHSVRTILRSESTVGTLAASKRNDRPAIPNYYEPAIDVATFNKAQEILSKNRVGRAPASDNPITINLFKGIIRCQCGASVHPTGVKSTYQGVYRCNNVPDGRCNVPTIKRKPFDKWMLDNIIGFLERSDGNNTDKRKAEIEYQISLVTSKLKKATPLLLELDDVTELKEQVKELNIQRSNMQSELDELNQRETLSDKPLHHLSEIDLTTKAGRVEAQLILSKFVQSIELQREMIIITLRNGTVIGKSRDLSPVLSQDLMKQVVSSPSPTDIDMFSVITSDEEFRKSGKQVTKRS

SEQ ID NO: 56607 - DNA, 50 bp, Klebsiella michiganensis; identical to SEQ ID NO: 56602
  source 1..50: mol_type = genomic DNA

SEQ ID NO: 56608 - DNA, 40 bp, Klebsiella michiganensis; identical to SEQ ID NO: 52043
  source 1..40: mol_type = genomic DNA

SEQ ID NO: 56609 - DNA, 40 bp, Klebsiella michiganensis
  source 1..40: mol_type = genomic DNA
gcggcgaggtaaatcaaagaacattgcgctcatagtcgtt

SEQ ID NO: 56610 - DNA, 50 bp, Klebsiella michiganensis; identical to SEQ ID NO: 56605
  source 1..50: mol_type = genomic DNA

SEQ ID NO: 56611 - protein, 543 aa, Pseudomonas aeruginosa
MGKNGARVYSYLRFSDPRQATGSSADRQLAYASAWASKHGMELDATLTLRDEGLSAYHETHVKQGALGAFLRAVDEGRIPAGSVLIVEGLDRLSRAEPLLAQAQLGQIVNAGITVVTASDGREYNREGLKAEPMNLVYSLLVMIRAHEESDTKSKRVKAAVRRQCEAWVAGSYRGRIVSGKDPQWLAWDGDSWQFIPERVEAVRFALDAYRSGIGAARLVRLMHEKGMVLSDWGIAAQQVYRLVRLPALRGAKRISIDGEDFMLEDYYPRLLSDEEFSELETLVGQRYRRRGKDEIVGIVTGIGITRCGYCGTALVAQNLMQRVKADGSLEDGHRRLHCVSYSKNGGCNGGSCSSVPIERAVLAYCSDQMNLQRLLEPSSAGEDLRPRLVEAQRGVAEIERQLERVTDALLADDSGAAPLAFVRKARELEEDLERRRSAVQALEQELVAKSASAPAAGASKWAELAERAKSMADAEAREQARQLVMDTFETLVVYMRGVIPNPKGRYIDVMMKSRAGQTRWIRVDRRTGVWKEGADRPTTRRP

SEQ ID NO: 56612 - DNA, 50 bp, Pseudomonas aeruginosa
  source 1..50: mol_type = genomic DNA
agtatattttcctagtcgtaggggcaccctaacgaaacccatcctatact

SEQ ID NO: 56613 - DNA, 40 bp, Pseudomonas aeruginosa; identical to SEQ ID NO: 54108
  source 1..40: mol_type = genomic DNA

SEQ ID NO: 56614 - DNA, 40 bp, Pseudomonas aeruginosa
  source 1..40: mol_type = genomic DNA
gtcgaccagcgccttggggattccaagactgacgaagccg

SEQ ID NO: 56615 - DNA, 50 bp, Pseudomonas aeruginosa
  source 1..50: mol_type = genomic DNA
aatacatttggattatcctaccagatccctaatgaattacattctttact

SEQ ID NO: 56616 - protein, 543 aa, Pseudomonas aeruginosa
MGKNGARVYSYLRFSDPRQATGSSADRQLAYASAWASKHGMELDATLTLRDEGLSAYHETHVKQGALGAFLRAVDEGRIPAGSVLIVEGLDRLSRAEPLLAQAQLGQIVNAGITVVTASDGREYNREGLKAEPMNLVYSLLVMIRAHEESDTKSKRVKAAVRRQCEAWVAGSYRGRIVSGKDPQWLAWDGDSWQFIPERVEAVRFALDAYRSGIGAARLVRLMHEKGMVLSDWGIAAQQVYRLVRLPALRGAKRISIDGEDFMLEDYYPRLLSDEEFSELETLVGQRYRRRGKDEIVGIVTGIGITRCGYCGTALVAQNLMQRVKADGSLEDGHRRLHCVSYSKNGGCNGGSCSSVPIERAVLAYCSDQMNLQRLLEPSSAGEDLRPRLVEAQKGVAEIERQLERVTDALLADDSGAAPLAFVRKARELEEDLERRRSAVRALEQELVAKSASAPAAGASKWAELAERAKSMVDVDAREQARQLVMDTFETLVVYMRGVIPNPKGRYIDVMMKSRAGQTRWIRVDRRTGVWKEGADRPTTRRS

SEQ ID NO: 56617 - DNA, 50 bp, Pseudomonas aeruginosa
  source 1..50: mol_type = genomic DNA
agtatattttcctattcgtaggggcaccctaacgaaacccatcctatact

SEQ ID NO: 56618 - DNA, 40 bp, Pseudomonas aeruginosa; identical to SEQ ID NO: 54108
  source 1..40: mol_type = genomic DNA

SEQ ID NO: 56619 - DNA, 40 bp, Pseudomonas aeruginosa; identical to SEQ ID NO: 56614
  source 1..40: mol_type = genomic DNA

SEQ ID NO: 56620 - DNA, 50 bp, Pseudomonas aeruginosa; identical to SEQ ID NO: 56615
  source 1..50: mol_type = genomic DNA

SEQ ID NO: 56621 - protein, 543 aa, Pseudomonas aeruginosa
MGKNGARVYSYLRFSDPRQATGSSADRQLAYASAWASKHGMELDATLTLRDEGLSAYHETHVKQGALGAFLRAVDEGRIPAGSVLIVEGLDRLSRAEPLLAQAQLGQIVNAGITVVTASDGREYNREGLKAEPMNLVYSLLVMIRAHEESDTKSKRVKAAVRRQCEAWVAGSYRGRIVSGKDPQWLAWDGDSWQFIPERVEAVRFALDAYRSGIGAARLVRLMHEKGMVLSDWGIAAQQVYRLVRLPALRGAKRISIDGEDFMLEDYYPRLLSDEEFSELETLVGQRYRRRGKDEIVGIVTGIGITRCGYCGTALVAQNLMQRVKADGSLEDGHRRLHCVSYSKNGGCNGGSCSSVPIERAVLAYCSDQMNLQRLLEPSSAGEDLRPRLVEAQKGVAEIERQLERVTDALLADDSGAAPLAFVRKARELEEDLERRRSAVRALEQELVAKSASAPAAGASKWAELAERAKSMADVAAREQARQLVMDTFETLVVYMRGVIPNPKGRYIDVMMKSRAGQTRWIRVDRRTGVWKEGADRPTTRRP

SEQ ID NO: 56622 - DNA, 50 bp, Pseudomonas aeruginosa
  source 1..50: mol_type = genomic DNA
agtatatttttctattcgtaggggcaccctaacgaaacccatcctatact

SEQ ID NO: 56623 - DNA, 40 bp, Pseudomonas aeruginosa; identical to SEQ ID NO: 54108
  source 1..40: mol_type = genomic DNA

SEQ ID NO: 56624 - DNA, 40 bp, Pseudomonas aeruginosa; identical to SEQ ID NO: 56614
  source 1..40: mol_type = genomic DNA

SEQ ID NO: 56625 - DNA, 50 bp, Pseudomonas aeruginosa; identical to SEQ ID NO: 56615
  source 1..50: mol_type = genomic DNA

SEQ ID NO: 56626 - protein, 434 aa, Mycobacteroides abscessus
MNDHQIVGWAEDLDVSGSVDPFDTPSLGPWFREDKRVQWDILVAWKLDRIGRRAIPLNKVFGWMLEHEKTLVCVSDNIDLSTWVGRLVANVLAGVAEGEIEAIKERTRASRRKLLTSGRWPGGQVPFGFTAVELPEGGWVLATDHAKARVVTRIVEEVIRGSAIEAVANRLNDDGIPAPKGGEWLPSSIWKIVTGKYLLGHATYGGETVRGPDGLPVLNAEPLVTREQWGRLQEAIKERRAGSRTKTTSPLLGVVVCAVCGKPLFHKIYRRNYGKGLYRYYHCRDKSHGKQMDAEPIEYLLADSFIREVGWVPLQEARYIPAENHQIELEEAIRAVEELTSVLGTITSATVRSSITGQLTALDSRIAALESLPKSTARWEYRDLEQTYADEWNLDEDVQRRRALLVKSGITAEASPGYFHFRIPPDLIERMRSI

SEQ ID NO: 56627 - DNA, 50 bp, Mycobacteroides abscessus
  source 1..50: mol_type = genomic DNA
tgtctatagtaggtagtagatgacaagtcgtggtctacccagtgtagact

SEQ ID NO: 56628 - DNA, 40 bp, Mycobacteroides abscessus; identical to SEQ ID NO: 22588
  source 1..40: mol_type = genomic DNA

SEQ ID NO: 56629 - DNA, 40 bp, Mycobacteroides abscessus
  source 1..40: mol_type = genomic DNA
catctacatcgtcggcgactggtcgtggtcaatcgacatg

SEQ ID NO: 56630 - DNA, 50 bp, Mycobacteroides abscessus
  source 1..50: mol_type = genomic DNA
attctatagtaaccagaatatcactgcaggtgggctctttgatgtagact

SEQ ID NO: 56631 - protein, 434 aa, Mycobacteroides abscessus
MNDHQIVGWAEDLDVSGSVDPFDTPSLGPWFREDKRVQWDILVAWKLDRIGRRAIPLNKVFGWMLEHEKTLVCVSDNIDLSTWVGRLVANVLAGVAEGEIEAIKERTRASRRKLLTSGRWPGGQVPFGFTAVELPEGGWVLATDHAKARVVTRIVEEVIRGSAIEAVANRLNDDGIAAPKGGEWLPSSIWKIVTGKYLLGHATYGGETVRGPDGLPVLNAEPLVTREQWGRLQEAIKERRAGSRTKTTSPLLGVVVCAVCGKPLFHKIYRRNYGKGLYRYYHCRDKSHGKQMDAEPIEYLLADSFIREVGWVPLQEARYIPAENHQIELEEAIRAVEELTSVLGTITSATVRSSITGQLTALDSRIAALESLPKSDARWEYRDLEQTHADEWNLDEDVQRRRALLVKSGITAEASPGYFHFRIPPDLIERMRSI

SEQ ID NO: 56632 - DNA, 50 bp, Mycobacteroides abscessus; identical to SEQ ID NO: 56627
  source 1..50: mol_type = genomic DNA

SEQ ID NO: 56633 - DNA, 40 bp, Mycobacteroides abscessus
  source 1..40: mol_type = genomic DNA
catctacatcgtcggtgacaagtcgtggtcaatcgacatg

SEQ ID NO: 56634 - DNA, 40 bp, Mycobacteroides abscessus
  source 1..40: mol_type = genomic DNA
catctacatcgtcggtgactggtcgtggtcaatcgacatg

SEQ ID NO: 56635 - DNA, 50 bp, Mycobacteroides abscessus; identical to SEQ ID NO: 56630
  source 1..50: mol_type = genomic DNA

SEQ ID NO: 56636 - protein, 526 aa, Dehalococcoides mccartyi
MVNNLGKAAIYARVSSERQAEKDLSIPAQIKALRKYALERGWDVVIEYVDEAESARTANRPAFKEMIAMAKKKEKPFDTILVWKLSRFARNREDSILYKSLLRKRGISVISINEQVDESPAGHLLEGIIEVIDEFYSINLSQDTVRGMKENASRGFYNGGFTPFGYKRTKIKIGMADKTKLIPDENESNVVKKIFEMAVGGQGGKEITKALNAAGTRTKLGKQFSTTAINHILRNEVYTGALVWRFRNNGYGNSHKAASNDIIRVPNCHEAVVSTEDFGRVQQLLTRRRPVSQHPRTISSQYLLSGLLHCGKCGAAMSGCWAKSGKYFYYDCVQHQKKGKEVCNCRLMSKDKLESFVLERIRENILTDENIKQLVQLVNEELVKNSGFFEEQLSEVGQQLGQVQSKLSKLYAALETGKIDLEDLAPRIKELRSQQKELEEKRNGLLDEMNEESPQALNLKTIQEYVSSMKALLASSSFIEQKSFLRSFVKRIELNEPQVVIDYTMPLPINGLTTTEEVLRIDRFGS

SEQ ID NO: 56637 - DNA, 50 bp, Dehalococcoides mccartyi
  source 1..50: mol_type = genomic DNA
gttctgcgtattgatagatttggctcccctaataggtcaatacacagaac

SEQ ID NO: 56638 - DNA, 40 bp, Dehalococcoides mccartyi
  source 1..40: mol_type = genomic DNA
cggttgaataaactctggctcccgaggtaggactcgaacc

SEQ ID NO: 56639 - DNA, 40 bp, Dehalococcoides mccartyi
  source 1..40: mol_type = genomic DNA
cggttgaataaactctggcagccgaggtaggactcgaacc

SEQ ID NO: 56640 - DNA, 50 bp, Dehalococcoides mccartyi
  source 1..50: mol_type = genomic DNA
gttttgcttttctttatattcagcagcctcactaggaaccctcccagaac

SEQ ID NO: 56641 - protein, 458 aa, Staphylococcus epidermidis
MNYERSYLRSCQVSTLEQKEHGYSIEEQERKLKSFCEINDWSVSDVFIDAGFSGAKRERPELQRMMNDIKRFDLVLVYKLDRLTRNVRDLLDLLEIFEQNNVAFRSATEVYDTSTAMGRLFVTLVGAMAEWERETIRERVMMGKRAAIKQGMILTPPPFYYDRVDNTYIPNDYKKVVLWAYDEVMKGVSSKGIARKLNDSDIPPPNGKRWEDRTITRALRSPITRGHYTWGDVFIENSHEPIITEEMYQQIKERLEERINTKIVSHVSVFRGKFICPRCGGTLTLNTVTRKRKKGYVTYKTYYCNTCKAKKESFGFSENEALRVFRDYLSELDLDKYKVKTKQNDDVVTIDIDKIMEQRKRYHKLYAKGLMQEEELFELIKETDETIAEYEKQKELVPRKSLDIDKIKKFKNALLESWEIFSLEDKADFIKMAIKSIDIEYVKLKNRHSIEIKDIEFY

SEQ ID NO: 56642 - DNA, 50 bp, Staphylococcus epidermidis; identical to SEQ ID NO: 51577
  source 1..50: mol_type = genomic DNA

SEQ ID NO: 56643 - DNA, 40 bp, Staphylococcus epidermidis; identical to SEQ ID NO: 26028
  source 1..40: mol_type = genomic DNA

SEQ ID NO: 56644 - DNA, 40 bp, Staphylococcus epidermidis; identical to SEQ ID NO: 26029
  source 1..40: mol_type = genomic DNA

SEQ ID NO: 56645 - DNA, 50 bp, Staphylococcus epidermidis; identical to SEQ ID NO: 26020
  source 1..50: mol_type = genomic DNA

SEQ ID NO: 56646 - protein, 458 aa, Staphylococcus epidermidis
MNYERSYLRSCQVSTLEQKEHGYSIEEQERKLKSFCEINDWSVSDVFIDAGFSGAKRERPELQRMVNDIKRFDLVLVYKLDRLTRNVRDLLDLLEVFEQNNVAFRSATEVYDTSTAMGRLFVTLVGAMAEWERETIRERVMMGKRAAIKQGMILTPPPFYYDRVDNTYIPNDYKKVVLWAYDEVMKGNSSKAIARKLNDSDIPPPNGKRWEDRTITRALRNPITRGHYTWGDVFIENSHEPIITEEMYQQIKERLEERINTKIVSHVSVFRGKFICPRCGGTLTLNTVTRKRKKGYVTYKTYYCNTCKAKKESFGFSENEALRVFHDYLSKLDLEKYEVKKKQKDDVVTIDIDKVMEQRKRYHKLYAKGLMQEEELFELIKETDETIAEYEKQKELVPRKSLDIDKIKKFKNALLESWKIFSLEDKADFIKMAIKSIDIEYVKIKNRHSIKISDIEFY

SEQ ID NO: 56647 - DNA, 50 bp, Staphylococcus epidermidis; identical to SEQ ID NO: 51577
  source 1..50: mol_type = genomic DNA

SEQ ID NO: 56648 - DNA, 40 bp, Staphylococcus epidermidis; identical to SEQ ID NO: 26028
  source 1..40: mol_type = genomic DNA

SEQ ID NO: 56649 - DNA, 40 bp, Staphylococcus epidermidis; identical to SEQ ID NO: 26029
  source 1..40: mol_type = genomic DNA

SEQ ID NO: 56650 - DNA, 50 bp, Staphylococcus epidermidis; identical to SEQ ID NO: 26020
  source 1..50: mol_type = genomic DNA

SEQ ID NO: 56651 - protein, 458 aa, Staphylococcus epidermidis; identical to SEQ ID NO: 51661

SEQ ID NO: 56652 - DNA, 50 bp, Staphylococcus epidermidis; identical to SEQ ID NO: 51577
  source 1..50: mol_type = genomic DNA

SEQ ID NO: 56653 - DNA, 40 bp, Staphylococcus epidermidis; identical to SEQ ID NO: 26028
  source 1..40: mol_type = genomic DNA

SEQ ID NO: 56654 - DNA, 40 bp, Staphylococcus epidermidis; identical to SEQ ID NO: 26029
  source 1..40: mol_type = genomic DNA

SEQ ID NO: 56655 - DNA, 50 bp, Staphylococcus epidermidis; identical to SEQ ID NO: 26020
  source 1..50: mol_type = genomic DNA

SEQ ID NO: 56656 - protein, 458 aa, Staphylococcus epidermidis
MNYERSYLRSCQVSTLEQKEHGYSIEEQERKLKSFCEINDWSISDVFIDAGFSGAKRERPELQRMMKDIKRFDLVLVYKLDRLTRNVRDLLDLLEIFEQNNVAFRSATEVYDTSTAMGRLFVTLVGAMAEWERETIRERVMMGKRAAIKQGMILTPPPFYYDRVDNTYIPNDYKKVVLWAYDEVLKGVSSKGIARKLNDSDIPPPNGKRWEDRTITRALRSPITRGHYTWGDVFIENSHEPIISEEMYQQIKERLEERINTKIVSHVSVFRGKFICPKCGGTLTMNTATRKRKKGYVTYKTYYCNTCKTKKQSFGFAENEALRVFHDYLSKLDLEKYEVKTKQKDDVVTIDIDKIMEQRKRYHKLYAKGLMQEEELFELIKETDETIAEYEKQKELVPRKSLDIDKIKKFKNALLESWKIFSLEDKADFIKMAIKSIDIEYVKIKNRHSIKISDIEFY

SEQ ID NO: 56657 - DNA, 50 bp, Staphylococcus epidermidis
  source 1..50: mol_type = genomic DNA
gtacggaagtatagacactcgattaatatttaatgtgtatacttccgcat

SEQ ID NO: 56658 - DNA, 40 bp, Staphylococcus epidermidis; identical to SEQ ID NO: 26028
  source 1..40: mol_type = genomic DNA

SEQ ID NO: 56659 - DNA, 40 bp, Staphylococcus epidermidis; identical to SEQ ID NO: 26029
  source 1..40: mol_type = genomic DNA

SEQ ID NO: 56660 - DNA, 50 bp, Staphylococcus epidermidis; identical to SEQ ID NO: 26020
  source 1..50: mol_type = genomic DNA

SEQ ID NO: 56661 - protein, 458 aa, Staphylococcus epidermidis
MNYERSYLRSCQVSTLEQKEHGYSIEEQERKLKSFCEINDWSVSDVFIDAGFSGAKRERPELQRMMNDIKRFDLILVYKLDRLTRNVRDLLDLLEIFEQNNVAFRSATEVYDTSTAMGRLFVTLVGAMAEWERETIRERVMMGKRAAIKQGMILTPPPFYYDRIDNTYIPNDYKKVVLWAYDEVLKGVSSKGIARKLNDSDIPPPNGKRWEDRTITRALRSPITRGHYTWGDVFIENSHEPIITEEMYQQIKERLEERINTKIVSHISVFRGKFICPRCNGTLTMNTATRKRKKGYVTYKTYYCNNCKTRKQSFGFSENEALRVFRDYLFKLDLDKYEVKTKQNDDVVTIDIDKIMEQRKRYHKLYAKGLMQEEELFELIKETDETIAEYEKQKELLPRKTLDIDKIKSFKNVLLESWKIFSLEDKADFIKMAIKSIDIEYVKLKNRHSIEIKDIEFY

SEQ ID NO: 56662 - DNA, 50 bp, Staphylococcus epidermidis
  source 1..50: mol_type = genomic DNA
gtacggaagtatagacagtcgattaatatttaatgtgtatacttccgtaa

SEQ ID NO: 56663 - DNA, 40 bp, Staphylococcus epidermidis; identical to SEQ ID NO: 26028
  source 1..40: mol_type = genomic DNA

SEQ ID NO: 56664 - DNA, 40 bp, Staphylococcus epidermidis; identical to SEQ ID NO: 26029
  source 1..40: mol_type = genomic DNA

SEQ ID NO: 56665 - DNA, 50 bp, Staphylococcus epidermidis; identical to SEQ ID NO: 26020
  source 1..50: mol_type = genomic DNA

SEQ ID NO: 56666 - protein, 458 aa, Staphylococcus epidermidis
MNYERSYLRSCQVSTLEQKEHGYSIEEQERKLKSFCEINDWCISDVFIDAGFSGAKRERPELQRMMKDIKRFNLVLVYKLDRLTRNVRDLLDLLEIFEQNNVAFRSATEVYDTSTAMGRLFVTLVGAMAEWERETIRERVMMGKRAAIKQGMILTPPPFYYDRVDNTYIPNDYKKVVLWAYDEVMKGNSSKAIARKLNDSDIPPPNGKRWEDRTITRALRSPITRGHYTWGDVFIENSHEPIITEEMYQQIKERLEERINTKIVSHVSVFRGKFICPKCGGTLTMNTATRKRKKGYVTYKTYYCNTCKGKKESFGFAENEALRVFRDYLYKLDLEKYEVKTKQKDDVITIDIDKIMEQRKRYHKLYAKGLMQEEELFELIKETDETIAEYEKQKELVPRKSLDIDKIKKFKNVLLESWKIFSLEDKADFIKMAIKSIDIEYVKLKNRHSIEIKDIEFY

SEQ ID NO: 56667 - DNA, 50 bp, Staphylococcus epidermidis; identical to SEQ ID NO: 46422
  source 1..50: mol_type = genomic DNA

SEQ ID NO: 56668 - DNA, 40 bp, Staphylococcus epidermidis; identical to SEQ ID NO: 52823
  source 1..40: mol_type = genomic DNA

SEQ ID NO: 56669 - DNA, 40 bp, Staphylococcus epidermidis
  source 1..40: mol_type = genomic DNA
gtatggcggtacatgcattcttatcggatgtataccaact

SEQ ID NO: 56670 - DNA, 50 bp, Staphylococcus epidermidis; identical to SEQ ID NO: 26020
  source 1..50: mol_type = genomic DNA

SEQ ID NO: 56671 - protein, 458 aa, Staphylococcus epidermidis
MNYERSYLRSCQVSTLEQKEHGYSIEEQERKLKSFCEINDWSISDVFIDAGFSGAKRDRPELQRLMSNIKRFDLVLVYKLDRLTRNVRDLLDLLEVFEQNNVAFRSATEVYDTSTAMGRLFVTLVGAMAEWERETIRERVMMGKRAAIKQGMILTPPPFYYDRVDNTYIPNDYKKVVLWAYDEVLKGVSSKGIARKLNDSDIPPPNGKRWEDRTITRALRSPITRGHYTWGDVFIENSHEPIITEEMYQQIKERLEERINTKIVSHVSVFRGKFICPRCGGTLTMNTATRKRKKGYVTYKTYYCNTCKGKKESFGFSENEALRVFRDYLSKLDLEKYEVKTKQKDDVVTIDIDKIMEQRKRYHKLYAKGLMQEEELFELIKETDETIAEYEKQKELVPSKTLDVDKIKNFKNALLESWEIFSLEDKADFIKMAIKSIDIDYVKLKNRHSIKINDIEFY

SEQ ID NO: 56672 - DNA, 50 bp, Staphylococcus epidermidis; identical to SEQ ID NO: 46422
  source 1..50: mol_type = genomic DNA

SEQ ID NO: 56673 - DNA, 40 bp, Staphylococcus epidermidis; identical to SEQ ID NO: 52823
  source 1..40: mol_type = genomic DNA

SEQ ID NO: 56674 - DNA, 40 bp, Staphylococcus epidermidis; identical to SEQ ID NO: 56669
  source 1..40: mol_type = genomic DNA

SEQ ID NO: 56675 - DNA, 50 bp, Staphylococcus epidermidis; identical to SEQ ID NO: 26020
  source 1..50: mol_type = genomic DNA

SEQ ID NO: 56676 - protein, 458 aa, Staphylococcus epidermidis
MNYERSYLRSCQVSTLEQKEHGYSIEEQERKLKSFCEINDWSISDVFIDAGFSGAKRERPELKRMMNDIKRFDLVLVYKLDRLTRNVRDLLDLLEVFEQNNVAFRSATEVYDTSTAMGRLFVTLVGAMAEWERETIRERVMMGKRAAIKQGMILTPPPFYYDRVDNTYIPNDYKKVVLWAYDEVLKGVSSKGIARKLNDSDIPPPNGKRWEDRTITRALRSPITRGHYTWGDVFIENSHEPIITEEMYQQIKERLEERINTKIVSHVSVFRGKFICPRCGGTLTLNTVTRKRKKGYVTYKTYYCNTCKAKKESFGFSENEALRVFRDYLSELDLDKYKVKTKQNDDVVTIDIDKIMEQRKRYHKLYAKGLMQEEELFELIKETDETIAEYEKQKELVPRKILDIDKIKSFKNVLLESWNIFSLEDKADFIKMAIKSIDIEYVELKNRHSIEIKEIEFY

SEQ ID NO: 56677 - DNA, 50 bp, Staphylococcus epidermidis; identical to SEQ ID NO: 46422
  source 1..50: mol_type = genomic DNA

SEQ ID NO: 56678 - DNA, 40 bp, Staphylococcus epidermidis; identical to SEQ ID NO: 26028
  source 1..40: mol_type = genomic DNA

SEQ ID NO: 56679 - DNA, 40 bp, Staphylococcus epidermidis; identical to SEQ ID NO: 26029
  source 1..40: mol_type = genomic DNA

SEQ ID NO: 56680 - DNA, 50 bp, Staphylococcus epidermidis; identical to SEQ ID NO: 26020
  source 1..50: mol_type = genomic DNA

SEQ ID NO: 56681 - protein, 458 aa, Staphylococcus epidermidis
MNYERSYLRSCQVSTLEQKEHGYSIEEQERKLKSFCEINDWCISDVFIDAGFSGAKRERPELQRMMKDIKRFDLVLVYKLDRLTRNVRDLLDLLEIFEQNNVAFRSATEVYDTSTAMGRLFVTLVGAMAEWERETIRERVMMGKRAAIKQGMILTPPPFYYDRVDNTYIPNDYKKVVLWAYDEVMKGNSSKAIARKLNDSDIPPPNGKRWEDRTITRALRSPITRGHYTWGDVFIENSHEPIITEEMYQQIKERLEERINTKIVSHVSVFRGKFICPRCGGTLTLNTTTRKRKKGYVTYKTYYCNTCKGKKESFGFSENEALRVFRDYLSKLDLEKYEVKTKQKDDVVTIDIDKIMEQRKRYHKLYAKGLMQEEELFELIKETDETIAEYEKQKELVPRKTLDIDKIKKFKNVLSKSWNIFSLEDKADFIKMAIKSIDIEYVKLKNRHSIEINDIEFY

SEQ ID NO: 56682 - DNA, 50 bp, Staphylococcus epidermidis; identical to SEQ ID NO: 17367
  source 1..50: mol_type = genomic DNA

SEQ ID NO: 56683 - DNA, 40 bp, Staphylococcus epidermidis; identical to SEQ ID NO: 26028
  source 1..40: mol_type = genomic DNA

SEQ ID NO: 56684 - DNA, 40 bp, Staphylococcus epidermidis; identical to SEQ ID NO: 26029
  source 1..40: mol_type = genomic DNA

SEQ ID NO: 56685 - DNA, 50 bp, Staphylococcus epidermidis; identical to SEQ ID NO: 26020
  source 1..50: mol_type = genomic DNA

SEQ ID NO: 56686 - protein, 458 aa, Staphylococcus epidermidis; identical to SEQ ID NO: 51661

SEQ ID NO: 56687 - DNA, 50 bp, Staphylococcus epidermidis; identical to SEQ ID NO: 46422
  source 1..50: mol_type = genomic DNA

SEQ ID NO: 56688 - DNA, 40 bp, Staphylococcus epidermidis; identical to SEQ ID NO: 26028
  source 1..40: mol_type = genomic DNA

SEQ ID NO: 56689 - DNA, 40 bp, Staphylococcus epidermidis; identical to SEQ ID NO: 26029
  source 1..40: mol_type = genomic DNA

SEQ ID NO: 56690 - DNA, 50 bp, Staphylococcus epidermidis; identical to SEQ ID NO: 26020
  source 1..50: mol_type = genomic DNA

SEQ ID NO: 56691 - protein, 458 aa, Staphylococcus epidermidis; identical to SEQ ID NO: 51576

SEQ ID NO: 56692 - DNA, 50 bp, Staphylococcus epidermidis; identical to SEQ ID NO: 51577
  source 1..50: mol_type = genomic DNA

SEQ ID NO: 56693 - DNA, 40 bp, Staphylococcus epidermidis; identical to SEQ ID NO: 26028
  source 1..40: mol_type = genomic DNA

SEQ ID NO: 56694 - DNA, 40 bp, Staphylococcus epidermidis; identical to SEQ ID NO: 26029
  source 1..40: mol_type = genomic DNA

SEQ ID NO: 56695 - DNA, 50 bp, Staphylococcus epidermidis; identical to SEQ ID NO: 26020
  source 1..50: mol_type = genomic DNA

SEQ ID NO: 56696 - protein, 458 aa, Staphylococcus epidermidis
MNYERSYLRSCQVSTLEQKEHGYSIEEQERKLKSFCEINDWSISDVFIDAGFSGAKRERPELKRMMNDIKRFDLVLVYKLDRLTRNVRDLLDLLEIFEQNNVAFRSATEVYDTSTAMGRLFVTLVGAMAEWERETIRERVMMGKRAAIKQGMILTPPPFYYDRVDNTYIPNDYKKVVLWAYDEVLKGVSSKGIARKLNDSDIPPPNGKRWEDRTITRALRSPITRGHYTWGDVFIENSHEPIITEEMYQQIKERLEERINTKIVSHVSVFRGKFICPRCGGTLTLNTVTRKRKKGYVTYKTYYCNTCKAKKESFGFSENEALRVFRDYLSELDLDKYKVKTKQNDDVVTIDIDKIMEQRKRYHKLYAKGLMQEEELFELIKETDETIAEYEKQKELVPRKILDIDKIKSFKNVLLESWNIFSLEDKADFIKMAIKSIDIEYVELKNRHSIEIKEIEFY

SEQ ID NO: 56697 - DNA, 50 bp, Staphylococcus epidermidis; identical to SEQ ID NO: 46422
  source 1..50: mol_type = genomic DNA

SEQ ID NO: 56698 - DNA, 40 bp, Staphylococcus epidermidis; identical to SEQ ID NO: 26028
  source 1..40: mol_type = genomic DNA

SEQ ID NO: 56699 - DNA, 40 bp, Staphylococcus epidermidis; identical to SEQ ID NO: 26029
  source 1..40: mol_type = genomic DNA

SEQ ID NO: 56700 - DNA, 50 bp, Staphylococcus epidermidis; identical to SEQ ID NO: 26020
  source 1..50: mol_type = genomic DNA

SEQ ID NO: 56701 - protein, 458 aa, Staphylococcus epidermidis; identical to SEQ ID NO: 17356

SEQ ID NO: 56702 - DNA, 50 bp, Staphylococcus epidermidis; identical to SEQ ID NO: 17357
  source 1..50: mol_type = genomic DNA

SEQ ID NO: 56703 - DNA, 40 bp, Staphylococcus epidermidis
  source 1..40: mol_type = genomic DNA
gtatggtggtacatgcattaatatcggatgtataccgact

SEQ ID NO: 56704 - DNA, 40 bp, Staphylococcus epidermidis
  source 1..40: mol_type = genomic DNA
gtatggtggtacatgcattcttatcggatgtataccgact

SEQ ID NO: 56705 - DNA, 50 bp, Staphylococcus epidermidis; identical to SEQ ID NO: 26020
  source 1..50: mol_type = genomic DNA

SEQ ID NO: 56706 - protein, 458 aa, Staphylococcus epidermidis
MNYERSYLRSCQVSTLEQKEHGYSIEEQERKLKSFCEINDWSISDVFIDAGFSGAKRERPELQRMMKDIKRFDLVLVYKLDRLTRNVRDLLDLLEIFEQNNVAFRSATEVYDTSTAMGRLFVTLVGAMAEWERETIRERVMMGKRAAIKQGMILTPPPFYYDRVDNTYVPNNYKKVVLWAYDEVLKGVSSKGIARKLNDSDIPPPNGKRWEDRTITRALRSPITRGHYTWGDVFIENSHEPIITEEMYQQIKERLEERINTKIVSHVSVFRGKFICPKCGGTLTMNTATRKRKKGYVTYKTYYCNTCKTKKQSFGFSENEALRVFRDYLSKLDLEKYEIKTKQKDDVVTIDIDKIMEQRKRYHKLYAKGLMQEEELFELIKETDETIAEYEKQKELAPSKTLDVAKIKKFKNALLESWKIFSLEDKADFIKMAIKSIDIDYVKLKNRHSIKINDIEFY

SEQ ID NO: 56707 - DNA, 50 bp, Staphylococcus epidermidis; identical to SEQ ID NO: 46422
  source 1..50: mol_type = genomic DNA

SEQ ID NO: 56708 - DNA, 40 bp, Staphylococcus epidermidis; identical to SEQ ID NO: 26028
  source 1..40: mol_type = genomic DNA

SEQ ID NO: 56709 - DNA, 40 bp, Staphylococcus epidermidis; identical to SEQ ID NO: 26029
  source 1..40: mol_type = genomic DNA

SEQ ID NO: 56710 - DNA, 50 bp, Staphylococcus epidermidis; identical to SEQ ID NO: 26020
  source 1..50: mol_type = genomic DNA

SEQ ID NO: 56711 - protein, 417 aa, Staphylococcus epidermidis
MNYERSYLRSCQVSTLEQKEHGYSIEEQERKLKSFCEINDWSVSDVFIDAGFSGAKRDRPELQRMMNDIKRFDLVLVYKLDRLTRNVRDLLDLLEVFEQNNVAFRSATEVYDTSTAMGRLFVTLVGAMAEWERETIRERVMMGKRAAIKQGMILTPPPFYYDRVDNTYIPNDYKKVVLWAYDEVMKGNSSKAIARKLNDSDIPPPNGKRWEDRTITRALRSPITRGHYTWGDVFIENSHEPIITEEMYQQIKERLEERINTKIVSHVSVFRGKFICPRCGGTLTLNTVTRKRKKGYVTYKTYYCNTCKAKKESFGFSENEALRVFRDYLSELDLDKYKVKTKQNDDVVTIDIDKIMEQRKRYHKLYAKGLMQEEELFELIKETDETIAEYEKQKELVPRKSLDIDKIKKFKNALLES

SEQ ID NO: 56712 - DNA, 50 bp, Staphylococcus epidermidis; identical to SEQ ID NO: 51577
  source 1..50: mol_type = genomic DNA

SEQ ID NO: 56713 - DNA, 40 bp, Staphylococcus epidermidis; identical to SEQ ID NO: 26028
  source 1..40: mol_type = genomic DNA

SEQ ID NO: 56714 - DNA, 40 bp, Staphylococcus epidermidis; identical to SEQ ID NO: 26029
  source 1..40: mol_type = genomic DNA

SEQ ID NO: 56715 - DNA, 50 bp, Staphylococcus epidermidis; identical to SEQ ID NO: 26020
  source 1..50: mol_type = genomic DNA

SEQ ID NO: 56716 - protein, 458 aa, Staphylococcus epidermidis
MNYERSYLRSCQVSTLEQKEHGYSIEEQERKLKSFCEINDWSVSDVFIDAGFSGAKRERPELQRMMNDIKRFDLVLVYKLDRLTRNVRDLLDLLEIFEQNNVAFRSATEVYDTSTAMGRLFVTLVGAMAEWERETIRERVMMGKRAAIKQGMILTPPPFYYDRVDNTYIPNDYKKVVSWAYDEVMKGVSSKAIARKLNDSDIPPPNGKRWEDRTITRALRSPITRGHYTWGDVFIENSHESIITEEMYQQIKERLEERINTKIVSHISVFRGKFICPSCNGTLTMNTATRKRKKGYVTYKTYYCNTCKTKKQSFGFSENEALRVFRDYLSKLDLDKYEVKTKQNDDVVTIDIDKIMEQRKRYHKLYAKGLMQEEELFELIKETDETIAEYEKQKELVPRKSLDIDKIKKFKNALLESWEIFSLEDKADFIKMAIKSIDIEYVKLKNRHSIKINDIEFY

SEQ ID NO: 56717 - DNA, 50 bp, Staphylococcus epidermidis; identical to SEQ ID NO: 51577
  source 1..50: mol_type = genomic DNA

SEQ ID NO: 56718 - DNA, 40 bp, Staphylococcus epidermidis; identical to SEQ ID NO: 26028
  source 1..40: mol_type = genomic DNA

SEQ ID NO: 56719 - DNA, 40 bp, Staphylococcus epidermidis; identical to SEQ ID NO: 26029
  source 1..40: mol_type = genomic DNA

SEQ ID NO: 56720 - DNA, 50 bp, Staphylococcus epidermidis; identical to SEQ ID NO: 26020
  source 1..50: mol_type = genomic DNA

SEQ ID NO: 56721 - protein, 458 aa, Staphylococcus epidermidis
MNYERSYLRSCQVSTLEQKEHGYSIEEQERKLKSFCEINDWSISDVFIDAGFSGAKRDRPELQRMMKDIKRFDLVLVYKLDRLTRNVRDLLDLLEIFEQNNVAFRSATEVYDTSTAMGRLFVTLVGAMAEWERETIRERVMMGKRAAIKQGMILTPPPFYYDRVDNTYIPNDYKKVVLWAYDEVLKGVSSKGIARKLNDSDIPPPNGKRWEDRTITRALRSPITRGHYTWGDVFIENSHEPIITEEMYQQIKERLEERINTKIVSHVSVFRGKFICPRCGGTLTMNTATRKRKKGYVTYKTYYCNTCKGKKESFGFAENEALRVFRDYLSKLDLDKYEVKTKQKDDVVTIDIDKVMEQRKRYHKLYAKGLMQEEELFELIKETDETIAEYEKQKELVPRKTLDVDKIKKFKNVLLESWKIFSSEDKADFIKMAIKSIDIEYVKFKNRHSIKINDIEFY

SEQ ID NO: 56722 - DNA, 50 bp, Staphylococcus epidermidis; identical to SEQ ID NO: 51577
  source 1..50: mol_type = genomic DNA

SEQ ID NO: 56723 - DNA, 40 bp, Staphylococcus epidermidis; identical to SEQ ID NO: 56703
  source 1..40: mol_type = genomic DNA

SEQ ID NO: 56724 - DNA, 40 bp, Staphylococcus epidermidis; identical to SEQ ID NO: 56704
  source 1..40: mol_type = genomic DNA

SEQ ID NO: 56725 - DNA, 50 bp, Staphylococcus epidermidis; identical to SEQ ID NO: 26020
  source 1..50: mol_type = genomic DNA

SEQ ID NO: 56726 - protein, 458 aa, Staphylococcus epidermidis
MNYERSYLRSCQVSTLEQKEHGYSIEEQERKLKSFCEINDWSVSDVFIDAGFSGAKRERPELQRMMNDIKRFDLVLVYKLDRLTRNVRDLLDLLEIFEQNNVAFRSATEVYDTSTAMGRLFVTLVGAMAEWERETIRERVMMGKRAAIKQGMILTPPPFYYDRVDNTYIPNDYKKVVLWAYDEVMKGVSSKAIARKLNDSDIPPPNGKRWEDRTITRALRSPITRGHYTWGDVFIENSHESIITEEMYQQIKERLEERINTKIVSHISVFRGKFICPSCNGTLTMNTATRKRKKGYVTYKTYYCNTCKTKKQSFGFSENEALRVFRDYLSKLDLDKYEVKTKQNDDVVTIDIDKIMEQRKRYHKLYAKGLMQEEELFGLIKETDETIAEYEKQKELVPRKSLDIDKIKKFKNALLESWEIFSLEDKADFIKMAIKSIDIEYVKLKNRHSIKINDIEFY

SEQ ID NO: 56727 - DNA, 50 bp, Staphylococcus epidermidis; identical to SEQ ID NO: 51577
  source 1..50: mol_type = genomic DNA

SEQ ID NO: 56728 - DNA, 40 bp, Staphylococcus epidermidis; identical to SEQ ID NO: 26028
  source 1..40: mol_type = genomic DNA

SEQ ID NO: 56729 - DNA, 40 bp, Staphylococcus epidermidis; identical to SEQ ID NO: 26029
  source 1..40: mol_type = genomic DNA

SEQ ID NO: 56730 - DNA, 50 bp, Staphylococcus epidermidis; identical to SEQ ID NO: 26020
  source 1..50: mol_type = genomic DNA

SEQ ID NO: 56731 - protein, 458 aa, Staphylococcus epidermidis
MNYERSYLRSCQVSTLEQKEHGYSIEEQERKLKSFCEINDWSISDVFIDAGFSGAKRERPELKRMMNDIKRFDLVLVYKLDRLTRNVRDLLDLLEIFEQNNVAFRSATEVYDTSTAMGRLFVTLVGAMAEWERETIRERVMMGKRAAIKQGMILTPPPFYYDRVDNTYIPNDYKKVVLWAYDEVMKGNSSKAIARKLNDSDIPPPNGKRWEDRTITRALRNPITRGHYTWGDVFIENSHEPIITEEMYQQIKERLEERINTKIVSHVSVFRGKFICPRCGGTLTMNTATRKRKKGYVTYKTYYCNTCKTRKQSFGFSENEALRVFRDYLSKLDLDKYEVKTKQKDDVVTIDIDKIMEQRKRYHKLYAKGLMQEEELFELIKETDETIAEYEKQKELVPRKILDIDKIKSFKNVLLESWNIFSLEDKADFIKMAIKSIDIEYVELKNRHSIEIKEIEFY

SEQ ID NO: 56732 - DNA, 50 bp, Staphylococcus epidermidis; identical to SEQ ID NO: 46422
  source 1..50: mol_type = genomic DNA

SEQ ID NO: 56733 - DNA, 40 bp, Staphylococcus epidermidis; identical to SEQ ID NO: 26028
  source 1..40: mol_type = genomic DNA

SEQ ID NO: 56734 - DNA, 40 bp, Staphylococcus epidermidis; identical to SEQ ID NO: 26029
  source 1..40: mol_type = genomic DNA

SEQ ID NO: 56735 - DNA, 50 bp, Staphylococcus epidermidis; identical to SEQ ID NO: 26020
  source 1..50: mol_type = genomic DNA

SEQ ID NO: 56736 - protein, 465 aa, Mycobacteroides abscessus
MLAVVYTRISKDRVGAGLGVERQRDDCQQLADSLGWTVVETFSDNDLSAYSGKKRPAYEAMLAALEGDKARAVIAWHTDRLHRQPIELEGFIDLCERKKIEVRAVKAGTIDLSTPSGRMVARMLGAAARHEVEHMIERTKSQKKQAALDGKYRGGQRPFGYEPDGLRLREAEADAIRSGVESVLSGVSLRQIARDWNALGLRTSAGNKEFSSVEVRKVLLRPRNAGIALHQGQPVGKGQWDAIIDTDSFAALEAILRDPERAKHVSYIRKYQGSGVYLCGMDECGAVTRISSQGPAKGSRERRSVYVCSRTKHLGRLVEYVDEYVDEHVIRRLSEPDARKIFVGPEVDLTAMHAQREGLRSRLNELSALFAEGAIDGPQLKRGSAGLKEKLAAVDAELTSVRSASAVALLLEADDIEAEWKITPPDVRGRIIDTLMTVTILPIGRGRQPDGSYFDPSKIQITWKS

SEQ ID NO: 56737 - DNA, 50 bp, Mycobacteroides abscessus
  source 1..50: mol_type = genomic DNA
gagtggcctagtcaatcttttgacaggtcattaatcgacttgataccatt

SEQ ID NO: 56738 - DNA, 40 bp, Mycobacteroides abscessus; identical to SEQ ID NO: 34388
  source 1..40: mol_type = genomic DNA

SEQ ID NO: 56739 - DNA, 40 bp, Mycobacteroides abscessus
  source 1..40: mol_type = genomic DNA
gaaggcgttgccgtgcgagtgatccagcaccagccagtcc

SEQ ID NO: 56740 - DNA, 50 bp, Mycobacteroides abscessus
  source 1..50: mol_type = genomic DNA
gacttgcctgaacaatggcttgactggccattaataatactgatacattg

SEQ ID NO: 56741 - protein, 506 aa, Citromicrobium sp
MTAQTNKKAVIYCRVSSARQVTHGNGLESQESRCREFAQYRGYEIIQTFSDDMSGSVIGRPGMQAMLKFLRSNRKKELVVIIDDISRLARGLEAHLQLRGAIASAGATLESPSIEFGEDSDSVLVENLLASVSQHQRQKNGEQTKNRMRGRMLNGYWVFKAPWGYRFQRQSGGGKLMVPDEPLASIIKEGLEGFASGRFASQAEVKRFFEAQPEFPKCRHGVVLNERVNQLLTQTLFSGYLEFPEWNVSLRKGQHEGLISLETFELIQKRLKTKGYAITRKDLNEDFPLRGVVCCADCGHPMTAAWSKGRNSLYPYYMCRQRGCSGEKKSIPRARIEDALHEMVKALTPAPSLFRLANEIFQDFWKKRANAGRERITQMRVEIGQIERKLAQVVDRLVEADSGAIVRAYEQKVDELERQKLILAEKIAKCGTPARDYQSTFQTALKFLSNPWNLWESGRLEDRRAMLKLVFGGKIVFDRFEGFQTPEISLPFKALRAISGPEKEMV

SEQ ID NO: 56742 - DNA, 50 bp, Citromicrobium sp
  source 1..50: mol_type = genomic DNA
cgatttctggccccgaaaaggaaatggtgcactctgagggagtgtttaca

SEQ ID NO: 56743 - DNA, 40 bp, Citromicrobium sp
  source 1..40: mol_type = genomic DNA
gcgctgcctcgaatggaaatggtgcgcccgacaggattcg

SEQ ID NO: 56744 - DNA, 40 bp, Citromicrobium sp
  source 1..40: mol_type = genomic DNA
gcgctgcctcgaatggaaaaggtgcgcccgacaggattcg

SEQ ID NO: 56745 - DNA, 50 bp, Citromicrobium sp
  source 1..50: mol_type = genomic DNA
ctatttcatctgtttaaaaagaaaagggtaactgtgtgtgtgtgtataca

SEQ ID NO: 56746 - protein, 584 aa, Pseudomonas putida
MPTAYAYIRYSSKAQGEAGRDSVDRQMASIQAITKQQGIELPPENIYSDTGISAHDGSNKRKGKLKELIDMISDMHIKEGDYIFVESIDRLSRQRLLQAKELVNGILEKGVILITTIDGQRYEKPNETNRIDDLQQDILLSVIAKRAYEESKTKSVRRKSAWNRAKKLAEEEKVIFNAHNPPYGIRYNTELNCFEINEEEAQEIRDFFESLKYVGVSLSIKKLNAYSKRKWSSRNIKHLIDTKYVLGAYMAQRRDENKKKVFERYIENYYPQIVSYELFNEAIAAMKNRAQRKNYGNQSVGSLNIFRHSIKCDCCEASMLFEKQTNPKGVVYPYFQCYTRKELKNGCDQPRFRFDLAFGLFLELIYQSTTDEDFDVHPWQNEDPNPERQHEWITRESGMIYRLTTQEDIDEEERVENFRELLIKLLSNRESQTKDNKKIVELNNLLLEQKSYRDNLMKSFAGFTSGVIPKEFLEVVSKTEANINDIEQNLAELQTQINIKKTTINIYSENDIIGLYKTEDGRLKINQFFVANDITFKFNFDKATRTLFAKIFQNGFEIDRIAKQFSLHNPLKEFGINNLNEYFN

SEQ ID NO: 56747 - DNA, 50 bp, Pseudomonas putida
  source 1..50: mol_type = genomic DNA
gtgtgggatacccccctaccattcgagactggtaggtggtattctcacac

SEQ ID NO: 56748 - DNA, 40 bp, Pseudomonas putida
  source 1..40: mol_type = genomic DNA
agtgctgcgcgagcccctggaatcgggcgaaatcgtgatc

SEQ ID NO: 56749 - DNA, 40 bp, Pseudomonas putida
  source 1..40: mol_type = genomic DNA
agtgctgcgcgagcccctgatatcgggcgaaatcgtgatc

SEQ ID NO: 56750 - DNA, 50 bp, Pseudomonas putida
  source 1..50: mol_type = genomic DNA
gtgtgggcttcagtccttcctttcatgacgtctgtgtgcctttctagcac

SEQ ID NO: 56751 - protein, 523 aa, Klebsiella variicola; identical to SEQ ID NO: 38381

SEQ ID NO: 56752 - DNA, 50 bp, Klebsiella variicola
  source 1..50: mol_type = genomic DNA
aacccgaatagcctatattcaatggtcattgtatttgagctattcggcga

SEQ ID NO: 56753 - DNA, 40 bp, Klebsiella variicola; identical to SEQ ID NO: 54543
  source 1..40: mol_type = genomic DNA

SEQ ID NO: 56754 - DNA, 40 bp, Klebsiella variicola
  source 1..40: mol_type = genomic DNA
gcggcgaggtaaatcaaggcccattgcgctcatagtcgtt

SEQ ID NO: 56755 - DNA, 50 bp, Klebsiella variicola
  source 1..50: mol_type = genomic DNA
aacctgaatgtaaaatattctcttcccattgttttctagttattagagaa

SEQ ID NO: 56756 - protein, 582 aa, Pseudomonas aeruginosa
MTNKPTAYAYIRYSSRKQGLGDKDSVDRQMNSIKAIAEQRGIEVRPENVFSDTGVSGYTGKNQEKGKLKDLIDLILNQQVKQGDYVFVESIDRLSRQRMRLSKDLVYKILDRGVTLVTTIDGQVYSRDNDDLRQDIMLTVIAERAHEESKTKSVRRISAWKRAKEQAESTGKIFNAHRPPYGIRFNKESEKFEIEPVEAQEILDIFESLKLVGINQTIKKLNSSSKRRWTQFHIRNLIDTKYPLGFFCSQRKVDGKLIFEKYIENYYPQIVPYDLWQEAITTMQSRKINKQSGRVSPDNYNVFRHIAKCGVCGENMYFHQNFNVRTNSYYYLNCRSNLETDGSCRHRFRYDFAFGILLQTVYQATTDEDYNVHPWQLLANEDWEEGTTIKVLSENSKITQMSEEDESEIIAAESFRELLAQLLARKETVSAKHKELVMAENEYLGHKIKLENFEKSLESGDGVISATFLKTLANQELKVAEAEKMVNQLKTEIAKSRSDITFYNYKDVIELNKTQEGRLRINQFFLQNNIHFKFRFDKTTRTLYAWIIQSNKEVERQARGFPINNPLSEFGLKNLTEYRDEG

SEQ ID NO: 56757 - DNA, 50 bp, Pseudomonas aeruginosa
  source 1..50: mol_type = genomic DNA
agtgttagtatcgtgcggttcgtcttgatgatatgatcgtttctaacaca

SEQ ID NO: 56758 - DNA, 40 bp, Pseudomonas aeruginosa; identical to SEQ ID NO: 33993
  source 1..40: mol_type = genomic DNA

SEQ ID NO: 56759 - DNA, 40 bp, Pseudomonas aeruginosa; identical to SEQ ID NO: 33993
  source 1..40: mol_type = genomic DNA

SEQ ID NO: 56760 - DNA, 50 bp, Pseudomonas aeruginosa
  source 1..50: mol_type = genomic DNA
attgcttgtgtgaagtagttattcttcatggtatgactctatctaacaaa

SEQ ID NO: 56761 - protein, 526 aa, Collinsella aerofaciens
MARKKRFAPNDNNLAIAYYRFSSHSQNDASIDQQRELAHDWADTHGLKIVKEYEDAAISGTTDARPGFQQMLSEVAKIRPHTLIMWKTDRLGRDKYVLAMAKKKIRDAGCEIHLLAEHIPTEGPEGVLIEGLMEAMAEYYSRQLSQNIQRGMDYNAQHALYNGHKLFGYDVDRSTKKYIPDPNTAPFVQWAFKEYASGKPLKAIAEEMNAQGLRTPRNAKFSVNMLNKMLKNRAYIGEYHHGDITVAGGMPVLVDEATFDRAQRRFAENKRKGSQRAHGMDDAEAPRYWLTGKLYCGECGSTMQGVSGTSKTGRTYYYYYCSAQRRKECHLHKARKQDLEDMVLFALHNIVDDEENVTALALDAAEYYEKSHNDTAYLEALEAKRREVEKSLANLVKVIERGVVSDTVTRRLAQLEEQKSALNDAIGTENVRVSLCEDRHSIQAYFDKFLHADVNDPEIRDQVFEYFVDKVYLYDDKLVVSMWFSEDDKQEITWRDWFSLDEYWTDESPFAKGEAVEFDCFPLSST

SEQ ID NO: 56762 - DNA, 50 bp, Collinsella aerofaciens
  source 1..50: mol_type = genomic DNA
cgactgcttccccctcagctcaaccaaaagaggaagcgtcgaactcttct

SEQ ID NO: 56763 - DNA, 40 bp, Collinsella aerofaciens
  source 1..40: mol_type = genomic DNA
cgattctccgcgcctccaccataagcaacaggcaggtaga

SEQ ID NO: 56764 - DNA, 40 bp, Collinsella aerofaciens
  source 1..40: mol_type = genomic DNA
cgattctccgcgcctccactctaagcaacaggcaggtaga

SEQ ID NO: 56765 - DNA, 50 bp, Collinsella aerofaciens
  source 1..50: mol_type = genomic DNA
ctgttgcttttaactcacctaaactcaaagactaagggtaaaagttttgt

SEQ ID NO: 56766 - protein, 573 aa, Clostridium acetobutylicum
MKVAIYSRKSKFTGKGDSIENQIEMCKNFITSKYNKKVEFLVYEDEGFSGGTINRPQFKKLIKDVELDKLDVLVCYRLDRISRNVSDFSNTLDTLQEHHVDFISISEQFDTSTPMGRAMVYIASVFAQLERETIAERVKDNMIEMAKNGRWTGGKIPLGFNSKRIKYIDENGLEREIPVLEINKEESKFVTSLYEKYLELGSLHKLEVYITQNEIKSRNGILFEKSSLKIILQNPIYVKSSYDVLKYLKNNEWKVYGNPDGAHSLLTYNKTEQTLRKGKHIKVDRPKEDRFAAISNILGFIEPELWLEVQKQFDKNRTSFPRLGKTHNALLTGKIKCGKCKKYMLIQHGRISKKTGEKAFYYVCSLKQKSHKKLCNNSNIRTDKIENLVLDSLKNFAKSKKEIMEALKRENNYKLKNNNSDIKLELNSALSERKKQIDRLTNALANGTGVEDILINKIKLIKKECIKIENKLSEIENNHEKSKSNKINLDIINSMLDSCKIIDTLSMQEQKRIIDTLIDNIYWFGENHKEGKISIEFLGSGMDATYKSHLYEAIDLDTNSNGKKAALLDTLQM

SEQ ID NO: 56767 - DNA, 50 bp, Clostridium acetobutylicum
  source 1..50: mol_type = genomic DNA
agcagcattattggataccttgcagatgcaatgtgaacaaaactacgact

SEQ ID NO: 56768 - DNA, 40 bp, Clostridium acetobutylicum
  source 1..40: mol_type = genomic DNA
aattcttttagacacaggagatgccaaattaatgacctcc

SEQ ID NO: 56769 - DNA, 40 bp, Clostridium acetobutylicum
  source 1..40: mol_type = genomic DNA
aattcttttagacacaggatttgccaaattaatgacctcc

SEQ ID NO: 56770 - DNA, 50 bp, Clostridium acetobutylicum
  source 1..50: mol_type = genomic DNA
agcttcattttcctatatcttccatttgcattgtgtggtctaattgtact

SEQ ID NO: 56771 - protein, 522 aa, Vibrio nigripulchritudo
MTTAFSYIRFSSSTQSHGDSLRRQTQLAKNYCNKHSLTLSEQSFQDLGVSAFRSANTNEDNGLGQFLKALEIGAIPRGSYLLVESLDRLSRAKVQTALRQLLNITEYGITVVTLIDKLAYNSDSDAKDLIISLTVMERAHNESKTKSERLKAVWANKRANPHTTNKSSLAPFWLSLNSDKRTYSVIEKQAEIVKRIYQLSIDGHGVIAIARILNDEGIPAPKGGSWANTSVGRILKTKAVLGHYMPHISRNSTNALIEDYYPAIISEQVYYLSQHRKSERSNPNSAGRKTTFPNVFNQVAKCSKCGSPMYYDNKSPTLKYLTCREFKKKTCTNKPIRIELMHQFIIEQFLHPQHFEQFNKLVSANDIGNTDIVVLEGNLESAKEAYKQLLSISSDFSDPVIQDEIKTRHETIQSLEKQLEEAKSVSVGKISSTRLNFWEACQLTANALNKEVYKKTPEELSPEESYSAREKLNRALKDTFGEVIITHCPDTKKASITANGFTFEAHKSAMKTGFYDVIWWAA

SEQ ID NO: 56772 - DNA, 50 bp, Vibrio nigripulchritudo
  source 1..50: mol_type = genomic DNA
caagggtaaatattgccaaatagcgtaacagtaggtagcatttaccttta

SEQ ID NO: 56773 - DNA, 40 bp, Vibrio nigripulchritudo
  source 1..40: mol_type = genomic DNA
ttctggtaatcctaccaacgtaaaccctggcattccgttg

SEQ ID NO: 56774 - DNA, 40 bp, Vibrio nigripulchritudo
  source 1..40: mol_type = genomic DNA
ttctggtaatcctaccaactcaaaccctggcattccgttg

SEQ ID NO: 56775 - DNA, 50 bp, Vibrio nigripulchritudo
  source 1..50: mol_type = genomic DNA
caagggacattcaacataaagatctcaacagtaatttatgattaacttta

SEQ ID NO: 56776 - protein, 551 aa, Mariprofundus ferrooxydans
MKKAYSYIRFSTPDQLKGDSLRRQLEASRAYAEQHNLLLDDTLRDLGVSGFRGKNRTEGALKEFIDLVENGEIAEGSVLILESLDRLSRDEIMSSLNLFTSLLAAGIEIVTLADGQRYTKKSINDIGQLIISLVVMSRAHEESAMKSKRLSASWENKRKLAIESKRPMTARCPYWLRLKEDRSSYEIIEERAAIVREIFEKTIAGKGKRTIASELNQRGVDTWEVGKRKGKFWQSSYVAKILENRAVFGEFQPCKKSDRKPVGVAIPDYYPAVVTFEEFAQAQAAIKSRRVCGGRKGKGFSNLFTGVCKCGVCGSTARFLNKGKRPRGGKYLVCSNRHAKAGCSNSKHWRYDYFEKVALILLSDKINWQAALSSNSSDKARLEKELICAEQELADAKKKVERFSLLFESADESMLSHAATKYKDAMKLETELIAKIKTIKENLAAYVPSSSAVDDLYNALHAIADAEKYSSAELVDARTKVNAAMKKIGLLLAFYPDFCLYLVKATGEKGLLCYADKLADTHEIFDIADELETVNRDIEKINTMIEELSDI

SEQ ID NO: 56777 - DNA, 50 bp, Mariprofundus ferrooxydans
  source 1..50: mol_type = genomic DNA
gctggtctattgtagcatgacatgctaatgttgtgacctattagaccata

SEQ ID NO: 56778 - DNA, 40 bp, Mariprofundus ferrooxydans
  source 1..40: mol_type = genomic DNA
aagcggagggcatcatttactgatgaccggcagccccggt

SEQ ID NO: 56779 - DNA, 40 bp, Mariprofundus ferrooxydans
  source 1..40: mol_type = genomic DNA
aagcggagggcatcatttaatgatgaccggcagccccggt

SEQ ID NO: 56780 - DNA, 50 bp, Mariprofundus ferrooxydans
  source 1..50: mol_type = genomic DNA
gctgctgtaagagaggaagccataataatgttgggtaaatcttgaccaga

SEQ ID NO: 56781 - protein, 476 aa, Nocardia brasiliensis
MARVVGRLRISRETEESTSLERQKELIIQWCDLHGHVIVGWAIDKDVSGSVDPFETKGLGAWLTEDAVSKYDILAAWKLDRYGRRVIPLNKLFGFCLDHGKALVCISDQIDLGTWVGRLVANVLAGVAEGELEAIKERTTASRAKLLKIGRWPGGAPPYWLEKYKADVGYKLRPVPDRAKVVLQAIDDVINGASVSEAAANLEKAGYPTATGKPWGSVTLWQIFTNKLLLGHSTYKGETVRDAQGEPVMLAEPIITQDTWNRLQAALELRKNPNTKRTRDTSPLLGVIKCLTCGGNYSIRQHDKDGRVYRYYWCRGDHPGQNQINGNMIEKLLEEEFLAQMGDKELEERVYVPAESHTEELQAAQEAVEELSAMMEGAKSKGARERLIKQIEALDSKIAVLEELPTQEAGYVYKSTGKTWKQAWDASDWQERRKMLIKSGITADVRLTGNTRSINSSGSLEFHLKIPADVQERMSL

SEQ ID NO: 56782 - DNA, 50 bp, Nocardia brasiliensis
  source 1..50: mol_type = genomic DNA
gttacaactaaagtcattgaccgggtttcgacgatgatgtaagttgtaac

SEQ ID NO: 56783 - DNA, 40 bp, Nocardia brasiliensis
  source 1..40: mol_type = genomic DNA
gatgaagcttatcgatcgggtgtcggccatcaactggaat

SEQ ID NO: 56784 - DNA, 40 bp, Nocardia brasiliensis
  source 1..40: mol_type = genomic DNA
gatgaagcttatcgatcggctgtcggccatcaactggaat

SEQ ID NO: 56785 - DNA, 50 bp, Nocardia brasiliensis
  source 1..50: mol_type = genomic DNA
gttgcagatactttcatgcaacggcttcctcagatgttgctagttgtaac

SEQ ID NO: 56786 - protein, 596 aa, Escherichia coli
MMSKIIPYGYLRVSSLEQVKSGGGLDSQDEAVRRYINERSDLFDIEQMVMMSDMASAYSGKQLSEGQLGGFLADVEAGKVPSGSALIAYSIDRLSRQNPWIGTKLISTLIGAGIQIHSVAENQILKSSDPVGAIMSTIYLMRANNESEIKSDRAKTGYQKRLKESIQNKKVLTRQMPRWLFDNDGKYAVEPKMKRVIEFVFDSYIAGQSSGYIANELNNKGWLYGNTYWRGSYVAKLIRDERLIGKHLRYSKQIKGVKREVIETIPDFYPNAVDVEKYHLANNMLTNVAENIRGRTRITYGDTSILRNIFSNVIKCGLCGGDTSVVQNTRKKVVGDKFVYIPYKMFLRCRNKYELKTCTHGDIRYEIIERAILVHLMGLDIANLLATPIDNSIELYKTELERCIADESQYREIIELRRKAGKRVRPETVEVLEDVLDRIDELNRLIESHVVENFVPDFNVDLGNIADVSNVEERSLIKKGIAAIAKRIFYKRVGGYILVEVMYRNLSIKHILVIDNKSSNTVVNFSIKYEEEKHIYTCNSFNMNYLIKSGDFEIHEETTMEDYAQMMNFIDIVSEDEAKKAKEFLVKNFNQNFISK

SEQ ID NO: 56787 - DNA, 50 bp, Escherichia coli; identical to SEQ ID NO: 44362
  source 1..50: mol_type = genomic DNA

SEQ ID NO: 56788 - DNA, 40 bp, Escherichia coli; identical to SEQ ID NO: 20258
  source 1..40: mol_type = genomic DNA

SEQ ID NO: 56789 - DNA, 40 bp, Escherichia coli
  source 1..40: mol_type = genomic DNA
ttagtgtaaagcataacgttgcggatctacacctgtgcag

SEQ ID NO: 56790 - DNA, 50 bp, Escherichia coli
  source 1..50: mol_type = genomic DNA
aattgtaagcatcttcctgcatcctgtatatctgagataaaacttcaaag

SEQ ID NO: 56791 - protein, 596 aa, Escherichia coli
MMSKIIPYGYLRVSSLEQVKSGGGLDSQDEAVRRYINERSDLFDIEQMVMMSDMASAYSGKQLSEGQLGGVLADVEAGKVPSGSALIAYSIDRLSRQNPWIGTKLISTLIGAGIQIHSVAENQILKSSDPVGAIMSTIYLMRANNESEIKSDRAKTGYQKRLKESIQNKKVLTRQMPRWLFDNDGKYAVEPKMKRVIEFVFDSYIAGQSSGYIANELNNKGWLYGNTYWRGSYVAKLIRDERLIGKHLRYSKQIKGVKREVIETIPDFYPNAVDVEKYHLANNMLTNVAENIRGRTRITYGDTSILRNIFSNVIKCGLCGGDTSVVQNTRKKVVGDKFVYIPYKMFLRCRNKYELKTCTHGDIRYEIIERAILVHLMGLDIANLLATPIDNSIELYKTELERCIADESQYREIIELRRKAGKRVRPETVEVLEDVLDRIDELNRLIESHVVENFVPDFNVDLGNIADVSNVEERSLIKKGIATIAKRIFYKRVGGYILVEVMYRNLSIKHILVIDNKSSNTVVNFSIKYEEEKQIYTCNSFNMNYLIKSGDFEIHEETTMEDYAQMMNFIDIVSEDEAKKAKEFLVKNFNQNFISK

SEQ ID NO: 56792 - DNA, 50 bp, Escherichia coli; identical to SEQ ID NO: 44362
  source 1..50: mol_type = genomic DNA

SEQ ID NO: 56793 - DNA, 40 bp, Escherichia coli; identical to SEQ ID NO: 20258
  source 1..40: mol_type = genomic DNA

SEQ ID NO: 56794 - DNA, 40 bp, Escherichia coli; identical to SEQ ID NO: 56789
  source 1..40: mol_type = genomic DNA

SEQ ID NO: 56795 - DNA, 50 bp, Escherichia coli; identical to SEQ ID NO: 56790
  source 1..50: mol_type = genomic DNA

SEQ ID NO: 56796 - protein, 596 aa, Escherichia coli
MMSKIIPYGYLRVSSLEQVKSGGGLDSQDEAVRRYINERSDLFDIEQMVMMSDMASAYSGKQLSEGQLGGFLADVEAGKVPSGSALIAYSIDRLSRQNPWIGTKLISTLIGAGIQIHSVAENQILKSSDPVGAIMSTIYLMRANNESEIKSDRAKTGYQKRLKESIQNKKVLTRQMPRWLFDNDGKYAVEPKMKRVIEFVFDSYIAGQSSGYIANELNNKGWLYGNTYWRGSYVAKLIRDERLIGKHLRYSKQIKGVKREVIETIPDFYPNAVDVEKYHLANNMLTNVAENIRGRTRITYGDTSILRNIFSNVIKCGLCGGDTSVVQNTRKKVVGDKFVYIPYKMFLRCRNKYELKTCTHGDIRYEIIERAILVHLMGLDIANLLATPIDNSIELYKTELERCIADESQYREIIELRRKAGKRVRPETVEVLEDVLDRIDELNRLIESHVVENFVPDFNVDLGNIADVSNVEERSLIKKGIAAIAKRIFYKRVGGYILVEVMYRNLSIKHILVIDNKSSNTVVNFSIKYEEEKHIYTCNSFNMNYLIKSGDFDIHEETTMEDYAQMMNFIDIVSEDEAKKAKEFLVKNFNQNFISK

SEQ ID NO: 56797 - DNA, 50 bp, Escherichia coli; identical to SEQ ID NO: 44362
  source 1..50: mol_type = genomic DNA

SEQ ID NO: 56798 - DNA, 40 bp, Escherichia coli; identical to SEQ ID NO: 20258
  source 1..40: mol_type = genomic DNA

SEQ ID NO: 56799 - DNA, 40 bp, Escherichia coli; identical to SEQ ID NO: 56789
  source 1..40: mol_type = genomic DNA

SEQ ID NO: 56800 - DNA, 50 bp, Escherichia coli; identical to SEQ ID NO: 56790
  source 1..50: mol_type = genomic DNA

SEQ ID NO: 56801 - protein, 447 aa, Rhodococcus qingshengii
MNHPSSAAIYVRISLDREDEAGVTRQREDCQELATKLGWRVGQVYEDNSVSAYKRKVRPEWQSMLDDLRSGIRDGVIFYDLDRIARQPRDLEDLIDVIELKKIPNKVVTGDVNLSDDNGLFMARLLVNVGNKASKDTGRRVARAALQRAQQGKPQKAVTRPFGYTHDYKIIESEAKLIREAYERVIAGESLTSILKDWQQIPTVEGKRWHRQTVKKILQAPRNAAIRTYRGEEVAVGNWEPIVSREVWQAAQDVFNARTQPMPDTTSVYLLSRIARCGKCGSPMYGRAQNKTRKASYTCMSALGGCGGINRQMKPVDEYISGLIKRQMAKGKPVAPPVDDHAAEIAEIETRISDLRQAWTDKQIDLSDFIAMRDAETQKLKSFERAKAQASATQISDTFAENFDDANLSQQRALIKRYLTAVVIHPAVRGARKVDFDAIEPIWKKII

SEQ ID NO: 56802 - DNA, 50 bp, Rhodococcus qingshengii
  source 1..50: mol_type = genomic DNA
cgcgcctatttgtgagtaggcatgaagctcttgtatcgtcaatagcatca

SEQ ID NO: 56803 - DNA, 40 bp, Rhodococcus qingshengii
  source 1..40: mol_type = genomic DNA
cgggagcactgcgagcatgaaaacgacggccttcggattg

SEQ ID NO: 56804 - DNA, 40 bp, Rhodococcus qingshengii; identical to SEQ ID NO: 56803
  source 1..40: mol_type = genomic DNA

SEQ ID NO: 56805 - DNA, 50 bp, Rhodococcus qingshengii
  source 1..50: mol_type = genomic DNA
agagcctatgatcaagtagtctgtaagctctggtatgcaagattggttca

SEQ ID NO: 56806 - protein, 539 aa, Streptomyces noursei
MGKRTRTRAAGDQKQQTAETEWTEADLALLEELKKAEAQLPDDAPRVLLSVRLSVLTDDTTSPVRQELDLRMLARERGWRVVGIASDLNVSATKVPPWKRKQLGDWLNNRAPEFDVLLFWKLDRFVRRLSDLSTMIDWSLKYGKNLVSKHDSIDLTTTAGKIMVTIIGGIAEIEAANTSTRVASLWDYTKTQSEWLVGRPAYGYVTDVDENDKVVLRIDKDAHRALHWCRKAAMRAKGASAGRMVRVLVRAGLCDPSLTPTTLLRRLRNPALMGYRVEVDKDGGKRRSKLVMGKDGKPIRVAEGVFTEEEFYSLQAVLDGNGKDQPKRQPGGATKFRGVKICDDCETNMTVQATNNKYGRYEYLRCQKCKSGGLGAPNPDDIDNKLVEDVLRVLGDFPVMTREYAKGAEARKEVKRLEESISYYMKELEPGGRYRKTRFTREQAEKTLDRMMADLEAIDPETTQDRWVAVHNGKTFRERWQEGGMEAMEADLLRVGVKCRIKRTKVKGVRAPHIHMKLLVPKDVRERLVLKEDDFAEAF

SEQ ID NO: 56807 - DNA, 50 bp, Streptomyces noursei
  source 1..50: mol_type = genomic DNA
acttgtggccatgtgtcgaactgcggccatatagacacagctctaaaact

SEQ ID NO: 56808 - DNA, 40 bp, Streptomyces noursei
  source 1..40: mol_type = genomic DNA
gatgtgggtgtccatctgcgggcagacgccgcagtcgaag

SEQ ID NO: 56809 - DNA, 40 bp, Streptomyces noursei
  source 1..40: mol_type = genomic DNA
gatgtgggtgtccatctgctcgcagacgccgcagtcgaag

SEQ ID NO: 56810 - DNA, 50 bp, Streptomyces noursei
  source 1..50: mol_type = genomic DNA
acttgaggaaatttattgaattgctcacattcagaccttgatataaaatt

SEQ ID NO: 56811 - protein, 582 aa, Streptomyces bacillaris
MTPLRKHRPGAAPSLDHVRAVSYIRQSKRREDDSQASPVAQRERCASLIASKGWSDAGHFEDVGKSGWDPSIHRPGFEEMMTAVRGGHVDAVVVFSLSRLTRRGALEAMRIIEELETHGVRLVSVEEPYLDTSTPVGVGILAIIAGLAQQESDMKSAYVSATKDTLRRAGSHVSGVAPYGFTAERATSGKLSVVRLVPDPVEAPHVRDMAKWATEGVSASQIAKRLNVDGVPTKAESLGESGAKRLASRRARGISEAVERPAWVSSTVLRILRDPRLAGYAIEWQGRVQATKDADGNPVPGKTGKRVILRDDEGQPVQSHEALIPTEEWWKLQDVLDGRTQVVVRAGRRVPTLLAGHGLLFCDVCGSVMVTDRRAGKLYYKCNRAGGVVPGHGGLVIGQDAADSETAGRVWARLMAMDPDDPEDLEWLAEASRRFARQQDTSQRDAERASVRAELEHVRESRRILHVDRLAGVYADETGAQMFRESMARLAAHEERTAVRLAELEATGSRSIQIPNEWTSVDGDPIGEGSTWAAWDLEKRRQFLALFIDSVRIAKSVGRGRNANTRDRVIVRWAESPDPADT

SEQ ID NO: 56812 - DNA, 50 bp, Streptomyces bacillaris
  source 1..50: mol_type = genomic DNA
tatgtgagtggcttgacccattcattgatctttaccacactaggcacatg

SEQ ID NO: 56813 - DNA, 40 bp, Streptomyces bacillaris
  source 1..40: mol_type = genomic DNA
ctgggggacggtcagcacattgatcttgactacgctcatg

SEQ ID NO: 56814 - DNA, 40 bp, Streptomyces bacillaris
  source 1..40: mol_type = genomic DNA
ctgggggacggtcagcacaaagatcttgactacgctcatg

SEQ ID NO: 56815 - DNA, 50 bp, Streptomyces bacillaris
  source 1..50: mol_type = genomic DNA
tctgtaagtgaagagagcccttcaaagatcttaaacaaggcagtgccaag

SEQ ID NO: 56816 - protein, 543 aa, Pseudomonas aeruginosa; identical to SEQ ID NO: 55806

SEQ ID NO: 56817 - DNA, 50 bp, Pseudomonas aeruginosa
  source 1..50: mol_type = genomic DNA
agtttacttttctactcgttggggcaccctaacgaaacccatcctatact

SEQ ID NO: 56818 - DNA, 40 bp, Pseudomonas aeruginosa; identical to SEQ ID NO: 54108
  source 1..40: mol_type = genomic DNA

SEQ ID NO: 56819 - DNA, 40 bp, Pseudomonas aeruginosa
  source 1..40: mol_type = genomic DNA
gtcgaccagcgccttggggaatccaagactgacgaagccg

SEQ ID NO: 56820 - DNA, 50 bp, Pseudomonas aeruginosa
  source 1..50: mol_type = genomic DNA
aattttctttgttccttgttagcaaagcttatcgaaaagtggcctatact

SEQ ID NO: 56821 - protein, 543 aa, Pseudomonas aeruginosa; identical to SEQ ID NO: 55831

SEQ ID NO: 56822 - DNA, 50 bp, Pseudomonas aeruginosa; identical to SEQ ID NO: 56817
  source 1..50: mol_type = genomic DNA

SEQ ID NO: 56823 - DNA, 40 bp, Pseudomonas aeruginosa; identical to SEQ ID NO: 54108
  source 1..40: mol_type = genomic DNA

SEQ ID NO: 56824 - DNA, 40 bp, Pseudomonas aeruginosa; identical to SEQ ID NO: 56819
  source 1..40: mol_type = genomic DNA

SEQ ID NO: 56825 - DNA, 50 bp, Pseudomonas aeruginosa; identical to SEQ ID NO: 56820
  source 1..50: mol_type = genomic DNA

SEQ ID NO: 56826 - protein, 482 aa, Agreia pratensis
MTPSRVIGYVRLSRESADSTSIVRQRQIIQSTADSRGWDLVDVVEDIDVSASKRRLDRPGLSRVRAMIAGEEVEAVLVWKLDRLARSVVDFGTLLDEGINVVSCTEPLDTTSAMGRAMAEVLQVFAVLEARTIGDRLRSSIAYRVGQGDRWRGGPTPYGYRSVRHESGDGKTLEIDPSEAAYIRQAAEIVLAGGSLYSAMQAIREAGSKPRRAEAWSISSLRVVLTGDSALGRQSRHGVPIRDEAGVLVAPWEPILTVEESERLRAILAPRPLTETRRKASRLLSGLLVCETCGSRLRVNSRRTAGAQVESYGCRANGDGRVCERPASVNADQVETFLVDEFLAVVGALPVVERREVIRDVAGIAEVEEAIRHVTDSMREPGADLGALVAQLGTLTESRDALASRPAEPTIEVVESGETYAERWARSGVDERRAVLESVLTGPVPVKAIGRGYRRMDAERVAAPWAWLDEAAADFVDPYWTD

SEQ ID NO: 56827 - DNA, 50 bp, Agreia pratensis
  source 1..50: mol_type = genomic DNA
gcttttactcgacaccgcctcgctctagtttccctatgacaccttctcgc

SEQ ID NO: 56828 - DNA, 40 bp, Agreia pratensis
  source 1..40: mol_type = genomic DNA
tgctcgacaccgcctcgctctactttcgcgcgttctacgg

SEQ ID NO: 56829 - DNA, 40 bp, Agreia pratensis
  source 1..40: mol_type = genomic DNA
tgctcgacaccgcctcgctagactttcgcgcgttctacgg

SEQ ID NO: 56830 - DNA, 50 bp, Agreia pratensis
  source 1..50: mol_type = genomic DNA
gatgttacttatcacctacacgctagagattcccaaactttcattttcgg

SEQ ID NO: 56831 - protein, 514 aa, Escherichia coli; identical to SEQ ID NO: 45276

SEQ ID NO: 56832 - DNA, 50 bp, Escherichia coli; identical to SEQ ID NO: 45262
  source 1..50: mol_type = genomic DNA

SEQ ID NO: 56833 - DNA, 40 bp, Escherichia coli; identical to SEQ ID NO: 6373
  source 1..40: mol_type = genomic DNA

SEQ ID NO: 56834 - DNA, 40 bp, Escherichia coli
  source 1..40: mol_type = genomic DNA
gcagtccatatccacatgatggattttacgcattactcac

SEQ ID NO: 56835 - DNA, 50 bp, Escherichia coli
  source 1..50: mol_type = genomic DNA
aagctgtatttttaagtgaatctttgaattttgacatacgtataaaccca

SEQ ID NO: 56836 - protein, 514 aa, Escherichia coli
MRKVYSYIRFSSTKQAFGDSHRRQSKAIQDWLASHPDHILDESLSFEDLGRSAFHGDHLKEGGALRAFLEAVKQGLIPPDSVLLVESLDRVSRQSISHAQETIRAILEQGITVVTLSDGETYNRQSLDDSLALIRMIILQERSHNESVIKSDRIKKVWSHKRQQFEQDGTKITGNCPGWLKLNSDGKSFSLIPHHVETIHRIFDEKLSGKSLHAIARDLNLENIPTITNKKVDTGWTPTRVRDLLLKESLIGVAYGVSDYFPPAISKEKFHAVQMIRGQGKGKKPTSRQPSSIDILKGICKCAECGSTLRQRNTKKTPEGRYPRGYLECRNRQLGRCNSKAFNRSLIEDILIQKVFPTLQYLSLKSNGDNISVTTLKADITSLEKGINNLISLAEKGLGDLDTLAQRITNNRVELESKKKDLRQAEAIQSLRSDNDIQDSDRKTVEGRIKLQLAIKSFVKEIIFDYYKQEITIRLLNGKSFSGISVARENKDFDHSSVFEVLQKSLLDIDEVHL

SEQ ID NO: 56837 - DNA, 50 bp, Escherichia coli; identical to SEQ ID NO: 45262
  source 1..50: mol_type = genomic DNA

SEQ ID NO: 56838 - DNA, 40 bp, Escherichia coli; identical to SEQ ID NO: 6373
  source 1..40: mol_type = genomic DNA

SEQ ID NO: 56839 - DNA, 40 bp, Escherichia coli; identical to SEQ ID NO: 56834
  source 1..40: mol_type = genomic DNA

SEQ ID NO: 56840 - DNA, 50 bp, Escherichia coli; identical to SEQ ID NO: 56835
  source 1..50: mol_type = genomic DNA

SEQ ID NO: 56841 - protein, 514 aa, Escherichia coli; identical to SEQ ID NO: 45276

SEQ ID NO: 56842 - DNA, 50 bp, Escherichia coli; identical to SEQ ID NO: 45262
  source 1..50: mol_type = genomic DNA

SEQ ID NO: 56843 - DNA, 40 bp, Escherichia coli; identical to SEQ ID NO: 6408
  source 1..40: mol_type = genomic DNA

SEQ ID NO: 56844 - DNA, 40 bp, Escherichia coli
  source 1..40: mol_type = genomic DNA
gtgagtaatgcgtaaaatctgtcatgtggatatggactgc

SEQ ID NO: 56845 - DNA, 50 bp, Escherichia coli; identical to SEQ ID NO: 56835
  source 1..50: mol_type = genomic DNA

SEQ ID NO: 56846 - protein, 514 aa, Escherichia coli; identical to SEQ ID NO: 27786

SEQ ID NO: 56847 - DNA, 50 bp, Escherichia coli; identical to SEQ ID NO: 45262
  source 1..50: mol_type = genomic DNA

SEQ ID NO: 56848 - DNA, 40 bp, Escherichia coli; identical to SEQ ID NO: 6408
  source 1..40: mol_type = genomic DNA

SEQ ID NO: 56849 - DNA, 40 bp, Escherichia coli; identical to SEQ ID NO: 56844
  source 1..40: mol_type = genomic DNA

SEQ ID NO: 56850 - DNA, 50 bp, Escherichia coli; identical to SEQ ID NO: 56835
  source 1..50: mol_type = genomic DNA

SEQ ID NO: 56851 - protein, 520 aa, Flavobacterium lindanitolerans
MSNAVGYMRLSFKDQSKYSLDSQEEAINAYCAKYGLELVALFKDNGQQSSSFDRLDFKALEMYVKKHSRLVNYIVVMEHDRFSRDLSEALSKIKKFESIYGIKVVSVDEPLDIDTEDPSVFISRAFRYATANAELLNIRARTKRGIQRARLEGRFINKAPFGYSNSRDFLGKSMLVQNMEEAEIVRKIFSYYLLGMSMGDIAANVCEIGFPLKGHNAVGRILDNYVYAGLVKLNSENGSVKYIKALHEAIVSEADFWLVQEMKNSKKPLKIKTRKDYLLKGLLKCNCGKYMTAGWSKGKKQYYLYYRCSEHVSVNIPGKKVHEQFNQVLENLKLTAEQLIVLNGKVREGIEKALVNEREQVAARKKMLKELDVKMESLEEHLINKTIDAVTFRKWSERYAVEYGNILGLINSTEKYVEERIDVTEKFMGKIHSVKDIIDGNTSPLVRLVILKFVFRYGIFYQDGGLVTHKICPALSHNTIQLTEFALLKIEVPRDSSISEEERFVNFMGQQLVDFISDYQ

SEQ ID NO: 56852 - DNA, 50 bp, Flavobacterium lindanitolerans
  source 1..50: mol_type = genomic DNA
ctaaaatttgtagcattttcctagtagcgggaacgagagttcatttgaac

SEQ ID NO: 56853 - DNA, 40 bp, Flavobacterium lindanitolerans
  source 1..40: mol_type = genomic DNA
cagcctttgccatttctagtagcgaggacgggagttgaac

SEQ ID NO: 56854 - DNA, 40 bp, Flavobacterium lindanitolerans
  source 1..40: mol_type = genomic DNA
cagcctttgccatttctagaggcgaggacgggagttgaac

SEQ ID NO: 56855 - DNA, 50 bp, Flavobacterium lindanitolerans
  source 1..50: mol_type = genomic DNA
tttaaatttactacattttctttgagggggctagaaacacccatttgaag

SEQ ID NO: 56856 - protein, 513 aa, Rhizobium leguminosarum
MKQSPASRPKAYSYVRFSTPEQEKGDSLRRQTAAAEAYAQRHGLDLDDRLTFRDLGVSAFLGANEEAGRLGEFLAAVEHGDIKPGSYLLVESLDRLSRKKPRKAVRLLERICEAGITLVTLDDQRVYTEEVLDEDQTALMVALLVAMRAHEESAKKGRRVAQAWENKRTNAKTKPLTSKAPGWLKLKADRSGFEFMPGRAEIVRRIFEQTLQGRGQHAIAETLNREGVPVFGRGKIWHRSYIKKMLGDASVVGVYVPHRTDRSSGKKVRVPTQPVEGYFPAVIDHEVFERVAALSNGRTANTKAGMANILAGLAKCPRCGATMTRVNKGSGPKGGKPYLVCTVAKAGAGCEYEASPCDQLELAIINCASAFYATVPSADAALQTAWDNARSIAEGIGVEIDRIIDAIRETGHSPMLLAELRRLEQLHDEAERSAGEAERRASAATTNRTNNTLDRLVAQLTGEERDIAAINAIMRQLFERVEVDRSKGDLWFYWKHAPSERTNIVFAWPKVET

SEQ ID NO: 56857 - DNA, 50 bp, Rhizobium leguminosarum
  source 1..50: mol_type = genomic DNA
taagggtcttttgctcacactatcagcaaggtatgtacaaaagacccaga

SEQ ID NO: 56858 - DNA, 40 bp, Rhizobium leguminosarum; identical to SEQ ID NO: 29968
  source 1..40: mol_type = genomic DNA

SEQ ID NO: 56859 - DNA, 40 bp, Rhizobium leguminosarum
  source 1..40: mol_type = genomic DNA
gcccggaggaccgaccatcctcagattatggccaccggcg

SEQ ID NO: 56860 - DNA, 50 bp, Rhizobium leguminosarum
  source 1..50: mol_type = genomic DNA
tcagggtcataaaataaacatatcctcaaattaagtgaaagagacccaaa

SEQ ID NO: 56861 - protein, 540 aa, Klebsiella michiganensis
MPKAISYIRFSSKIQASGDSTKRQNKYINEWLKNNPDYHLDESLRFQDLGISGYSGANAKSGAFGEFLAAVESGIIESGSVLLVESLDRVSRQDIDTARERLRKILLAGVDVVTLADNSWYKKESLNDPLSLIKAVLIMQRANEESATKSKRLRSAWDAKREEAAKGKIMSRRCVAWLRVSDDMSHFELIPDNVKAVQRVFQLRLEGLPFVRIARQMNEEGFYTLNQHKPVKGAWSHTTVKALLDNRSVIGFKVPSNCTVTKGVKEIPNYYPAVISEEHFYAVQQLKQGSGRRPTSDKPLLTNLFKGVMRCAECGFVTIVNCATEKWHGVYRCSMRYEGRCHAKSINRRLADKALVQGLLYNTNRLSLNRDNGSAIGALQSELEQLQKQRERLIKLAMLADDTESMAKDLKALNSRIKDAEKAVSEVHQREQSSQLETISHLDLTVKKDRVEAQIIIKRIVKEIRLNTAGKKCDVFLHNGLKLLNFPLDRVVDGAQWIEILPLIDGDEFDFEGFTTKPRHIALEEAPDWVKELEFNSKIQ

SEQ ID NO: 56862 - DNA, 50 bp, Klebsiella michiganensis; identical to SEQ ID NO: 47037
  source 1..50: mol_type = genomic DNA

SEQ ID NO: 56863 - DNA, 40 bp, Klebsiella michiganensis
  source 1..40: mol_type = genomic DNA
attggtgtgcagcgttgagagaaccaggtgcccggtttgc

SEQ ID NO: 56864 - DNA, 40 bp, Klebsiella michiganensis
  source 1..40: mol_type = genomic DNA
attggtgtgcagcgttgagtgaaccaggtgcccggtttgc

SEQ ID NO: 56865 - DNA, 50 bp, Klebsiella michiganensis; identical to SEQ ID NO: 26430
  source 1..50: mol_type = genomic DNA

SEQ ID NO: 56866 - protein, 540 aa, Enterobacter hormaechei
MPKAISYIRFSSKIQASGDSTKRQNKYIYEWLKNNPDYQLDESLRFQDLGISGYSGANAKSGAFGEFLAAVESGVIQAGSVLLVESLDRVSRQDIDTARERLRKILLAGVDVVTLADNSWYKKESLNDPLSLIKAVLIMQRANEESATKSKRLRSAWDAKREAAAKGKIMTRRCVAWLRVSGDMSHFELIPDNVKAVQRVFQLRLEGLPFVRIARQMNEEGFYTLNQRNPVKGAWSHTTVKALLDNRSVIGFKVPSNCTVTQGVKEIPNYYPAVISEEQFYAVQQLKQGAGRRPSSEKPLLTNLFKGVMRCGECGFVTVVNCATEKWHGVYRCSMRYEGRCDAKSINRRLADKALVQGLLYNTNRLSLNRGNGSAIGSLQSELEQLQKQRERLIKLAMLADDTESMAKDLKALNSQIKDAEKSVSEVHQREQSSQLETISHLDLTVKKDRIEAQIIIKRIIKEIRLNTAGKKCDVFLHNGLRLLNFPLDRVVDGGQWIEILPLIDGDEFDFEGFTTKPRHIALEEAPEWVKELEFNSKIQ

SEQ ID NO: 56867 - DNA, 50 bp, Enterobacter hormaechei; identical to SEQ ID NO: 47037
  source 1..50: mol_type = genomic DNA

SEQ ID NO: 56868 - DNA, 40 bp, Enterobacter hormaechei; identical to SEQ ID NO: 29158
  source 1..40: mol_type = genomic DNA

SEQ ID NO: 56869 - DNA, 40 bp, Enterobacter hormaechei
  source 1..40: mol_type = genomic DNA
attagtatggagggtggactgcaccagatgcccggtttgc

SEQ ID NO: 56870 - DNA, 50 bp, Enterobacter hormaechei; identical to SEQ ID NO: 26430
  source 1..50: mol_type = genomic DNA

SEQ ID NO: 56871 - protein, 540 aa, Raoultella ornithinolytica
MPKAISYIRFSSKIQASGDSTKRQNKYIYEWLKNNPDYQLDESLRFQDLGISGYSGANAKSGAFGEFLAAVESGVIQAGSVLLVESLDRVSRQDIDTARERLRKILLAGVDVVTLADNSWYKKESLNDPLSLIKAVLIMQRANEESATKSKRLRSAWDAKREDAAKGKIMTRRCVAWLRVSGDMSHFELIPDNVKAVQRVFQLRLEGLPFVRIARQMNEEGFYTLNQRNPVKGAWSHTTVKALLDNRSVIGFKVPSNCTVTQGVKEIPNYYPAVISEEQFYAVQQLKQGAGRRPSSEKPLLTNLFKGVMRCGECGFVTVVNCATEKWHGVYRCSMRYEGRCDAKSINRRLADKALVQGLLYNTNRLSLNRGNGSAIGSLQSELEQLQKQRERLIKLAMLADDTESMAKDLKALNSQIKDAEKSVSEVHQREQSSQLETISHLDLTVKKDRIEAQIIIKRIIKEIRLNTAGKKCDVFLHNGLRLLNFPLDRVVDGGQWIEILPLIDGDEFDFEGFTTKPRHIALEEAPEWVKELEFNSKIQ

SEQ ID NO: 56872 - DNA, 50 bp, Raoultella ornithinolytica; identical to SEQ ID NO: 47037
  source 1..50: mol_type = genomic DNA

SEQ ID NO: 56873 - DNA, 40 bp, Raoultella ornithinolytica
  source 1..40: mol_type = genomic DNA
gttggtgtgcagcgtcgaaaggaccagatgcccggtttgc

SEQ ID NO: 56874 - DNA, 40 bp, Raoultella ornithinolytica
  source 1..40: mol_type = genomic DNA
gttggtgtgcagcgtcgaatggaccagatgcccggtttgc

SEQ ID NO: 56875 - DNA, 50 bp, Raoultella ornithinolytica; identical to SEQ ID NO: 26430
  source 1..50: mol_type = genomic DNA

SEQ ID NO: 56876 - protein, 492 aa, Streptomyces hirsutus
MSYPAHTVIGMTRPKLARATVTPGEPAAIYCRISHTRDEDQTGVDRQERICRDIAERLQLRVEPTHIYVDNNRSAWQRDRKRPGWEAMLKAMGAGEIRHVIVYHPDRLMRQPKDLEELLSIADDKRVLLHGEANRRDLSDPDDRFILRIEVAHACRSSDDTSRRLKDALKDHAREGRPHVGNRPYGYTRDGRAIVEEEAEIVREVYRRYLDGESPHAIAQDLVARDIPTSKGKAWNPENVRHLLSSHFVAGLRFHLGEEVAVGTWPAIIDRGQWDEVQRLREYRAQQHQDTKKRPIRNYLLRGVATCTCGARMGGTNSGRYAYYRCMRADNTDQQKCNRSISAEPLEAFVRDVAIKVLTKLDTAGYEPATTTRPEADVIADEKDREKLRELKELWLNDDDFTTADFQAMRTPIVKRMKERQRKTVKRPVAVLEGIAGPDAEANWERLEKAEDYARMNAIYRFLFAAVFVRPPTRKGRGLDTDRVDIKPNPLD

SEQ ID NO: 56877 - DNA, 50 bp, Streptomyces hirsutus
  source 1..50: mol_type = genomic DNA
ttattactgcatgagcaggacttgatcgatgtcatacccggctcatacag

SEQ ID NO: 56878 - DNA, 40 bp, Streptomyces hirsutus
  source 1..40: mol_type = genomic DNA
gatcgccgcaccgacgatgaccgaggattcccgcaaggcc

SEQ ID NO: 56879 - DNA, 40 bp, Streptomyces hirsutus
  source 1..40: mol_type = genomic DNA
gatcgccgcaccgacgatgatcgaggattcccgcaaggcc

SEQ ID NO: 56880 - DNA, 50 bp, Streptomyces hirsutus
  source 1..50: mol_type = genomic DNA
ctatctctggatagacacaacttgatccaggtcatatgctatttatacag

SEQ ID NO: 56881 - protein, 463 aa, Mycobacterium intracellulare
MLLMHCAVYLRQSQDKANDERAVSRQREDCLKLCEARGWTPVEYLDNDISASKGVRPAYQRMLADIHDGKIQAVVAWHLDRLHRRPVELEHFIALADEKRLALATVTGDVDLSTDNGRLIARITGAVARAEVERKSARQKRAALQRAEQGRAHSGGRRAFGYGADKKTVNEEEAALVRSAYNAVMDGEGLSTITRRWNDAGITTTTGGRWHSVTLRHVLLNPRHAGLRSYQGEILKGADTDGVRSTEWDAIVDEDIWRAVHAILTQPSRRNNFTTGRKYLLTGIAVCGVCGAPMSSNIKRGYTIYACKQCYGCSRRQDAVDRLVIDLVLGFLARPDAAELLVDPHAEGLDALRRRERALMDRLDELAVERADGVFDRRGYQIAREHVESRLAEVTEKMRGGDRHRLLEDLVKAKNPRKVWESKSLDKQRAIIRTLMRPRILPAGRGRRFTHDQLVPGWLTGEE

SEQ ID NO: 56882 - DNA, 50 bp, Mycobacterium intracellulare
  source 1..50: mol_type = genomic DNA
aggcgtgtttcgctaatagtgattctacccactacacagataagatgctt

SEQ ID NO: 56883 - DNA, 40 bp, Mycobacterium intracellulare
  source 1..40: mol_type = genomic DNA
cgacagatcgatgttcacgctgcccactacgcatacccct

SEQ ID NO: 56884 - DNA, 40 bp, Mycobacterium intracellulare
  source 1..40: mol_type = genomic DNA
cgacagatcgatgttcacgatgcccactacgcatacccct

SEQ ID NO: 56885 - DNA, 50 bp, Mycobacterium intracellulare
  source 1..50: mol_type = genomic DNA
aggtgtgttttaacaatagtcagtatactaatttcaataccaagagtcat

SEQ ID NO: 56886 - protein, 549 aa, Eubacterium ramulus; identical to SEQ ID NO: 19126

SEQ ID NO: 56887 - DNA, 50 bp, Eubacterium ramulus; identical to SEQ ID NO: 3407
  source 1..50: mol_type = genomic DNA

SEQ ID NO: 56888 - DNA, 40 bp, Eubacterium ramulus
  source 1..40: mol_type = genomic DNA
tccgggaacagtgcatgtggagacggtagttcttttgtcc

SEQ ID NO: 56889 - DNA, 40 bp, Eubacterium ramulus
  source 1..40: mol_type = genomic DNA
tccgggaacagtgcatgtgtagacggtagttcttttgtcc

SEQ ID NO: 56890 - DNA, 50 bp, Eubacterium ramulus
  source 1..50: mol_type = genomic DNA
cctttgaaaataagaacgattttctaaacagttcttaatatttcctaggt

SEQ ID NO: 56891 - protein, 553 aa, Flavonifractor plautii
MREVEILKKKQLKCYLYTRVSTSMQVDGYSLDAQRDKLRKYAAYEDMIVAGEYSDEGFSGKNIQGRQDFQRMLNDIQDGKDDVSYVLVFKLSRFGRNAADVLNSLQLMQDFGVNLICVEDGIDSSKDAGKLMISVLSAVAEIERENIRTQTMAGREQKAREGKWNGGFAPYGYKLDNGELVIAEDEAEVIRVIYDRYIHTNEGVAGVAKYLNRNGYTKKLRQNNTIPGFSRDFVKNVLYNPVYMGKIAYGRRRTEKKQGTRNEMHVVEQSEFPVYEGQHEAIISEEDWYLAQEKRKINSFKREKVNNPDHAHILSGILKCPCCGKSMYGNIAKAHSKDKKTRYYYYCKNTVTPTGHECSFRLNIEQTEINKFVVKVISAMVNNPRFVEAIQAKIGTAVDTEDMERQIAVLQGRLKQAFGTKSRLERQMDTLDINDAHYDRKILDLQRRYDEQYDTIEKIEVQIGELQSQIRSIQQEKISGDNIYRLLLAFDEVYHSATEAEQKEFMKAFIERIEMFPEKRKDGSWIKKIVFNFPVPVDGEEVKELPLETETTV

SEQ ID NO: 56892 - DNA, 50 bp, Flavonifractor plautii
  source 1..50: mol_type = genomic DNA
cccttggaaactgaaacaactgttgagacggttgtcttgctttccaaggg

SEQ ID NO: 56893 - DNA, 40 bp, Flavonifractor plautii; identical to SEQ ID NO: 33938
  source 1..40: mol_type = genomic DNA

SEQ ID NO: 56894 - DNA, 40 bp, Flavonifractor plautii
  source 1..40: mol_type = genomic DNA
cccccgcaccgcgcatgtgtaaaccgtggcgcggctggaa

SEQ ID NO: 56895 - DNA, 50 bp, Flavonifractor plautii
  source 1..50: mol_type = genomic DNA
acctaggaaatattaagaactgtttagaaaatcgttcttattttcaaagg

SEQ ID NO: 56896 - protein, 547 aa, Faecalibacterium prausnitzii
MKKTKTKCYLYTRVSTSMQVDGYSLDAQRDKLRKYAEYEDMVVAGEYSDEGFSGKNIQGRHEFQRMLQDIQDCKDGVEYVLVFKLSRFGRNAADVLNSLQLMQDFGVNLICVEDGIDSSKDSGKLMISVLSAVAEIERENIRTQTMAGREQKAREGKWNGGFAPYGYRLEKGELLIAEDEVDVIRTIFDRYIHTNDGVSGVAKYLNRQGFVKKLRQNGTIPGFSASFVKSIIDNPVYMGKIAYGRRRTEKKIGTRNEMHVVEQSEFPVYEGKHEAIISEEDWNLAQEKRKINAYRRGKVNDPTHAHILSGILKCPCCGKSLYGNIAKAHSKDKKTRYYYYCKNTVTPTGHECTFRLNIEQMEMNRMVASIISAMVSDPRFADAIKAKIGSAVDTNDLEKQLEALQAQLRQTLGTKARLERQMDGLDVNDPYYDRKISDLQRRYDEQYGAIDEIEVQIDDVQSQIRSIRQEKISGDNIYRLLLAFDQVYEAASEVERKEFMRAFIERIELFPEKQPDGNWIRKIIFNFPVPVNGTEVKELPLENETIV

SEQ ID NO: 56897 - DNA, 50 bp, Faecalibacterium prausnitzii; identical to SEQ ID NO: 3407
  source 1..50: mol_type = genomic DNA

SEQ ID NO: 56898 - DNA, 40 bp, Faecalibacterium prausnitzii
  source 1..40: mol_type = genomic DNA
cccgaggacgaagcattgcgaatgcgtactcttgatgtca

SEQ ID NO: 56899 - DNA, 40 bp, Faecalibacterium prausnitzii
  source 1..40: mol_type = genomic DNA
cccgaggacgaagcattgctaatgcgtactcttgatgtca

SEQ ID NO: 56900 - DNA, 50 bp, Faecalibacterium prausnitzii; identical to SEQ ID NO: 56890
  source 1..50: mol_type = genomic DNA

SEQ ID NO: 56901 - protein, 555 aa, Faecalibacterium prausnitzii
MREVKILKKKQLKCYLYTRVSTSMQVDGYSLDAQRDKLRKYAAYEDMIVAGEYSDEGFSGKNIQGRQEFQRMLNDIQDGKDDVSYVLVFKLSRFGRNAADVLNSLQLMQDFGVNLICVEDGIDSSKDAGKLMISVLSAVAEIERENIRTQTMAGREQKAREGKWNGGFAPYGYKLDNGELVIAEDEAEVIRVIYDRYIHTNEGVAGVAKYLNRNGYTKKLRQNNTIPGFSRDFVKNVLYNPVYMGKIAYGRRRTEKKQGTRNEMHVVEQSEFPVYEGQHEAIISEEDWYLAQEKRKVNSFKREKVNNPDHAHILSGILKCPCCGKSMYGNIAKAHSKDKKTRYYYYCKNTVTPTGHECSFRLNIEQTEINKFVAKVISAMVNNPRFVEAIQAKIGTAVDTEDMEKQIAVLQGRLKQAFGTKSRLERQMDTLDLNDAHYDRKILDLQRRYDEQYDIIEEIEVQIAELQGQIRSIQQEKISGDNIYRLLLAFDEVYHSATEAEQKEFMKAFIERIEMFPEKRKDGSWIKKIVFNFPVPVDGEEVKELPLETETTVET

SEQ ID NO: 56902 - DNA, 50 bp, Faecalibacterium prausnitzii; identical to SEQ ID NO: 56892
  source 1..50: mol_type = genomic DNA

SEQ ID NO: 56903 - DNA, 40 bp, Faecalibacterium prausnitzii
  source 1..40: mol_type = genomic DNA
cccgcatacggagcatatcgagacggtatgtgtattgtcc

SEQ ID NO: 56904 - DNA, 40 bp, Faecalibacterium prausnitzii
  source 1..40: mol_type = genomic DNA
cccgcatacggagcatatctagacggtatgtgtattgtcc

SEQ ID NO: 56905 - DNA, 50 bp, Faecalibacterium prausnitzii; identical to SEQ ID NO: 56895
  source 1..50: mol_type = genomic DNA

SEQ ID NO: 56906 - protein, 498 aa, Mycolicibacter arupensis
MDATTAPTRRAALYLRISRDLTGEGLAVERQRELCQQIVSLRGWTVVDEFVDNSISASDARKNRPGYDALVAAYDAGSFDALVCYDMDRLTRQPRQMEDWLDAAEKNGLALVTANGEADLTTDAGRTFVRVRMAFARGEVERKSARQKAAAVQRANLGRPPLGTRLTGYTSRGEVVPDEAELVRRIFKLFHAGESLRGIARTLTNEGTSARSGKPWNPTSVYGILANPRYCGRSIYNRLATETDARKARRNGEVTEALTVTRGTWEALVSEDVFDAVQAILTDPRRITNRQGTERKHLGSGLFLCATCDQPVVSFSGGRYRCKAACVNRAHGPVDYDRIRQIITADDDQDAPRARGVDEFVTAVVAERLRRPDARKRLAPPKANTAPLRAEQDALRARLAKVDADYDDDLIDARRWRTKKEKIGAQLAEVDRKIKAVQPGGGALDDVLAAPHPSEAFMAASLMARRSVIDALCEVRLRRGTRGSKTFDPNTIRIDWRR

SEQ ID NO: 56907 - DNA, 50 bp, Mycolicibacter arupensis
  source 1..50: mol_type = genomic DNA
gacgttgttccaaaccggaactccaccacatcacagtgtcaataaacgtt

SEQ ID NO: 56908 - DNA, 40 bp, Mycolicibacter arupensis
  source 1..40: mol_type = genomic DNA
gacgttaaacctaaactccaccacgtccccgtcggccatg

SEQ ID NO: 56909 - DNA, 40 bp, Mycolicibacter arupensis
  source 1..40: mol_type = genomic DNA
gacgttaaacctaaactcctccacgtccccgtcggccatg

SEQ ID NO: 56910 - DNA, 50 bp, Mycolicibacter arupensis
  source 1..50: mol_type = genomic DNA
gacttttttccagaccagaacttctccacagcacatattcaattattttt

SEQ ID NO: 56911 - protein, 465 aa, Brevibacterium linens
MELSGQAGIYCRISDDKAGGGLGVQRQEQDCCKLAGRLNLHVVETYVDNDTSAYSGAKRPAYDRMIDDVRRGRVTTVLAWHNDRLHRSPKELEAFIDLINDTGAQVHFVTSGEFDLSTPTGRMIARQVGVLARYESEHKSERITRAHRQGAELGKYRGGSARIFGYNDDGYTLNPVEAEAIRGAYQAILEGKSAGSILRDWKARGLTSTSGRQFIHTTLRSVLLRKRNYGVSEYKGEIVGVGQWEPIVDEATFKQVEGILNDPGRIKNKSNRAKYLMSGLLLCGKCEQSATMGSYTASQKGVKVRYYRCRSCLSNFIRIDETDAFVAQLVIARLSQPDSEILAMPRAEQKADDDDLEAKARVLRARLTELIDMYASGEITRAQHQRAAEAVKTELSAVEARMSTTPGRTLVGELISSEDIEQAWANLDIAQRKELVSALVTVTVKPVGKGYVRRYQPERLEIEWT

SEQ ID NO: 56912 - DNA, 50 bp, Brevibacterium linens
  source 1..50: mol_type = genomic DNA
aatggtgcttaactaatattggggctgcctgtgttgcttgttacactata

SEQ ID NO: 56913 - DNA, 40 bp, Brevibacterium linens
  source 1..40: mol_type = genomic DNA
cgtcgcgctcaattcgggcctgccgggaatggggacgatc

SEQ ID NO: 56914 - DNA, 40 bp, Brevibacterium linens
  source 1..40: mol_type = genomic DNA
cgtcgcgctcaattcgggctagccgggaatggggacgatc

SEQ ID NO: 56915 - DNA, 50 bp, Brevibacterium linens
  source 1..50: mol_type = genomic DNA
aatagtgctgttttcatatctcagtagccagtgttggaagccatactaaa

SEQ ID NO: 56916 - protein, 589 aa, Enterobacter hormaechei; identical to SEQ ID NO: 12416

SEQ ID NO: 56917 - DNA, 50 bp, Enterobacter hormaechei
  source 1..50: mol_type = genomic DNA
aattatagctattacacttcagtgaacactaaagtaaaatacacctcatt

SEQ ID NO: 56918 - DNA, 40 bp, Enterobacter hormaechei; identical to SEQ ID NO: 52588
  source 1..40: mol_type = genomic DNA

SEQ ID NO: 56919 - DNA, 40 bp, Enterobacter hormaechei
  source 1..40: mol_type = genomic DNA
gctcggtgtgaccatcggtatcaccgacggtaacgtgatt

SEQ ID NO: 56920 - DNA, 50 bp, Enterobacter hormaechei
  source 1..50: mol_type = genomic DNA
aagtatgtagaagacactccagtgatgcttgaagtaagagacacttcatt

SEQ ID NO: 56921 - protein, 589 aa, Citrobacter freundii; identical to SEQ ID NO: 12421

SEQ ID NO: 56922 - DNA, 50 bp, Citrobacter freundii
  source 1..50: mol_type = genomic DNA
aattatacttattacacttcagtgaacactaaagtaaaatacacctcatt

SEQ ID NO: 56923 - DNA, 40 bp, Citrobacter freundii; identical to SEQ ID NO: 52643
  source 1..40: mol_type = genomic DNA

SEQ ID NO: 56924 - DNA, 40 bp, Citrobacter freundii
  source 1..40: mol_type = genomic DNA
gcttggcgtcaccatcggtatcaccgacggtaacctgatt

SEQ ID NO: 56925 - DNA, 50 bp, Citrobacter freundii; identical to SEQ ID NO: 56920
  source 1..50: mol_type = genomic DNA

SEQ ID NO: 56926 - protein, 566 aa, Mycobacteroides abscessus
MSNNTLATMESATAVKIAVSYLRVSTKEQAERDGEPDGYSIPAQRDANRRKATSMNAVVQMEFVDRGASARSADRPQLQEMLRYLENNHVDYVIVHKVDRLARNRADDVEISLAIKKSGAELVSATENIDETPSGMLLHDIMSSIGAFYSRNLAVEVLKGMDQKAKTGGTPGMAPIGYLNIPKLNANGSQVRTVEVDPVRGPLIAWAFQAYATGNWTVTALAEELNTRGLTTRPNSRTPGRPVSRSSVHQFLINPYYKGIVTYRKATYDGRHEPLTDAVTWARVQEILRDHAVGEKQREHPHYLKSSVYCWSCGSRLVVTMAKNRHGTVYPYFMCVGRHQKRSTCQQKAKLIPVVEQEVEDEYDRQLLQLKAEERDEIEAMISDGLQDFRRSSETNRKTLTVQKDRLVSERMRLLQAHYGGAIPLDLLKQEQDRIASQLASIEERLTSSATEFDRFEQLIKRALDLATYAAQAYRHAATVKGSDQIRRLFNQAFFTRIRVSDDQATGELAEPFKTLLSPEMAAAAKHHRQTKSATQNATHTLTGAITAENDKPTPRGAGLKETFLV

SEQ ID NO: 56927 - DNA, 50 bp, Mycobacteroides abscessus
  source 1..50: mol_type = genomic DNA
aggtttgaaagaaacgtttttggtacacctccgcgacgccgtttcaaatt

SEQ ID NO: 56928 - DNA, 40 bp, Mycobacteroides abscessus
  source 1..40: mol_type = genomic DNA
acctcgctaacgagctggtacccccgatgggattcgaacc

SEQ ID NO: 56929 - DNA, 40 bp, Mycobacteroides abscessus
  source 1..40: mol_type = genomic DNA
acctcgctaacgagctggtttccccgatgggattcgaacc

SEQ ID NO: 56930 - DNA, 50 bp, Mycobacteroides abscessus
  source 1..50: mol_type = genomic DNA
acatgtggaactttcggttttggtttagctctgtgaacgtatttaaaact

SEQ ID NO: 56931 - protein, 566 aa, Mycobacteroides abscessus
MSNNTFATTESATAVKIAVSYLRVSTKEQAERDGEPDGYSIPAQRDANQRKATSMNAVVQMEFVDRGASARSADRPQLQEMLRYLENNHVDYVIVHKVDRLARNRADDVEISLAIKKAGAELVSATENIDETPSGMLLHDIMSSIGAFYSRNLAVEVLKGMDQKAKTGGTPGMAPIGYLNIPKLNANGSQVRTVEVDPVRGPLIAWAFQAYATGNWTVTALAEELSTRGLTTRPNSRTPGRSVSRSSVHQFLINPYYKGVVTYRKATYDGRHEPLTDAVTWAKVQEILRDHAVGEKQREHPHYLKSSVYCGACGSRLVVTMAKNRHGTVYPYFMCVGRHQKRNTCQQKAKLIPVVEQEVEDEYDRQLIQLKAGERDEIEAMISDGLHDFRRSSETNRKTLTVQKDRLVSERMRLLQAHYAGAIPLDLLKQEQDRIASQLASIEERLTSSSTEFDRFEQLIKRALDLATYAARAYRNAATAKGSDQIRRLLNQAFFTRIKVSDDHARGELAEPFKTLLSPEMAAAAKHHRQTKSATQNATRTLTEAITAENDKPAPRGAGLKETFLV

SEQ ID NO: 56932 - DNA, 50 bp, Mycobacteroides abscessus; identical to SEQ ID NO: 44297
  source 1..50: mol_type = genomic DNA

SEQ ID NO: 56933 - DNA, 40 bp, Mycobacteroides abscessus
  source 1..40: mol_type = genomic DNA
ccagtatgactggttgcgtacccccaacgggattcgaacc

SEQ ID NO: 56934 - DNA, 40 bp, Mycobacteroides abscessus; identical to SEQ ID NO: 56933
  source 1..40: mol_type = genomic DNA

SEQ ID NO: 56935 - DNA, 50 bp, Mycobacteroides abscessus; identical to SEQ ID NO: 26560
  source 1..50: mol_type = genomic DNA

SEQ ID NO: 56936 - protein, 566 aa, Mycobacteroides abscessus; identical to SEQ ID NO: 44296

SEQ ID NO: 56937 - DNA, 50 bp, Mycobacteroides abscessus; identical to SEQ ID NO: 44297
  source 1..50: mol_type = genomic DNA

SEQ ID NO: 56938 - DNA, 40 bp, Mycobacteroides abscessus; identical to SEQ ID NO: 56933
  source 1..40: mol_type = genomic DNA

SEQ ID NO: 56939 - DNA, 40 bp, Mycobacteroides abscessus; identical to SEQ ID NO: 56933
  source 1..40: mol_type = genomic DNA

SEQ ID NO: 56940 - DNA, 50 bp, Mycobacteroides abscessus; identical to SEQ ID NO: 26560
  source 1..50: mol_type = genomic DNA

SEQ ID NO: 56941 - protein, 584 aa, Aeromonas rivuli
MTQMYSYIRWSSDRQELGTTLQRQITGAKEFAIQQGLELVEVIDAGVSAFKGKNTTDGKLGDFIAAVEAKAIPSDSWLYVENLDRLTRQEVTTAQELFLKLLRLGLTVVTGMDKRVYTIESVNQNPTDLMLSILLFSRANEESKTKQARTIGNVETLIERHKKGEPVNIKSAGKHPFWVDDSGSQYEAIKPHPKYWQIAREALDMFLEGHGIYKVKRYLDDQYPNELNGKEWDYQVIKRMRESRALIGERTLNVQKRTYILENYYPALCKSESEFLRLQELRVQNGHKSKRDPNKDNIKLMSGLSILRCARCKGTMHGYLNKGKPRYICVNGKHKQKGCSAWSVTAPLVEQCIIICLLMEYLDSSRDTSQNVSDIESAIASKQNLLETCSNKVKNLVSLVENGVGNISELSDRLIELGKERDGLIKQISNLSDKKILMEGKGSFEDTMIDFIGMIRWDTFNDITDESRNKIRNNISSIVETVFLDKIDGCLSIKVKCIGSDIIYVFTGDMMKPQWKFYTEHYVDGESYLVSTNDDLLSHEKMKTIIKTEKEIQNTYQKYLKTVMGLLSTVGYPEINGSAFWPNR

SEQ ID NO: 56942 - DNA, 50 bp, Aeromonas rivuli
  source 1..50: mol_type = genomic DNA
taatttacttattgattgttagggcaacccaatgataaaaaaccaatctt

SEQ ID NO: 56943 - DNA, 40 bp, Aeromonas rivuli; identical to SEQ ID NO: 26578
  source 1..40: mol_type = genomic DNA

SEQ ID NO: 56944 - DNA, 40 bp, Aeromonas rivuli; identical to SEQ ID NO: 26579
  source 1..40: mol_type = genomic DNA

SEQ ID NO: 56945 - DNA, 50 bp, Aeromonas rivuli
  source 1..50: mol_type = genomic DNA
taagtaacttgcccagtgttctggttatccattgctacaaaacaaatctg

SEQ ID NO: 56946 - protein, 458 aa, Eisenbergiella tayi
MKEKIPRCAIYDRVSTDLQVKEGLSLEAQRQALTDYAISHGYKIIGYYADEGITARKKMQNRKELVRLLNDVKADKIDLILVTKLDRWFRNVKDYHNTQAILEAHGCNWKTIFEEYDTSTSNGRFAINIMLSVNENECDRDSDRIKSVFEYKKSRKEHLNGRPGYGYIADENKKLIKDPATQHIVEDTFKHYFSTYSKNATVEYILDKYSGDPNAPTMYQVNRILTCETYAGRKYGIDNYCEPYITLKKHEQIISVCDAKIIPHQNEPFLFSSMIKCPICGRNMSGFTKKHTLKNGEISKYKRYRCEAKFTEFHNGACITESVIESYLLNNIMCELNKELLQIKTREKENKKKLACNPVKIQEEINRLNIMYQKGRIDDEYYDKQYSKLKQKLSDAQHPQKVASLEAYKPIIQTLNDGWMEMYHTLDIKHKKSFWKGLIEAIYVDKESRKLCGFKFLL

SEQ ID NO: 56947 - DNA, 50 bp, Eisenbergiella tayi
  source 1..50: mol_type = genomic DNA
gggtgtagtaacacataaaaatccgttgaattatatattttactacacca

SEQ ID NO: 56948 - DNA, 40 bp, Eisenbergiella tayi
  source 1..40: mol_type = genomic DNA
cgggcagggcgatttcaccgttgaattcgagccgcatgcc

SEQ ID NO: 56949 - DNA, 40 bp, Eisenbergiella tayi
  source 1..40: mol_type = genomic DNA
cgggcagggcgatttcacccatgaattcgagccgcatgcc

SEQ ID NO: 56950 - DNA, 50 bp, Eisenbergiella tayi
  source 1..50: mol_type = genomic DNA
gtatttagagtaaaaaaaaaatcacatgcattaaagttttgattacacca

SEQ ID NO: 56951 - protein, 533 aa, Bacteroides fragilis; identical to SEQ ID NO: 17301

SEQ ID NO: 56952 - DNA, 50 bp, Bacteroides fragilis; identical to SEQ ID NO: 17302
  source 1..50: mol_type = genomic DNA

SEQ ID NO: 56953 - DNA, 40 bp, Bacteroides fragilis; identical to SEQ ID NO: 54348
  source 1..40: mol_type = genomic DNA

SEQ ID NO: 56954 - DNA, 40 bp, Bacteroides fragilis
  source 1..40: mol_type = genomic DNA
tttaggatgcaactatagttgtcgaagcgggacttgaacc

SEQ ID NO: 56955 - DNA, 50 bp, Bacteroides fragilis
  source 1..50: mol_type = genomic DNA
aaaataggattcctcctttaggtttgcctaagagcactcagtattgaagc

SEQ ID NO: 56956 - protein, 533 aa, Bacteroides thetaiotaomicron
MENFDLKGFAKGKKQQKEQIGGNAIIYTRVSSSEQVDGQSLEVQIDKCREYAKVRSYTVVGEFGGTYESAKSDKERKEFNRMLAFIKQSNKKGSSQPVKTVIVFSTSRFSRTGSTTIIEEVEARGAYVVSATSNYDPRTPVGKYMQLMELANARFQNDEKRATTIENSVKALLKGRWIGKAPRGYDQKTTKKEQIITINEEGKLIRKAFLWKANNKLSNEEIRHRLAAEGFHICKQKLSELFKNPFYCGYMAHKFLQGDIILGNHPPLIPKEIFLKVNGELSKNHSGYEQKIDKEYAPLLGSIKCPCCGKNLSASISTKMRKRFGRTDIGYYVCSRKGCKYNSSTKKVHEAFEEEVNRYALSNKVSELLKMQLTITFEYMNQENRERAKSIKANIKAKEKELEQVETNYALCTDAKKQSICEKVMTKLEKEVRDLKTEFSKVNTEILNLDKFIDFAFKMRSNLFGLWELQGLEGRRRLQKLVFPDGFIYDKNNEHIEPKRVNQFFLLKYSYPTGNGDKKKETNRGKHDSSLRV

SEQ ID NO: 56957 - DNA, 50 bp, Bacteroides thetaiotaomicron; identical to SEQ ID NO: 17302
  source 1..50: mol_type = genomic DNA

SEQ ID NO: 56958 - DNA, 40 bp, Bacteroides thetaiotaomicron; identical to SEQ ID NO: 55103
  source 1..40: mol_type = genomic DNA

SEQ ID NO: 56959 - DNA, 40 bp, Bacteroides thetaiotaomicron
  source 1..40: mol_type = genomic DNA
tttaatcaggaatactcgttgtcgaagcgggacttgaacc

SEQ ID NO: 56960 - DNA, 50 bp, Bacteroides thetaiotaomicron; identical to SEQ ID NO: 56955
  source 1..50: mol_type = genomic DNA

SEQ ID NO: 56961 - protein, 533 aa, Bacteroides thetaiotaomicron
MENFDLKGFAKGKKQQKEQIGGNAIIYTRVSSSEQVDGQSLEVQQDKCREYAQSHSYTVVAEFGGTYESAKSDKERKEFNRMLDFIKKSNKKGNTQKVDVVIVFSTSRFSRTGSTTIIEEVEARGAYVVSATSSYDPRTAVGKYMQLMELANARFQNDEKRATTIENSVKALLKGRWIGKAPRGYDQKTTKKEQIITINEEGKLIRKAFLWKANNKLSNEEIRHRLEAEGLHICKQKLSELFKNPFYCGYMAHKFLQGDIVQGNHPPLISKEIFLKVNGELSKNHSGYEQKVDKEYAPLLGSIKCPCCGKNLSASISTKMRKKFGRTDIGYYVCCRKGCKYNSSTKKVHEAFEEEVNKYALSDKVSELLKMQLTITFEYMNQENRERAKSIKANIKTKEKELEQVETNYALCTDAKKQSICEKVMTKLEKEVRDLKTELSKVSTEILNLDKFIDFAFKMRSNLFELWELQGLEGRRRLQKLVFPDGFIYDKNNEYIEPKRVNQFFLLKYSYPTGNGDKKKETNREKHDSSLRV

SEQ ID NO: 56962 - DNA, 50 bp, Bacteroides thetaiotaomicron; identical to SEQ ID NO: 17302
  source 1..50: mol_type = genomic DNA

SEQ ID NO: 56963 - DNA, 40 bp, Bacteroides thetaiotaomicron; identical to SEQ ID NO: 55103
  source 1..40: mol_type = genomic DNA

SEQ ID NO: 56964 - DNA, 40 bp, Bacteroides thetaiotaomicron; identical to SEQ ID NO: 56959
  source 1..40: mol_type = genomic DNA

SEQ ID NO: 56965 - DNA, 50 bp, Bacteroides thetaiotaomicron; identical to SEQ ID NO: 56955
  source 1..50: mol_type = genomic DNA

SEQ ID NO: 56966 - protein, 533 aa, Bacteroides thetaiotaomicron
MENFDLKGFAKGKKQQKEQIGGNAIIYTRVSSSEQVDGQSLEVQIDKCREYAKARSYTVVGEFGGTYESAKSDKERKEFNRMLAFIKQSNKKGSNQPVKTVIVFSTSRFSRTGSTTIIEEVEARGAYVVSATSNYDPRTPVGKYMQLMELANARFQNDEKRATTIENSVKALLKGRWIGKAPRGYDQKTTKKEQIITINEEGKLIRKAFLWKANNKLSNEEIRHRLAAEGLHICKQKLSELFKNPFYCGYMAHKFLQGDIVQGNHPPLISKEIFLKVNGELSKNHSGYEQKIDKEYAPLLGSIKCPCCGKNLSASISTKMRKKFGRTDIGYYVCSRKGCKYNSSIKKVHEAFEEEVNRYSLSDKVSELLKMQLTITFEYMNQENRERAKSIKANIKAKEKELEQVETNYALCTDAKKQSICEKVMTKLEKEVRDLKNEFSKVNTEILNLDKFIDFAFKIRSNLFGLWELQGLEGRRRLQKLVFPDGFIYDKNNEHIEPKRVNQFFLLKYSYPTGNGDKKKETNREKHDSSLRV

SEQ ID NO: 56967 - DNA, 50 bp, Bacteroides thetaiotaomicron; identical to SEQ ID NO: 17302
  source 1..50: mol_type = genomic DNA

SEQ ID NO: 56968 - DNA, 40 bp, Bacteroides thetaiotaomicron; identical to SEQ ID NO: 55103
  source 1..40: mol_type = genomic DNA

SEQ ID NO: 56969 - DNA, 40 bp, Bacteroides thetaiotaomicron; identical to SEQ ID NO: 56959
  source 1..40: mol_type = genomic DNA

SEQ ID NO: 56970 - DNA, 50 bp, Bacteroides thetaiotaomicron; identical to SEQ ID NO: 56955
  source 1..50: mol_type = genomic DNA

SEQ ID NO: 56971 - protein, 533 aa, Bacteroides thetaiotaomicron; identical to SEQ ID NO: 54406

SEQ ID NO: 56972 - DNA, 50 bp, Bacteroides thetaiotaomicron; identical to SEQ ID NO: 17302
  source 1..50: mol_type = genomic DNA

SEQ ID NO: 56973 - DNA, 40 bp, Bacteroides thetaiotaomicron; identical to SEQ ID NO: 55103
  source 1..40: mol_type = genomic DNA

SEQ ID NO: 56974 - DNA, 40 bp, Bacteroides thetaiotaomicron; identical to SEQ ID NO: 56959
  source 1..40: mol_type = genomic DNA

SEQ ID NO: 56975 - DNA, 50 bp, Bacteroides thetaiotaomicron; identical to SEQ ID NO: 56955
  source 1..50: mol_type = genomic DNA

SEQ ID NO: 56976 - protein, 600 aa, Neorhizobium galegae
MKSKAYSYIRMSTEIQLRGDSLRRQSEASRTYAAENDLELVEDFKLEDIGISAFHGRNVEDGSLGRFLSLVQNGQIPCGSFLLVESLDRISRQSSVAATTLFLQILKAGVNIVTLVDKHVYRAGSADFIDIIQSVLIMSRAHEESKTKSMRVGAAWENKRQGISDRKLTRMCPSWLELNGDRKSFRLMPDRVEIVRAIFNEASTGKGSYQIARALNKVCVPPFGRGDGWHESFISKLLTSRAVLGEFQPHRLVAGKRHPEGTPIKDYFPRIVSDELFALVGTGRISRKNRGSGRKGRSNINLFSGVATCGYCGAKMRIIDKGAKPKGGIYLGCENARRGARCRASLWLLEHLETAFLRFVSELDLSSLISERSPHHLDRLAQEASLAALNLELARKFKIREQAFEMLSVDGVEGAYVQGKLAELTNDIVALEKERADLRAKIAVEGAQPVDIIETEKLIRSLALGPKDNANDRTKVSDWIRRNVETMRVFPDGLDGPPGTLQEMRDALSDDVTAVLEKAVSFAAKRHALVDGGHRRFEIAFGPLTSRIVEVDRADPLKFVVSMRINEFEAVLETAENEVTRRKPRSTVEHQIVLDGTVGT

SEQ ID NO: 56977 - DNA, 50 bp, Neorhizobium galegae
  source 1..50: mol_type = genomic DNA
ctctgattaatccacctcattatccaactggtgaggtggattaaaccaac

SEQ ID NO: 56978 - DNA, 40 bp, Neorhizobium galegae
  source 1..40: mol_type = genomic DNA
gccgggcaagatcaacatgcatatcgtcggcctgccggac

SEQ ID NO: 56979 - DNA, 40 bp, Neorhizobium galegae
  source 1..40: mol_type = genomic DNA
gccgggcaagatcaacatgcctatcgtcggcctgccggac

SEQ ID NO: 56980 - DNA, 50 bp, Neorhizobium galegae
  source 1..50: mol_type = genomic DNA
ctctgttttcaccacctctttaccccattggtgaggaaggaatttccacc

SEQ ID NO: 56981 - protein, 557 aa, Pseudomonas lundensis
MSKAYAYVRWSTAEQGEEGRDSHSRQITPLQAFTETTGVPVVETVIDKGVSAFRGANARTGQLKGLLDRVENGEIGKGDYIIVESIDRLTRQKLTDSVDLIQSILKKGVRLHTVFDDKTYSYDDPSRDLETLILVGVIAKRAHEESDTKSKRLKSSWLKKRDAAETTIIRKQCPYGFRYDEKTQAFAIVEDEAQEIRQIFDQLKHMGILESIKRVNQYSKRRWTRKHIDELIKSKSPIGVLCLRRRNEDGTKSFDRYVPGYFPKLIEESEFDAAVTAIKNRFNERKSGRRSPNNYNIFRHCIQCEEHKVGMLFNLQGLGAEKKRYAYLVCSNRAERVCECNNRIRFDLVFGTFLAFVKQLSENRYIDERTDKKRKDFTWFSQEQYKQMDSVNNAFSRFFSARDTSASKEEIRTKKAQLTSEKNTLDMLEASLAQFDGLIPKIFIKRVADSEARITAIESEIQNLEGSLIIEAETLEITTYNDILDLYQTEEGRLKLNTFFISRGIIFRVQFGKESNTVVLTIRIKGEDGSKLYTHQQFGTNDPLKPFGVPDLSHIIK

SEQ ID NO: 56982 - DNA, 50 bp, Pseudomonas lundensis
  source 1..50: mol_type = genomic DNA
ttattagaaaacgctagaccgctgaacaacggaggggtattttctaataa

SEQ ID NO: 56983 - DNA, 40 bp, Pseudomonas lundensis
  source 1..40: mol_type = genomic DNA
gctgtcgatcgagcctctgaacaatacttcaaacgccagc

SEQ ID NO: 56984 - DNA, 40 bp, Pseudomonas lundensis
  source 1..40: mol_type = genomic DNA
gctgtcgatcgagcctctgcacaatacttcaaacgccagc

SEQ ID NO: 56985 - DNA, 50 bp, Pseudomonas lundensis
  source 1..50: mol_type = genomic DNA
ctctcatacaaaaatagattgctgcacaacagagggaagaattcaaatag

SEQ ID NO: 56986 - protein, 600 aa, Vibrio aestuarianus; identical to SEQ ID NO: 37001

SEQ ID NO: 56987 - DNA, 50 bp, Vibrio aestuarianus; identical to SEQ ID NO: 37002
  source 1..50: mol_type = genomic DNA

SEQ ID NO: 56988 - DNA, 40 bp, Vibrio aestuarianus
  source 1..40: mol_type = genomic DNA
tgcgcttgttgtaccaactaacgaagaatttgtcattgcc

SEQ ID NO: 56989 - DNA, 40 bp, Vibrio aestuarianus
  source 1..40: mol_type = genomic DNA
tgcgcttgttgtaccaactttcgaagaatttgtcattgcc

SEQ ID NO: 56990 - DNA, 50 bp, Vibrio aestuarianus
  source 1..50: mol_type = genomic DNA
tgccatactttacacaacacaaccttccaagaggcacacagagtacatca

SEQ ID NO: 56991 - protein, 545 aa, Vibrio alginolyticus
MNKYHLYQRVSKQIQAEEGQGIQRQEQACEHWISDYNKRLLSEGKSAYSKGLIYEDRGKSAYTAANFKRGELGALINDIENGKIEKGDLIVIELIDRFSRANVDFVRSQFQRIIDAGVKIAITKWNLVFEENMESVSSVTGRILLEIGMYLAYQESSQKSSRIKASRKLLEDSGKKSIAKPPFWLARNSDLKSYTIIEENAEIIRKIFDLKLNFNYGPQKIIKSLGDLDIYRYSFDENGNLIKTTKNSPLSESSINAYIRNTNVIGKLDGKDYYPRIIDDRTFYAVQKRTRENTGGVGEIFRNVFVGVGKCGCLIRKENENGCGSLAKCGYIMAFSSRKVKNPTKGMYLKCNRKRKSTKCDSENINYYLAQNKIYNVLKSLKFDIDQSVDISHLEEKINTIDKSMSKIRDYMTQYSDDEEWENQYKIKRMEREKIENEIKASKSRITGQLSNLDIDFSKEKDRVLFNQFLKDNRIKVYFTKERMEIIIGSLNNFSIKCGYDDSNRDIDHIIESYSKNGLVGIEEKSGKSEGKGLLRFNLPTVPGS

SEQ ID NO: 56992 - DNA, 50 bp, Vibrio alginolyticus; identical to SEQ ID NO: 41102
  source 1..50: mol_type = genomic DNA

SEQ ID NO: 56993 - DNA, 40 bp, Vibrio alginolyticus; identical to SEQ ID NO: 8223
  source 1..40: mol_type = genomic DNA

SEQ ID NO: 56994 - DNA, 40 bp, Vibrio alginolyticus
  source 1..40: mol_type = genomic DNA
gggtaagccacagtttgcacatgacacaaatggaccgcgt

SEQ ID NO: 56995 - DNA, 50 bp, Vibrio alginolyticus
  source 1..50: mol_type = genomic DNA
ctgtagttacaattaaatttaattcatgaaaactacatatcatacttcat

SEQ ID NO: 56996 - protein, 522 aa, Anaerobutyricum hallii
MELLNVCIYLRKSRADREAEARGEGETLARHERILLDLAKKRGYNVGAIYKEIVSGETISARPVMQQVLREVESGMWDGVLVVEVERLARGDTIDQGVVARAFRYSETLIITPLKTYDPNNEYDEEYFEFGLFMSRREYKTIRRRLTAGRESSAKEGKYCGSKPPYGYSRVKLVGEKGWTLQPVPDQAEIVKLIFNLYVHGVAGERIGMAKICRKLNDSGIKTMDGGLWTVPRVQAILRNPVYAGMIRWNSRKAVKHIQDGQITISRPFAKDYILVEGRHPAIVSKELFQQAQDIVNQNPARPLNSLHVLRNPLAGIIRCGKCGYVMTRKAPSGRQVDLLRCPYSSCNNVSSKLPLVEKALLDGIQELVDGYKLNSNFSDQEYSLSISEKEEMIRGKLKEIDVLRKKKEKQYDLLEQGIYSTEEFLERSRATAAELSACDTVIHSLRQEIKHEQELQFQRSSFIPKCEDLLAHYWTWDTSTKNQFLRELIEKAVYTKNTKNTWKNGDDVSFTLDIYPKIQHK

SEQ ID NO: 56997 - DNA, 50 bp, Anaerobutyricum hallii
  source 1..50: mol_type = genomic DNA
tgtgggtagcctttatgcgcccacacattggcacataaatgatgatacaa

SEQ ID NO: 56998 - DNA, 40 bp, Anaerobutyricum hallii; identical to SEQ ID NO: 26988
  source 1..40: mol_type = genomic DNA

SEQ ID NO: 56999 - DNA, 40 bp, Anaerobutyricum hallii; identical to SEQ ID NO: 26989
  source 1..40: mol_type = genomic DNA

SEQ ID NO: 57000 - DNA, 50 bp, Anaerobutyricum hallii
  source 1..50: mol_type = genomic DNA
tgtgacaactgcagatacccccacagatttccaaatataaaatgaaacaa

SEQ ID NO: 57001 - protein, 459 aa, Blautia pseudococcoides
MKDKELNDKLTRTALYIRVSGEEQKIKGLSLESQRERLEAYAKEQGWVIVGVYIDAAKTARKKLHKRSEFQRMLDSVRHDEIDMLLFTRLDRWFRSVPDYYKVMEVLEAHHCEWKTIDDGEGYDTTTASGRLYINIKLSIAQNEADLDGERIDVVFDSKVQHGTVLSGNCPFWLRVNEDKRLELIPEKTAILQDAFDYYERSTSQRATIKYIRETYGVNWCDATFRRMLHDKLAIGIYDRNGRYNPDFCPAAISREQFDRVQELSSRNSRSNPSGKVYIFTGVLVCEECRHNLIGYLTRDIYYYRCNQHFQRGRCCHNHSAREDKVESWLFEHLSEEIEKYEVSWEVQAAERKKTAASVDRATLRRKLTKLKELYMNDLIDIEDYKKDYVTYSAALEKLNEPQESEKRVDLSGVRQIVSKGFREIYDSLTREEKRTLWKSVLKEIRIDNDQNITGISFF

SEQ ID NO: 57002 - DNA, 50 bp, Blautia pseudococcoides
  source 1..50: mol_type = genomic DNA
ttgtgtactaatgttacataaccggtgggtagtgtaaaattagtatttaa

SEQ ID NO: 57003 - DNA, 40 bp, Blautia pseudococcoides
  source 1..40: mol_type = genomic DNA
tttagagtcaagatttccggtgggctcgtcagccaggatc

SEQ ID NO: 57004 - DNA, 40 bp, Blautia pseudococcoides
  source 1..40: mol_type = genomic DNA
tttagagtcaagatttccgatgggctcgtcagccaggatc

SEQ ID NO: 57005 - DNA, 50 bp, Blautia pseudococcoides
  source 1..50: mol_type = genomic DNA
aagtgtactgtgcatataaaaactatgggtagtgtacagttaggttctag

SEQ ID NO: 57006 - protein, 479 aa, Mycobacteroides abscessus; identical to SEQ ID NO: 3691

SEQ ID NO: 57007 - DNA, 50 bp, Mycobacteroides abscessus; identical to SEQ ID NO: 3692
  source 1..50: mol_type = genomic DNA

SEQ ID NO: 57008 - DNA, 40 bp, Mycobacteroides abscessus; identical to SEQ ID NO: 8958
  source 1..40: mol_type = genomic DNA

SEQ ID NO: 57009 - DNA, 40 bp, Mycobacteroides abscessus; identical to SEQ ID NO: 8958
  source 1..40: mol_type = genomic DNA

SEQ ID NO: 57010 - DNA, 50 bp, Mycobacteroides abscessus
  source 1..50: mol_type = genomic DNA
tgggtaaataggtaacttgtcaataagcagtaatattttgaaagaaatct

SEQ ID NO: 57011 - protein, 479 aa, Mycolicibacterium farcinogenes; identical to SEQ ID NO: 3691

SEQ ID NO: 57012 - DNA, 50 bp, Mycolicibacterium farcinogenes; identical to SEQ ID NO: 3692
  source 1..50: mol_type = genomic DNA

SEQ ID NO: 57013 - DNA, 40 bp, Mycolicibacterium farcinogenes
  source 1..40: mol_type = genomic DNA
cggtccgaccgaactcgacaacctcgtgctggtgtgtccg

SEQ ID NO: 57014 - DNA, 40 bp, Mycolicibacterium farcinogenes; identical to SEQ ID NO: 57013
  source 1..40: mol_type = genomic DNA

SEQ ID NO: 57015 - DNA, 50 bp, Mycolicibacterium farcinogenes; identical to SEQ ID NO: 57010
  source 1..50: mol_type = genomic DNA

SEQ ID NO: 57016 - protein, 614 aa, Aeromonas veronii
MHHVYKARDFTGMVQNHKGQNLYSYIRWSSEKQGQGTSHARQVSQARQFALEHGLNFIEVLDSGVSAYRGANAAQGALGAFIAAVEGGAIPSDSWLYVENLDRLSRQAITNSQELFLKLLRLGLTIVTGIDGRIYTTETVNTNPTDLMLSILLFSRAHEESKTKSDRTNKNVLALIDRHHQGLPVNIKAAGKHPFWIDDSGAQYESVRLHATYAPAAKKAVELFLQGWGSYRVCNYLNDHYQCPPALKYKNKHGTIRAEGWSITALRKMRDNPSLFGQRVLSIQNKTYTLNNYYPPLISESDFINLKSIKENNKITCNKQYNTISLLSGLNILRCAKCRGPMSFFTHRNKIRYVCETGKAQKGCVPWSMDGTIAERLLVFPLLKSFIDLKLKGMSNSDQYQHKITELNETLSNINTQISNFEAVIGAGINLDSTIANLRNLQSQRETITLELKKVTEIAALKTSREQTVEQIVEFLFDNLTEQIINDIKHPNRQELRETIRNLFANVYLDKQDDKTYTIAFESQDNSFVVYSGDPNIAPTAVAEPSFPSTLFEPSAQDLNEIERLRATIDPATLNKLGGLTFKINELEEKLWSKMQPILSRFTPVLNKELKARK

SEQ ID NO: 57017 - DNA, 50 bp, Aeromonas veronii
  source 1..50: mol_type = genomic DNA
attgtaatcttttaacctttagggcaacctaaagaaacaaagcctacttt

SEQ ID NO: 57018 - DNA, 40 bp, Aeromonas veronii; identical to SEQ ID NO: 26578
  source 1..40: mol_type = genomic DNA

SEQ ID NO: 57019 - DNA, 40 bp, Aeromonas veronii
  source 1..40: mol_type = genomic DNA
atcgaccaggtttttggggacacccaaggagacgaatcct

SEQ ID NO: 57020 - DNA, 50 bp, Aeromonas veronii
  source 1..50: mol_type = genomic DNA
gttgtaatcacattgcctttagtcacaagcaaagaaagtagggataattt

SEQ ID NO: 57021 - protein, 574 aa, Pseudomonas aeruginosa
MPKAYPYIRFSSDKQKDGLSIQRQTEAIEAYLAANPHLEVDKSLNLEDLGKSGYAGRHLQKGGALYLFLEKIKSGEIEKGSVLIIEHFNRLSRLKLHKAMDLFNEILRHGIDIAVLDEKQIFTAESISSIDYIKAVLKFDLAHEESKDKSKKGKDNWKFKKEALRNSQNPQIERLNFTKTLPLWLEKTDAEIVVNEQKAETIRLIFRLCIENNGYMRIATHLNQSKTPRLDASNGPWTLDIVKRLLHNRALLGEYQPRKTVEIEGRARPIYVPNEEDPIKGVYPAVIDEDTFNAAHNGLTSRKSTGGGRRADMPNLFLKLLKCDECGGSIKFNKHHNGYKQYNYLKCFNSLYGHCVSLGPKTWRYEQFEEMFFKFSGKLNLEDIFKKNEQSKVIQKEITALTAKQNKKKEKVAEILEQIETMEFSKSLYALISKLESETEELETKIKQKYQELSSVKQEELDRRIKDFKDINSLLLQSTEVETREKINNHLRGLIESIALDFKSKTCTIRFKNGIERHIHNDGMFASIPPKAEGEQREKDLDAILNWHNKTEAERQAIYEDADFKIVPLPVSAE

SEQ ID NO: 57022 - DNA, 50 bp, Pseudomonas aeruginosa
  source 1..50: mol_type = genomic DNA
tttatccaatagttgcaccgtttgaccaaacgccgctatcattggaataa

SEQ ID NO: 57023 - DNA, 40 bp, Pseudomonas aeruginosa
  source 1..40: mol_type = genomic DNA
gtgcgccagggtgcgcttgaccacctggcgcgggtagacg

SEQ ID NO: 57024 - DNA, 40 bp, Pseudomonas aeruginosa
  source 1..40: mol_type = genomic DNA
gtgcgccagggtgcgcttgtgcacctggcgcgggtagacg

SEQ ID NO: 57025 - DNA, 50 bp, Pseudomonas aeruginosa
  source 1..50: mol_type = genomic DNA
tttctccaagggagataccatatctggaaatgcagctgtgattggaatca

SEQ ID NO: 57026 - protein, 515 aa, Bacillus tropicus
MKTAIYLRKSRADLEAEARGEGETLAKHRSTLLKIAKEMNLNVLAVREEIVSGESLVKRPEMLALLEEIEDNKYDVVLCMDMDRLGRGGMKEQGIILETFKRSNTKIMTPRKTYDLNDEWDEEYSEFEAFMARKELKIITRRMQRGRVASVEAGNYLGTHAPFGYDIHRLNKRERTLTINPEEASVVRMIFDWYANEDMGANAIRSKLNDLGYKSKLGNEWNPYSILDILKNNVYIGKVTWQKRKEVKRPDAVKRSCARQDKSDWIIADGKHEPIIPESLFEQVQEKLNSRYHVPYNTNGIKNPLAGIIKCSKCGYSMVQRYPKNRKETMDCKHRGCENKSSYTELIEKRLLEALKEWYINYKADFEKHKQSEKLKETQVIQMNEVALRKLEKELVDVQKQKNNLHDLLERGVYTVDIFLERSKAVSDRINEITSTMENLKKEIKTEIKKEKVKKDTIPQVEHVLDLYFKTDDPKKKNSLLKSVLEKAVYKKEKWQRLDDFELVLYPKLPQDGDI

SEQ ID NO: 57027 - DNA, 50 bp, Bacillus tropicus
  source 1..50: mol_type = genomic DNA
accttgttggtgtaattagatttacgccaacagggtgacaacacaagtaa

SEQ ID NO: 57028 - DNA, 40 bp, Bacillus tropicus; identical to SEQ ID NO: 26918
  source 1..40: mol_type = genomic DNA

SEQ ID NO: 57029 - DNA, 40 bp, Bacillus tropicus
  source 1..40: mol_type = genomic DNA
attaggcgcatgaggttgaagccattaagccctaaagcat

SEQ ID NO: 57030 - DNA, 50 bp, Bacillus tropicus
  source 1..50: mol_type = genomic DNA
acttcgttggaatgattaaatttaaggtggcagtctttgattacaagtaa

SEQ ID NO: 57031 - protein, 479 aa, Streptococcus agalactiae
MTKIALYLRLSVDEANTDESNSITHQRYLLNHFLDQESKFKNWERLEFVDDGFSGTSLNRPAFKRMMADVKAGTIRYIIVKDLSRFMRDYLELGNYLENIFPFLGVRFIALNDHYDSLVSEHNGLDIDVPFRNLLNDFYAKDVSEKVKSAMNSMKRSGKNMSWLPPFGYIKDPNDRFKIIIDEEVAPIVRRIFRLCIEGMGTQKIAMLLNSEQTITPAERKMQVSQARYAKSIIITVEQKRNVWTRSGVLQILKNEAYKGTYLFNTRTMVNGKQIRRPESEWERLENNHEAIVPSEDFDKAQQSLASRISGAKSQTCNQPQEVLLRGLVICEHCGHRLLRYSHYNNYDYFYCRYCRSQGQSMKSCRIDRIEDAIEKELKSRLPMSSPKLPKRNLIREVERLKTQKVSHFQDYKEGLMTREAFMKKRQILDNSIMELEEQLKVVDGENIAFDKKLTREVVDIHIDRIVVNGQGSFTVVYK

SEQ ID NO: 57032 - DNA, 50 bp, Streptococcus agalactiae
  source 1..50: mol_type = genomic DNA
agtgtcatttacttgacataagagggggattatgtcataataatgacagg

SEQ ID NO: 57033 - DNA, 40 bp, Streptococcus agalactiae
  source 1..40: mol_type = genomic DNA
cttttgggacttaccaggcggtggtcgtgagggcgatgaa

SEQ ID NO: 57034 - DNA, 40 bp, Streptococcus agalactiae
  source 1..40: mol_type = genomic DNA
cttttgggacttaccaggcgatggtcgtgagggcgatgaa

SEQ ID NO: 57035 - DNA, 50 bp, Streptococcus agalactiae
  source 1..50: mol_type = genomic DNA
agagggatttaaggatcatgtcaggaggtttatgtctgaattatgacagg

SEQ ID NO: 57036 - protein, 579 aa, Flavonifractor plautii
MTNSQTLGTIEATNPVLAVAPLKEETEMLRATDKITALYCRLSVEDMKEDKKGGKEDVSNSIQNQKMILLQYAKENRFPNPTFFVDDGYSGTNFDRPGFQAMLAEIEAGRVAVCITKDLSRLGRNSSLTGLYINFTFPKYNVRYIAINDHFDTIDPNSTDSDIAGIKNWFNEFFAKDTSRKIRAVQKAKGERGVPLTTNVPFGYRKDPEDKTKWIVDEAAAMVVRRIFKLCMEGRGPMQIAKLLQEEKVLNPTAYKRQIGIKTPSPETADPYHWNTNTVVHILERREYTGCTVNFKTYTNSIWDKKQRETPLENQAVFYDTHPAIIEQEIFNKVQEIRQQRHRRTKTGKSSLFSGMVYCADCGAKMRYCTTNYFEKRQDHFVCANYRSNTGSCSAHFIRAVVLEELVWMHMRTVISYVSRYEDHFRAVMEQKLRLSSEAVIRGHKKRLAQAEKRLGELDRLFIRIYEDNVAGRITDEKFSMMSKTYEDEQAQLKVEIQTLQQEIEVQERQIENLEQFIQRVRKYEDLDELTPYALRELVKGVYIEAPDKSSGKRRQNIRISYDLVGFIPLNELMKEETA

SEQ ID NO: 57037 - DNA, 50 bp, Flavonifractor plautii
  source 1..50: mol_type = genomic DNA
ttactttcttacgacccctgcccattacacgggtgctcataagaaagtaa

SEQ ID NO: 57038 - DNA, 40 bp, Flavonifractor plautii
  source 1..40: mol_type = genomic DNA
acgcaaaacccccgggcctttgggcccgggggttttcttt

SEQ ID NO: 57039 - DNA, 40 bp, Flavonifractor plautii
  source 1..40: mol_type = genomic DNA
acgcaaaacccccgggcctacgggcccgggggttttcttt

SEQ ID NO: 57040 - DNA, 50 bp, Flavonifractor plautii
  source 1..50: mol_type = genomic DNA
tttccttcttttttctcctccccaacacacatatgcttctctgactgtaa

SEQ ID NO: 57041 - protein, 478 aa, Kocuria indica
MVELVSLRKTNEVAAYVRASMDRKGDRWTVETQLRKIRALAEAKDWNVVEVYDDNTVSATKKRRAGTRWAEMLDDARAGRFSMVVAVDMDRLLRSTKDLNTLIDLGLRVVTVDGEIDLSTADGEFRATMLAALARFEARRKAERQIRSNERRRTEGIPASTWKAFGWTREGELIEEEADAVRRAFDAFLGEPSLSIRRIREDLNYAGHLTARGSEFSVDAVRYLLANPLYAGYIKHYASGELYPVQGEAFPPIVGEQTWRAAVAKLEDNVRRSARQGNQPKYLLSTIGLCGKCGATLVSGTNSRKQPTYRCGEQFHLTRQREPVDAMVTEAVLTRLSSVDVHDLVMPQEDDGPDREELLTERNALVERVKELSPLLRDIHQPVLEITAAINDVKARIDEIDAELLDRSVSVAAKLLADVDEPVGTAERREVVEAKWKALDVDRRRMLVDELVTVTIEPIAPGHVRFDPDLIRIEPRRD

SEQ ID NO: 57042 - DNA, 50 bp, Kocuria indica
  source 1..50: mol_type = genomic DNA
cggtgtcacaaccaaggcatgcgctagcgcatgtcgcggttgcaacaccc

SEQ ID NO: 57043 - DNA, 40 bp, Kocuria indica
  source 1..40: mol_type = genomic DNA
cggcgtgatcgacatgcgctatgagaacccgctctacctc

SEQ ID NO: 57044 - DNA, 40 bp, Kocuria indica
  source 1..40: mol_type = genomic DNA
cggcgtgatcgacatgcgctttgagaacccgctctacctc

SEQ ID NO: 57045 - DNA, 50 bp, Kocuria indica
  source 1..50: mol_type = genomic DNA
ctgtgccactttgcctgcatgcacttgcccatgacctccctgcaccatcc

SEQ ID NO: 57046 - protein, 488 aa, Lachnospira eligens
MAKDILNMKSACAYIRVSTDKQEELSPDAQKRLLIDFAKKNNMSLLAENIYIDNGISGKKADKRPEFMKMIGMAKSKEHPFDVILVWKFSRFARNQEESIVYKSLLKKNRVDVVSVSEPLIDGPFGTLIERIIEWMDEYYSIRLSGEVLRGMTEKALRGGYQSSLPLGYRMNKETGIPYIYEEEAVIVRKIYNDYIAGHSYLEIARELNAIGYKTKRGATFEGRTVEYILSNPFYYGAVRWNRQNHDNHTIKDISEWIIVMGKHPAIIDKETWDLVQHLMALRSKPYKARAAGHMKHWLGGIVKCSDCGASLMAGLNATRYQCGNYNKGKCLRSHFIKTAALEQAVYNAFERVFDGTTELHYELKKASNEANTNDRDILLSKLSKLDDKEARIKQAYRDGIDTIEEYKENKQLLNDERKALEKQLEAFSLASDDSNADMLKNISTVYDIIKDTSNDTLTRANAIRSVVDHMVYDKENDKLEVYFFLQK

SEQ ID NO: 57047 - DNA, 50 bp, Lachnospira eligens
  source 1..50: mol_type = genomic DNA
cagtataccttattgaagtatggtggaccatacttcaataaggtatacag

SEQ ID NO: 57048 - DNA, 40 bp, Lachnospira eligens
  source 1..40: mol_type = genomic DNA
gataatcagtcaatatggtggcccggacggcgagcttggt

SEQ ID NO: 57049 - DNA, 40 bp, Lachnospira eligens
  source 1..40: mol_type = genomic DNA
gataatcagtcaatatggttacccggacggcgagcttggt

SEQ ID NO: 57050 - DNA, 50 bp, Lachnospira eligens
  source 1..50: mol_type = genomic DNA
atggttagcatacttaagtatggttaaccatacttaagtgtggttaacat

SEQ ID NO: 57051 - protein, 527 aa, Thermoclostridium stercorarium
MYCIYLRKSRADAEAEARGEGETLARHEKALLELAKKLNITVEKIYREIVSGETIASRPVVQELLSDVEQGFWKGVLVMEVERLARGDTIDQGIVAQTFKYSGTKIITPTKIYDPNNEFDEEYFEFGLFMSRREYKTINRRLQRGRLQSVKEGKYVGNKPPYGYIRKKLPNDKGYTLEPHPEQAEIVKLIFDLYTGPNRIGVSKIVRKLNEMKIPTITGGPWIPSTVQGILRNPVYIGKIRWNSRPQRKRMVNGQLVKERPRAKDNIVIVDGIHEPLISVETWELAQKYLSEHKEVPAPKRYQVKNPLAGLVICGKCGRKMIRRPYTNGQPDTLMCPVTACDNISSYLYVVEDMTLEALKKQLDEYKLEVKNILKNNSEYYKEIEILQKSISNLDKEFETLNKQSNSLHDLLEQGVYSVDTFLERSKIISEKKEANRKERAQLEEKLKEYEKYTNAQKNFIPKTESLIKVYKMIEDPADKNKMLKEVIEKITYLKTDNGRWNSNPEIQLKIYPKLPKINKSLITSWY

SEQ ID NO: 57052 - DNA, 50 bp, Thermoclostridium stercorarium
  source 1..50: mol_type = genomic DNA
cattgataacatcatggtactgatgaattggtgccattaggttatcagtg

SEQ ID NO: 57053 - DNA, 40 bp, Thermoclostridium stercorarium
  source 1..40: mol_type = genomic DNA
gaatgacatcggtactgaagaacttgctcatcttgaaatg

SEQ ID NO: 57054 - DNA, 40 bp, Thermoclostridium stercorarium
  source 1..40: mol_type = genomic DNA
gaatgacatcggtactgaattacttgctcatcttgaaatg

SEQ ID NO: 57055 - DNA, 50 bp, Thermoclostridium stercorarium
  source 1..50: mol_type = genomic DNA
acttgataataaactgttactggtttattgtagtatactcattatcattg

SEQ ID NO: 57056 - protein, 505 aa, Parageobacillus thermoglucosidasius
MKKCAVYIRVSTDKEEQKKSLIHQKELFMNLLAEKGWDLYKIYVDVETGTKSNKRPKLQEMIQDAKEGKFDLILAKELSRLARNGRLSYEIKHLAEHKGIDIITLDGAIDTMSGNTHMFGLYAWIYEQESQRTSERIKHVLRLKAQKGEFKGSVAPYGYYVENKKLKIRNDYTVDVVRRIFRSYIAGKGFDRIARELTEERIPTPGEVAGKVNASRVWHGSTVRKILENPHYTGDLVQQRETTISVTSNHRKKLDPSDYIIVENAHEAIISKEEFMLVQQLIKERQRKRPHTKIHLFTNIAFCADCGKSMHFKANRKGYVCGNYNKHGHTICSDHFVREDELINVITNDIRQLFSLLSVEEFQKNIEQKVTKILERDKKKLSKINDKIEALKQEKINALRMKVNGELSEEEYQLLIEDNNQQLAKLMREQRELNEILTHQKNINFKELMAQLEQFIQAPKLDEEILHKLIERIEIKEDGSPRIFYRFSNSYISSIFLRATHSTPH

SEQ ID NO: 57057 - DNA, 50 bp, Parageobacillus thermoglucosidasius
  source 1..50: mol_type = genomic DNA
acgagcaacgcacagcactccacatgcgttgaatacaggctgtagataaa

SEQ ID NO: 57058 - DNA, 40 bp, Parageobacillus thermoglucosidasius
  source 1..40: mol_type = genomic DNA
tttcgcgacacactccacatgcgcagtatgcggaaacata

SEQ ID NO: 57059 - DNA, 40 bp, Parageobacillus thermoglucosidasius
  source 1..40: mol_type = genomic DNA
tttcgcgacacactccacaaacgcagtatgcggaaacata

SEQ ID NO: 57060 - DNA, 50 bp, Parageobacillus thermoglucosidasius
  source 1..50: mol_type = genomic DNA
atgaggaaaccgaagcactccacaaaggtagattactccctggaattaca

SEQ ID NO: 57061 - protein, 559 aa, Dietzia cinnamea
MATASNNTDPVRDDPAQSLIDPPEGAAVAVSYLRVSTKEQAERGGRDEGFSIPAQREANRRKAGQLGAAVVEEFVDAGESARKADRPELMRMIPYVKQHKVAYCIVHKVDRLARNRADDVTIHLALQQAGVLLVSATENIDETPSGMLLHGIMSTIAEFYSRNLATEVTKGMTQKAAGGGTLGKAPIGYLNVRTRDELGREARTVELDPERAPLVQWAFKAYASGNWTVSQLHDELTSRGLMSLPTPKRPSKPMAVSSVHRLLTNPYYKGDVTYRGVNYKGAHQPLVPAEVWYQVQSVLTAHKSAAEATQIHDHYLKGTIHCGGCGSRLIVSNAKNRHGNVYCYFVCSGRHSKRTNCDRSAILIADVEKLIEDYYQRIQITPAQHEALAGMLHHEFDRLMSAEVDELAQLTANRDRLQHEQERLLQAHYADAIPLALLKREQDRILGELDQVSRRIDAHHGEYADARAHLDDALNLLTNCADIYNRCDDANRRLCNQAFFTKVYIDEDDELRVENNRPFEMLLDPEINANALTWAENADKTRTTTNDSVGKGSSLVRRV

SEQ ID NO: 57062 - DNA, 50 bp, Dietzia cinnamea
  source 1..50: mol_type = genomic DNA
gggttcgagccttgtgcgtcgggtggacctccgtagggagtttgagaacc

SEQ ID NO: 57063 - DNA, 40 bp, Dietzia cinnamea
  source 1..40: mol_type = genomic DNA
gcggcgggcgccgatgagtggagcctaggggattcgaacc

SEQ ID NO: 57064 - DNA, 40 bp, Dietzia cinnamea
  source 1..40: mol_type = genomic DNA
gcggcgggcgccgatgagttgagcctaggggattcgaacc

SEQ ID NO: 57065 - DNA, 50 bp, Dietzia cinnamea; identical to SEQ ID NO: 26780
  source 1..50: mol_type = genomic DNA

SEQ ID NO: 57066 - protein, 559 aa, Dietzia maris
MATASNNTDPVRDDPAQSLIDPPEGAAVAVSYLRVSTKEQAERGGRDEGFSIPAQREANRRKAGQLGAAVVEEFVDAGESARKADRPELMRMIRYVKQHKVAYCIVHKVDRLARNRADDVTIHLALQQAGVLLVSATENIDETPSGMLLHGIMSTIAEFYSRNLATEVTKGMTQKAAGGGTLGKAPIGYLNVRTRDELGREARTVELDPERAPLVQWAFKAYASGNWTVSQLHDELTSRGLMSLPTPKRPSKPMAVSSVHRLLTNPYYKGDVTYRGVNYKGAHQPLVPAEVWYQVQSVLTAHKSAAEATQIHDHYLKGTIHCGGCGSRLIVSNAKNRHGNVYCYFVCSGRHSKRTNCDRSAILIADVEKLIEDYYQRIQITPAQHEALAGMLHHEFDRLMSAEVDELAQLTANRDRLQHEQERLLQAHYADAIPLALLKREQDRILGELDQVSRRIDAHHGEYADARAHLDDALNLLTNCADIYNRCDDANRRLCNQAFFTKVYIDEDDELRVENNRPFEMLLDPEINANALTWAENADKTRTTTNDSVGKGSSLVRRV

SEQ ID NO: 57067 - DNA, 50 bp, Dietzia maris; identical to SEQ ID NO: 57062
  source 1..50: mol_type = genomic DNA

SEQ ID NO: 57068 - DNA, 40 bp, Dietzia maris; identical to SEQ ID NO: 57063
  source 1..40: mol_type = genomic DNA

SEQ ID NO: 57069 - DNA, 40 bp, Dietzia maris; identical to SEQ ID NO: 57064
  source 1..40: mol_type = genomic DNA

SEQ ID NO: 57070 - DNA, 50 bp, Dietzia maris; identical to SEQ ID NO: 26780
  source 1..50: mol_type = genomic DNA

SEQ ID NO: 57071 - protein, 497 aa, Anaerotruncus colihominis
MNAIYTRQSVDRADSISIESQIEFCKYEMRGEAYKVYSDRGYSGKNTDRPAFAEMMNDIENGIISKVVVYKLDRISRSILDFSTMMERFGEHKVEFVSTTEKFDTSSPMGRAMLNICIVFAQLERETIQKRVADAYFSRSQRSFYMGGRVPYGFQLVPTTIEGIKTSMYEIKPDEAEQVKLIYELYSKPECSYGDIIRYFQEHGILKNGKPWGRTRLADVLRNPIYVRADLSVYEFYRDQGAIIANDPSDFIGTNGCYYYKGQDSTGRKQMNLEGNYLVLAPHEGIIPSDLWLKCRAKCLEAKQIKPYQKAKNTWLAGKIKCGVCGYALVDKHYSTTRSRYFLCSNKMNSRACEGPGTIYSDEFEQLIYDEMLKKLTQFKALKKRKGNKLNPELTTLNIELAQVEDEISSLMNRMAGADDVLFRYISERVRELDGKKQELMKRISELKLHKEADYTEISNHLTMWEELSFDDKRQTVDQLIRVIYATSDSIKIEWRI

SEQ ID NO: 57072 - DNA, 50 bp, Anaerotruncus colihominis
  source 1..50: mol_type = genomic DNA
tatgtccatcttgtacgcttcggcgaaacgaagcgtacaagatggagaag

SEQ ID NO: 57073 - DNA, 40 bp, Anaerotruncus colihominis
  source 1..40: mol_type = genomic DNA
acacttccagcgtttcggcgacgcgctgcgcatcacccag

SEQ ID NO: 57074 - DNA, 40 bp, Anaerotruncus colihominis
  source 1..40: mol_type = genomic DNA
acacttccagcgtttcggctacgcgctgcgcatcacccag

SEQ ID NO: 57075 - DNA, 50 bp, Anaerotruncus colihominis
  source 1..50: mol_type = genomic DNA
tatgtccataaaccatgcattggctaaagaaagtgtggtacatagacatc

SEQ ID NO: 57076 - protein, 497 aa, Anaerotruncus colihominis
MNAIYTRQSVDRADSISIESQIEFCKYEMRGEAYKVYSDRGYSGKNTDRPAFAEMMNDIENGIISKVVVYKLDRISRSILDFSTMMERFGEHKVEFVSTTEKFDTSSPMGRAMLNICIVFAQLERETIQKRVADAYFSRSQRSFYMGGRVPYGFQLVPTTIEGIKTSMYEIKPDEAEQVKLIYELYSKPECSYGDIIRYFQEHGILKNGKPWGRTRLADVLRNPIYVRADLSVYEFYRDQGAIIANDPSDFIGTNGCYYYKGQDSTGRKQMNLEGNYLVLAPHEGIIPSDLWLKCRAKCLEAKQIKPYQKAKNTWLAGKIKCGVCDYALVDKHYSTTRSRYFLCSNKMNSRACEGPGTIYSDEFEQLIYDEMLKKLTQFKALKKRKGNKLNPELTTLNIELAQVEDEISSLMNRMAGADDVLFRYISERVRELDGKKQELMKRISELKLHKEADYTEISNHLTMWEELSFDDKRQTVDQLIRVIYATSDSIKIEWRI

SEQ ID NO: 57077 - DNA, 50 bp, Anaerotruncus colihominis; identical to SEQ ID NO: 57072
  source 1..50: mol_type = genomic DNA

SEQ ID NO: 57078 - DNA, 40 bp, Anaerotruncus colihominis; identical to SEQ ID NO: 57073
  source 1..40: mol_type = genomic DNA

SEQ ID NO: 57079 - DNA, 40 bp, Anaerotruncus colihominis; identical to SEQ ID NO: 57074
  source 1..40: mol_type = genomic DNA

SEQ ID NO: 57080 - DNA, 50 bp, Anaerotruncus colihominis; identical to SEQ ID NO: 57075
  source 1..50: mol_type = genomic DNA

SEQ ID NO: 57081 - protein, 546 aa, Enterobacter hormaechei
MNIHSPTTTARAALYLRVSTARQAEHDISIPDQKRQGEAYCEQRGYQLVETYVEPGATATNDKRPEFQRMIEAGTSKPAPFDIVVVHSFSRFFRDHFEMEFYVRKLAKNGVKLVSITQEMGDDPMHQMMRQIMALFDEYQSKENAKHVLRAMNENARQGFWNGARPPIGYRIVAAEQRGSKIKKKLEIDPLHADTVRLIYRLFLEGDGTSGAMGVKAIATYLNERRFFTRDGGRWGLAQIHAILTRTTYIGEHRFNTRSHKDREKKPESEVAIMAVPPLIERETFDAVQARLKSRNPMVTPARVSSGPTLLTGICFCAKCGGAMTLRTGQGSTGATYRYYTCSTKARQGKTGCKGRTIPMDKLDHTVADYIGDRLLLPKRLETVLASVIDRRQERTERRREHLAELQRRITEADQRLGRLFDAIEAGMVDKDDAMAKERMVSLKALRDQAAADAERTQLALDSSGNQGVTPDMLKGFARKARERIRLNDGGYRRDHLRALAQRVEVADDEVRIMGSKSELLRTLVAASSVETAAFGVHSSVLKWRA

SEQ ID NO: 57082 - DNA, 50 bp, Enterobacter hormaechei
  source 1..50: mol_type = genomic DNA
atagttctgttctgaaatggcgcgccgcgccgggtgaagatgacaactac

SEQ ID NO: 57083 - DNA, 40 bp, Enterobacter hormaechei
  source 1..40: mol_type = genomic DNA
ggcgttgcgcaatggtgcgccatttgctgaattgccaccc

SEQ ID NO: 57084 - DNA, 40 bp, Enterobacter hormaechei; identical to SEQ ID NO: 57083
  source 1..40: mol_type = genomic DNA

SEQ ID NO: 57085 - DNA, 50 bp, Enterobacter hormaechei
  source 1..50: mol_type = genomic DNA
tcagggctgctgctagagggcgcgcccagccgcgtggccctgactactac

SEQ ID NO: 57086 - protein, 546 aa, Enterobacter hormaechei
MNIHSPTTTARAALYLRVSTARQAEHDISIPDQKRQGEAYCEQRGYQLVETYVEPGATATNDKRPEFQRMIEAGTSKPAPFDIVVVHSFSRFFRDHFEMEFYVRKLAKNGVKLVSITQEMGDDPMHQMMRQIMALFDEYQSKENAKHVLRAMNENARQGFWNGARPPIGYRIVAAEQRGSKIKKKLEIDPLHADTVRLIYRLFLEGDGTSGAMGVKAIATYLNERRFFTRDGGRWGLAQIHAILTRTTYIGEHRFNTRSHKDREKKPESEVAIMAVPPLIERETFDAVQARLKSRNPMVTPARVSSGPTLLTGICFCAKCGGAMTLRTGQGSTGATYRYYTCSTKARQGKTGCKGRTIPMDKLDHTVADYIGDRLLLPKRLETVLASVIDRRQERTERRREHLAELQRRITEADQRLGRLFDTIEAGMVDKDDAMAKERMVSLKALRDQAAADAERTQLALDSSGNQGVTPDMLKGFARKARERIRLNDGGYRRDHLRALAQRVEVADDEVRIMGSKSELLRTLVAASSVETAAFGVHSSVLKWRA

SEQ ID NO: 57087 - DNA, 50 bp, Enterobacter hormaechei; identical to SEQ ID NO: 57082
  source 1..50: mol_type = genomic DNA

SEQ ID NO: 57088 - DNA, 40 bp, Enterobacter hormaechei; identical to SEQ ID NO: 57083
  source 1..40: mol_type = genomic DNA

SEQ ID NO: 57089 - DNA, 40 bp, Enterobacter hormaechei; identical to SEQ ID NO: 57083
  source 1..40: mol_type = genomic DNA

SEQ ID NO: 57090 - DNA, 50 bp, Enterobacter hormaechei; identical to SEQ ID NO: 57085
  source 1..50: mol_type = genomic DNA

SEQ ID NO: 57091 - protein, 598 aa, Agrobacterium tumefaciens
MTKAYSYIRISSKKQVEGHGIARQLEKTHEYARQNGLTLDTELRDVGSGYHGKHVRFGALGGFLRLVEQGKIPVGSTLIVESLDRLSREDVLTAQSQFIDILRAGITIVTLIDRQVYSRDRDFTQLIMSLSIMQRANDESQTKHERSVFNVRKNRLEALEGKPRQVQTLVRWIDQRKIDGTRRDFQFTLNDNAKTVKTIFELRDIGMGARSIAKYLNDRNVPVLKPGASQTHKWKDPIIRLILKNEVAIGTYHVFETVDGKRVQLGEPIRNYFPAAVDEDLFWRVQGKNKQLTTRGAKGRVHTNLFTGLSCCATCGNRMRIKHSGGIRKEGDDPRYRLYQCLGYETMGKTVCNTKRKSVPYEPLEKAVLDHATEFYMASDLAGNRAYRESDLQRLISVLSENIRQNEKKRSNFIAAVGSAEDSEERLAYQMQASAVRQQIEADKSQLAEYEIALRELSNQEIERSNVAEMIAMERLRWRTASDEEVMQSRSRVTLALRKFISRVEVNLERQETIVFVAGGMKGYRFDTAGNLTGQYDLSPSFQTMNGETSYTLEHLSNHMNSLGFDEGEKATATEAATQILSLAGIKPEAKPKALSTK

SEQ ID NO: 57092 - DNA, 50 bp, Agrobacterium tumefaciens
  source 1..50: mol_type = genomic DNA
aaacgcacaattgttatatgcagaccagcgcagtagcgaattgtgcgttt

SEQ ID NO: 57093 - DNA, 40 bp, Agrobacterium tumefaciens
  source 1..40: mol_type = genomic DNA
cgcgccattgcaatgcgggccggcgcagtagacgacaaag

SEQ ID NO: 57094 - DNA, 40 bp, Agrobacterium tumefaciens
  source 1..40: mol_type = genomic DNA
cgcgccattgcaatgcgggggggcgcagtagacgacaaag

SEQ ID NO: 57095 - DNA, 50 bp, Agrobacterium tumefaciens
  source 1..50: mol_type = genomic DNA
aagcgctgaagggttttatgcagaggagcaacgtattcagatgcgcattt

SEQ ID NO: 57096 - protein, 525 aa, Actinomyces graevenitzii
MKLHSEYNDNQMVVAYYRYSSSSQNEASIEQQREMVQRWAKSQGLVVVNEYEDAAKTGTNADRPGYQLMLRELPKIRPAYVAVWKNDRLARDRAELVLVKQAIRSIGARVHYIEGISPTDSPDSVLVEGVADAFAEYYSLQLSANIRRGQRYNAERALSNGHKIFGFTVDQDKRYIPDPETAPIVTQIFHDYASGVSMQKICNQLNAQGIRTTRGYRFTPKNLNKMLKNRAYIGEYAYGGHVHEDGMPRLVDDLTFNEVQRRFAINKRRGAKTKAELAAQGENAPDYWLTGRAYCLTCGGPMEGVSGTSKTGKTYRYYYCLNQRKKKCSAKTVRKDEIEVRIQEIVASFLADPEMLASLAVDLADHYQKTHGRGDDILKALEARRADVERKLANFVKAISQGIFNDTTAEAMRSLEEQKRELDAAIQAEHVKATLYEDEASIGAFYKRFAEATIDTPETRDQLFEYFVDKVFIGREQIIIASYFHDSAAPIEFEDLEEALTSGHRAGEVRTYARKRKFDTSPSGG

SEQ ID NO: 57097 - DNA, 50 bp, Actinomyces graevenitzii
  source 1..50: mol_type = genomic DNA
aagttcgacacttccccctcaggtggagctcagggggtacgtgtcgaact

SEQ ID NO: 57098 - DNA, 40 bp, Actinomyces graevenitzii
  source 1..40: mol_type = genomic DNA
aagcccggggagggatggtggagatgcggggaatcgaacc

SEQ ID NO: 57099 - DNA, 40 bp, Actinomyces graevenitzii; identical to SEQ ID NO: 57098
  source 1..40: mol_type = genomic DNA

SEQ ID NO: 57100 - DNA, 50 bp, Actinomyces graevenitzii; identical to SEQ ID NO: 26785
  source 1..50: mol_type = genomic DNA

SEQ ID NO: 57101 - protein, 583 aa, Streptococcus agalactiae
MKEVEVIKARNDLQTRTRGKTIELMRVGAYCRVSTDSADQLNSYKSQVAYYTDMIKKNKEWVLADIYADEAITGTQVAKREDFQRMINDCMNGEIDMVITKSISRFARNTLDTLKYVRMLKERNIAVYFEDEKINTLTMDGELLLVVLSSVAQQEVENISANVKKGLKMKMKRGELVGFQGCLGYDYHKDTKTITVNEEEAEIVRYIFNRYIEGAGGSVIAHELENLGYKTKYGSSTWVQSTVIGIIKNEKYKGDLLLGKTFTVDPISKRRLENFGEEDKFYIRNHHEPIISEEVFEKAQEILARRNVNRGKIGEGSTKREKYSRKYAFSCMLECGFCGGTLTRRNWHSSSQYSKVIWQCVTATKKGKKFCKHSKGIPETAIEEAFVESYRLLCDDNKDVLEEFLQRMDDTLSSSVVSKQLAKAEKEIGALEKKKSKLVDMRLEEIIDKETYESKYADLVSKQEQLVEERKKLQETSDNEKDIKKRLKEFKKTLEQNEVLDKFDRYVFESIVEKVIVGGLDENGNVDPAQLTFVYKTGLKNNVDGAKFKPQRKNARGRHRTEELCSHDSNEVDKMCSDSSNDT

SEQ ID NO: 57102 - DNA, 50 bp, Streptococcus agalactiae; identical to SEQ ID NO: 537
  source 1..50: mol_type = genomic DNA

SEQ ID NO: 57103 - DNA, 40 bp, Streptococcus agalactiae
  source 1..40: mol_type = genomic DNA
aatggctgataataccagccatgtggagtgcgtagcgttg

SEQ ID NO: 57104 - DNA, 40 bp, Streptococcus agalactiae
  source 1..40: mol_type = genomic DNA
aatggctgataataccagcgatgtggagtgcgtagcgttg

SEQ ID NO: 57105 - DNA, 50 bp, Streptococcus agalactiae
  source 1..50: mol_type = genomic DNA
tttgttctgcctaaagtaagaacagatatagaggtataattgttgcttgg

SEQ ID NO: 57106 - protein, 599 aa, Enterobacter hormaechei
MKKIIPYGYLRVSSLEQVRSGSGLEAQDDAVRNYINERSDLFDTDRTVMISDAGLSAFSGQQLSEGQLGVFLSDVETGKVPTGSALVCFSIDRLSRQNPWIGTKLISTLIGAGIQIHSVAERQVLKSDDPVGAIMSTIYLMRANNESEIKSSRAKDGYQQRLLKSIQNKTVLTGQMPRWLFNKDGRYSINPDMQKIINFSFDSYIAGQSTGYIAKELNNKGWMYGSTSWRGSYVAKLIRDERLIGKHTRYGKQIKGVKREIIEVIPDFYPVAIEVEKFYLANNMLTNIAEKIRGRTRITYGDTSILRNLFSGVIKCGVCGGDTSVVQNTRRKVVNGTVKYIPYKTFLRCRNKYELKSCTQGDLRYEVIEQAVLLHLKSLDINSLLNKPIDNTVELYKAELEGCISDSLQYQSMINLRKAENKRVRPETLEAYEKVMDRIDELNKLIESHVVDDFVPDFNIDLDRIKNISNVAERSVIKKGIASISDTIKYKRISDFILIEIKYRNINAKHVLVIDNTKSDMVVDFSIEYNGGNKVYICNSFVMEYDNLSCEFTVSKTTMEDYAHMMNFVDYVSDDESYKAKEFLVNNFNHIKFITKRNE

SEQ ID NO: 57107 - DNA, 50 bp, Enterobacter hormaechei
  source 1..50: mol_type = genomic DNA
tagtgtacttaacttccttaatgcctgctatcgtagtgttatctacacta

SEQ ID NO: 57108 - DNA, 40 bp, Enterobacter hormaechei; identical to SEQ ID NO: 21883
  source 1..40: mol_type = genomic DNA

SEQ ID NO: 57109 - DNA, 40 bp, Enterobacter hormaechei
  source 1..40: mol_type = genomic DNA
ttagtgtaaagcataacgtagccgatctacacctgtgcag

SEQ ID NO: 57110 - DNA, 50 bp, Enterobacter hormaechei
  source 1..50: mol_type = genomic DNA
cagtgtactgagaactatttatgaagcctattgtagccgactctgcactc

SEQ ID NO: 57111 - protein, 518 aa, Mesorhizobium sp
MRKAASKTPKAYSYVRFSTPEQQRGDSLRRQTEAAARWAAARGMELDNSSYQDLGVSAYAGDNAEVGMLGEFLGAVRDGTIEAGSYLLIESLDRLSRDKARRAVRLLGDLCDSGIAVVTLADGKEYTAEGLDNDPMGLMWALMVAMRANEESATKSRRVREAWGKKKEAAAAQRRPMTKRLPAWLTLSADRTTIGVDEDKANIVRRIFRDAIAGGGQHSIAQTLTAEGVDTFGDGRRKAPVWQRSYVKKLLESPAVIGTMIPHDTRKVRGKRVRDPLPPIPNYYPAIVSAADFARVNSARKGSNTPRVRASTGQVSNVLASLGKCPRCRATMTRVNKGRKGGTPYLVCVLAKAGGGCIYKQVRLESIEAAVREASGTFARDVPGRDDLLEEARRALEAKEHGIGDGIERLLEEIERGNASPALRKRLTDNEDQLTAVKDELEEVEEKIRQSGGKAIERRLARLVATLGNDRASITEINVALRETFRECVVNYFEGTLDFVWQHSDTPTEIRYAMPESV

SEQ ID NO: 57112 - DNA, 50 bp, Mesorhizobium sp
  source 1..50: mol_type = genomic DNA
gatgggtccttggtaaacatcttgctgaatttgttgacaaaggaccctac

SEQ ID NO: 57113 - DNA, 40 bp, Mesorhizobium sp
  source 1..40: mol_type = genomic DNA
ggccggcggtcacaatctgctgatggtcggaccgccggga

SEQ ID NO: 57114 - DNA, 40 bp, Mesorhizobium sp
  source 1..40: mol_type = genomic DNA
ggccggcggtcacaatctgttgatggtcggaccgccggga

SEQ ID NO: 57115 - DNA, 50 bp, Mesorhizobium sp
  source 1..50: mol_type = genomic DNA
gctgtgtcccacccaaatctcatcttgaatctgttgtggaagggacccac

SEQ ID NO: 57116 - protein, 482 aa, Streptomyces lunaelactis
MNMTPSRAVILVRISDDKAGDAQGVGRQEEDCRSLAQRLGWTVAQVVTENDTSAYKRKRIKLPDGTSVLRTVRPRFRYVLDGLASGEFDGLIAYDLDRVARDMRDLEDLVDVVQSGYPHLPVESVSGSLRLANSSDIAMARVMTVMANKSSSDTGRRVARKHEELAAAGKPGGGGFRGYGYDVRNLEIVPEEAEIVREIAGRILDDESLNAIAADLQAREVPTVTGAPWNSRSVKSIVTKPRVAGLRAHRGDVVGDAVWPPILDRGQWEDVCARLAGRVRNVDLTLQRWLTGVLVCSKCGRTMPGAQGNNGVRYWCATPRGGCGKIAIKAEPVEAEIERRVLEGLSGPQVLEQLRHAATTEATDDARRSLAEDEQQLKELAGMWARKQVSLAEYREARSLIEARVKDSRAFVTSRAPRVLRRLLAGDIHEGWHALTPADKREVVIALGGMWRVMPHDRSKGNKFNPARLVPIEAGEQPPASA

SEQ ID NO: 57117 - DNA, 50 bp, Streptomyces lunaelactis
  source 1..50: mol_type = genomic DNA
ttaggtctccatggacccttgggggacgcgatgtgtcgatggtaacctat

SEQ ID NO: 57118 - DNA, 40 bp, Streptomyces lunaelactis
  source 1..40: mol_type = genomic DNA
cgaagtaaacggaattggtgaccgccggttcgcggagctc

SEQ ID NO: 57119 - DNA, 40 bp, Streptomyces lunaelactis
  source 1..40: mol_type = genomic DNA
cgaagtaaacggaattggttaccgccggttcgcggagctc

SEQ ID NO: 57120 - DNA, 50 bp, Streptomyces lunaelactis
  source 1..50: mol_type = genomic DNA
ttaggtttctacatacctgaggtgtacttgatgtgtgtctggtcatttat

SEQ ID NO: 57121 - protein, 572 aa, Pseudomonas asiatica
MKPKAYSYIRFSSPEQAKGDSYRRQRTAALEYCAENGLELADTKEYRFFDSGRSAYKGKHVSDEGEFGRFLALVNDGVIKSGSVLLVESLDRLSRDKVNIALGQLLNLLAAGIKVVTLSDKRTYSNDSPDLATELIVSIAVMMRAHNESSEKGNRVAKAWRNKRELARSEKTPLGAACPYWLKLADGVYEQVPERVEVVRRIFDMTIQGYGQAMISRRLNHDNVPVFGSTRSSKEKPRNKSGLWGTSSVEKILNNRALLGEYQPTHLVGRVRENDGDPVKGFYPEIITPDLFLQAKAAREQRKTTGATKQSKNFNVWQGLAKCHVCGDAMHLINKGRPPKGYTYLQCYSAKKGICRNGSIRIEQTNAVFKEILANVDSMSLVHGKSADIRKSLEVVEGKLAVIAGHLEGAIEAQTAFPTIAGAKVLYKFEQDHAQCSAERDELRQQLASHRVISREDFFLQVDLVTYEGRAAANSLLKRLGLQVLFRRHNPSRFQCWVLDKSEEAVTDEVQQMLFSVLYEDGHATTQPLDPDIYGRQVEQGLTTTEAAMREQEEEGIGWQWFGGKLSQGRNT

SEQ ID NO: 57122 - DNA, 50 bp, Pseudomonas asiatica
  source 1..50: mol_type = genomic DNA
attggtgtactactccacaacctgtttaagttgtgagagaatacaccaac

SEQ ID NO: 57123 - DNA, 40 bp, Pseudomonas asiatica
  source 1..40: mol_type = genomic DNA
ggccggggcgcacaaccttttgttcaccgggcctcccggt

SEQ ID NO: 57124 - DNA, 40 bp, Pseudomonas asiatica
  source 1..40: mol_type = genomic DNA
ggccggggcgcacaaccttaagttcaccgggcctcccggt

SEQ ID NO: 57125 - DNA, 50 bp, Pseudomonas asiatica
  source 1..50: mol_type = genomic DNA
tttgttgtcacaaacaacaactacaataagttgtgacaatatacaataag

SEQ ID NO: 57126 - protein, 545 aa, Pseudomonas aeruginosa
MNMHSPTVTTRAALYLRVSTARQAEHDISIPDQKRQGEAYCEQRGFQLVETYVEPGATATNDKRPEFQRMIEAGTSKPAPFDIVVVHSFSRFFRDHFEMEFYVRKLAKNGVKLVSITQEMGDDPMHQMMRQIMALFDEYQSKENAKHVLRAMNENARQGFWNGARPPIGYRIVAAEQRGSKTKKKLEIDPLHADTVRLIYRLFLEGDGTRGAMGVKAIATYLNERRFFTRDGGRWGLAQIHAILTRTTYIGEHRFNTRSHKDREKKPESEIAIMAVPPLIEREIYDAVQARLKSRNPMVTPARVSSGPTLLTGICFCAKCGGAMTLRTGQGSTGATYRYYTCSTKARQGKTGCKGRTIPMDKLDHLVADHIGDRLLQPKRLETVLASVIDRRQERAERRREHLAELNRRITEADQRLGRLFDAIEAGMVDKDDAMAKERMVSLKALRDQAAADAERTQLALDSSGNQGVSPDMLKGFARKARERIRLDDGGYRRDHLRALAQRVEVADDEVRIMGSKSELLRTLVAASSVETAAFGVQSSVLKWR

SEQ ID NO: 57127 - DNA, 50 bp, Pseudomonas aeruginosa
  source 1..50: mol_type = genomic DNA
ttcagagttctgttctgaaatggcgcgccgtaccgggtgaagatgacaac

SEQ ID NO: 57128 - DNA, 40 bp, Pseudomonas aeruginosa
  source 1..40: mol_type = genomic DNA
caggccctttcggtatggcgcactcaggaggattcgaacc

SEQ ID NO: 57129 - DNA, 40 bp, Pseudomonas aeruginosa
  source 1..40: mol_type = genomic DNA
caggccctttcggtatggcctactcaggaggattcgaacc

SEQ ID NO: 57130 - DNA, 50 bp, Pseudomonas aeruginosa
  source 1..50: mol_type = genomic DNA
ttcagacttctgtcctggcatggcctgccttagccccttggggttacacc

SEQ ID NO: 57131 - protein, 521 aa, Escherichia coli; identical to SEQ ID NO: 50236

SEQ ID NO: 57132 - DNA, 50 bp, Escherichia coli
  source 1..50: mol_type = genomic DNA
cggtgtacattcttgcatgactacgaacagttatgttatgatatacacca

SEQ ID NO: 57133 - DNA, 40 bp, Escherichia coli; identical to SEQ ID NO: 34068
  source 1..40: mol_type = genomic DNA

SEQ ID NO: 57134 - DNA, 40 bp, Escherichia coli; identical to SEQ ID NO: 52874
  source 1..40: mol_type = genomic DNA

SEQ ID NO: 57135 - DNA, 50 bp, Escherichia coli
  source 1..50: mol_type = genomic DNA
cagtgtgcatgcatgcatcaacacagacattaaggttttattatgaacca

SEQ ID NO: 57136 - protein, 523 aa, Vibrio vulnificus
MTTAYSYIRFSSAIQAKGDSLRRQTQLAQDYCLKHSLTLSDQSFTDLGVSAFRSANTNEDNGLGQFIKALEQGVIPRGSLLLVESLDRLSRASVMTAMRQLFNIIEYGITVVTLIDNRTYNSESETTDLIISLTVMERAHNESKTKSERLRAVWANKRANPHTTIRHSNTPFWLSLNDDKRTYSIIEPKADIVRRIFQMSIDGHGVISTCRILNEEGLKAPKGGTWATTSIKKILDSKAAIGHHTHIINNKVQLSTVPDFYPPIISEETYYLSQAKKKERHKPDSAGRKSAFPNVLSQVAVCGSCGSHMLYDPKSPQWIYLTCREFKKNACTNKPLRIELINRFIIEQYLHPQHIEKHVDLVKKGSTSTDQINVIEGKIESAKEALKQLLTLSSDFSNSVIQDEIKTRSESIQSLEQQLEEAKALSVESITSIRMDFREACQLVADALQVQVFDKKPATLSKKELFKVRVKLNRSLKKTFSEVRVSHCPETKKARITANDFVFEAHKSAVKTGFTSYTWNVIV

SEQ ID NO: 57137 - DNA, 50 bp, Vibrio vulnificus; identical to SEQ ID NO: 19872
  source 1..50: mol_type = genomic DNA

SEQ ID NO: 57138 - DNA, 40 bp, Vibrio vulnificus
  source 1..40: mol_type = genomic DNA
ccctggaggccccaaaaacaataaattgtgattgcccgca

SEQ ID NO: 57139 - DNA, 40 bp, Vibrio vulnificus
  source 1..40: mol_type = genomic DNA
ccctggaggccccaaaaacattaaattgtgattgcccgca

SEQ ID NO: 57140 - DNA, 50 bp, Vibrio vulnificus
  source 1..50: mol_type = genomic DNA
gctgaatccagggagccaagcagcattgttctgtggcccacttccacagc

SEQ ID NO: 57141 - protein, 498 aa, Nocardia puris
MTTRKTTTGKLSILRVALYLRISQDRSGEGLGVARQEGDCRKLAEQIAARRGAVAHIEVFTDNDTSAYSGKKRKEYERMCEAIGRGEIDLVISWHPDRLHRSPLELEYFISLIQEQAIMVHTVQAGERDLTTDNGRMVARIEGAVARQESERKSARIKAARVQQAMAGKFHGGNRPYGYEPDGVTIREDEAREIVRMYEQVVAGVSLRQIVRDLNERGVPTAKTRGPWTSVAVGGVIKNPRNVGHSVHNGEVVAKAQWPALVSEETWQAAVGVLTNPARKTSPGNTPRWLGSGLYLCGVCGRAELRAGVAGSGRKPVYRCRSRETTGQGHVSRDAHQLDALVEETVVARLELPDAIAQLSAGHGEGGEDVAALRLEQAALRQRLDSLAEMFAAGEIDTRQLATASATLKAKISEIDMSLASLGMRSPLAELEGKDNIRAAWFGTKEDRSDGLSLGSRRAIVDMLLTVTVLPGPKGRPVGGRSFKPEYVGLEWKRTAAA

SEQ ID NO: 57142 - DNA, 50 bp, Nocardia puris
  source 1..50: mol_type = genomic DNA
atgtgtcttattccatatgacgtgaaaccgtgacttaggttgtggcacac

SEQ ID NO: 57143 - DNA, 40 bp, Nocardia puris
  source 1..40: mol_type = genomic DNA
cggcggcacgggagcaggaaaaacaacacttttgtccgcg

SEQ ID NO: 57144 - DNA, 40 bp, Nocardia puris; identical to SEQ ID NO: 57143
  source 1..40: mol_type = genomic DNA

SEQ ID NO: 57145 - DNA, 50 bp, Nocardia puris
  source 1..50: mol_type = genomic DNA
aagtgtcttaaagaacataatgagaaatggagacttgagtaggggcagac

SEQ ID NO: 57146 - protein, 527 aa, Bradyrhizobium diazoefficiens
MALKAAIYARFSDKEKQTDKSIEDQVALCRTMCERDGLLVVEVYSDHGISGASTVNRLGLQRMMRDAKAGKFAVVVAESLDRISRDQEDLAGIHKRLNFARVEIRTFVDNTVGEIHVGVKGLVGALFLKDLAQKTRRGQAGVVRDGRHNGGRSFGYRPVLGKPGVLEIDEAEAEIVREIFDLYLDGYTARDIAARLNKRGAPGPRGGHWNASTINGSRTRRNGILQNDLYAGKIIWNRQSFVKDPETGKRISRPNPRDQWMTAEAEQLRIIDSDTWVLAQSRVGDRAGTPHKARPQHLLSGLVKCGKCGSGMIACGTDKRGVRLMCSRRRETGLCDNGIGVPRSTVEDRVLAGIEEHLADPELVAEYVAEYHRIMRELNSKAAVQIRAIEKRLTTVNTQIGRLVDAIVGGSLARALQDRLAALEAEREEIEREKAAVGADPVEFHPNAANAYRLKIRSLKKWLAGTGDEARQAAFAGIRQIVEKVTIHPRGPGEPVGIEIDGQLAAILRLSDTVTGAGESQGAMVAG

SEQ ID NO: 57147 - DNA, 50 bp, Bradyrhizobium diazoefficiens
  source 1..50: mol_type = genomic DNA
gtcgcagggggcgatggttgcggggacacgcaacaaccgccccctgcgac

SEQ ID NO: 57148 - DNA, 40 bp, Bradyrhizobium diazoefficiens
  source 1..40: mol_type = genomic DNA
gtccgaatttggttgcggggataggatttgaacctatgac

SEQ ID NO: 57149 - DNA, 40 bp, Bradyrhizobium diazoefficiens
  source 1..40: mol_type = genomic DNA
gtccgaatttggttgcgggcataggatttgaacctatgac

SEQ ID NO: 57150 - DNA, 50 bp, Bradyrhizobium diazoefficiens
  source 1..50: mol_type = genomic DNA
gtagcagggctcagtggttatgggcacactaagcaagaggggactgccgc

SEQ ID NO: 57151 - protein, 448 aa, Anaerobutyricum hallii
MSRTSKITALYERLSRDDDLNGESNSITNQKKYLEDYARRNGFTNIRHFTDDGFSGVNFNRPSFQELIKEVEAGNVATIIVKDMSRLGRNYLQVGFYTEVLFPQKDVRFLAINNSIDSNNASDNDFAPFLNIMNEWYAKDTSNKIKAVFDARMKDGKRCSGSIPYGYNRLATDKQTLVVDPVASEVVKRIFLLANEGKSPRAIAELLTEEKVLIPAAHAKEYHPEQYNGMKFTDPYLWGMSTIRTILSRQEYLGHTVLRKSVSTNFKLHKRKNTDEDEQYVFYNTHEPIISQELWDSVQKRKKRANRTAAKGTHSNRLSGYLYCADCGRRMTLQTHYSKKDRSVQYSYRCGGYASRVNACTAHSISADNVEALILSAVKRLSKFVLNDEEAFAKELQALWNEKQTEKPKQNKSELHRFQKRYDELSKLSRGLYENLVSGLLPERQYNN

SEQ ID NO: 57152 - DNA, 50 bp, Anaerobutyricum hallii
  source 1..50: mol_type = genomic DNA
aagtgtcttgacaaactcgaccccgagggctataatttagtaggacgata

SEQ ID NO: 57153 - DNA, 40 bp, Anaerobutyricum hallii
  source 1..40: mol_type = genomic DNA
agcaatagaacttacgccggaaggaacgggttacagagcg

SEQ ID NO: 57154 - DNA, 40 bp, Anaerobutyricum hallii
  source 1..40: mol_type = genomic DNA
agcaatagaacttacgccgaaaggaacgggttacagagcg

SEQ ID NO: 57155 - DNA, 50 bp, Anaerobutyricum hallii
  source 1..50: mol_type = genomic DNA
aaatctcttccagtggtcaacagcaagggctataaaatgcaagcatgata

SEQ ID NO: 57156 - protein, 563 aa, Vibrio cholerae
MQKIIYPYVRFSSEQQSGGSSYKRQLGDILKYAKENGYTVNDSLELRDLGLSAYNADHIKKGSLGDFFDAIDMGIIETDGTAYLCVEQFDRLSRQSLDDASDVLRKILRANINVITLMDKRVYTKESLNDLMSVMYSSMLMAQANEESAKKSERILKSFDARLDALHDGKQIQYVGVFPGWIDNKGTKKETNFVLNKKAEIVKKIFKMYINGTSFNEIARTLNYEKIPQVAKKRQRNFTNLWSSAKVNHILKNRCVLGELYIRKTGDTFKNYYPQIISNDDWDIVQSMTKTKKIIKTSGRNSINIFTGKLFCSGCGQKYYFETDDKTLKTGKKYYHMLKCSGRRGLQCKSASIKYDDFLTSMPNMFGLIDKKPQDYSDKIKKIKEKITEISGYSKDINEKLLLLEELNNNNELDFTIYLKESSKLQKQIRENDARIASFKVSISRLSSDNKLDYFDKNDPISIKKAKKFINDNFAGFIVSSDSRNCTALYNNGQIIHFKVKNSKIEKTKNIIEKADGFKEFFDLKEEVVQAYKNGTMDGRFAEILKATNFWGIETPEKDYTLE

SEQ ID NO: 57157 - DNA, 50 bp, Vibrio cholerae; identical to SEQ ID NO: 36222
  source 1..50: mol_type = genomic DNA

SEQ ID NO: 57158 - DNA, 40 bp, Vibrio cholerae; identical to SEQ ID NO: 54203
  source 1..40: mol_type = genomic DNA

SEQ ID NO: 57159 - DNA, 40 bp, Vibrio cholerae
  source 1..40: mol_type = genomic DNA
ggctggggctaaattgacctgaatgcgcttcgctggaaac

SEQ ID NO: 57160 - DNA, 50 bp, Vibrio cholerae
  source 1..50: mol_type = genomic DNA
ttactctaaatgcttcaaaatatctggatttttataacaggttacaggaa

SEQ ID NO: 57161 - protein, 422 aa, Aeromonas veronii
MIQAGDVVILEKLDRLSRQGIAKTQAMLQEILSQGVVVVSLMDGLVLDRDSLNDLTLVIRIAVASDIAYKESLAKSQRIQANKDAAREKAKQGVAIPRKLPFWLSLIDGKYDFNDRLSVLKTIIDMKRNGASLAKIAAHLNSSSIPTANHNGIWNPSTLRDVIANPCLYGAHQVRVKVQGKYQPSELINDYYPAVISFSEYQELNSRAVQRPAGRSETNHISGLVYCEHCGKKMAAKSRKNKTGKVTYYYCRYSLLESCEHKAHVRDLHSHVIDNANSLEIKPTLKDDKRANEILIELSQIDNRVRELSESLASMTSTIATTAVISALSSLEEQKKVLLAEQRQSVPIAADAVKTLLTLVDDPKQFNIQLKKIVSEIRVRQSGNGHIVSVKRHDGHKIVFHTNGAFTTDTKQFLDEIRELNQ

SEQ ID NO: 57162 - DNA, 50 bp, Aeromonas veronii
  source 1..50: mol_type = genomic DNA
tcatgtgctttcaagcgtcataacaaagtgttacaatcaaaggcacacac

SEQ ID NO: 57163 - DNA, 40 bp, Aeromonas veronii
  source 1..40: mol_type = genomic DNA
ctgtgaaacccgctatcgcaagggattccacgcccacgaa

SEQ ID NO: 57164 - DNA, 40 bp, Aeromonas veronii
  source 1..40: mol_type = genomic DNA
ctgtgaaacccgctatcgcatgggattccacgcccacgaa

SEQ ID NO: 57165 - DNA, 50 bp, Aeromonas veronii
  source 1..50: mol_type = genomic DNA
acatgtgcagatctgtgtcataacatattggcacaagaaatgacacatca

SEQ ID NO: 57166 - protein, 452 aa, Listeria seeligeri
MKAAIYIRVSTQEQVENYSIQAQTEKLTALCRSKDWDVYDTFIDGGYSGSNMNRPALNEMLSKLHEIDAVVVYRLDRLSRSQKDTITLIEEYFLKNNVEFVSLSETLDTSSPFGRAMIGILSVFAQLERETIRDRMVMGKIKRVESGLPLTTAKGRTYGYDVVDTKLYINEEEAQHLQLIYDIFEEEKSITFLQKKLKELGFKVKSYSSYNKWLMNDLYIGYVSYGDKVHVKGVHEAIISEEQFYRVQEIFSRMGKNPNMNKESSSLLNNLIVCEKCGLGFVHRVKDTVSRGKKYHYRYYSCKTYKHTHELEKCGNKIWRADKLEEIIINRVKNYSFATRNLDKEDELDSINAKLKVEHSKKKRLFDLYINGSYEVAELDKMMADIDAQINYYNSQIEANEELKRDKKVQESLAELATVDFDSLEFREKQIYLKSIINKIYISDEQVTIEWI

SEQ ID NO: 57167 - DNA, 50 bp, Listeria seeligeri
  source 1..50: mol_type = genomic DNA
tttagtacctcgttttctctcactggacggagaacaaatgagaaactaaa

SEQ ID NO: 57168 - DNA, 40 bp, Listeria seeligeri; identical to SEQ ID NO: 21013
  source 1..40: mol_type = genomic DNA

SEQ ID NO: 57169 - DNA, 40 bp, Listeria seeligeri; identical to SEQ ID NO: 54149
  source 1..40: mol_type = genomic DNA

SEQ ID NO: 57170 - DNA, 50 bp, Listeria seeligeri
  source 1..50: mol_type = genomic DNA
tttcagacccagctttctatctctgcagaaagaacaagacaaaaacttaa

SEQ ID NO: 57171 - protein, 550 aa, Intestinimonas butyriciproducens
MTANTNYPDNITALYARLSQEDALDGESNSIANQKKILMKFATDSGFPNPTFFIDDGVSGVTFDRPGWNEMIRLAEAGKIRTVIVKDMSRMGRDYLKVGYYTESFFAERDIRYIAINDGVDSDKGDNDFTPFRNLFNDFYARDTSKKIRAVMRAKGNAGEHLCTNPPYGYQKDLADKKKWIVDEEAAEIVKRIFDLCISGKGPMQIAKLLTAQHVLTVKAHYAQRDGKPLPEKPYQWSPKSVAGILERPEYTGCTVNFKTYSKSHKLKKRLHNAPENQRIFPNTQPAIIEEQVFARVRELRENKRRPAKQAERQGLFSGLLYCADCGSKLHFATGKNMTPQQDCYRCSRYKSNTGDCTMHFIREETLKLFVLQRIFDVTALFFDDAMAFGEAAKKQRFQEAEKEAKKRRREIAQAEKRIGELDRIFKRIYEDDISGTISHERFLKLSADYEAEQKELTEQVKAWRDAVETFEQDQADFASFAAIVRKYVGIRELTPTIVNEFVKKIIVHAPDKSSGHRRQKIELVWNFIGEVNLPGAAQTVERQRKGRTA

SEQ ID NO: 57172 - DNA, 50 bp, Intestinimonas butyriciproducens
  source 1..50: mol_type = genomic DNA
ttacttccttatgggggcgcaccttttggtgaacaccgataaggaagtat

SEQ ID NO: 57173 - DNA, 40 bp, Intestinimonas butyriciproducens
  source 1..40: mol_type = genomic DNA
gagaaaggggcgatgccggttgcggcggcgccccttttaa

SEQ ID NO: 57174 - DNA, 40 bp, Intestinimonas butyriciproducens
  source 1..40: mol_type = genomic DNA
gagaaaggggcgatgccggaagcggcggcgccccttttaa

SEQ ID NO: 57175 - DNA, 50 bp, Intestinimonas butyriciproducens
  source 1..50: mol_type = genomic DNA
ttacttcttttctagtgtgcatttaatggtgtacatttctcctaaagtat

SEQ ID NO: 57176 - protein, 560 aa, Rhodococcus pyridinivorans
MTIIDADRTAIDSLVAPTPFPGSFAVSYLRVSTKKQAEKGGQAEGFSIPAQREANQRKADQLGATIIEEFVDAGESARKADRPELMRMIQYVVKHKTNYCIVHKVDRLARNRADDVTIHLALKDAGVTLVSATENIDETPSGMLLHGIMSSIAEFYSRNLATEVVKGLSQKAAQGGTVTKAPIGYRNVGVRDDFGREVRTVEIDEERARLVRWAFQVFASGGWTTSQLHHELVARELTTAASPRRPSRPIGKSSVHRMLTNPYYKGSVRYQGVTYAGAHEAIVPNEVWDQVQTVLGTHRSAADATQVHEHYLKGTVFCGQCGSRLLVCNAKSSQGTIYPYFVCASRHAGRGDCTRQAMLIEQVERLIERFYAKVQIDPETIEAISAMIHARFDEMMAEGAAELADLASRRTQLEGEQQKLLQAHYAGAIPLDLLEREQDRITASLETIEHRITAHHGHYADARANLDDSLKLLSNAADLYEHADDPNRRLCNQALFKAIYIDEDNDVCVGYRNPYDGLSLSGLHADALSWAAEAKKMGQGRTCDQGRTLGRKFTPDPFGV

SEQ ID NO: 57177 - DNA, 50 bp, Rhodococcus pyridinivorans
  source 1..50: mol_type = genomic DNA
aagttcacacctgacccgtttggggtgcctcgcatccacgttcccgacat

SEQ ID NO: 57178 - DNA, 40 bp, Rhodococcus pyridinivorans
  source 1..40: mol_type = genomic DNA
atcgggggttctcttcggggtgagtgacgggactcgaacc

SEQ ID NO: 57179 - DNA, 40 bp, Rhodococcus pyridinivorans; identical to SEQ ID NO: 57178
  source 1..40: mol_type = genomic DNA

SEQ ID NO: 57180 - DNA, 50 bp, Rhodococcus pyridinivorans
  source 1..50: mol_type = genomic DNA
aagttaaaaatagggccaggtgtggtggctcgcatctgtagtcccggcac

SEQ ID NO: 57181 - protein, 539 aa, Rhodococcus pyridinivorans
MTIIDADRTAIDSLVAPTPFPGSFAVSYLRVSTKEQAEKGGQAEGFSIPAQREANQRKADQLGATIIEEFVDAGESARKADRPELMRMIQYVAKHKTNYCIVHKVDRLARNRADDVTIHLALKDAGVTLVSATENIDETPSGMLLHGIMSSIAEFYSRNLATEVVKGLSQKAAQGGTVTKAAIGYRNVGVRDDFGREVRTVEIDEERARLVRWAFQVFASGGWTTSQLHHELVARELTTAASPRRPSRPIGKSSVHRMLTNPYYKGSVRYQGVTYAGAHEAIVPNEVWDQVQTVLGTHRSAADATQVHERYLKGTVFCGQCGSRLLVCNSKSSQGTIYPYFVCASRHAARGDCTRQAMLIEQVERLIERFYAKVQIDPETIEAISAMIHARFDEMMAEGAAELADLASRRTQLEGEQDQITASLETIEHRITAHHGHYADARANLDDSLKLLSNAADLYEHADDPNRRLCNQGLFKAIYIDEDNDVRVGYRNPYDGLSLSGLHADALSWAAEAKKMGQGRTCDQGRTLGRKFTPDPFGV

SEQ ID NO: 57182 - DNA, 50 bp, Rhodococcus pyridinivorans; identical to SEQ ID NO: 57177
  source 1..50: mol_type = genomic DNA

SEQ ID NO: 57183 - DNA, 40 bp, Rhodococcus pyridinivorans; identical to SEQ ID NO: 57178
  source 1..40: mol_type = genomic DNA

SEQ ID NO: 57184 - DNA, 40 bp, Rhodococcus pyridinivorans; identical to SEQ ID NO: 57178
  source 1..40: mol_type = genomic DNA

SEQ ID NO: 57185 - DNA, 50 bp, Rhodococcus pyridinivorans; identical to SEQ ID NO: 57180
  source 1..50: mol_type = genomic DNA

SEQ ID NO: 57186 - protein, 560 aa, Rhodococcus pyridinivorans
MTIIDADRTAIDSLVAPTPFPGSFAVSYLRVSTKKQAEKGGQAEGFSIPAQREANQRKADQLGATIIEEFVDAGESARKADRPELMRMIQYVVKHKTNYCIVHKVDRLARNRADDVTIHLALKDAGVTLVSATENIDETPSGMLLHGIMSSIAEFYSRNLATEVVKGLSQKAAQGGTVTKAPIGYRNVGVRDDFGREVRTVEIDEERARLVRWAFQVFASGGWTTSQLHHELVARELTTAASPRRPSRPIGKSSVHRMLTNPYYKGSVRYQGVTYAGAHEAIVPNEVWDQVQTVLGTHRSAADATQVHEHYLKGTVFCGQCGSRLLVCNAKSSQGTIYPYFVCASRHAGRGDCTRQAMLIEQVERLIERFYAKVQIDPETIEAISAMIHARFDEMMAEGAAELADLASRRTQLEGEQQKLLQAHYAGAIPLDLLKREQDRITASLETIEHRITTHHGHYADARANLDDSLKLLSNAADLYEHADDPNRRLCKQALFKAIYIDEDNDVRVGYRNPYDGLSLSGLHADALSWAAEAKKTGQGRTCDQGRTLGRKFTPDPFGV

SEQ ID NO: 57187 - DNA, 50 bp, Rhodococcus pyridinivorans; identical to SEQ ID NO: 57177
  source 1..50: mol_type = genomic DNA

SEQ ID NO: 57188 - DNA, 40 bp, Rhodococcus pyridinivorans; identical to SEQ ID NO: 57178
  source 1..40: mol_type = genomic DNA

SEQ ID NO: 57189 - DNA, 40 bp, Rhodococcus pyridinivorans; identical to SEQ ID NO: 57178
  source 1..40: mol_type = genomic DNA

SEQ ID NO: 57190 - DNA, 50 bp, Rhodococcus pyridinivorans; identical to SEQ ID NO: 57180
  source 1..50: mol_type = genomic DNA

SEQ ID NO: 57191 - protein, 539 aa, Rhodococcus pyridinivorans
MTIIDADRTAIDSLVAPTPFPGSFAVSYLRVSTKEQAEKGGQAEGFSIPAQREANQRKADQLGATIIEEFVDAGESARKADRPELMRMIQYVAKHKTNYCIVHKVDRLARNRADDVTIHLALKDAGVTLVSATENIDETPSGMLLHGIMSSIAEFYSRNLATEVVKGLSQKAAQGGTVTKAAIGYRNVGVRDDFGREVRTVEIDEERARLVRWAFQVFASGGWTTSQLHHELVARELTTAASPRRPSRPIGKSSVHRMLTNPYYKGSVRYQGVTYAGAHEAIVPNEVWDQVQTVLGTHRSAADATQVHERYLKGTVFCGQCGSRLLVCNSKSSQGTIYPYFVCASRHAARGDCTRQAMLIEQVERLIERFYAKVQIDPETIEAISAMIHARFDEMMAEGAAELADLASRRTQLEGEQDRITASLETIEHRITAHHGHYADARANLDDSLKLLSNAADLYEHADDPNRRLCNQGLFKAIYIDEDNDVRVGYRNPYDGLSLSGLHADALSWAAEAKKMGQGRTCDQGRTLGRKFTPDPFGV

SEQ ID NO: 57192 - DNA, 50 bp, Rhodococcus pyridinivorans; identical to SEQ ID NO: 57177
  source 1..50: mol_type = genomic DNA

SEQ ID NO: 57193 - DNA, 40 bp, Rhodococcus pyridinivorans; identical to SEQ ID NO: 57178
  source 1..40: mol_type = genomic DNA

SEQ ID NO: 57194 - DNA, 40 bp, Rhodococcus pyridinivorans; identical to SEQ ID NO: 57178
  source 1..40: mol_type = genomic DNA

SEQ ID NO: 57195 - DNA, 50 bp, Rhodococcus pyridinivorans; identical to SEQ ID NO: 57180
  source 1..50: mol_type = genomic DNA

SEQ ID NO: 57196 - protein, 559 aa, Rhodococcus pyridinivorans
MTIIDADRTAIDSLVAPTPFPGSFAVSYLRVSTKEQAEKGGQAEGFSIPAQREANQRKADQLGATIIEEFVDAGESARKADRPELMRMIQYVAKHKTNYCIVHKVDRLARNRADDVTIHLALKDAGVTLVSATENIDETPSGMLLHGIMSSIAEFYSRNLATEVVKGLSQKAAQGGTVTKAPIGYRNVGVRDDFGREVRTVEIDEERARLVRWAFQVFASGGWTTSQLHHELVARGLTTAASPRRPSRPIGKSSVHRMLTNPYYKGSVRYQGVTYAGAHEAIVPNEVRDQVQTVLGTHRSAADATQVHEHYLKGTVFCGQCGSRLLVCNAKSSQGTIYPYFVCASRHAGRGDCTRQAMLIEQVERLIERFYAKVQIDPETIEAISAMIHARFDEMMAEGAVELADLASRRTQLEGEQQKLLQAHYAGAIPLDLLKREQDRITASLETIEHRITAHHGHYADARANLDDSLKLLSNAADLYEHADDPNRRLCNQALFKAIYIDEDNDVRVGYRNPYDGLSLSGLHADALSWAAEAKKMGQGRTATKGGPLVASSHLTRLG

SEQ ID NO: 57197 - DNA, 50 bp, Rhodococcus pyridinivorans; identical to SEQ ID NO: 57177
  source 1..50: mol_type = genomic DNA

SEQ ID NO: 57198 - DNA, 40 bp, Rhodococcus pyridinivorans; identical to SEQ ID NO: 57178
  source 1..40: mol_type = genomic DNA

SEQ ID NO: 57199 - DNA, 40 bp, Rhodococcus pyridinivorans; identical to SEQ ID NO: 57178
  source 1..40: mol_type = genomic DNA

SEQ ID NO: 57200 - DNA, 50 bp, Rhodococcus pyridinivorans; identical to SEQ ID NO: 57180
  source 1..50: mol_type = genomic DNA

SEQ ID NO: 57201 - protein, 529 aa, Faecalibacterium prausnitzii
MTAVIYARYSSDSQREASIEGQLRDCKDYAEKNGITVVGTYIDRAYSAKTDDRPEFQHMIKDSAKKIFDVVLVWKLDRFARNRYDAVNYKHQLEKNGVHLVSAMEPISQGPEGIMVESMLIGMAEYYSAELALKVARGERENALQCKYNGGVVPLGFTIGKEDRLYHIDPETAPIVQEIFTRYADGEPAEKIAASLNERGLRTRTGKPFVKNSFFQIFRNRRYIGEYRYKDIVTPGGIPAIVDKDLFDRVQQRFEQNKIAHGRPAKEDVSYLLTTKLFCGKCGTLMGGESGTSHMGNTYYYYKCGNAKRHGKAHCDLKAIRKESLERFVVETAIKVIFSDEIIERLIDLIMEAQQQENTRLPVLKDQLRDTEKRLANLLEAIEQGILTPTTKQRLDELEARKEALNTSILEEELKKPVLTREWMRFWFEKFRKGDVGSTEHQRQIIDTFVNSVYVFDDRVVLNFNFTDDSKTVTREEVLGSSAVENAPPNKKNPNLFPIGEGFGFFVFFGYNNEGSCGRRKTPIPCHRP

SEQ ID NO: 57202 - DNA, 50 bp, Faecalibacterium prausnitzii
  source 1..50: mol_type = genomic DNA
gattcttgctctcaccgtcagaatcagtcccgaagtggcgagaattttca

SEQ ID NO: 57203 - DNA, 40 bp, Faecalibacterium prausnitzii
  source 1..40: mol_type = genomic DNA
ggcacgccccaacaagaagcatccgccttgcattcgtagt

SEQ ID NO: 57204 - DNA, 40 bp, Faecalibacterium prausnitzii
  source 1..40: mol_type = genomic DNA
ggcacgccccaacaagaaggttccgccttgcattcgtagt

SEQ ID NO: 57205 - DNA, 50 bp, Faecalibacterium prausnitzii
  source 1..50: mol_type = genomic DNA
tattctgggtgtgtctgtgagagtgtgtccagaagagattagcattttaa

SEQ ID NO: 57206 - protein, 480 aa, Rhodococcus fascians
MTSQNAPQRAAVYVRISSDPTGKSLGVQRQEDDCRALAERLGWTVAGVYTDNDISAASGKLRPAFERLLADVAAGVIDGVLVWHADRLYRRAPDLVRIVDELKVPIQTVTSGDLDLVTSSGRMNARILGAVAEHEIEHATERMRAAHRQSAESGVWRIRRRVFGYKPGGQELEPQEAQAIRAAAHDILGGVSTGEIARRWNRGGLRTTGLTVKTSAGEKIERGKGSTSEWTSRRVSAQLRHPLYARRVVYQGKVLPGIEGQWLRILDDDVHDALTAFLDNRRQPRTKPRVWQGTSVYRCGRCDPDEHGMRPKMEIAYRGSVAHYRCRTTGHNNRNQARVDSFVDSVVLARLARPDAVDLLDKGEVDVPALTAQRDGLQARLDELALLFSDGDIDGSQLKTGSRPLRDQIEGIDRQLAAQVQRDPVAELLLAEGELESTWEHMGPDRRSKIIDVLMTVTILPIAKRGNTFDESRIKIEWKR

SEQ ID NO: 57207 - DNA, 50 bp, Rhodococcus fascians
  source 1..50: mol_type = genomic DNA
gcgcgcaccttgttaggtgtcaaccacttaaaccataacctcatgcgcac

SEQ ID NO: 57208 - DNA, 40 bp, Rhodococcus fascians
  source 1..40: mol_type = genomic DNA
acgcaacgggctcgtcaaccactaccaccacccgcaggaa

SEQ ID NO: 57209 - DNA, 40 bp, Rhodococcus fascians
  source 1..40: mol_type = genomic DNA
acgcaacgggctcgtcaacggctaccaccacccgcaggaa

SEQ ID NO: 57210 - DNA, 50 bp, Rhodococcus fascians
  source 1..50: mol_type = genomic DNA
gcccgcagcccaccaggtctcaacggctgaagtcagcgaccaaggcgccc

SEQ ID NO: 57211 - protein, 539 aa, Pseudomonas aeruginosa
MEKNGARVYSYLRFSDPRQATGSSADRQLAYAAAWAAERGMELDATLTLRDEGLSAYHETHVKQGALGAFLRAVDEGRIPAGSVLIVEGLDRLSRAEPLLAQAQLGQIVNAGITVVTASDGREYNRAGLKAEPMNLVYSLLVMIRAHEESDTKSKRVTASIRRLCEGWQAGTYRGLIRNGKDPQWLRWSGEVWELIPERVAAVRRALELYRQGLGAQRAYRIMYDEGHQLSDWGIASQQIYRLVRLPALRGAKRLRVGGEDYLLEDYYPRLLSDTEFSELQQLTGQRLRRRGKGSIPGIITGIGMTYCGYCGTAITGQNLMGRARADGSLADGHRRLHCISYSRNEGCAAGGSCSAAPIERALMAYCSDRMNLERLHEPAVDGQPVRDRLAAARSAAAEVEQQLGRVTDALLAAEGGAAPLVFVRKARELEELLARRQADVREIEEELAGLAGSQAPADAERWAELAAGVEAMNGTVREQVRQLVMDTFSRIVVYMRGVVPDRASRSIDVLLIARAGHRQWLRIDRRSGRWKASAARPA

SEQ ID NO: 57212 - DNA, 50 bp, Pseudomonas aeruginosa
  source 1..50: mol_type = genomic DNA
ggtttatactgagcatcaatagggcaccccagtgaaacccaacctatact

SEQ ID NO: 57213 - DNA, 40 bp, Pseudomonas aeruginosa; identical to SEQ ID NO: 54108
  source 1..40: mol_type = genomic DNA

SEQ ID NO: 57214 - DNA, 40 bp, Pseudomonas aeruginosa
  source 1..40: mol_type = genomic DNA
gtcgaccagcgccttggggagtccaagactgacgaagccg

SEQ ID NO: 57215 - DNA, 50 bp, Pseudomonas aeruginosa
  source 1..50: mol_type = genomic DNA
ggaatataccccatctccataggaagccccagggatcctagagataaact

SEQ ID NO: 57216 - protein, 514 aa, Vibrio parahaemolyticus
MNNNKALAVLYVRFSTKKQETGDSQRRQIESAEQWCERNNAELSAQTYEDLGVSAFKEGGKRPALEDLINAIRMGKIPRDSYLLIEDHDRLSRRGWRYTQDLVYQLVQLGVRLVMLKTGVVYDANNINNIADNIVLMISAERAHQESERKSHLIKASREKARRDKKVTGKLPAWVSRDGDGFTFNDKKATIQELINCKLSGKSHQSTAKHLNSLKMTTGNDSAWSASGVRAIVQNHALYGAKAYFDTGKDGRMNKEPIEIVSDIFPALITHEQYQVLNKRQQAGRTSKRGAYSRLLKCGACGGAMTTRTSNYKGKPRAYKMCVKATEGSCNQVERIREPEVYLNQALHFLKYESSSTLYVSRTSEYQQRLETLNATVDLLTKNGNVEALARVYADIKEVSDLIEESKVLDQNNVDIKVDFSLISSIEDVEQRNIELRKVLREIRFYCIEKVGQTSKWKVVIEQINGIKKYLVLDQKYGFGNTVVDYASLLTQGTEDNRESWEIEDSEEWESYSY

SEQ ID NO: 57217 - DNA, 50 bp, Vibrio parahaemolyticus
  source 1..50: mol_type = genomic DNA
ctgcattgcaatgaatacgttactaaagtactatacagattatgatgcac

SEQ ID NO: 57218 - DNA, 40 bp, Vibrio parahaemolyticus; identical to SEQ ID NO: 4428
  source 1..40: mol_type = genomic DNA

SEQ ID NO: 57219 - DNA, 40 bp, Vibrio parahaemolyticus
  source 1..40: mol_type = genomic DNA
atttggctggcatgtggtcgcggttctctacagaacatag

SEQ ID NO: 57220 - DNA, 50 bp, Vibrio parahaemolyticus
  source 1..50: mol_type = genomic DNA
ctgcagtgctctacctgctcttctgcagtactctacctgctcttatgcag

SEQ ID NO: 57221 - protein, 586 aa, Streptomyces chartreusis
MKQKQKTLQRITGDDYVAYLRVSSKGQVDTDYNPEGVSIPAQREKVEERGRELGASKAAEFVDPGRSARTIDERQEFQEMIAYLREHPNVRYVIVYMLSRFARNRLDDAIMVATLEKLGVKLISAVEKNIDDTPTGRMLHGMLAVINEYSSNQSAEDIKYKMGQKAKNGGTITRTPVGYLNTVEIIDGRRVRTVAIDPVRGPFIRLAFELYATGEYTVDEVAGELYDRGLRMPRDARYPTERGISTNRLYVVLRDDYYCGWITHDDKKYKGRHAPLVPQDLFDQVQMVTDTRNTARERRRVHHHELKGSLFCGSCHDRRGDRRRMIVQHATNRHGNVYRYFFCNGRFDHICELPYVPIEQAEEAVEDHYATVRFTPEFIATMRSELAAMVDEQQATTKILQAQLTKQLRALDTKENNLIDLAADGSLPQAKIKAKLQEITKQRDRLTTRLHDVDEDLSTAAEIIEACLQLLQDPQALYQRCNGQQRRQLNQALFEALYIDEDSNGDLRVSHILKEPFGILHEAQSQHPAPTGPLEAPPSLRAVLPAPKRQSAPPQPGTGAGLQLTGAALVGGPWKVPGSNNLLMVG

SEQ ID NO: 57222 - DNA, 50 bp, Streptomyces chartreusis
  source 1..50: mol_type = genomic DNA
gggttccaacaatcttcttatggtgggcgacaaggggcctgactggaaca

SEQ ID NO: 57223 - DNA, 40 bp, Streptomyces chartreusis
  source 1..40: mol_type = genomic DNA
ggaccggcctcttcccggtgggcgatactgggttcgaacc

SEQ ID NO: 57224 - DNA, 40 bp, Streptomyces chartreusis
  source 1..40: mol_type = genomic DNA
ggaccggcctcttcccggttggcgatactgggttcgaacc

SEQ ID NO: 57225 - DNA, 50 bp, Streptomyces chartreusis
  source 1..50: mol_type = genomic DNA
gggttcacaaactattcttgtcattggccccaagaatatacactggaaga

SEQ ID NO: 57226 - protein, 551 aa, Stenotrophomonas maltophilia
MATKARVYSYLRFSDPKQAAGSSADRQLEYAKRWAAEHGMTLDAALSMQDEGLSAYHQRHVTKGALGVFLAAIDDGRIPAGSVLIVEGLDRLSRAEPIQAQAQLAQIINAGITVVTASDGREYNRAGLKAQPMDLVYSLLVMIRAHEESDTKSKRVRAAIHRQCRGWQDGTWRGVIRNGKDPSWTRLEPETKTFQLVPERAEAVKLAIRMFRDGHGAVRIMRTLAEEGLQLTNGGNPAGQLYRILRNRALIGEKVLEIDGEEYRLAGYYPSLLSAEQFADLQQATEQRAKQKGTGEIPGLITGLRISYCGYCGSAMVAQNLMNRGRREDGGPQHGHRRLICVGNSQGMGCAVAGSCSVVPIEHAIMSYCADQMNLARLFEGGDRSEALGGRLAIARARVADTTAKIERITDAMLADDAGDAPAAFMRRAREMEAALAAQQAEVEALEHEMAAVGSSPTPAVAKAWADLQEGVKALDYDARTKARQLVADTFERISIYHRGTEPEQTRSWKGTIDLVLVAKRGSARILHVDRQTGEWRGGEEVRDLPDDPIQ

SEQ ID NO: 57227 - DNA, 50 bp, Stenotrophomonas maltophilia
  source 1..50: mol_type = genomic DNA
agtctatttgagacgacgctcgggcaccccaatgaaacaaaccctatact

SEQ ID NO: 57228 - DNA, 40 bp, Stenotrophomonas maltophilia; identical to SEQ ID NO: 21998
  source 1..40: mol_type = genomic DNA

SEQ ID NO: 57229 - DNA, 40 bp, Stenotrophomonas maltophilia; identical to SEQ ID NO: 21999
  source 1..40: mol_type = genomic DNA

SEQ ID NO: 57230 - DNA, 50 bp, Stenotrophomonas maltophilia
  source 1..50: mol_type = genomic DNA
agtcattttcttctgagcctcaggacaccccaggaattgattcatatact

SEQ ID NO: 57231 - protein, 510 aa, Ruminococcus gnavus
MSYFIYARKSRKDAELEALGIDVLERHITTLLELAKTLSLPIGAIYREVVSGDSIDTRPVMTQVLSEVEACMWDGALVMDVDRLARGDTIDQGRVQRAFFYSNTRIVTPSKTYDPANEYDNEYFEFSLFMSRREYATIKRRMQRGRERSSSDGYYVGNVAPYGWERVIAPDGKHYSLTPSQTEAPVLDLMYDLCGNKQYGYQKACTYMTNMGILARSGKPFSPSTLKGIISNPANIGKVRWGYRKTVRAVKDGRVVKSRPNATDYILADAAWAPRISTDLFKRANQPKGCFSSPVRNDRPIQNLFAGLVRCSQCGRLMVRKKAQTKTPYDVLICQYTECSTVGIRIDELEEALLEWLKDYIVKYEFTDTHEEDAAAIAAKEMIVTNFETEHQTLLKQRESLFDFLEQGIYTKEIFLERSNALEQRIRDCMNNITAAQEDLHTTIARQANRKNFVPKCKNLLSEWNSLTIPEKNSALRKLIDRIVLTKTKRNKKNQKNSEFMIDVYPKVPK

SEQ ID NO: 57232 - DNA, 50 bp, Ruminococcus gnavus
  source 1..50: mol_type = genomic DNA
tagttgcatcttctacgagcgtattctttcgcacatccaagatgcaacta

SEQ ID NO: 57233 - DNA, 40 bp, Ruminococcus gnavus
  source 1..40: mol_type = genomic DNA
catttccatatgggccagttcctccgtgccgatatccgta

SEQ ID NO: 57234 - DNA, 40 bp, Ruminococcus gnavus
  source 1..40: mol_type = genomic DNA
catttccatatgggccagtgcctccgtgccgatatccgta

SEQ ID NO: 57235 - DNA, 50 bp, Ruminococcus gnavus
  source 1..50: mol_type = genomic DNA
tatttacatctgtaacgtaggtatgctcttgcacatgacagatgtaaaca

SEQ ID NO: 57236 - protein, 535 aa, Rhodococcus pyridinivorans
MSHDQQERTAGNEPNDQATAQASPSLRAVVYVRISDDPEGTERGVDRQEADCRAYAAAHGWEVAQVYRENDTSAFKQRTITLPTGERVRRVVRPEFRAMLKHLSEQRAGVMIAYDLDRAVRDPRDLEDLIDAKVLNGFSVRSVTGSLRLDTDSDVAMARVLVAMANKSSADTARRVARAAKQQAIEGTWHGGQVPFGYRAENHTLVIDPEAAELVREAARRVLAGETLYRILTDWNRRGIRTTHGCRWSDRTLKLVLRNPSIKGVREYRPLLPDGTRSKTSLMQTTAAWPAILDEDTWQQVSDVLDARKQARNFHQPGSGAAKRLYPFSGLIRCSTCGRAMLHRGQVYQCVQQVPGGCNRSIRSGDLTKLVEEAVLATFEQITLNPAKRQSPGADQAARVGLAATLDADRERLARLDDDYYDGLIDKSMWVRQRSRIAERIERTRREYAATVPEHTGPSIDMTTVAQEWADRTPMWQHQAASLVLEAVLVHALPRGMNGATPARRRNETVEAFHARREVYRAGILAHRVEFVWRA

SEQ ID NO: 57237 - DNA, 50 bp, Rhodococcus pyridinivorans
  source 1..50: mol_type = genomic DNA
cgagtgcgtttgcagaacctcggctagccgaggttctgtaaacgcaccta

SEQ ID NO: 57238 - DNA, 40 bp, Rhodococcus pyridinivorans
  source 1..40: mol_type = genomic DNA
ccagtaggtggtggtccggtaggcgcgttcctcgtggtgg

SEQ ID NO: 57239 - DNA, 40 bp, Rhodococcus pyridinivorans
  source 1..40: mol_type = genomic DNA
ccagtaggtggtggtccgggcggcgcgttcctcgtggtgg

SEQ ID NO: 57240 - DNA, 50 bp, Rhodococcus pyridinivorans; identical to SEQ ID NO: 6035
  source 1..50: mol_type = genomic DNA

SEQ ID NO: 57241 - protein, 525 aa, Brachybacterium alimentarium
MGQNQQEQTTGSSSPLRAVVYVRISDDPESTERGVDRQEADCRAYATAHGWEVAAVFRENDTSAFKQRTITLASGERVRRVVRPEFRAMLKHLNDGQAQVMVAYDLDRAVRDPRDLEDLIDAKVLAGFTVRSVTGSLRLDTDSDVAMARVLVAMANKSSADTARRVARAAKQQAIEGTWHGGRVPFGYRAESGALVVDPVAGPMVDEAAQRVLAGESLYRIRKDWNERGVLTTHGCAWSDKTIRMVLRSPSIKGVREYRPILPDGTRAKTSQMQVQAAWPAILDEDTWQQVSDVLDARKQARNFHQPGSGATKRMYPFSGLIRCSACGRAMLHRGEVYQCVQATRGGCHRSIRSADISKLVEEAVLATFEQITVSPSKRATPSADAGARVGLAARLDADRERLGRLDDDHYDGLIDKAMWVRQRARIAERIEATRREYAAAMPEQEGPGIDVTTVAKEWAGRTPLWQYQATSLILEAVLVHALPEGMNGATPARRRNETIEAFHARRTVYRADILSRRVELVWRA

SEQ ID NO: 57242 - DNA, 50 bp, Brachybacterium alimentarium
  source 1..50: mol_type = genomic DNA
tgagtgtgtttgcagtacctcggctaaccgaggttctgtaaacgcaccta

SEQ ID NO: 57243 - DNA, 40 bp, Brachybacterium alimentarium
  source 1..40: mol_type = genomic DNA
gcggtgcccggtgatcgcatacccgagctcgacctgatcg

SEQ ID NO: 57244 - DNA, 40 bp, Brachybacterium alimentarium
  source 1..40: mol_type = genomic DNA
gcggtgcccggtgatcgcagccccgagctcgacctgatcg

SEQ ID NO: 57245 - DNA, 50 bp, Brachybacterium alimentarium; identical to SEQ ID NO: 6035
  source 1..50: mol_type = genomic DNA

SEQ ID NO: 57246 - protein, 554 aa, Vibrio campbellii; identical to SEQ ID NO: 54431

SEQ ID NO: 57247 - DNA, 50 bp, Vibrio campbellii
  source 1..50: mol_type = genomic DNA
tttcccccaatcagtcgctatgctttaatgtaagtctcaaaaaggcggtt

SEQ ID NO: 57248 - DNA, 40 bp, Vibrio campbellii
  source 1..40: mol_type = genomic DNA
tttgcgtccgcgctgcatcttcgcattacataggcggtag

SEQ ID NO: 57249 - DNA, 40 bp, Vibrio campbellii
  source 1..40: mol_type = genomic DNA
tttgcgtccgcgctgcatctacgcattacataggcggtag

SEQ ID NO: 57250 - DNA, 50 bp, Vibrio campbellii
  source 1..50: mol_type = genomic DNA
ttggcccaaaggaatagtgatgcttaaatgtatgttactaaaagactgtt

SEQ ID NO: 57251 - protein, 458 aa, Staphylococcus argenteus; identical to SEQ ID NO: 41121

SEQ ID NO: 57252 - DNA, 50 bp, Staphylococcus argenteus
  source 1..50: mol_type = genomic DNA
gtgcggaactacgaacagtttatcaacacgaagtgtacaaactcccatac

SEQ ID NO: 57253 - DNA, 40 bp, Staphylococcus argenteus; identical to SEQ ID NO: 29728
  source 1..40: mol_type = genomic DNA

SEQ ID NO: 57254 - DNA, 40 bp, Staphylococcus argenteus
  source 1..40: mol_type = genomic DNA
gtacggaggcacttgtataagcgtaggatgtataccttca

SEQ ID NO: 57255 - DNA, 50 bp, Staphylococcus argenteus
  source 1..50: mol_type = genomic DNA
atgtggaacaggaaactgtttctcagcacaaagtttttaatcacataaac

SEQ ID NO: 57256 - protein, 458 aa, Staphylococcus argenteus
MKVAIYTRVSTLEQKEKGHSIEEQERKLRAYSDINDWTIQGVYVDAGYSGAKTDRPELNRLKENLSKIDLVLVYKLDRLTRNVKDLLDLLEIFERENVSFRSATEVYDTSTAMGRLFVTLVGAMAEWERETIRERAMMGKQAAIRKGMILTPPPFYYDRVDNKYIPNKYKDVVVWAYEEVKKGNSAKGIARKLNASDIPPPNGIQWEDRTITRALRSPLSKGHYFWGDIFIENSHEPIITDEMYNEIKERLNERVNAKTITHTSVFRGKLICPNCNGRLCLNTSYRKLKRGDVIHKNYYCNNCKINKNGAFSFTEKEALKVFYDYLSKLDLSKYKTKEKEDKKIVTIDINKVMEQRKRYHKLYANGMMQEEELFELIKETDEKISEYEKQKERVPKKRLDVSKIKKFKNILLDSWNAFTLEDKADFIKMAIKSIEIEYIHVKRGKTKHSIKIKNIDFY

SEQ ID NO: 57257 - DNA, 50 bp, Staphylococcus argenteus; identical to SEQ ID NO: 57252
  source 1..50: mol_type = genomic DNA

SEQ ID NO: 57258 - DNA, 40 bp, Staphylococcus argenteus; identical to SEQ ID NO: 29728
  source 1..40: mol_type = genomic DNA

SEQ ID NO: 57259 - DNA, 40 bp, Staphylococcus argenteus; identical to SEQ ID NO: 57254
  source 1..40: mol_type = genomic DNA

SEQ ID NO: 57260 - DNA, 50 bp, Staphylococcus argenteus; identical to SEQ ID NO: 57255
  source 1..50: mol_type = genomic DNA

SEQ ID NO: 57261 - protein, 458 aa, Staphylococcus argenteus
MKVAIYTRVSTLEQKEKGHSIEEQERKLRAYSDINDWTIQGVYVDAGYSGAKTDRPELNRLKENLSKIDLVLVYKLDRLTRNVKDLLDLLEIFERENVSFRSATEVYDTSTAMGRLFVTLVGAMAEWERETIRERAMMGKQAAIRKGMILTPPPFYYDRVDNKYIPNKYKDVVVWAYEEVKKGNSAKGIARKLNASDIPPPNGIQWEDRTITRALRSPLSKGHYFWGDIFIENSHEPIITDEMYNEIKERLNERVNAKTITHTSVFRGKLICPNCNGRLCLNTSYRKLKRGDVIHKNYYCNNCKINKNGAFSFTEKEALKVFYDYLSKLDLSKYKTKEKEDKKIVTIDINKVMEQRKRYHKLYANGMMQEEELFELIKETDEKISEYEKQKERVPKKRLDVSKIKNFKNILLDSWNSFTLEDKADFIKMAIKSIEIEYIHVKRGKTKHSIKIKNIDFY

SEQ ID NO: 57262 - DNA, 50 bp, Staphylococcus argenteus; identical to SEQ ID NO: 57252
  source 1..50: mol_type = genomic DNA

SEQ ID NO: 57263 - DNA, 40 bp, Staphylococcus argenteus; identical to SEQ ID NO: 29728
  source 1..40: mol_type = genomic DNA

SEQ ID NO: 57264 - DNA, 40 bp, Staphylococcus argenteus; identical to SEQ ID NO: 57254
  source 1..40: mol_type = genomic DNA

SEQ ID NO: 57265 - DNA, 50 bp, Staphylococcus argenteus; identical to SEQ ID NO: 57255
  source 1..50: mol_type = genomic DNA

SEQ ID NO: 57266 - protein, 452 aa, Listeria seeligeri; identical to SEQ ID NO: 39176

SEQ ID NO: 57267 - DNA, 50 bp, Listeria seeligeri; identical to SEQ ID NO: 39192
  source 1..50: mol_type = genomic DNA

SEQ ID NO: 57268 - DNA, 40 bp, Listeria seeligeri; identical to SEQ ID NO: 21013
  source 1..40: mol_type = genomic DNA

SEQ ID NO: 57269 - DNA, 40 bp, Listeria seeligeri
  source 1..40: mol_type = genomic DNA
ttttggttcaagctacgatgtacggaaagagggaaccaag

SEQ ID NO: 57270 - DNA, 50 bp, Listeria seeligeri; identical to SEQ ID NO: 27010
  source 1..50: mol_type = genomic DNA

SEQ ID NO: 57271 - protein, 449 aa, Enterococcus faecalis; identical to SEQ ID NO: 46431

SEQ ID NO: 57272 - DNA, 50 bp, Enterococcus faecalis; identical to SEQ ID NO: 46432
  source 1..50: mol_type = genomic DNA

SEQ ID NO: 57273 - DNA, 40 bp, Enterococcus faecalis
  source 1..40: mol_type = genomic DNA
tttctactgcatatgccgtactagtaacgcttggcgctat

SEQ ID NO: 57274 - DNA, 40 bp, Enterococcus faecalis
  source 1..40: mol_type = genomic DNA
tttctactgcatatgccgtcttagtaacgcttggcgctat

SEQ ID NO: 57275 - DNA, 50 bp, Enterococcus faecalis
  source 1..50: mol_type = genomic DNA
ttagtgacttgtgagaacttaccccttggaggtttcataagaaggcaaaa

SEQ ID NO: 57276 - protein, 449 aa, Enterococcus faecalis
MLKRAALYIRVSTDQQAKHGDSLDAQIATLKDYVSTQDNLTIIDTYIDDGISGQKLYRDEFQRLLEDIKKNRIDIILFTKLDRWFRNLRHYLNIQEILDNSGVTWLAVSQPFFNTDTAYGRSFVNQSMSFAELEAQMASERIKAVFENKIRKGEVVTGSVPFGYKICDKKLIPNENAAIAKDIFKHYSIHNSIRLTVEYLFNEYDITRSSRTIKHMLRNRKYIGEVSGNKNYCPPIVDKETFEKVQNLLDKNISSIAKRTYIFSGLVVCSCCGKKMTGRYRKRKYIKKDGTVMYYTKKVYRCNGNTYKRNKCPNKINIPEEILEEYLLNNIKADAENFEAKQKKIAVSAPEKNNNSKILKKIERLKKAYLNEVISLDEYKKDRKELEQMIVQVKPKETIVFKSNWFNKNIESTYRDFDEEEKRFVWRSVLKNLLVDPHGKITINFLTKN

SEQ ID NO: 57277 - DNA, 50 bp, Enterococcus faecalis; identical to SEQ ID NO: 46432
  source 1..50: mol_type = genomic DNA

SEQ ID NO: 57278 - DNA, 40 bp, Enterococcus faecalis; identical to SEQ ID NO: 57273
  source 1..40: mol_type = genomic DNA

SEQ ID NO: 57279 - DNA, 40 bp, Enterococcus faecalis; identical to SEQ ID NO: 57274
  source 1..40: mol_type = genomic DNA

SEQ ID NO: 57280 - DNA, 50 bp, Enterococcus faecalis; identical to SEQ ID NO: 57275
  source 1..50: mol_type = genomic DNA

SEQ ID NO: 57281 - protein, 449 aa, Enterococcus faecalis
MLKRAALYIRVSTDQQAKHGDSLDAQIATLKDYVSTQDNLTIIDTYIDDGISGQKLYRDEFQRLLEDIKKNRIDIILFTKLDRWFRNLRHYLNIQEILDNSGVTWLAVSQPFFNTDTAYGRSFVNQSMSFAELEAQMASERIKAVFENKIRKGEVVTGSVPFGYKICDKKLIPNENAPIAKDIFKHYSIHNSIRLTVEYLFNEYDITRSSRTIKHMLRNRKYIGEVSGNKNYCPPIVDKETFEKVQNLLDKNISSIAKRTYIFSGLVVCSCCGKKMTGRYRKRKYIKKDGTVMYYTKKVYRCNGNTYKRNKCPNKINIPEEILEEYLLNNIKADAENFEAKQKKIAVSAPEKNNNSKVLKKIERLKKAYLNEVISLDEYKKDRKELEQMIVQVKPKETIVFKSNWFKKNIESTYRDFDEEEKRFVWRSVLKNLIVDPHGKITINFLTKN

SEQ ID NO: 57282 - DNA, 50 bp, Enterococcus faecalis; identical to SEQ ID NO: 46432
  source 1..50: mol_type = genomic DNA

SEQ ID NO: 57283 - DNA, 40 bp, Enterococcus faecalis; identical to SEQ ID NO: 57273
  source 1..40: mol_type = genomic DNA

SEQ ID NO: 57284 - DNA, 40 bp, Enterococcus faecalis; identical to SEQ ID NO: 57274
  source 1..40: mol_type = genomic DNA

SEQ ID NO: 57285 - DNA, 50 bp, Enterococcus faecalis; identical to SEQ ID NO: 57275
  source 1..50: mol_type = genomic DNA

SEQ ID NO: 57286 - protein, 449 aa, Enterococcus faecalis
MLKRAALYIRVSTDQQAKHGDSLDAQIATLKDYVSTQDNLTIIDTYIDDGISGQKLYRDEFQRLLEDIKKNRIDIILFTKLDRWFRNLRHYLNIQEILDNSGVTWLAVSQPFFNTDTAYGRSFVNQSMSFAELEAQMASERIKAVFENKIRKGEVVTGSVPFGYKICDKKLMPNENAPIAKDIFKHYSIHNSIRLTVEYLFNEYDITRSSRTIKHMLRNRKYIGEVSGNKNYCPPIVDKETFEKVQNLLDKNISSIAKRTYIFSGLVVCSCCGKKMTGRYRKRKYIKKDGTVMYYTKKVYRCNGNTYKRNKCPNKINIPEEILEEYLLNNIKADAENFEAKQKKIAVSAPEKNNNSKILKKIERLKKAYLNEVISLDEYKKDRKELEQMIVQVKPKETIVFKSNWFNKNIESTYRDFDEEEKRFVWRSVLKNLLVDPHGKITINFLTKN

SEQ ID NO: 57287 - DNA, 50 bp, Enterococcus faecalis; identical to SEQ ID NO: 46432
  source 1..50: mol_type = genomic DNA

SEQ ID NO: 57288 - DNA, 40 bp, Enterococcus faecalis; identical to SEQ ID NO: 57273
  source 1..40: mol_type = genomic DNA

SEQ ID NO: 57289 - DNA, 40 bp, Enterococcus faecalis; identical to SEQ ID NO: 57274
  source 1..40: mol_type = genomic DNA

SEQ ID NO: 57290 - DNA, 50 bp, Enterococcus faecalis; identical to SEQ ID NO: 57275
  source 1..50: mol_type = genomic DNA

SEQ ID NO: 57291 - protein, 449 aa, Enterococcus faecalis
MLKRAALYIRVSTDQQAKHGDSLDAQIATLKDYVSTQDNLTIIDTYIDDGISGQKLYRDEFQRLLEDIKKNRIDIILFTKLDRWFRNLRHYLNIQEILDNSGVTWLAVSQPFFNTDTAYGRSFVNQSMSFAELEAQMASERIKAVFENKIRKGEVVTGSVPFGYKICDKKLIPNENAPIAKDIFKHYSIHNSIRLTVEYLFNEYDITRSSRTIKHMLRNRKYIGEVSGNKNYCPPIVDKETFEKVQNLLDKNISSIAKRTYIFSGLVVCSCCGKKMTGRYRKRKYIKKDGTVMYYTKKVYRCNGNTYKRNKCPNKINIAEEILEEYLLNNIKADAENFEAKQKKIAVSAPEKNNNSKILKKIERLKKAYLNEVISLDEYKKDRKELEQMMIQVKPKETIVFKSNWFNKNIESTYRDFDEEEKRFVWRSVLKNLIVDPHSKITINFLTKN

SEQ ID NO: 57292 - DNA, 50 bp, Enterococcus faecalis; identical to SEQ ID NO: 46432
  source 1..50: mol_type = genomic DNA

SEQ ID NO: 57293 - DNA, 40 bp, Enterococcus faecalis; identical to SEQ ID NO: 57273
  source 1..40: mol_type = genomic DNA

SEQ ID NO: 57294 - DNA, 40 bp, Enterococcus faecalis; identical to SEQ ID NO: 57274
  source 1..40: mol_type = genomic DNA

SEQ ID NO: 57295 - DNA, 50 bp, Enterococcus faecalis; identical to SEQ ID NO: 57275
  source 1..50: mol_type = genomic DNA

SEQ ID NO: 57296 - protein, 449 aa, Enterococcus faecalis
MLKRAALYIRVSTDQQAKHGDSLDAQIATLKDYVSTQDNLTIIDTYIDDGISGQKLYRDEFQRLLEDIKKNRIDIILFTKLDRWFRNLRHYLNIQEILDNSGVTWLAVSQPFFNTDTAYGRSFVNQSMSFAELEAQMASERIKAVFENKIRKGEVVTGSVPFGYKICDKKLIPNENAPIAKDIFKHYSIHNSIRLTVEYLFNEYDITRSSRTIKHMLRNRKYIGEVSGNKNYCPPIVDKETFEKVQNLLDKNISSIAKRTYIFSGLVVCSCCGKKMTGRYRKRKYIKKDGTVMYYTKKVYRCNGNAYKRNKCPNKINIAEEILEEYLLNNIKADAENFEAKQKKIAVSAPEKNNNSKILKKIERLKKAYLNEVISLDEYKKDRKELEQMIVQVKPKETIVFKSNWFNKNIESTYHDFDEEEKRFVWRSVLKNLIVDPHGKITINFLTKN

SEQ ID NO: 57297 - DNA, 50 bp, Enterococcus faecalis
  source 1..50: mol_type = genomic DNA
ttagccacttttaggaactgtcctactggatatttccatttagcgcaaac

SEQ ID NO: 57298 - DNA, 40 bp, Enterococcus faecalis; identical to SEQ ID NO: 57273
  source 1..40: mol_type = genomic DNA

SEQ ID NO: 57299 - DNA, 40 bp, Enterococcus faecalis; identical to SEQ ID NO: 57274
  source 1..40: mol_type = genomic DNA

SEQ ID NO: 57300 - DNA, 50 bp, Enterococcus faecalis; identical to SEQ ID NO: 57275
  source 1..50: mol_type = genomic DNA

SEQ ID NO: 57301 - protein, 531 aa, Thermoclostridium stercorarium
MYCIYLRKSRADAEAEARGEGETLARHEKALLELAKKLNITVEKIYREIVSGETIASRPVVQELLSDVEQGFWKGVLVMEVERLARGDTIDQGIVAQTFKYSGTKIITPTKIYDPNNEFDEEYFEFGLFMSRREYKTINRRLQRGRLQSVKEGKYVGNKPPYGYIRKKLPNDKGYTLEPHPEQAEIVKLIFDLYTGPNRIGVSKIVRKLNEMKIPTITGGPWIPSTVQGILRNPVYIGKIRWNSRPQRKRMVNGQLVKERPRAKDNIVIVDGIHEPLISVETWELAQKYLSEHKEVPAPKRYQVKNPLAGLVICGKCGRKMIRRPYTNGQPDTLMCPVTACDNISSYLYVVEDMTLEALKKQLDEYKLEVKNILKNNSEYYKEIEILQKSISNLDKEFETLNKQSNSLHDLLEQGVYSVDTFLERSKIISEKKEANRKERAQLEEKLKEYEKYTNAQKNFIPKTESLIKVYKMIEDPADKNKMLKEVIEKITYLKTDNGRWNSNPEIQLKIYPKLPKINKSLITSSVLKNL

SEQ ID NO: 57302 - DNA, 50 bp, Thermoclostridium stercorarium
  source 1..50: mol_type = genomic DNA
attgataacatcatcggtactgaagaacttggtgccattaggttatcagt

SEQ ID NO: 57303 - DNA, 40 bp, Thermoclostridium stercorarium; identical to SEQ ID NO: 57053
  source 1..40: mol_type = genomic DNA

SEQ ID NO: 57304 - DNA, 40 bp, Thermoclostridium stercorarium
  source 1..40: mol_type = genomic DNA
gaatgacatcggtactgaacaacttgctcatcttgaaatg

SEQ ID NO: 57305 - DNA, 50 bp, Thermoclostridium stercorarium
  source 1..50: mol_type = genomic DNA
attcaaaattatataggtcctgtacaacttagtgtcagtaagttgtcaga

SEQ ID NO: 57306 - protein, 514 aa, Vibrio parahaemolyticus
MKAYIYSRISSAIQKKGHGLDRQQDIALTYATQLGFDISEEVLQDVASGYHGKQMEGRLGVFLEGIKRGKIESPAALIVESLDRLGREHTMDALPRFIDIVNHGVEIHEVSTGIVYNREETHKIHIAIAIMERAHNESLMKSKRARAAANKRLQRAQQGENVVINVNLPCWIRSQDGKLELVPEYAVVIRRIFELYLEGKGSNKVAQILREENHPYFTSNIHSKKIRSRVWTDQRVMDIIKKDSTCGVFRSTANPDTVIDGYYPAAIDKATFERAQVLRMSRVRTAKKSKKGLNILSGLLRCGHCGSSLQYTRSYSNKKKTRMYENLRCRDRAARMNCDSRSVPLRPLEKLVLGWVGTIPLFDIKAASNDELEQKKAELTQLEQQAENLVELLATGLTRVKDKYLQLEQQIDSVKKEISSLSVTNSSSVDKIDYFQAIDLENEEYREQVQQELALIIDRVSVKCDGEDAEIDIFLNSKIHNHQRFIGKKKQLDKARQTIRTLRPCAAHVDSFVD

SEQ ID NO: 57307 - DNA, 50 bp, Vibrio parahaemolyticus
  source 1..50: mol_type = genomic DNA
tacagtggtttacaatggaacagcacgctgttagcatgtataccacagtt

SEQ ID NO: 57308 - DNA, 40 bp, Vibrio parahaemolyticus; identical to SEQ ID NO: 34653
  source 1..40: mol_type = genomic DNA

SEQ ID NO: 57309 - DNA, 40 bp, Vibrio parahaemolyticus
  source 1..40: mol_type = genomic DNA
gaaagtgcactaccacggcctgcttatcgatggcactgtt

SEQ ID NO: 57310 - DNA, 50 bp, Vibrio parahaemolyticus
  source 1..50: mol_type = genomic DNA
catagtgctttttgaaggaattgcctgctgttagcattgactcaactatt

SEQ ID NO: 57311 - protein, 585 aa, Duganella pernnla
MPVAYSYIRFSTVEQIKGDSLRRQTTASAQYAAANGLELDSSLNAQDLGVSAFSGANFESGALGKFITAIDEGRVARGSYLLVESLDRLSRLPVPDALAIFQAIIGRGVVIVTLTDMAVYSQERLKTDWTPLLIALVSMSRAHEESAVKSQRVKAAWDAKKERVKKNKEVMSTRCPWWLKPSDDKTKYEIIEANAETVRLMYALSKDGMGSWSISRYLNALEIPTPQHSQRWQNSTVQFNLRNIATIGILQMDQDHNGRTTTNTFVEGYYPPIIDKTLFYEVQAGKAERRRLPASGGGRAGQCHNIFKGTAKCGYCGSPMHIRRKPGINTGFLYCAKSLQSASCVGVSYNVRQLEAEFINFTRELDLKQVLGDGAGKGSVQAKKSELAACAGELEATEAKFNNLLKAVELGGDVSMLVQRMREMEYATVELRKRNHALKAELESLINVEQIESSSYENMNALMEQLESKSTGLDEKLRLRFRMLTEVQRIVKRLDLFPGGLWHSIDKLDAMAAGLREAGYDEERIEDYISSLPTKPNRDERYFVASMRNGMFRMVKAGDVIEVDTEWTSKALELLKTRREFANEQ

SEQ ID NO: 57312 - DNA, 50 bp, Duganella pernnla
  source 1..50: mol_type = genomic DNA
gggtgtcaaattaaccaaaacatcaagatcttttggttaatttgacaccc

SEQ ID NO: 57313 - DNA, 40 bp, Duganella pernnla
  source 1..40: mol_type = genomic DNA
atactatgcccatccgcgcaacttgctgtggccgatattg

SEQ ID NO: 57314 - DNA, 40 bp, Duganella pernnla
  source 1..40: mol_type = genomic DNA
atactatgcccatccgcgcagcttgctgtggccgatattg

SEQ ID NO: 57315 - DNA, 50 bp, Duganella pernnla
  source 1..50: mol_type = genomic DNA
gaatcataatcctccctaaacatcagaatcacttgggaagcttcacaccc

SEQ ID NO: 57316 - protein, 456 aa, Gordonia sp YC-JH1
MQAVIYARISKDRTGAGLGVNRQVEDCERLAATLGWNVVETYSDNDVSAYSGRRRPSYDRMLKDLASGRASAILAWHADRLHRRPVELEDFITFCEEHRIEIRTVNAGDFDLSTASGKMVARMLGAAARHEVEHSIERQKRAKAEAAEHGKYRGGRRPFGWDSDGMTLNHVEAQSIQRAANELLAGRSLRSIVKEWNESGLRTSFGNKEFNTLTAKKILLRPRNAGYALHEGRRIHSGQWEHILDVDTFTALEALITDPARGRSIAFERRWQGSGVYVCGRCSDTMLVSQTKGVHYYRCASGPHLTRVADQLDALVSSLAVERLADANLTSGADDGVDVDGLRTRREALQIRLDELATMFADGTVSGQQLQVGSKRLRADLAAVEAEIAAAQQTSVMANMALTEGDIEERWEGLSPDLRGKVIAALMTVTVLPAPKGRRPGGGYFDPDCVQIDWLS

SEQ ID NO: 57317 - DNA, 50 bp, Gordonia sp YC-JH1
  source 1..50: mol_type = genomic DNA
acaggggcaacttaacctttgcgttggcacaaagtcaagtactacagtgt

SEQ ID NO: 57318 - DNA, 40 bp, Gordonia sp YC-JH1
  source 1..40: mol_type = genomic DNA
tcggggtcgatgtacgacttggcgttggctttggcggtgc

SEQ ID NO: 57319 - DNA, 40 bp, Gordonia sp YC-JH1
  source 1..40: mol_type = genomic DNA
tcggggtcgatgtacgactgggcgttggctttggcggtgc

SEQ ID NO: 57320 - DNA, 50 bp, Gordonia sp YC-JH1
  source 1..50: mol_type = genomic DNA
acagagacatgcacagcattatgtgggcacaaagttattacctggagtgc

SEQ ID NO: 57321 - protein, 558 aa, Brevibacterium casei
MTIVDDASAVNSLVAPNPPGEAIAVSYLRVSTKEQAEKGGTDEGYSIPAQREANQRKAEQMGATIVEEFVDAGESARKADRPDLMRMIKYVATHKVNYCIVHKVDRLARNRADDVAIHLALRDAGVMLVSASENIDETPSGMLLHGIMSTIAEFYSRNLATETVKGLSQKAARGGTIGKAPLGYRNVGVRDENGREVRTVEIDPERAKLVAWAFMVYASGEWTTSQLHEELTARGLRTPATPRRPSRPIGKSSIQRMLTNPYYKGDVRYQGVTYKGTHEPFVPPEVWYQVQTVLQSHRTAADASRVHDHYLKGTVFCGQCGSRLLVCNAKSSTGNIYPYFVCADRHARRGDCTRQAMLIEEVERLVERHYEKVQISGETRHAVGAHLHAKFDALMASESDALSDLTKERARLEEEQGKLLQAHYAGAIPLDLLKKEQDRISGGLETIKNRIDAHHDEYATARDNLDDSLNLLEHAVDIYARCDDANRRRCNQAFFTAIYIEEEGEVRAGYARPFDALTSREVQADALTWADNARNENEVRTPPEDGSSGESSHLAHLG

SEQ ID NO: 57322 - DNA, 50 bp, Brevibacterium casei
  source 1..50: mol_type = genomic DNA
aagttcacacctcgcacatttggggtccctgagtagtacgttcggcaact

SEQ ID NO: 57323 - DNA, 40 bp, Brevibacterium casei; identical to SEQ ID NO: 29003
  source 1..40: mol_type = genomic DNA

SEQ ID NO: 57324 - DNA, 40 bp, Brevibacterium casei
  source 1..40: mol_type = genomic DNA
gcggggcttctcgatcggggagagtaacgggacttgaacc

SEQ ID NO: 57325 - DNA, 50 bp, Brevibacterium casei
  source 1..50: mol_type = genomic DNA
aacctcaacatgtgcacatttggggaccacaagtaagtagttcgtaaact

SEQ ID NO: 57326 - protein, 473 aa, Mycobacteroides abscessus
MAKKIPAVRSAAVYARISADVEGKSLGVQRQLEDCRKLAAERGWVVGREYVDNDVSAYSGKSRAGYEAMCTDLAAGVRDAVIVYNLDRLHRRPVELEEFVALCEAAGVNQVATVTADIDLGNDDGLFMARIFAAFAAKESGRKSARMRRKYEQKAAQGLPHGPNRPFGYEEDKITIREAEADVVRELVTRVIAGESLNSLTVWLNESGAKPVRGARWASTAVRGIVSSPRIAGLRAYKGEVVGDAAWPAIISVAERDQVLAALAVRAWNRKRSPRKYLLSGLCRCGRCQARMFSAARLEAGAHKRRYVCSSSPDHGGCGRMTVVAEPLEKLITDAVLTRLDSKALADALAGKARANPDTAALSAQVEAAQARLDELTGLYSSGAISAREWIMARDPITDTIARLRREIAETVDTGPLAELAGQGSVLRGQWDDLGLDRCHAIIRTVIDHVVIKPGQPGARGLDMNRIDPVWRI

SEQ ID NO: 57327 - DNA, 50 bp, Mycobacteroides abscessus; identical to SEQ ID NO: 35842
  source 1..50: mol_type = genomic DNA

SEQ ID NO: 57328 - DNA, 40 bp, Mycobacteroides abscessus; identical to SEQ ID NO: 28128
  source 1..40: mol_type = genomic DNA

SEQ ID NO: 57329 - DNA, 40 bp, Mycobacteroides abscessus
  source 1..40: mol_type = genomic DNA
tgcgcaggcgaaggtgagggtgtcgatgtcggtgggtccg

SEQ ID NO: 57330 - DNA, 50 bp, Mycobacteroides abscessus
  source 1..50: mol_type = genomic DNA
aagtgagttagctcagatggtggggttctgattgtttaattccctgacct

SEQ ID NO: 57331 - protein, 523 aa, Blautia producta
MTSMKLRVAIYCRLSEEDRNKQNENDDSNSIQNQKSMLIQYALEQGWEIYNIYSDDDYTGADRKRPEFNKLLDDAEHKKFDVVLCKTQSRFTRELELVEKYIHGLFPLWGIRFISIVDNADTANKGNKKSRQINGLVNEWYLEDMSENIKSVLTDRRKNGFHIGAFALYGYKKDPEQKGHLIIDEEAAAVVREVFTLFSQGYGKTAIARMLNDRGIPNPTEYKRLHGLRYQQPKTKNSTLWKYFAISDMLINEIYIGNMVQGKYGSVSYKTKQNKPRPKDEWYSVEGTHEPIIDRELWDSVQELIAQKAKPFTIGTIGLFARKARCMSCGYTMRSSKTSDGRHYLGCSNRHVAKDACEGSFISVKRLEQTVIAELNKLSQEYLDKDELEQKVEFNTNLKEKKDSLESEIGAYQKKIAEYAKGIRELYLDKVKGILSENDYLDLSKDFTKEKERLEKLVIEKQKQLAVIERKMQAGDNRRQLIEQYTNLEHLDRETVEKLIDYILVGKRIPGTREVPIEIHWNF

SEQ ID NO: 57332 - DNA, 50 bp, Blautia producta
  source 1..50: mol_type = genomic DNA
tgttgttcttacacaatcgccccagatggtgcgaccttataagaacaaca

SEQ ID NO: 57333 - DNA, 40 bp, Blautia producta
  source 1..40: mol_type = genomic DNA
atttgaggatatggcagcagagcagaaagcgcgtaccacc

SEQ ID NO: 57334 - DNA, 40 bp, Blautia producta
  source 1..40: mol_type = genomic DNA
atttgaggatatggcagcaaagcagaaagcgcgtaccacc

SEQ ID NO: 57335 - DNA, 50 bp, Blautia producta
  source 1..50: mol_type = genomic DNA
tgttcttctgtattaatagccccaaatcctgggagcatttgagaactgtt

SEQ ID NO: 57336 - protein, 518 aa, Schinkia azotoformans
MTLTANKIKKVAIYSRKSRPDETEEVLQRQLAFLIDKCVENNWEFEVFQEVGSSQSIDEKVRPELNKMLEKVQSYHYDAIVVTDQDRLSRNTAGFSQIKEILTNYGVQVVTSSKIYDYNTQEDDLMSDMQSIVAKQEYLNIKKRLVRGKRQSAKEGNWVGGKTPVGYSYDHKTKKLVPDENAPVIKRIYDLYLSGKSSTDIERILDLEGTLTPTGSKWNKARISVVLSNPVYKGTVVYGKTKVSKVEKKPSGSPKQFKTDESNQIIIENAHEPIIAPEDWENAKAIREGRLTKPPSARIGKVIFTGLIKCAICGRTHSFQRRKGKELRITSCQTRYYDEDGINYTVCKNKGVRLDHFEQVFFAKFSQFVNQLELYLEDIKKNIKKDETNPADEKAILTANIKKIDASIKRVQKGFIAEIYTEEEAQKEIKQLKAQKEYLEEQIKRLDTKTKDEKLDELQAVLDKLKQLLEGTSDLETKEINHLLTSLIDHIEYKRVGDHKAEIEMKIHYKGQSGEQAS

SEQ ID NO: 57337 - DNA, 50 bp, Schinkia azotoformans
  source 1..50: mol_type = genomic DNA
ggtagcattttagaagtgatctatttatatattgaaaccaaaatgcaacc

SEQ ID NO: 57338 - DNA, 40 bp, Schinkia azotoformans
  source 1..40: mol_type = genomic DNA
tgtcgcatccttggtcagcttatacaccattgtagcgatc

SEQ ID NO: 57339 - DNA, 40 bp, Schinkia azotoformans
  source 1..40: mol_type = genomic DNA
tgtcgcatccttggtcagcgaatacaccattgtagcgatc

SEQ ID NO: 57340 - DNA, 50 bp, Schinkia azotoformans
  source 1..50: mol_type = genomic DNA
gttacagtttggctaatgagttatgaatatattgtaactgaaataaaacc

SEQ ID NO: 57341 - protein, 523 aa, Mobiluncus mulieris; identical to SEQ ID NO: 27986

SEQ ID NO: 57342 - DNA, 50 bp, Mobiluncus mulieris
  source 1..50: mol_type = genomic DNA
cttatcattttcgacgtccaagtggatacttagacgtcgaaaatgataaa

SEQ ID NO: 57343 - DNA, 40 bp, Mobiluncus mulieris
  source 1..40: mol_type = genomic DNA
ttgacctggggttttagtggagcgggcgacgggaatcgaa

SEQ ID NO: 57344 - DNA, 40 bp, Mobiluncus mulieris
  source 1..40: mol_type = genomic DNA
ttgacctggggttttagtgacgcgggcgacgggaatcgaa

SEQ ID NO: 57345 - DNA, 50 bp, Mobiluncus mulieris; identical to SEQ ID NO: 27110
  source 1..50: mol_type = genomic DNA

SEQ ID NO: 57346 - protein, 523 aa, Mobiluncus curtisii; identical to SEQ ID NO: 27986

SEQ ID NO: 57347 - DNA, 50 bp, Mobiluncus curtisii; identical to SEQ ID NO: 57342
  source 1..50: mol_type = genomic DNA

SEQ ID NO: 57348 - DNA, 40 bp, Mobiluncus curtisii; identical to SEQ ID NO: 6558
  source 1..40: mol_type = genomic DNA

SEQ ID NO: 57349 - DNA, 40 bp, Mobiluncus curtisii
  source 1..40: mol_type = genomic DNA
gcccggcttttagtcaatgacgcgggcgacgggaatcgaa

SEQ ID NO: 57350 - DNA, 50 bp, Mobiluncus curtisii; identical to SEQ ID NO: 27110
  source 1..50: mol_type = genomic DNA

SEQ ID NO: 57351 - protein, 561 aa, Intestinimonas butyriciproducens
MTDPVLTVAPLKEETEMLRATEKITALYCRLSQEDANEGESYSISNQKNILMKYAKEHRFPHPVFFVDDGYSGTSFDRPGFQNMLDEIEAGRVGVVIVKDLSRFGRNSAMTGMYINITFAKHEVRFIAINDNFDTIDPNSVDNDFAGIKNWFNEFYARDTSRKIRAVNKAKGERGEPLTTNIPYGYKKDPDTPKGWLVDEEASQVVKYIFTLCMEGRGPMQIAKALTEEKVLNPTAYKHQQGRKTPNKESADPFHWSTNTVVNILERREYTGCTVNFKTYTNSIWDKKQRDNPEEKQAVFYNTHPAIIEPEVFDKVQEMRQQRHRRTKTGKSSMFSGLVYCADCGAKMRYCTTSYFEKRQDHFVCANYRSNTGSCSAHFIRAVVLEELVWMHMREVISYVTHYEAHFRSVMEERLKLATSEAIKVRRKKLVKAEKRLDELDRLFIRLYEDNVGGKVSDERFAMMSKTYEDEQAALKNEVQALRREIEMQERQTDDLEQFIQRAHKYTELDELTPYALRELVKGIYIEAPDKSSGKRRQGIRIAYDLIGFIPLSELEKEETA

SEQ ID NO: 57352 - DNA, 50 bp, Intestinimonas butyriciproducens
  source 1..50: mol_type = genomic DNA
ttactttcttatgacaccccgccattcgccgggtgcccataagacagtaa

SEQ ID NO: 57353 - DNA, 40 bp, Intestinimonas butyriciproducens; identical to SEQ ID NO: 57173
  source 1..40: mol_type = genomic DNA

SEQ ID NO: 57354 - DNA, 40 bp, Intestinimonas butyriciproducens
  source 1..40: mol_type = genomic DNA
gagaaaggggcgatgccggccgcggcggcgccccttttaa

SEQ ID NO: 57355 - DNA, 50 bp, Intestinimonas butyriciproducens
  source 1..50: mol_type = genomic DNA
ttacattttaacaggacctctccacccactgtgtgaagaacaaacagtaa

SEQ ID NO: 57356 - protein, 572 aa, Agathobaculum butyriciproducens; identical to SEQ ID NO: 28851

SEQ ID NO: 57357 - DNA, 50 bp, Agathobaculum butyriciproducens
  source 1..50: mol_type = genomic DNA
ttactgttttacggccaccgtgcattggatgggtggtcataaaacagtaa

SEQ ID NO: 57358 - DNA, 40 bp, Agathobaculum butyriciproducens
  source 1..40: mol_type = genomic DNA
caaaatgcaagccgcccggttttccgggcggctttttttg

SEQ ID NO: 57359 - DNA, 40 bp, Agathobaculum butyriciproducens
  source 1..40: mol_type = genomic DNA
caaaatgcaagccgcccggacttccgggcggctttttttg

SEQ ID NO: 57360 - DNA, 50 bp, Agathobaculum butyriciproducens
  source 1..50: mol_type = genomic DNA
ttaatatttctgttcctccatgcaactgatgtttgttttttaaagggtaa

SEQ ID NO: 57361 - protein, 463 aa, Mycobacterium intracellulare
MLLMHCAVYLRQSQDKANDERAVSRQREDCLKLCEARGWTPVEYLDNDISASKGVRPAYQRMLADIRDGKIQAVVAWHLDRLHRRPVELEDFIALADEKRLALATVTGDVDLSTDNGRLIARITGAVARAEVERKSARQKRAALQRAEQGRAHSGGRRAFGYEGDKKTVNEEEAALVRSAYNAVMDGEGLSTITRRWNDAGITTTTGGRWHSVTLRHVLLNPRHAGLRSYQGELLKGVDAEGVRATEWDAIVDEDVWRAVHGILTQPSRRNNFTTGRKYLLTGIAVCGICDAPMSSNIKRGYTIYACKQCYGCSRRQDAVDRLVIDLVLGFLSRADAAELLVDQHAEGLDALRRRERALMDRLDRLALDYAEEVLDRRAYQVARKHVESKLAEVTEKMRGGDRHRLLEDLVKAKNPRKVWESKSLDKQRAIIRTLMRPRVLPAGRGRRFTHDQLVPGWLTGEE

SEQ ID NO: 57362 - DNA, 50 bp, Mycobacterium intracellulare
  source 1..50: mol_type = genomic DNA
gagggtgttttgttaatagtgatactacccactacacagataagatgctt

SEQ ID NO: 57363 - DNA, 40 bp, Mycobacterium intracellulare; identical to SEQ ID NO: 56883
  source 1..40: mol_type = genomic DNA

SEQ ID NO: 57364 - DNA, 40 bp, Mycobacterium intracellulare
  source 1..40: mol_type = genomic DNA
cgacagatcgatgttcacggcgcccactacgcatacccct

SEQ ID NO: 57365 - DNA, 50 bp, Mycobacterium intracellulare
  source 1..50: mol_type = genomic DNA
tattgtgttctattaatagtcaaagcaacaactaaacccagaagataatt

SEQ ID NO: 57366 - protein, 583 aa, Enterocloster bolteae
MTQTQIHATISPCTPILSADPTVKEDAMLDQQKITILYCRLSNEDALDGESNSIQNQKEFLTRYAAEHGYTNLKILVDDGYTGTNFDRPGVQEGFALVKQGLVGCWLVKDLSRFGRDYLTVGQYTDIIFPSYDVRFIAVNDGVDSERGDSDGFAAIRNLFNEWYPRDTSKKVRVVFRQKGTSGKHLGKPPYGYRTDPADKDHWIIDEDAAPVVKRIFDFAIDGKGPEQIARILEQDKVLTTKALYAKQSENHPDPKKRKKMPERPYHWIGQSVAGILERMEYTGCTCNFKTYSKSYKLKKRIPNAIEDMCIFPDTQEAIVSQAQWDRVQELRKNKRRPTKAERQGLFSGLLFCPDCGNKLHFATCKSFDGKQDHYVCSSYKSGRGTCSAHYIREDVLRELVLERIRAVNAYIRQDVEGFQEEWLQCRRSDQERNIREDRKRVEQAKKRLADLDVLLSRLYEDFVLGDLNKERYKKMTADYEAEQERLKLEIEVTEEWLETRETMSADVDAFVALTQKYVDVPELTPTIVNEYIKKIEVFAPDKSSGKRVQKVKIYFNFVDDVEIPVISEPVVAKSTPGRRKTA

SEQ ID NO: 57367 - DNA, 50 bp, Enterocloster bolteae; identical to SEQ ID NO: 10157
  source 1..50: mol_type = genomic DNA

SEQ ID NO: 57368 - DNA, 40 bp, Enterocloster bolteae
  source 1..40: mol_type = genomic DNA
ttgtaacacctgcaatgccttcccgtaaaggactttatag

SEQ ID NO: 57369 - DNA, 40 bp, Enterocloster bolteae
  source 1..40: mol_type = genomic DNA
ttgtaacacctgcaatgccaacccgtaaaggactttatag

SEQ ID NO: 57370 - DNA, 50 bp, Enterocloster bolteae
  source 1..50: mol_type = genomic DNA
atagtacatttgtaattttgagccaatgtttaacatttggaagaaatcaa

SEQ ID NO: 57371 - protein, 484 aa, Bacillus anthracis
MKILKYAVYVRVSTDRDEQVSSVENQIDICRYWLEKNGYEWDPNAVYFDDGISGTAWLERHAMQLILEKARRNELDTVVFKSIHRLARDLRDALEIKEILIGHGIRLVTIEENYDSLYEGGNDIKFEMFAMFAAQLPKTISVSVSAAMQAKARRGEFIGKPGLGYDVIDKKLVINEKEAEIVREIFDLSYKGYGFKKIANILNDKGTYTKFGQLWSHTTVGKILKNQTYKGNLVLNSYKTVKVDGKKKRVYTPKERLTIIEDHYPAIVSKELWNAVNSDRASKKKTKQDTRNEFRGMMFCKHCGEPITAKYSGRYAKGSKKEWVYMKCSNYIRFNRCVNFDPAHYDDIREAIIYGLKQQEKELEIHFNPKMHQKRNDKSTEIKKQIKLLKVKKEKLIDLYVEGLIDKEMFSKRDLNFENEIKEQELALLKLTDQNKRNKEEKKIKEAFSMLDEEKDMHEVFKTLIKKITLSKDKYIDIEYTFSL

SEQ ID NO: 57372 - DNA, 50 bp, Bacillus anthracis
  source 1..50: mol_type = genomic DNA
agttggttattagttaccgtgacatttatcacggtacccaataaccaatg

SEQ ID NO: 57373 - DNA, 40 bp, Bacillus anthracis; identical to SEQ ID NO: 21638
  source 1..40: mol_type = genomic DNA

SEQ ID NO: 57374 - DNA, 40 bp, Bacillus anthracis
  source 1..40: mol_type = genomic DNA
gataggtgtaactgtcgtgtgtgtaacggtacttccaaca

SEQ ID NO: 57375 - DNA, 50 bp, Bacillus anthracis
  source 1..50: mol_type = genomic DNA
agttggttcacctttacctttccatgaagcccgctatggtgtaagcaata

SEQ ID NO: 57376 - protein, 558 aa, Fusicatenibacter saccharivorans
MLQTDKITALYCRLSQEDMQAGESESIQNQKLILQKYADEHHFFNTRFFVDDGFSGVSFEREGLQAMLHEVEAGNVATVITKDLSRLGRNYLKTGELIEIIFPEYEVRYIAINDGVDTAREDNEFTPLRNWFNEFYARDTSKKIRAVKQAKAQKGERVNGQVPYGYIADPNDRNHLLPDPETAHIVKQIFAMYVRGDRICEIQNWLREHEVLTVAELQYRRTGSHRHPRPHPNCIYNWPDKTLYDILARKEYLGHTITGKSYKVSYKSKKTKKNPEEKRYFFPNTHEPLIDEETFELAQKRIATKHRPTKVDEIDLFSGLLFCGDCGYKMYLQQGAGTLERKHAYTCGKYRNRIRTGELCTTHYIRKSVLKELVLADLQRVLSYVKEHEQEFIETANECSAKAVQKTLTQQRKELDKAQSRISELNILFRKLYEDNALGKLSDEQFAFLTSGYDEEKKTLTRRIAELSQEIDNATERSADVKRFVALVRKYTAITELTYENVHEFVDRILIHELDKETNTRKIEIFYSFVGRVDTGDKPTESISYFRQIGADVKSYAI

SEQ ID NO: 57377 - DNA, 50 bp, Fusicatenibacter saccharivorans; identical to SEQ ID NO: 38647
  source 1..50: mol_type = genomic DNA

SEQ ID NO: 57378 - DNA, 40 bp, Fusicatenibacter saccharivorans
  source 1..40: mol_type = genomic DNA
ttgaaatccgggtctttgaaagttcgcaccggaataaccg

SEQ ID NO: 57379 - DNA, 40 bp, Fusicatenibacter saccharivorans
  source 1..40: mol_type = genomic DNA
ttgaaatccgggtctttgagggttcgcaccggaataaccg

SEQ ID NO: 57380 - DNA, 50 bp, Fusicatenibacter saccharivorans
  source 1..50: mol_type = genomic DNA
aggttaggttatgctacctattcaggagcttaggctttagtaaaatagtt

SEQ ID NO: 57381 - protein, 558 aa, Schaedlerella arabinosiphila
MLQTDKITALYCRLSQEDMQAGESESIQNQKLILQKYADEHHFFNTRFFVDDGFSGVSFEREGLQAMLHEVEAGNVATVITKDLSRLGRNYLKTGELIEIVFPEYEVRYIAINDGVDTAREDNEFTPLRNWFNEFYARDTSKKIRAVKQAKAQKGERVNGEVPYGYIADPNDRNHLLPDPETAHIVKQIFAMYVRGDRICEIQNWLREHEVLTVSELRYRRSGSCRHPRPHPTCIYNWPDKTLYDILGRKEYLGHTITGKSYKVSYKSKKTKKNPEEKQYFFPNTHEPLIDEETFELAQKRIATKHRPTKVDEIDIFSGLLFCGDCGYKMYLQQGAGTLERKHAYTCGKYRNRIRTGELCTTHYIRKSVLKELVLADLQRVLSYVKEHEQEFIETANECSAKAVQKTLTQQRKELDKAQSRISELNILFRKLYEDNALGKLSDEQFAFLTSGYDEEKKTLTRRIAELSQEIDNATERSADVKRFVALVRRYTTITELTYENVHEFIDRILIHELDKETNTRKIEIFYSFVGRVDTGDKPTESISYFRQIGADVKSYAI

SEQ ID NO: 57382 - DNA, 50 bp, Schaedlerella arabinosiphila; identical to SEQ ID NO: 77
  source 1..50: mol_type = genomic DNA

SEQ ID NO: 57383 - DNA, 40 bp, Schaedlerella arabinosiphila
  source 1..40: mol_type = genomic DNA
tttaaaaccggggcggtcaaagatatagccggaaacaccg

SEQ ID NO: 57384 - DNA, 40 bp, Schaedlerella arabinosiphila
  source 1..40: mol_type = genomic DNA
tttaaaaccggggcggtcagggatatagccggaaacaccg

SEQ ID NO: 57385 - DNA, 50 bp, Schaedlerella arabinosiphila; identical to SEQ ID NO: 57380
  source 1..50: mol_type = genomic DNA

SEQ ID NO: 57386 - protein, 558 aa, Lachnospiraceae bacterium oral taxon 082; identical to SEQ ID NO: 11316

SEQ ID NO: 57387 - DNA, 50 bp, Lachnospiraceae bacterium oral taxon 082; identical to SEQ ID NO: 77
  source 1..50: mol_type = genomic DNA

SEQ ID NO: 57388 - DNA, 40 bp, Lachnospiraceae bacterium oral taxon 082
  source 1..40: mol_type = genomic DNA
cccattaagcggctcatataatatccaacccagcttgtag

SEQ ID NO: 57389 - DNA, 40 bp, Lachnospiraceae bacterium oral taxon 082
  source 1..40: mol_type = genomic DNA
cccattaagcggctcatatggtatccaacccagcttgtag

SEQ ID NO: 57390 - DNA, 50 bp, Lachnospiraceae bacterium oral taxon 082; identical to SEQ ID NO: 57380
  source 1..50: mol_type = genomic DNA

SEQ ID NO: 57391 - protein, 579 aa, Nocardia salmonicida
MTRSKAKTQVEPAWLADINAALAVAVADVDPAQWVYGYVRISRDEKDRAEGMHLQAKNQVKLAKRKNLPLARIWCDNDMSGADLDRPALREVLGLVTGGPAKVVLTRDVARLTRDYDLGNELMKLGRDEGVRYCFVNATDYDLTTGAGRKNFMVAVAEAVEYREVNTENLLERMSEEAAKGVMQGGSRRFGYGKVAGTHPITGAEILDRCALRDEEVEVLREGRDRLINGETQTAIVTDWNARGVTTAEGELWGVGRLAKQLLLEAYVAYDQGEHTDANGDRCECLNNPEGNGIRFHERSGTRHRGQWPAIFTRAEHDAMRAAVTAHRRSKNPERPRQRNAFYWLTGLAECGGTWREGTDRAGQYCGGWLVGSALERTRKSGPPVIQRRYGCRSKDARKVVCACGRVFRDADALETFVAQAVIAEYENPEILARLDRGNDNAEQIAALQKRIETTAGNLDAEADRRTEVLSGVGDEFDLRVIDRTITGLKASLKILRAEQDSLRSSQALAVLADIGSTPGELRKAWATKGSRWRHEAAARVIEKVIVRPANIYAARWEDQNGRVWRFDPSSVEILWRQL

SEQ ID NO: 57392 - DNA, 50 bp, Nocardia salmonicida
  source 1..50: mol_type = genomic DNA
agagtgtgtaaccaacatctcactcccgaaaggtacccgttatgcactcc

SEQ ID NO: 57393 - DNA, 40 bp, Nocardia salmonicida
  source 1..40: mol_type = genomic DNA
caggtattcgacactgacgcccgcgagcatcgcgacctcc

SEQ ID NO: 57394 - DNA, 40 bp, Nocardia salmonicida
  source 1..40: mol_type = genomic DNA
caggtattcgacactgacggccgcgagcatcgcgacctcc

SEQ ID NO: 57395 - DNA, 50 bp, Nocardia salmonicida
  source 1..50: mol_type = genomic DNA
agagtttgcctataaaatcacacagccgaggcgtacagcataggcacttc

SEQ ID NO: 57396 - protein, 523 aa, Klebsiella pneumoniae
MRQVITYLRFSSKPQERGDSIRRQKGLFERWLKDNPDAKVVDEFSDEGASAYHGHHLKGDFGRMLQNIQDGKYLSGQTVLLVESETRLNRQKARNTENLVDLITGKGVDVICLESGKIYTSTNIDDLDTSIQLKIAAHIAHQQSKEKSIKVSAAWEHRAQLALEGKQQLTKNVPGWIDPDTRKLNEHSSTVVTIFDLLLSGESLHNIARYLQANNIKSFSRREKANGFSVHSVRTILRSESTVGTLAASKRNDRPAIPNYYEPAIDVATFNKAQEILSKNRVGRAPASDNPITINLFKGIIRCQCGASVHPTGVKATYQGVYRCNNVPDGRCNVPTIKRKPFDKWMLDNIISFLERSDGNNTDKRKAEIEYQISLVTSKLKKAATLLLELDDVTELKEQVKELNIQRINMQSELDDLNQRETLSDKPLHHLSEIDLTTKAGRVEAQLILSKFVQSIELQREMIIITLRNGAVIGKSRDLSPALSQDLMKQVVSSSSPRDIDMFSVITSDEEFRKSGKPVTKRS

SEQ ID NO: 57397 - DNA, 50 bp, Klebsiella pneumoniae
  source 1..50: mol_type = genomic DNA
aacccgaatagcctatatccaagggtcattgtatttgagctattcggcga

SEQ ID NO: 57398 - DNA, 40 bp, Klebsiella pneumoniae; identical to SEQ ID NO: 54543
  source 1..40: mol_type = genomic DNA

SEQ ID NO: 57399 - DNA, 40 bp, Klebsiella pneumoniae
  source 1..40: mol_type = genomic DNA
gcggcgaggtaaatcaagggacattgcgctcatagtcgtt

SEQ ID NO: 57400 - DNA, 50 bp, Klebsiella pneumoniae
  source 1..50: mol_type = genomic DNA
aacccaaataccttatatcaaaaggacatacaattgaaaagatactgcca

SEQ ID NO: 57401 - protein, 520 aa, Klebsiella michiganensis
MELLVQYVRWSTSEQDSGDSLRRQNSMFDNFYKKHSHKFYTSPTHRYVDKGKSGFHQKHKADGEFKRMFDNVMNGTIKAGSVIACEGFDRMSRADNDDAVEDVRQILHKGVEIITLSDNETYDKSSLSDPFKLIKHILIAQRAHEESLVKQQRTLEVWSAKTKEAKLSKKPLGKQAPGWLELNEERTAFYIIPDKAELVRDIFKKRLSGMSMFAVTKWLNESGKPPINDRKVRISKTAKPGGGNWSALSVKCLLTSRATLGYLPAKISKEDYKTVLREEIPDYYPRIVDDQTFYAVQQLLSETGKGRITKGEHWLYTNIFRTIIRCACGLTMQPSGIRKPNYQGTYRCNGMSEKRCPYGAVSRKTLDTELCNRLFSKLSQLFDEHVDATRLEELQRDIQRIDDELAKLTETLIALPNITQIRDALDAKHKEKDSVLFELKREKARVDSVVDMDLSKLNFETVEGRTEAHIIIKKLVREIVVNSRDKLVDVYLHNGNVIEGFSLEGKYDHTLSFTEATDEE

SEQ ID NO: 57402 - DNA, 50 bp, Klebsiella michiganensis
  source 1..50: mol_type = genomic DNA
tatcgtgtttaggtatgtaagatgaccagtatacgtggcttgccgcgtag

SEQ ID NO: 57403 - DNA, 40 bp, Klebsiella michiganensis
  source 1..40: mol_type = genomic DNA
gtacatagaataataaagcaccagaatcttagccatttgc

SEQ ID NO: 57404 - DNA, 40 bp, Klebsiella michiganensis
  source 1..40: mol_type = genomic DNA
gtacatagaataataaagcttcagaatcttagccatttgc

SEQ ID NO: 57405 - DNA, 50 bp, Klebsiella michiganensis
  source 1..50: mol_type = genomic DNA
aatcctgtggaaacatgaaaaatgttcattatatgtaaaaatccacgtat

SEQ ID NO: 57406 - protein, 562 aa, Brucella anthropi
MRDLGVSAFRGTNSTEGALKRFLTLVEDGQIQHGSYLIVESLDRISRETATDAAMRLFDLIRAGIIVVTLSDGQVYSHDGLRGNPMPLAFSIMIMARAHEESLVKSQRLTAVWQHKKEIARTEKKPLTPRCPEWLEVRDGKFHIRPERVAIVHRIFQDVIDGYGRREIVRRLNAEKVPTWRGGDGWHTSSVAKVVQSKAVIGEYQPHSGTHKLRNRKPVGDPIKDYYPRIVDEATFWRAQAATEGRQQRSAGRKGKHAHILQGLAVCGSCGSPMHLLNKGKPPKGGKYICCSNNLRGLDCSMSRRWRAEMLEDQLLRTFATIEAGSIQLLDNSAPRLEHDISSLKARLDDEKRKRKRLVALVEDGNDDENLAERYRAVSKLVKELTAELKAAETAQSKASADPDFVQKIIETASLSAQLDEADQAKARDLRIRLREVIKSTIDRIVCDPEIGAILHFPPRHWFELKTRGFAVHMKAEGDTGPIFLLDKNPSQDAVDRFFGGAFPTDAEFMPPSETLDSMQPQNPAMLAYADALFAFLRDHNPTPEQIEQWQERYVQEHGLAM

SEQ ID NO: 57407 - DNA, 50 bp, Brucella anthropi
  source 1..50: mol_type = genomic DNA
atgtagcacaatatgagcagattgtgctacattcccccgcgaatcagttt

SEQ ID NO: 57408 - DNA, 40 bp, Brucella anthropi
  source 1..40: mol_type = genomic DNA
tccgacgagcagcagattgtgattgcctgcagcggcgatt

SEQ ID NO: 57409 - DNA, 40 bp, Brucella anthropi
  source 1..40: mol_type = genomic DNA
tccgacgagcagcagattgtaattgcctgcagcggcgatt

SEQ ID NO: 57410 - DNA, 50 bp, Brucella anthropi
  source 1..50: mol_type = genomic DNA
atgctgcatttattgagcacattttactacatttgcatttgaattaggat

SEQ ID NO: 57411 - protein, 510 aa, Omnitrophica bacterium GWA2 41 15
MKTALKQETIKAAIYVRVSTDEQAQYGYSIEAQKEKLLAFCKSQDWEVYKTYVDDGFRATTLNRPEIQKLIEESNSGKFNMVVFYKLDRLSRSVKDLSYLIETFEKNNTAIKSITEPFDTSSPPGKLMFNMLGSFAQFERELIGERTRLGVGRRVREGKWTTSPPFGYSMINGELVINEKDVPFYKRIVELCLYHNFGTKLIAMKLNEEDKITKRAGKWSDSTIWRILTNPVYYGMVRWHDEIYQGKHEPIIAKEEFETIQKRLREKNRTPERSHSSPNILNGLIACGLCNSNLTPSKGKKIYRYYSCLGRQKGCSLHYIRTDKLHDAILAQINEIGENPRIIQDCIEEHNKSQFSRLSKLEKELLCAKREIIELNKKKERKTEWLSENLPDKNVASIIGEEIQQATKQIEELKKKAAGIEETIEKENISGVKPEIISGFLLRFKDMFNKLDIYQKRLFMQAIVKNITVYNKDKIRLSLALPSGPQKAVAQNEVFKIKQPDFYPFYAEWG

SEQ ID NO: 57412 - DNA, 50 bp, Omnitrophica bacterium GWA2 41 15
  source 1..50: mol_type = genomic DNA
tttaccctttctatgctgaatggggtcgctggtggcttggtaaaggtaaa

SEQ ID NO: 57413 - DNA, 40 bp, Omnitrophica bacterium GWA2 41 15
  source 1..40: mol_type = genomic DNA
cgagaggcgaaaaattggggtgggtaacgggatttgaacc

SEQ ID NO: 57414 - DNA, 40 bp, Omnitrophica bacterium GWA2 41 15
  source 1..40: mol_type = genomic DNA
cgagaggcgaaaaattgggcagggtaacgggatttgaacc

SEQ ID NO: 57415 - DNA, 50 bp, Omnitrophica bacterium GWA2 41 15
  source 1..50: mol_type = genomic DNA
tttaccctttatttgctgaattagcacactggtgccattgaagttcaaag

SEQ ID NO: 57416 - protein, 556 aa, Yersinia pekkanenii
MITKTAYCYCRVSSSRQNDENGGFGMTRQQATLMDYISLFGENEELGYALSPDQVVFLRAEGVSGFTGKNIEKGSVLLNFIEDIKSKKIKNSVLLIENIDRFSRFNVNESTELFLSIVNNGCDIHECDGGVIHHRKSDTNLISAGLTRARAESYRKSKLSIKNWDKRFKNTIKDRSVLSNHSPSWLNTDGGVYTIIESEAVVYRKIFEMFNNGYGQAAIRTYLNDNGMTINGRTIGTWMIHKVLNDDRLWGRLRTKSDLRKEHDGLLIYPVVVEREIFNTASLILSSKGKSIKINKRANNIFTGLMICGVCKNGHLLVNHDKRGSYLRCSNSLSSNTRCIARGFKYGIVEQALIKFIKNIDTKILDSNDDNILELDILGKELKYYLDYMNQVQQDFDSVDIPDPNDRKLLKNLQSKVRDLEDEILKIKSFENSEADFEAVGAAISPELLDPFNVDLRKDFNIKLRKIIQQIEAFRYDKSNILIIIKYYAVANQQWLLIDSKTGDMKSHTYIDEEYIVIEGIDQKIVRFDVKMKQYTLDGNQISVEELISELKIISQ

SEQ ID NO: 57417 - DNA, 50 bp, Yersinia pekkanenii
  source 1..50: mol_type = genomic DNA
aactgtattgtagctgctaacatcaccattggtggtgctataatacagtc

SEQ ID NO: 57418 - DNA, 40 bp, Yersinia pekkanenii
  source 1..40: mol_type = genomic DNA
tgcaatgatggcgatcgaaaccatcaattctattaatgta

SEQ ID NO: 57419 - DNA, 40 bp, Yersinia pekkanenii
  source 1..40: mol_type = genomic DNA
tgcaatgatggcgatcgaatgcatcaattctattaatgta

SEQ ID NO: 57420 - DNA, 50 bp, Yersinia pekkanenii
  source 1..50: mol_type = genomic DNA
aactgtgttaactgtgttaacatttgcactgatggtgcaaaaatggtgga

SEQ ID NO: 57421 - protein, 528 aa, Pseudomonas juntendi
MPIAVPYSRFSSQRQSYGSSFHRQETLIVNWLARHPEYTRYERKFEDLGVSGSSGKHIEAGALGELLAAIEDGHFPAGTVILVEAMDRFSRLEPMDTLNHLRTIVKAGIDLVTLDDGQRYDAKSLKGNSLLYLAMKAQAAHEFAVRLSDFTVGSYEKRAIKAKLRESIKRRNPFWLTSEGELKEVEAAALEQVFTAFTNGAPLRALAIQYAQYFGNRQSLKHALRNPAAIGHWQRTVTVEVDGKKKRVDGELIKGVFKPAVSDELFFQVQKMLDDLADQPVTVARKFPLAGLLQCGDCGANMVLLRQNSRQQTDTVRCYRRMQSSDKCTNQKTIPVPVVAWFYEATRKPHAFKAYQRTKLPENKRQRIKLEGQIDQLKQQQARLRQLVLLDDGDKDALADYSKLVNERKTLEQELAALPVVADTATVGMVEFYGFLQSDPFAVSNLLQQDGYRIVCHSDGVLAVNKLASDEPALLAISYEGYSRKYKMWRVAVPEGSDIFVDRHATQQFPHHTVITTPQQWKEHIGDS

SEQ ID NO: 57422 - DNA, 50 bp, Pseudomonas juntendi
  source 1..50: mol_type = genomic DNA
tcactgtataaatagaaattcaggctgcgggagggtaagatatgcattga

SEQ ID NO: 57423 - DNA, 40 bp, Pseudomonas juntendi; identical to SEQ ID NO: 54293
  source 1..40: mol_type = genomic DNA

SEQ ID NO: 57424 - DNA, 40 bp, Pseudomonas juntendi
  source 1..40: mol_type = genomic DNA
cccgatggacaagttccgccagctgcacgaccacctggtc

SEQ ID NO: 57425 - DNA, 50 bp, Pseudomonas juntendi
  source 1..50: mol_type = genomic DNA
tcactgtcttcctaaaaagtcagccagcagggggagtgcaaattcattaa

SEQ ID NO: 57426 - protein, 528 aa, Pseudomonas putida
MPIAVPYSRFSSQRQSYGSSFHRQETLIVNWLARHPEYTRYERKFEDLGVSGSSGKHIEAGALGELLAAIEDGHFPAGTVILVEAMDRFSRLEPMDTLNHLRTIVKAGIDLVTLDDGQRYDAKSLKGNSLLYLAMKAQAAHEFAVRLSDFTVGSYEKRAIKAKLRESIKRRNPFWLTSEGELKEVVAAALEQVFTAFTNGAPLRALAIQYAQYFGNRQSLKHALRNPAAIGHWQRTVTVEVDGKKKRVDGELIKGVFKPAVSDELFFQVQKMLDDLADQPVTVARKFPLAGLLQCGDCGANMVLLRQNSRQQTDTVRCYRRMQSSDKCTNQKTIPVPVVAWFYEATRKPHAFKAYQRTKLPENKRQRIKLEGQIDQLKQQQARLRQLVLLDDGDKDALADYSKLVNERKTLEQELAALPVVADTATVGMVEFYGFLQSDPFAVSNLLQQDGYRIVCHSDGVLAVNKLASDEPALLAISYEGYSRKYKMWRVAVPEGSDIFVDRHATQQFPHHTVITTPQQWKEHIGDS

SEQ ID NO: 57427 - DNA, 50 bp, Pseudomonas putida; identical to SEQ ID NO: 57422
  source 1..50: mol_type = genomic DNA

SEQ ID NO: 57428 - DNA, 40 bp, Pseudomonas putida; identical to SEQ ID NO: 54293
  source 1..40: mol_type = genomic DNA

SEQ ID NO: 57429 - DNA, 40 bp, Pseudomonas putida; identical to SEQ ID NO: 57424
  source 1..40: mol_type = genomic DNA

SEQ ID NO: 57430 - DNA, 50 bp, Pseudomonas putida; identical to SEQ ID NO: 57425
  source 1..50: mol_type = genomic DNA

SEQ ID NO: 57431 - protein, 607 aa, Streptococcus pyogenes; identical to SEQ ID NO: 10731

SEQ ID NO: 57432 - DNA, 50 bp, Streptococcus pyogenes; identical to SEQ ID NO: 1792
  source 1..50: mol_type = genomic DNA

SEQ ID NO: 57433 - DNA, 40 bp, Streptococcus pyogenes; identical to SEQ ID NO: 23708
  source 1..40: mol_type = genomic DNA

SEQ ID NO: 57434 - DNA, 40 bp, Streptococcus pyogenes
  source 1..40: mol_type = genomic DNA
ttgtttccgcaaacgcatctggtcgagtgcgtagtgttgc

SEQ ID NO: 57435 - DNA, 50 bp, Streptococcus pyogenes
  source 1..50: mol_type = genomic DNA
gtaatcccatcactttgggcagactgctggagttcaggagtttgagacca

SEQ ID NO: 57436 - protein, 610 aa, Streptococcus pyogenes
MFCKCGIIELHRKIQKGGGAVKKDVKVIKGDTTLKRTASGCVQRSIKRVAAYCRVSTDTEDQINSYNSQVEHYTEFIQKNKEWTLAGIYADEAITGTQVDRRIDFQRLINDCMNGDIDMIITKSISRFARNTLDTLKYVRKLKEFNVAVFFEEENINTLTMDGELLLTILSSVAQQEVENISANVKKGLRMKMERGEMVGFQGCLGYDYDPETKSISINEKEAEIVRYIFRRYIEGVGGMVISRELEEQGYLSPRGNKRWTETTVLGIIKNEKYKGDLMMGKTYTVDPISKRRLDNFGEQDKFYIENHHEPIISEEDFEKAQGIRLRRSKNRNTVANNGGKREKYSRKYAFSSMLECGFCGHNLSRRNWHSSSEYTKVIWQCVNATKNGKKYCPHSKGIEEEAIEKAFMESYRQVCHNNVEITNEFLKTVEEELKDNSLAKDLKKITNQLDKILKKEKDLVELRLNESISMDIYQDKYNEIAISKEKLLAEKRTLEVTLTDEKALKKRLEGFKKLLESNKYLEEFDRAVFESIVDKIIIGGTNDEGEIDPAMITIIYKTGKKDSQDGRLFKSRRKNAKEVNEETDNKLYPHSSDEVNNLYSYPIDNTRRV

SEQ ID NO: 57437 - DNA, 50 bp, Streptococcus pyogenes
  source 1..50: mol_type = genomic DNA
gtattcctatcctattgacaacacacgtggagtgcatagcgttgatacaa

SEQ ID NO: 57438 - DNA, 40 bp, Streptococcus pyogenes; identical to SEQ ID NO: 23708
  source 1..40: mol_type = genomic DNA

SEQ ID NO: 57439 - DNA, 40 bp, Streptococcus pyogenes; identical to SEQ ID NO: 57434
  source 1..40: mol_type = genomic DNA

SEQ ID NO: 57440 - DNA, 50 bp, Streptococcus pyogenes; identical to SEQ ID NO: 57435
  source 1..50: mol_type = genomic DNA

SEQ ID NO: 57441 - protein, 587 aa, Streptococcus pyogenes
MKKAVKVIKGDTTLKRTASGCVERSIKRVAAYCRVSTDTEDQINSYNSQVEHYTEFIQKNNEWTLAGIYADEAITGTQVDRRIDFQRLINDCMNGDIDMIITKSISRFARNTLDTLKYVRKLKEFNVAVFFEEENINTLTMDGELLLTILSSVAQQEVENISANVKKGLRMKMERGEMVGFQGCLGYDYDPETKSISINEKEAEIVRYIFRRYIEGVGGMVISRELEEQGYLSPRGNKRWTETTVLGIIKNEKYKGDLMMGKTYTVDPISKRRLDNYGEQDKFYIENHHEPIISEEDFEKAQGIRLRRSKNRNTVANNGGKREKYSRKYAFSSMLECGFCGHNLSRRNWHSSSEYTKVIWQCVNATKNGKKYCPHSKGIEEEAIEKAFMESYRQVCHNNVEITNEFLKTVEEELKDNSLAKDLKKITNQLDKILKKEKDLVELRLNDSISMDIYQDKYNEIAISKEKLLAEKRTLEVTLTDEKALKKRLEGFKKILESNKYLEKFDRAVFESIVDKIIIGGTNDEGEIDPAMITIIYKTGKKDSQDGRLFKSRRKNAKEVNEKADSKLYPQSSDEVNNLYSYPIDNT

SEQ ID NO: 57442 - DNA, 50 bp, Streptococcus pyogenes; identical to SEQ ID NO: 1792
  source 1..50: mol_type = genomic DNA

SEQ ID NO: 57443 - DNA, 40 bp, Streptococcus pyogenes; identical to SEQ ID NO: 23708
  source 1..40: mol_type = genomic DNA

SEQ ID NO: 57444 - DNA, 40 bp, Streptococcus pyogenes; identical to SEQ ID NO: 57434
  source 1..40: mol_type = genomic DNA

SEQ ID NO: 57445 - DNA, 50 bp, Streptococcus pyogenes; identical to SEQ ID NO: 57435
  source 1..50: mol_type = genomic DNA

SEQ ID NO: 57446 - protein, 589 aa, Eubacterium callanderi; identical to SEQ ID NO: 29691

SEQ ID NO: 57447 - DNA, 50 bp, Eubacterium callanderi; identical to SEQ ID NO: 1792
  source 1..50: mol_type = genomic DNA

SEQ ID NO: 57448 - DNA, 40 bp, Eubacterium callanderi
  source 1..40: mol_type = genomic DNA
atgtttccgcatgtgggacatgtggagacagtggtcaagc

SEQ ID NO: 57449 - DNA, 40 bp, Eubacterium callanderi
  source 1..40: mol_type = genomic DNA
atgtttccgcatgtgggactggtggagacagtggtcaagc

SEQ ID NO: 57450 - DNA, 50 bp, Eubacterium callanderi; identical to SEQ ID NO: 57435
  source 1..50: mol_type = genomic DNA

SEQ ID NO: 57451 - protein, 475 aa, Nesterenkonia jeotgali
MNPSPPPGAARPRAVLYLRQSVAREESISLEVQETSGRTYCTQQGYDVVAVESDPGISGRTWNRPAVQRVMTMIETGAADVVILWKWSRLSRSRLDWAVAVDKVESAGGRIESATESVDVSTSTGRLARGMLAEFAAFESERIGDTWKQAHERRVKQGRPANGKPRFGYIYDPDTQDFHPDPKTGPILTELYQRYISGEPMTGLARWLNLQGTHSVMGNPWTPVTVRQMMDRGFATGTFVRHGERLEGVHEALISWETWEEYQARRKVRRATKWEGSKKLLSGLVRCYCGARMHSGSTSRYSCAGYLEQQTRPHPGRLSVQRDTVEDAVMEWLREVAAEIDAAAPKQPARPAAGPRPDVLQRKLMKLQNRLDTLTVRYLDGEVDRETYERIKTTTKAESAELEDQLRELRVHGRNPVGDLIPDLLRDWDGLSVGVRRDMLSRLIHPVIVGDGYGRSGTILVRGLWEDRPTPADLP

SEQ ID NO: 57452 - DNA, 50 bp, Nesterenkonia jeotgali
  source 1..50: mol_type = genomic DNA
tcaggcgagtcggaaccaggaaggttcacgactataaacagcacgtaggt

SEQ ID NO: 57453 - DNA, 40 bp, Nesterenkonia jeotgali
  source 1..40: mol_type = genomic DNA
ctccggcttgacctggaatttcacgacgatgaagatcacg

SEQ ID NO: 57454 - DNA, 40 bp, Nesterenkonia jeotgali
  source 1..40: mol_type = genomic DNA
ctccggcttgacctggaatatcacgacgatgaagatcacg

SEQ ID NO: 57455 - DNA, 50 bp, Nesterenkonia jeotgali
  source 1..50: mol_type = genomic DNA
tcaggcaaagcatcacaaggaagtatccagactaaatttctctcctatgt

SEQ ID NO: 57456 - protein, 556 aa, Sellimonas intestinalis
MAMMNEMEYRTIGSALAGGYRAAVYCRLSKDDDLQGESASIANQRDMLEKYCEKQGWEVVAVYQDDGFTGLNMERPDLQRMLRAIERRQINLVITKDLSRLGRNYLQTGHLIEDFFPRNGVRYIAMNDGIDTLRDNNDIAPFKNILNEMYSKDISKKVHSSYLLKAQKGQFTGCLAPFGYRKDPEDRNHLLIDEETAPIVRLIFGYALNGHGPNYIRRRLEEEKIPCPTWWNRERGLRNTRTKWEKKDPENGRYMWDFSVIKDLLMNPVYTGAIASQKKDYRFKIGTIGEKKPEDWIVVEGQHEPLIDRMSFDIVQNKLKSRQRPGQTNEISLFAGLIKCGECGKSLTVRYTNAKHPQQIYSCKTYNAFGKNHCTQHRIDYDTLYSHVLRKIRECARAALMDGKAVADRLTNTCEAEQREQREAMERSLTRDEERIEVLDKMVMRLYEDMIAGRISEQNFNTMLEKTQTEQAELKAKVSEGRKRLSDEVQLANDAKQWVEAIQEYANITELDAATLNRLIKEIVVHERIDEDKTRHISIEIHFNLKPIPEVEQVTA

SEQ ID NO: 57457 - DNA, 50 bp, Sellimonas intestinalis
  source 1..50: mol_type = genomic DNA
ttttacacctaattggggataaaacagtttatggctaattaaagggaaca

SEQ ID NO: 57458 - DNA, 40 bp, Sellimonas intestinalis
  source 1..40: mol_type = genomic DNA
aaagagccagggcatgaagcagcttatggcgggcggcggc

SEQ ID NO: 57459 - DNA, 40 bp, Sellimonas intestinalis
  source 1..40: mol_type = genomic DNA
aaagagccagggcatgaagctgcttatggcgggcggcggc

SEQ ID NO: 57460 - DNA, 50 bp, Sellimonas intestinalis; identical to SEQ ID NO: 27460
  source 1..50: mol_type = genomic DNA

SEQ ID NO: 57461 - protein, 655 aa, Vibrio vulnificus; identical to SEQ ID NO: 46386

SEQ ID NO: 57462 - DNA, 50 bp, Vibrio vulnificus; identical to SEQ ID NO: 14802
  source 1..50: mol_type = genomic DNA

SEQ ID NO: 57463 - DNA, 40 bp, Vibrio vulnificus
  source 1..40: mol_type = genomic DNA
aactgcgccaagccctatggaaatggtgctaatggccgcg

SEQ ID NO: 57464 - DNA, 40 bp, Vibrio vulnificus
  source 1..40: mol_type = genomic DNA
aactgcgccaagccctatgttaatggtgctaatggccgcg

SEQ ID NO: 57465 - DNA, 50 bp, Vibrio vulnificus
  source 1..50: mol_type = genomic DNA
ggcagtacagctattttaacaatgttgattatttctattcatgagcatga

SEQ ID NO: 57466 - protein, 655 aa, Vibrio vulnificus
MKPTIITYLRYSSKQQADGLSEFRQSEINRKFVEKFCAEHDVDLNEVISLKDLGVSAYRGLNLTLGSFSQTIKKFKSGEIKKRFNEDGEINTYLIVESLDRITRTGPFKSTQIFTELLEYTNIVVLADGEKKIYSKKSIDSTHGMMDLFMALISLQRSHTESLMKEYRSRKSWEKKREDLLNYFTLPEEERIGLERPKNATAMCPFWLTAKKDGRGYDFIPENKKVMDFLIEKLLDGNGMTRAVRLLNDEIDAGNLKPKLKKANRKTRHFRAAAYSGLFNSEISTVKGDYLLTESYYPTEDDIEQGKYPEKHLGKRVRKEIAVLKNYYPALMTESQAAYIRKMMDERRSAGTKPNKSIKNLAQGILRCPLCNSTYIKSKDRRNVYLRCNLAREGLCNAKVIKHGVFEHNLLQFCKGLNINKIISNQSSDQVIDSSLKELEQKMMPLKVKKSQLEDDIEQIVKNISSIKIPSLLEKVQDDYLKKENELKKVVQEIDLIETSIMKLQHQIAMSDGDNSLQELIDLTLDEHADDEIRQRFNVELKKVVKSMTVLYRDTDDNPFGYHMISIQFLDGVHRLIPVHEKMTDKIHNILPYQDAVKVDSVDFSETVILPEDYVEGREKGKYPNLDGMAKYYQENPTKYLRLKHKIDQVHEIHA

SEQ ID NO: 57467 - DNA, 50 bp, Vibrio vulnificus; identical to SEQ ID NO: 14802
  source 1..50: mol_type = genomic DNA

SEQ ID NO: 57468 - DNA, 40 bp, Vibrio vulnificus; identical to SEQ ID NO: 56593
  source 1..40: mol_type = genomic DNA

SEQ ID NO: 57469 - DNA, 40 bp, Vibrio vulnificus
  source 1..40: mol_type = genomic DNA
aacggcgccaagccctatgttaatggtgctaatggccgcg

SEQ ID NO: 57470 - DNA, 50 bp, Vibrio vulnificus; identical to SEQ ID NO: 57465
  source 1..50: mol_type = genomic DNA

SEQ ID NO: 57471 - protein, 655 aa, Vibrio vulnificus; identical to SEQ ID NO: 46386

SEQ ID NO: 57472 - DNA, 50 bp, Vibrio vulnificus; identical to SEQ ID NO: 14802
  source 1..50: mol_type = genomic DNA

SEQ ID NO: 57473 - DNA, 40 bp, Vibrio vulnificus; identical to SEQ ID NO: 56593
  source 1..40: mol_type = genomic DNA

SEQ ID NO: 57474 - DNA, 40 bp, Vibrio vulnificus; identical to SEQ ID NO: 57469
  source 1..40: mol_type = genomic DNA

SEQ ID NO: 57475 - DNA, 50 bp, Vibrio vulnificus; identical to SEQ ID NO: 57465
  source 1..50: mol_type = genomic DNA

SEQ ID NO: 57476 - protein, 487 aa, Paenibacillus naphthalenovorans
MRGFQYIRVSDEEQAVEGYSITAQKALLDRKFAEWGATVAGVYIDDGYSAKDIRRPDLQRLMNDIATLKPDFIAFWKLDRWTRAGRDWHALNDKLKPYGVTLRSAIGENLSEGTAFERFNVGLNVLLGQFEREQISERVHFVMMERHNKGLRNGAKPPYGYDLKNGQLIVNEEQAEVVRKIFNWYAYGDENGPCGFREIAVKLNRGNGREWTYSSVRYALMNPVYCGKLRWNYRKASGKPTGKEIIVDSDHAPIIPVELFEKVYGEIVSRKRGGKAATSEYAFSGVLRCGRCGKAMVGFSRGARFYRCTGRANAGTCDMPAIHSGRLEQAFLASLDYDSDQVRNLIDVPDRSDEVKSRREALEAEIEQIRKRKKKWQMAYADDVISLEDLRERTREDAEREKEISQELATLPQGTSNVWSKEMIADILVDAKEAMQSADEAEKKAFIRELFERVTVDAEKPEGKPAPGRYSMPVIIELVPRQSKSYL

SEQ ID NO: 57477 - DNA, 50 bp, Paenibacillus naphthalenovorans
  source 1..50: mol_type = genomic DNA
tcgtatctttgagattgccacggatcgccatggtgatctaaaagttactg

SEQ ID NO: 57478 - DNA, 40 bp, Paenibacillus naphthalenovorans
  source 1..40: mol_type = genomic DNA
gcgttgctccttgaagggatcgccatacatgtggtatccg

SEQ ID NO: 57479 - DNA, 40 bp, Paenibacillus naphthalenovorans
  source 1..40: mol_type = genomic DNA
gcgttgctccttgaagggagagccatacatgtggtatccg

SEQ ID NO: 57480 - DNA, 50 bp, Paenibacillus naphthalenovorans
  source 1..50: mol_type = genomic DNA
tagtttctaattctttgcaatgatgagccatgctgaattaaaagttcttg

SEQ ID NO: 57481 - protein, 563 aa, Nocardia cyriacigeorgica
MSSTSEKLRVLGRLRLSRSTEESTSIDRQRETIQQWADAHGHTVVGWAEDVDVSGSIDPFETPQLGPWLNDRPHEWDVLAAWKLDRLGRNAIQLSRLFGWVMEHDKTLVSCSESIDLSTWAGRMLANVIAGLAEGELEAIRERQRGSRHKLRNSARWGGGKPPFGYIAVKNPQGEGWALEVDPVASKLIRRIVDDTIAGKPSTQIAAELNREGYLTPSQYYRARSAGYSTLLRSELPADLDVNPKQEPGKVRRRKVRTENPWTQTPIRNMLRSDAIRGYVHHKGELVRDDDGMPIQLAEPLVTLDEWELIQSTLDRRRDTNRAKRRVKLSPLAGVAVCLGCGYTLHHTRKVARGIEYRYYRCENKDISDIRADFLEDLVGELVVDEIGDVEILERVWVPGDSRETELREAIAAVDDLVRALSGATSSTVRDRIQKQISALDAKISELEATPARESRWEYKPTGGVYRDVWESSDLAGRRELLRRSGITVAVSLTGIDGKRSGDNSGTFEYRVDFPAELMANLGHPKDDEQLWKKISGSFIPVFERRSAADIVRTEATPSRDGA

SEQ ID NO: 57482 - DNA, 50 bp, Nocardia cyriacigeorgica
  source 1..50: mol_type = genomic DNA
gttgtgcggagcatgatgttagactcatggaacatcagctttagcacaac

SEQ ID NO: 57483 - DNA, 40 bp, Nocardia cyriacigeorgica
  source 1..40: mol_type = genomic DNA
attgggcgggatgcacggctcatggaacatcagtcggaac

SEQ ID NO: 57484 - DNA, 40 bp, Nocardia cyriacigeorgica
  source 1..40: mol_type = genomic DNA
attgggcgggatgcacggcagatggaacatcagtcggaac

SEQ ID NO: 57485 - DNA, 50 bp, Nocardia cyriacigeorgica
  source 1..50: mol_type = genomic DNA
gtcctggggatacagaaattaataagatggaacatctcccctaacagaac

SEQ ID NO: 57486 - protein, 563 aa, Nocardia cyriacigeorgica
MSSTSEKLRVLGRLRLSRSTEESTSIDRQRETIQQWADAHGHTVVGWAEDVDVSGSIDPFETPQLGPWLNDRPHEWDVLAAWKLDRLGRNAIQLSKLFGWVMDHDKTLVSCSESIDLSSWAGRMLANVIAGLAEGELEAIRERQRGSRHKLRNSARWGGGKPPFGYVAVKNPQGEGWALEVDPVASKLIRRIVDDTIAGKPSTQIAAELNREGVLTPSQYHRARSAGYPTLLRSELPADLDVTPKQEPGKVRRRKVRTENPWTQTPIRNMLRSDAIRGYVHHKGEVVRDDDGMPIQLAEPLVTLDEWELIQSTLDRRRDTNRAKRRVQLSPLAGVAVCLVCGYTLHHTRKVARGIEYRYYRCENKDTSDIRADFLEDLVGELVVDEIGDVEILERVWVPGDSRETELREAIAAVDDLVRVLGNATSSTVRDRIQRQISALDAKIAELEATPARESRWEYKPTGGIYRDVWESSDPEGRRELLRRSGITVAVSLTGIDGKRSGDNSGTFEYRVDFPTELMANLGHPKDGEQPWKKISGSFIPVFERRSAADIVRTEATPSRDGA

SEQ ID NO: 57487 - DNA, 50 bp, Nocardia cyriacigeorgica
  source 1..50: mol_type = genomic DNA
gttgtgcggaacatgatgttagactcatggaacatcagctttagcacaac

SEQ ID NO: 57488 - DNA, 40 bp, Nocardia cyriacigeorgica
  source 1..40: mol_type = genomic DNA
attgggcggaatgcacggctcatggaacatcagtcggaac

SEQ ID NO: 57489 - DNA, 40 bp, Nocardia cyriacigeorgica
  source 1..40: mol_type = genomic DNA
attgggcggaatgcacggcagatggaacatcagtcggaac

SEQ ID NO: 57490 - DNA, 50 bp, Nocardia cyriacigeorgica; identical to SEQ ID NO: 57485
  source 1..50: mol_type = genomic DNA

SEQ ID NO: 57491 - protein, 539 aa, Pseudomonas syringae; identical to SEQ ID NO: 35601

SEQ ID NO: 57492 - DNA, 50 bp, Pseudomonas syringae
  source 1..50: mol_type = genomic DNA
ggtttattttggatatcgttaggacaccctaacgatatcattcctacacg

SEQ ID NO: 57493 - DNA, 40 bp, Pseudomonas syringae
  source 1..40: mol_type = genomic DNA
atcaacgagcgccttcgggcaacccagagaaacgaatccg

SEQ ID NO: 57494 - DNA, 40 bp, Pseudomonas syringae
  source 1..40: mol_type = genomic DNA
atcaacgagcgccttcgggagacccagagaaacgaatccg

SEQ ID NO: 57495 - DNA, 50 bp, Pseudomonas syringae
  source 1..50: mol_type = genomic DNA
gttctatttttttcatagtcagaaagccaaatcaattcctaacctacacg

SEQ ID NO: 57496 - protein, 515 aa, Vibrio diabolicus
MTKAYSYIRFSTKGQIEGRSLQRQLETARKYAEENGLELQSLSFQDLGVSGFKGRNSEQGALSQFIEAVKEGTIPEGSWLLLESFDRMSRQPVEKSMRLLMELVELGIIVVTLLDKQVYRRGQLDMTKLIISLVIMSRAHEESAAKSKRLADVWHAKQAVAHLKPLGTHLPAWLEYNEDKTKIQINYEKAVVVRYIFELSANGYGRSALIRKLNSQGIAPIGSRAKRWHLSYVTKLLNNTAVLGEYIPHVTDKLGQRVPTGEVIENYYPPIIEKDLWLRAKAAAQSRKIRGTGAIRRGHTRNILSGMVSCECGSSMQFVNKGSSDKGGYYLVCSTARHGAGCQYIGHRYYSVQWVVLIALQKLLHTFANKADNHEKEMQLEGELVELDRKLNNLINDLEENGSSKYISAAIRKTEQRMDIVKNELLMLQSSKAVENDEVDLQEITLRLNENFERLRLHQYLKRHIANIVVYKNKERLEINLKTGEDIILTFIPSENLWQSNTGVSFSVTFDTRWG

SEQ ID NO: 57497 - DNA, 50 bp, Vibrio diabolicus; identical to SEQ ID NO: 37287
  source 1..50: mol_type = genomic DNA

SEQ ID NO: 57498 - DNA, 40 bp, Vibrio diabolicus; identical to SEQ ID NO: 29213
  source 1..40: mol_type = genomic DNA

SEQ ID NO: 57499 - DNA, 40 bp, Vibrio diabolicus; identical to SEQ ID NO: 29213
  source 1..40: mol_type = genomic DNA

SEQ ID NO: 57500 - DNA, 50 bp, Vibrio diabolicus
  source 1..50: mol_type = genomic DNA
ataaaactagaaatttataacaggaggaattttgggaactatacacatac

SEQ ID NO: 57501 - protein, 461 aa, Mycobacteroides abscessus; identical to SEQ ID NO: 35826

SEQ ID NO: 57502 - DNA, 50 bp, Mycobacteroides abscessus; identical to SEQ ID NO: 35827
  source 1..50: mol_type = genomic DNA

SEQ ID NO: 57503 - DNA, 40 bp, Mycobacteroides abscessus; identical to SEQ ID NO: 28128
  source 1..40: mol_type = genomic DNA

SEQ ID NO: 57504 - DNA, 40 bp, Mycobacteroides abscessus
  source 1..40: mol_type = genomic DNA
tgcgcaggcgaaggtgaggaggtcgatgtcggtgggtccg

SEQ ID NO: 57505 - DNA, 50 bp, Mycobacteroides abscessus
  source 1..50: mol_type = genomic DNA
gggtctcctgagtttagagcttggagggtgatttttttaaaaactgacat

SEQ ID NO: 57506 - protein, 554 aa, Vibrio alginolyticus
MSTPIAYSYIRFSSLEQAKGDSFRRQTTLAKDYCDKHGLNLADLTLRDLGKSAYHGTHFKDGALGEFINAVKEGTIPKGSYLLVESMDRLSREKISIALGRFMELLGLGISIVTLQDNRTYTTESLDRIEDLMLSLVFMMRAHEESLTKSKRLKAAHAEKRKQARENLKPTGYNMPHWIKLTESGYELIPERVELLKRIFQMTIDGLGAIAIHKQLNQEAIKPWGRSKTGWHTTYIKKILRARTVLGEYQPFKTENGKRIKDGEPIQGYYPEAIDVDTFKRANLAIDSRNGKSSGTRNNAINNLFTSLVVCKNCGATMHYLNKGRGRKGGQYLVCSRARQGAHHDGITCKYASMRYPVIEDAVLSIAATLNLRLHTAHNEAESAQLKEQLSSVSRNLKTVEASIVRLVDLLDSSSGSKALLIKLEQREAEQQELEQRYRELEKRLDEIEFTPKSNNVWKELKHTLKTLKFEAADRTNVPLRAKINSQLVQCIDKIEFDAVAKVISIRVDESRTIELRFDQKQKSYTVKPSWDSRELLPKIFMIKEVASWQEFNL

SEQ ID NO: 57507 - DNA, 50 bp, Vibrio alginolyticus
  source 1..50: mol_type = genomic DNA
tggggtgataccagttacagcaagctattagagtgcctgaaataacccca

SEQ ID NO: 57508 - DNA, 40 bp, Vibrio alginolyticus; identical to SEQ ID NO: 5183
  source 1..40: mol_type = genomic DNA

SEQ ID NO: 57509 - DNA, 40 bp, Vibrio alginolyticus
  source 1..40: mol_type = genomic DNA
cgctggaaaccacaacttagttttccttggcccgccaggt

SEQ ID NO: 57510 - DNA, 50 bp, Vibrio alginolyticus
  source 1..50: mol_type = genomic DNA
gatggtgataatagtagcagcaaagtcttagagtgctttttacatgccca

SEQ ID NO: 57511 - protein, 517 aa, Trueperella pyogenes
MATVTTIPARPAKTLTPTTVRARRKVAAYARVSTDLEEQQSSYQAQIDYYTNYIQGRADWEFVGMYADEGISGTSTKHRQGFQTMITDALAGRIDLIVTKSVSRFARNTVDSLTSVRALKEAGVEVYFEKENIWTLDSKGELLITIMSSLAQEESRSISENVTWGHRRRFAEGKVMVPYASLLGYKKGDDGGLAVDEDQARIVRRIYREYLAGHSPKTIAAHLTEDGIPTPLGKKTWNVSTINSILRNEKYKGDALLQKTFTVDFLTKTTKRNEGEIPQYYVTGNHEAIIAPAVWDQVQSELARRSGRSRSFSHPFASKIECGCCGGWYGPKTWHAGSRYERRIWRCNRKYDPAGDQQCATKHVTENELIAAFEQATSQFAPPPSPEVLEAALDQLGDPHALEAKLAQAITARDAVVDAINALIRSAANTDFNPDAFEADHARLEADYQHHLSTVEAIEGHLRELEAKRAAITAFHQYRSENAAISYTPEAWRALVDHATIHSDGTITITFNDGTTL

SEQ ID NO: 57512 - DNA, 50 bp, Trueperella pyogenes
  source 1..50: mol_type = genomic DNA
tgtatccatcgtgaccacctttggtccaatagaacgtcactttggataca

SEQ ID NO: 57513 - DNA, 40 bp, Trueperella pyogenes
  source 1..40: mol_type = genomic DNA
ttcgattcccgtcgcccgctccgctgatgtcccgcgacac

SEQ ID NO: 57514 - DNA, 40 bp, Trueperella pyogenes
  source 1..40: mol_type = genomic DNA
ttcgattcccgtcgcccgcagcgctgatgtcccgcgacac

SEQ ID NO: 57515 - DNA, 50 bp, Trueperella pyogenes
  source 1..50: mol_type = genomic DNA
tatcttcattcatgccccatttggagcagtagttcttaactttggaaaca

SEQ ID NO: 57516 - protein, 598 aa, Pseudomonas aeruginosa
MVFSHFQNHRRTLEMPTAYAYIRYSSKAQGEAGKDSVDRQMASIQAITKHHDVELLAENIFSDTGVSAHDGSNKKKGKLKDLIDMINDVHIKPGDYIFVESIDRLSRQRLLQAKELVNSILEKGVILITTIDGQRYEKPNETNRIDDLQQDILLSVIAKRAHEESKTKSVRRKSAWNRAKKLADDEKAIFNGHNPPYGISYNKEENRFEIVEEEAQEIRDIFESLKYVGVSLTIRKINAYAKRKWTNKNIHLLFQTKYVLGSYMAQRRDENKNKVFERFIEGYYPQIVSYELFNEALEAMKLRAHRKHYGNQTVGSLNIFRHSIKCDCCNASMLFEKQTNPKGVCYGYFHCFTRKELKTNCNQPRFRFDLAYGLFLELVYQATTKEDFDVHPWQTLELEEEKQDREHYIKNGVRYSFATQHDIEIEEKIESFRELLISLLSNKKRQASDNKKLVELRNTLLEQKSYKDNLLKSFAGFTNGVIPQEFLAVVSSTELKINDIEGELSKLQAEMNTRKTSINIYSENDIIDLYKTEEGRLKINQFFITNDIVFKFNFEKETRTLYCKIHYQGIMIDKIAKQFSLHNPLSEFGIKNLNEYFN

SEQ ID NO: 57517 - DNA, 50 bp, Pseudomonas aeruginosa
  source 1..50: mol_type = genomic DNA
gtgtgagaatgcactctaccattggagagcagaggatggtattctcacac

SEQ ID NO: 57518 - DNA, 40 bp, Pseudomonas aeruginosa; identical to SEQ ID NO: 22678
  source 1..40: mol_type = genomic DNA

SEQ ID NO: 57519 - DNA, 40 bp, Pseudomonas aeruginosa
  source 1..40: mol_type = genomic DNA
ggtcctgcgcgagccgctgttaagcggcgagatcgtcatt

SEQ ID NO: 57520 - DNA, 50 bp, Pseudomonas aeruginosa
  source 1..50: mol_type = genomic DNA
gattgagaattcagtctaaaatttttgagctgaggatttcagactcaagc

SEQ ID NO: 57521 - protein, 599 aa, Klebsiella michiganensis; identical to SEQ ID NO: 39806

SEQ ID NO: 57522 - DNA, 50 bp, Klebsiella michiganensis; identical to SEQ ID NO: 38352
  source 1..50: mol_type = genomic DNA

SEQ ID NO: 57523 - DNA, 40 bp, Klebsiella michiganensis
  source 1..40: mol_type = genomic DNA
tcccgcccctgctcaagccaggtgtaccaggtgacgccga

SEQ ID NO: 57524 - DNA, 40 bp, Klebsiella michiganensis
  source 1..40: mol_type = genomic DNA
tcccgcccctgctcaagccgagtgtaccaggtgacgccga

SEQ ID NO: 57525 - DNA, 50 bp, Klebsiella michiganensis
  source 1..50: mol_type = genomic DNA
tcagttcctgtaattattacagctgatggtagtttagtactttgaacata

SEQ ID NO: 57526 - protein, 608 aa, Blautia massiliensis
MRTKKAENEKITALYERLSRDDEMVGDSNSIVNQKKMLEDYAKQNGYTNIEHFTDDGYSGGSFDRPDWKRMIAGIEDGSIGTVIVKDMSRIGRDYLQVGFYTEVMFKEKEVHFIAIANGVDNQKRESSEFAPFLNIMNEWYIRDSSRKVTTVLRARGMEGKHTTNNAIYGYRKSEEDKNQWVIDEEAAEVVRRIYRMSLEGKGPYEIARILSEEQIERPSYYLAKRGLGTCRSNNNTATPYVWRGATVRDILSKPEYMGHTVNFRSYKESYKDKRAKKAPKEDWVIFKNTQEAIVSEEMWNKVQELRKTVRRTDTVGEANPFTGLLYCADCGAKMYNHRGGAGRARNWKGELNGKRRPDRDEYNCSTYNLSRQSYDKQCSQHYIRTEVVRKLVLETIKAVSDYVITNEEEFINRIYSSSRDKQKESIRSLKRKIAQDTKRVNELNMLMKKLYEDNISGKLSDKRFEFMLSEFENEQDTIEISMENAKAEIEKYESDTVRADKFIELVKRYTDFSELTTPMLNEFVEKILVHEADYSSGERVQEVEIYLNFIGKFELPVKEPTAEEIAEHEKLKARRAKKAEYNRRYMEKRRKRIAGEEQKSKEVTVNG

SEQ ID NO: 57527 - DNA, 50 bp, Blautia massiliensis
  source 1..50: mol_type = genomic DNA
aactacccttgacaaaatctttccgaggacttatattgtaaagggtagtt

SEQ ID NO: 57528 - DNA, 40 bp, Blautia massiliensis
  source 1..40: mol_type = genomic DNA
accgccgaagcattatacggaggatacacttcttagtgcc

SEQ ID NO: 57529 - DNA, 40 bp, Blautia massiliensis
  source 1..40: mol_type = genomic DNA
accgccgaagcattatacggtggatacacttcttagtgcc

SEQ ID NO: 57530 - DNA, 50 bp, Blautia massiliensis
  source 1..50: mol_type = genomic DNA
cactcccctcctctagatctttcagtggagttatttgttttatagcagtc

SEQ ID NO: 57531 - protein, 525 aa, Oscillibacter sp
MYLEISNPMDYHVALYIRLSKEDENEGPSESVNNQKSLLDDFVKKHRLSVYDTYIDDGWSGTNFDRPDFQRMIGDIEAKKVNMVITKDLSRLGRDYIMTGHYMERYFPEKRVRYISLLDGIDTGVESSANDITPFRAIMNDMYAKDISKKIKSVKRDKQRKGQFIGGKPMYGYKMHPTEKNKIIVDEEVAPVVRRIFAMALDGMSCRKIAATLNEEHVPTPAAYCGWNMGRKGPYAGLWSSERISEMLQNETYIGNMVQGRQVKISYKSKKCLHQERENWVVVENTHEPLIDAESFRKVRMLVNSRKHTRSRTYDFLLKGLVFCHECGYPLAVVNRPNASGEVALYFVCRTYQRFTKAGVCSCHSIRESKLTEAVLAKVREVCKDYLKPQALLPMAERAVKEASQEEKAAAEITALQGKITSLTENLDRMYTDRLSGLLPETDFQRIFTRIKEERGRLEERIRDLEQQQKSPVSHEDRAKELVQRFLNTACASRELLVSLIERIELTEGKEIIIKFRFAELQQVG

SEQ ID NO: 57532 - DNA, 50 bp, Oscillibacter sp
  source 1..50: mol_type = genomic DNA
cacttacaatagccgatgcgctacgtatcccgccggaactaatgtaagtg

SEQ ID NO: 57533 - DNA, 40 bp, Oscillibacter sp
  source 1..40: mol_type = genomic DNA
cggtatcagccgcagctatgtatcgcgtatcgagaagaag

SEQ ID NO: 57534 - DNA, 40 bp, Oscillibacter sp
  source 1..40: mol_type = genomic DNA
cggtatcagccgcagctatacatcgcgtatcgagaagaag

SEQ ID NO: 57535 - DNA, 50 bp, Oscillibacter sp
  source 1..50: mol_type = genomic DNA
cactgacaactctggctgtgctacacatttcaatggtcatcttttaagtg

SEQ ID NO: 57536 - protein, 547 aa, Ochrobactrum anthropi
MTKAYSYIRFSTPEQAQGDSLRRQTAKAEAWANERGITLDNSLRDLGVSAYHGANRTTGALKSFLDMVEDGRIQRGSYLIVESLDRISREAVMDATSRLFDLIRAGIIVVTLSDGQEYSEERLRTDWTPLMFSLIVMARAHEESRIKSERVGEAWRQKKDAARREKKPLTPRCPEWLEIRDGAFVERAERVALVRRIFQETINGFGRREIVRRLNAEGIPAFRGSNGWHTSSVAKVIQSRAVLGEYQPHTGTHRNRNRKPEGDPIQNYYPPIVDSGIFWQAQGATQGRRQDAAGRKGMSGSHLFQGLAKCAHCGGSMHVQNKGPLPKGGIYLACSANLRKMGCENRRRWRIDTLEPLLLAAIDMLDQTALSNENDEAGQLRAKAEALRTQIADFERRQRGLIPLVELGDETATARSLELAKLIKRSKKELKTTEDQQATAAAEPNLAARVSAAASISRQLEESAGIEERRELRTRLREIIRGIVERIECHQRFGATAFFIPRDEFSINNRRSAYRFNFMTREGIPRILLDQNVPDDIIDEWVGPWPF

SEQ ID NO: 57537 - DNA, 50 bp, Ochrobactrum anthropi
  source 1..50: mol_type = genomic DNA
aatgtagcacaatgtcaacagattgtgctacattaacccgacgccatatg

SEQ ID NO: 57538 - DNA, 40 bp, Ochrobactrum anthropi
  source 1..40: mol_type = genomic DNA
gcccgacaagcagcagattgtgattgcccgcagcagcgat

SEQ ID NO: 57539 - DNA, 40 bp, Ochrobactrum anthropi
  source 1..40: mol_type = genomic DNA
gcccgacaagcagcagattatgattgcccgcagcagcgat

SEQ ID NO: 57540 - DNA, 50 bp, Ochrobactrum anthropi
  source 1..50: mol_type = genomic DNA
aatgtggctgaacctcaaaagattatgctaaatgaaataagccagataca

SEQ ID NO: 57541 - protein, 576 aa, Pseudomonas juntendi
METLKIDRSKPLAIAYVRWSSTVQGGDDKDSYDRQTSPLEFFTSSTGVPVVETIIDPGQSAFTGENSKKGKLKGILDRIESGEIRKGDFLVVESIDRITRMRVLDGVALIQDGILKKGVKLYTTTDNKTYSYEDPEKDFENLLMISLIAKRANEESEIKSKRRRSAWNKAKTKATDGVPFNAHNPPYGLRYDPEENRFEIVEDEAIEIKKIFEGLKYEGVSNTLKKVNLTSKRKWSRKTVHLMLTSRYPIGTLMSQKRDGKTKVFERYIENYYPAILTHKEFQDALQAMKQRGKVKDYGRNTEGYLNIFKHCVKCAVCGQSLMFEKSMNKKGIKYGYFHCWTRKETLSHCDVPRFRFDFAFGTLLQLVKQLTCEEDFDAHPWASEMPADYDSTLADDEINIENFGNQFLSLFSKSTATEAVKTEFYKAENELAKAKSIYENLTASFSQFSDGRIPSFFIKQMSDAEQAYENAKADVDALSVQIDNAESSLEIYSYKDIIDLYSSDEGRLKLNYFFKSNGFKFIFNYEAKTRTLFMTVRDKADAEIYRVGKKFTLHNPLKEFGIDNLNEQMNSVLKV

SEQ ID NO: 57542 - DNA, 50 bp, Pseudomonas juntendi
  source 1..50: mol_type = genomic DNA
tgtgtgagaaaagactatcctttggagagcggatagacgtatcatacact

SEQ ID NO: 57543 - DNA, 40 bp, Pseudomonas juntendi
  source 1..40: mol_type = genomic DNA
ggtgttacgcgagccattggagtccggtgaaatcgtgatt

SEQ ID NO: 57544 - DNA, 40 bp, Pseudomonas juntendi; identical to SEQ ID NO: 57543
  source 1..40: mol_type = genomic DNA

SEQ ID NO: 57545 - DNA, 50 bp, Pseudomonas juntendi
  source 1..50: mol_type = genomic DNA
tgtgtgagaaaatgcaatcctatggagagaaaagcgggctgttaaaaact

SEQ ID NO: 57546 - protein, 453 aa, Fusobacterium ulcerans
MKNAIIYVRVSTEEQAKNDLKSSLEMQKSKCLDYCKQNNLNPVKIIQDIQSGGNDKRKGFLELQKELETGIYDIVVVYEISRISRVASTGLEFADMLSRLSVQFASIMQPQANKFILGILFSIAEEERTQGSQRTKSNKLERAKKGFYQGKAPYGYKNIPNSLGIVEEEAKIVRELFEEYLNSFSFSKLSRDYNISISTVKNILTNRAYTGWFKYGEKKRDNLFQEYKKSKDVQYYKGNYPHIIDEAIFYKVQEAISKKIKINAAFPVILFSGLVECSCGSKMYQEKKTKMIKGVKNISYYYKCNSCNKSFNANKEKIIIEAIKSYEVESGEVEKVDNSKIINKLKKELEQLPIKKQRLMELYTNGLISMEAIKEKCNNFDHEKEKIEIQLKKYTQESKEISTQEILDTKAKLIYILENYDLDDVQSIRKILRMLIKRIKINDIKKFDFLIEL

SEQ ID NO: 57547 - DNA, 50 bp, Fusobacterium ulcerans
  source 1..50: mol_type = genomic DNA
agggtgagcattttgtaactcccgaccgctgtttataaattatacacggg

SEQ ID NO: 57548 - DNA, 40 bp, Fusobacterium ulcerans
  source 1..40: mol_type = genomic DNA
gggcagggtgtgattcccgaccggcggtaaaagtccgcga

SEQ ID NO: 57549 - DNA, 40 bp, Fusobacterium ulcerans
  source 1..40: mol_type = genomic DNA
gggcagggtgtgattcccgagcggcggtaaaagtccgcga

SEQ ID NO: 57550 - DNA, 50 bp, Fusobacterium ulcerans
  source 1..50: mol_type = genomic DNA
aatgttagcatcaagtaactcaaaagtgtagtttattatttatacatggg

SEQ ID NO: 57551 - protein, 455 aa, Listeria booriae
MKAAIYIRVSTDEQAKKFSIPAQERLAKAFCESKGWKIYKIYTDGGFSGKNLDRPALQEMLSETDKFDAVIVYRLDRLSRSQVDTMTLIETFFLKNDIEFISLTETLDTTSPGGRAMIGVLAAFSQMERESIRERSIMGRIQRVKSGLRDSPVKKRNFGYDIVDGKLYINESEAAVIREVCNRFEVLQSVGKIQQEQKAKGVEVITRARIMNYLTNDLYIGYVHYLDEVHRKGIHEPIISEDQYYRIQAILERIKRAPNINKKSQSLLSGLVRCATCGSPYHHAVKGAKKYASGKVIEYRYYTCKKNRRKPESEGCTNKSHRGEKLEDIVINRIKNYSVDTRTDEKMKDLAENREKLDAQVVKKNRLLALYVDGVYQKSDLDPLMQEIDAEIKRLTDEASQQSKEINNKEITKRLLNKNQTLDFDSLDFAEKQRLLRGIIKEIVINGDNVKVYWL

SEQ ID NO: 57552 - DNA, 50 bp, Listeria booriae
  source 1..50: mol_type = genomic DNA
gtacctcatgtttttatgacggtagatagctgtatgagaacctaaccaaa

SEQ ID NO: 57553 - DNA, 40 bp, Listeria booriae
  source 1..40: mol_type = genomic DNA
ggttcaagttatgacggtagacgagaaggtacacgatacc

SEQ ID NO: 57554 - DNA, 40 bp, Listeria booriae
  source 1..40: mol_type = genomic DNA
ggttcaagttatgacggtaggcgagaaggtacacgatacc

SEQ ID NO: 57555 - DNA, 50 bp, Listeria booriae
  source 1..50: mol_type = genomic DNA
gtcctttttcatttcatcacggtaggtagctggatgttatgctttccaat

SEQ ID NO: 57556 - protein, 598 aa, Blautia wexlerae; identical to SEQ ID NO: 36101

SEQ ID NO: 57557 - DNA, 50 bp, Blautia wexlerae; identical to SEQ ID NO: 36102
  source 1..50: mol_type = genomic DNA

SEQ ID NO: 57558 - DNA, 40 bp, Blautia wexlerae
  source 1..40: mol_type = genomic DNA
cgctcgtcttgcagcagcacaggcagctatcgctgagaag

SEQ ID NO: 57559 - DNA, 40 bp, Blautia wexlerae; identical to SEQ ID NO: 57558
  source 1..40: mol_type = genomic DNA

SEQ ID NO: 57560 - DNA, 50 bp, Blautia wexlerae
  source 1..50: mol_type = genomic DNA
ccctcatataatagactatctgctcaggcttcttattccatttggatgta

SEQ ID NO: 57561 - protein, 498 aa, Geobacillus thermodenitrificans
MKVAGYIRVSTNKEGQKESPENQKQLILNFLEENQYDLYDFYTDVETGTTDNREGLKKLIRDAENKQFDIIVAKELSRLGRNVELLYQLKRIAETKGVRLITLDGRVDTQDLSKQTMFGLYAWVYESESQRISDRIKSVFHMKYKSGKFLGSIAPYGYKLQDGKLIIRDDYTVEVVREIFNKYLEGWGHDKIARYLTKKKVPTPAQVAGKSNAGLYWQGTTIKKILSNPHYVGDLVQNRETSTNITNKKRKVNNQNEWIIVPNTHEPIISREVFEQAQKLLESKARKGRGKTKAQKHLFTNILYCADCGASMWYRHNRKGYICGNYAKHGNIACSHHAIKEQQLIETILTDLKNIYESFERLDTENQIKNKVHELQKKNTIRLQTIEKQIQKQMDLKRNALQKFIGGDISKEDYHDFVSMIQDKLQHLEMEKSTIKKAMVDSQSTIDLSTIRKQLDEFLSFKTLTTEMVLRFIERIEVDNNQNVKIYYKFAPIECVKV

SEQ ID NO: 57562 - DNA, 50 bp, Geobacillus thermodenitrificans
  source 1..50: mol_type = genomic DNA
actagccgtgaaacacactccacatgtgttgaatactttttacagaactg

SEQ ID NO: 57563 - DNA, 40 bp, Geobacillus thermodenitrificans
  source 1..40: mol_type = genomic DNA
cttcgcaaccgtctccacatgcgccgtatgcgggaacatg

SEQ ID NO: 57564 - DNA, 40 bp, Geobacillus thermodenitrificans
  source 1..40: mol_type = genomic DNA
cttcgcaaccgtctccacaggcgccgtatgcgggaacatg

SEQ ID NO: 57565 - DNA, 50 bp, Geobacillus thermodenitrificans
  source 1..50: mol_type = genomic DNA
cataacagttgaataccttccacaggtgttgaataccttccacaggtgtt

SEQ ID NO: 57566 - protein, 530 aa, Bacillus licheniformis; identical to SEQ ID NO: 41441

SEQ ID NO: 57567 - DNA, 50 bp, Bacillus licheniformis; identical to SEQ ID NO: 41442
  source 1..50: mol_type = genomic DNA

SEQ ID NO: 57568 - DNA, 40 bp, Bacillus licheniformis
  source 1..40: mol_type = genomic DNA
tttttcccaaacgcccatcgatccgctcgtatccatcatg

SEQ ID NO: 57569 - DNA, 40 bp, Bacillus licheniformis
  source 1..40: mol_type = genomic DNA
tttttcccaaacgcccatctttccgctcgtatccatcatg

SEQ ID NO: 57570 - DNA, 50 bp, Bacillus licheniformis
  source 1..50: mol_type = genomic DNA
tataattaaatttgaaatcaggaattgcaatgtcttttgttttttcttct

SEQ ID NO: 57571 - protein, 507 aa, Escherichia coli
MKRVISYIRFSSERQAKGDSLRRQSKMVNDWLKAHPEYYLDQDLSFRDLGVSGFTGKHLKGGLGDFLTAIEKGLVKAGDTLLIESLDRLSRQAVDRASELLRNILRSGVDVVTLSDGEHYTKESLKDPLSLIKSILIMQRAHEESLRKAERIQAAWDAKKEAAKAGIKISRRCPAWLKLNDDRKSFSVIPEKVETVKRCFQLRLEGKSIWEIVRTLNDEGHQTLNQYKAGKFGQTSVQDLLKNRSVIGYFTPKGCCEIAGYYPSIIPESDFYKVQQLSYARGGRKPASDKPLSVNLFKGVIRCSECGHALIITGFSDTRNGIYRCPLRNENRCNAKGLSRKQTDGTLLALLSRIDRFDSDMTNTIDTLKLHREHISSNIEKLVQLSLEIEDLSAITSKLKQLKGELSQVDADIEKETQRLKSIDVGCLSDCDLTTKAGRIEAQLIIKSAVKEVVLNTAKRRCKVTFHNGKVIDLPITEDPSEDVTEAIQSLSEVTERGLIDVDEVII

SEQ ID NO: 57572 - DNA, 50 bp, Escherichia coli
  source 1..50: mol_type = genomic DNA
tagcgcatttagaccttgatgatttttattagacacgtttaaatacacca

SEQ ID NO: 57573 - DNA, 40 bp, Escherichia coli; identical to SEQ ID NO: 5188
  source 1..40: mol_type = genomic DNA

SEQ ID NO: 57574 - DNA, 40 bp, Escherichia coli
  source 1..40: mol_type = genomic DNA
cggcgttaatcgggtgattatagacagccgcccggttcat

SEQ ID NO: 57575 - DNA, 50 bp, Escherichia coli
  source 1..50: mol_type = genomic DNA
tgacacattaatcatatgatgattattatagggcactattaaatactaca

SEQ ID NO: 57576 - protein, 510 aa, Arsenicicoccus sp oral taxon 190
MQATRRSRGQTTVAREYLRVSQDRDGKGKSTSQQHEENARAVAERGWKLHPKAYRDDGRSASRYARRAREDFKQLINDLETGHFDAEILVIWESSRGSRRTDEWVVITNACEKVGVRIFVTTHGRDYDPKNARDRRSLLEDAVDSEYESAKTSERIRRNVRAAAEAGRVHGKNLYGYQRIYDPRTRELLRIEEHPEQAPVVKEAVRRVLAGHSFYEIAKDFNVRGIPPRRPAFTERRKNLGWTPPAVKQMLGMPAYAGKRQHNGKIVSKAQWPPLIEPEEWDKLALILNNPARKRSNDWPAKHLLTGIAVCDVCGAGVIVGKQNQGRKQYDENREPLPREHYYSYLCRGVPGKVGFHTAMKEEYLDRIVVEYVLARLVQPDFLSTYGRKDGKVDAERKALVDEIDEHERYLAGVREQAAARHDLDILFAQEDLIRPKIAEAQRKLNQLVAADPIVVELASSSDVHAAWERLELADKRRILRQMVEPRIKRAEKPGARGLQPERVLPGWRV

SEQ ID NO: 57577 - DNA, 50 bp, Arsenicicoccus sp oral taxon 190
  source 1..50: mol_type = genomic DNA
cacctttctttgtagtagtctcaccagtgatagtttatttgtgaggtgag

SEQ ID NO: 57578 - DNA, 40 bp, Arsenicicoccus sp oral taxon 190
  source 1..40: mol_type = genomic DNA
acgatgctgacgttggacccggacaccgcgctgaggtggc

SEQ ID NO: 57579 - DNA, 40 bp, Arsenicicoccus sp oral taxon 190
  source 1..40: mol_type = genomic DNA
acgatgctgacgttggaccaggacaccgcgctgaggtggc

SEQ ID NO: 57580 - DNA, 50 bp, Arsenicicoccus sp oral taxon 190
  source 1..50: mol_type = genomic DNA
caaaacacttcccaatagtctcacaggtaatagtttacagatgtgctggg

SEQ ID NO: 57581 - protein, 566 aa, Mycobacteroides chelonae; identical to SEQ ID NO: 44296

SEQ ID NO: 57582 - DNA, 50 bp, Mycobacteroides chelonae
  source 1..50: mol_type = genomic DNA
ggtttgaaagaaacatttttggtacacctccgcgacgccgtttcaaatcc

SEQ ID NO: 57583 - DNA, 40 bp, Mycobacteroides chelonae
  source 1..40: mol_type = genomic DNA
cttcgaagaagagctggtacccccgatgggattcgaaccc

SEQ ID NO: 57584 - DNA, 40 bp, Mycobacteroides chelonae
  source 1..40: mol_type = genomic DNA
cttcgaagaagagctggtaaacccgatgggattcgaaccc

SEQ ID NO: 57585 - DNA, 50 bp, Mycobacteroides chelonae
  source 1..50: mol_type = genomic DNA
cgtttgaaaatattatttgtgttaaagctcagctacattaaagcaactgc

SEQ ID NO: 57586 - protein, 566 aa, Mycobacteroides abscessus; identical to SEQ ID NO: 44296

SEQ ID NO: 57587 - DNA, 50 bp, Mycobacteroides abscessus; identical to SEQ ID NO: 57582
  source 1..50: mol_type = genomic DNA

SEQ ID NO: 57588 - DNA, 40 bp, Mycobacteroides abscessus
  source 1..40: mol_type = genomic DNA
cagtatgactggttgcgtacccccaacgggattcgaaccc

SEQ ID NO: 57589 - DNA, 40 bp, Mycobacteroides abscessus
  source 1..40: mol_type = genomic DNA
cagtatgactggttgcgtaaacccaacgggattcgaaccc

SEQ ID NO: 57590 - DNA, 50 bp, Mycobacteroides abscessus; identical to SEQ ID NO: 57585
  source 1..50: mol_type = genomic DNA

SEQ ID NO: 57591 - protein, 566 aa, Mycobacteroides abscessus
MSNNTFATTESTTPVKIAVSYLRVSTKEQAERDGELDGYSIPAQRDANQRKATSMNAVVQMEFVDRGASARSADRPQLQEMLRYLENNHVDYVIVHKVDRLARNRADDVEISLAIKKAGAELVSATENIDETPSGMLLHDIMSSIGAFYSRNLAVEVLKGMDQKAKTGGTPGMAPIGYLNIPKLNANGSQVRTVEVDPVRGPLIAWAFQTYATGNWTVTALAEELNTRGLTTRPNSRTPGRPVSRSSVHQFLINPYYKGVVTYRKATYDGRHEPLTDAVTWAKVQEILRDHAVGEKQREHPHYLKSSVYCGSCGSRLVVTMAKNRHGTVYPYFMCVGRHQKRNTCQQKAKLIPVVEQEVEDEYDRQLIQLKAGERDEIEAMISDGLQDFRRSSETNRKTLTVQKDRLVSERMRLLQAHYAGAIPLDLLKQEQDRIASQLAAIEERLTSSNTEFDRFEQLIKRALDLATYAAKAYRNAATAKGSDQIRRLFNQAFFTRIKVSDDHARGELAEPFKTLLSPEMAAAAKHHRQTKSAAQNATHTPTGAITAENGKPAPHGAGLKETFLV

SEQ ID NO: 57592 - DNA, 50 bp, Mycobacteroides abscessus; identical to SEQ ID NO: 57582
  source 1..50: mol_type = genomic DNA

SEQ ID NO: 57593 - DNA, 40 bp, Mycobacteroides abscessus; identical to SEQ ID NO: 57588
  source 1..40: mol_type = genomic DNA

SEQ ID NO: 57594 - DNA, 40 bp, Mycobacteroides abscessus; identical to SEQ ID NO: 57589
  source 1..40: mol_type = genomic DNA

SEQ ID NO: 57595 - DNA, 50 bp, Mycobacteroides abscessus; identical to SEQ ID NO: 57585
  source 1..50: mol_type = genomic DNA

SEQ ID NO: 57596 - protein, 529 aa, Bacillus velezensis
MRLKEYNINSIVNYLRKSRKDIERERRTGEDTLYQQQKTMTEFLDKTGIPYVQRFEVGSGDKISTRPVFQGVLEELKEFKYDAIAVKEISRLGRGSMSDMGVIYDLIIENRIFILTPDRTYDPRNDSDLRQIRFEMFFAREEFEQIRQRLTGARYSSAREGKWMGVVPYGYTRNPKTLRLEPNEDAKNVKLIFNLLAHGIDGKEVRERAIATYLKRIGIKSAKGLDQWDTTQLKRLLTNQAYIGVSKFRETERLSNGKVRKRPADEHIIVENAHEPIISKELFDEVQKKLNNRTVTKVKLDVGRYALTGLVTCGVCGSRMVVNSYSRKRKDYVLRDSYLVCKNTCQSVKYDTVEREIINQLQGMKQMDIELLQEAKNEALKDTSIEEQYLLKEEIKKSILQKKENLQKRLKFIQQKHFNGIYTDEDYLGFKQEIDEELKEIEKIEKNDFEDEASAALEDAPLEKEQFVKQIDHILDAYQNTDSKEKKNQLLTEYYDEIVLTVLESGTRVKPAKIKLDSALSYNFWNIGS

SEQ ID NO: 57597 - DNA, 50 bp, Bacillus velezensis
  source 1..50: mol_type = genomic DNA
tgctgttatcagtagtcaaactacaggtgcattgcttattgataacagca

SEQ ID NO: 57598 - DNA, 40 bp, Bacillus velezensis; identical to SEQ ID NO: 28263
  source 1..40: mol_type = genomic DNA

SEQ ID NO: 57599 - DNA, 40 bp, Bacillus velezensis
  source 1..40: mol_type = genomic DNA
cgccgtgtcatgtgatcatttttttatcgcggaaacagcg

SEQ ID NO: 57600 - DNA, 50 bp, Bacillus velezensis
  source 1..50: mol_type = genomic DNA
ggctgttttcatttcttaaacttcttgtgcaattctttagcataagagat

SEQ ID NO: 57601 - protein, 662 aa, Chryseobacterium indoltheticum
MLAIYARISQDKGDNQSSIENQIHFGKQYADKLKLNYKIYQDIGVSGTLPIEQRAELFRLIQDIEAKEITYVFSYDQSRIERDNVVWNSIWLLFQQHNIKLYFHSGGEFNFNSPDTFLSSNVLSVFNSFFVKLTKQKVVNALQKNVETGRVHASPPYGYTKDINKLLIIDKEEAEIVERIYEMSLEGKGTDKIAEILNLEEVPTAYSKLEKGGIYKVRDRYNPNLITEKKKSDAKWRGRTIQGIIKNTIYKGQRFWRGNYYPAPAIFDEVYWQKVNENLQKNRNNTGKKVEHKYLLKGIIKCNCGRNMYGRTRVSKRDHTYICSSRRYKGENCGNRAINIDKIEKIIWEHFFIRKELLELLNNSTDSQNEILEDLKQEESLLDKKIEDNQKSRSNLVRAISNGVINDEDARDEISKIKENLTKYNLDKALIASRVADVQNFESLIVDTRTDFENFSNDIDFDTKRSLIHKYVERIIVVYDDGREHKKGFKYPPYTYHIQIEFKNGIVKENYIYNVKDNIILSLRDRAFKLLTENGIVETMDSDMIEKSIIPLSNGKLLLKPFLGKDNCTYILDNTIIPHGDLRTWNVKKVVDFYTLSKTWLCKESGINILTENKTDESYQWFVRNYKNYQDKPLIEWVTFLFEALDYTDLLITPKAKSKLKE

SEQ ID NO: 57602 - DNA, 50 bp, Chryseobacterium indoltheticum
  source 1..50: mol_type = genomic DNA
gccccctcattcaagagaatgacagatgttgttgtatagaatgtggtgta

SEQ ID NO: 57603 - DNA, 40 bp, Chryseobacterium indoltheticum
  source 1..40: mol_type = genomic DNA
acctcatcatacgatttcagatgttgcgcttgttggtggc

SEQ ID NO: 57604 - DNA, 40 bp, Chryseobacterium indoltheticum
  source 1..40: mol_type = genomic DNA
acctcatcatacgatttcacttgttgcgcttgttggtggc

SEQ ID NO: 57605 - DNA, 50 bp, Chryseobacterium indoltheticum
  source 1..50: mol_type = genomic DNA
gccctctctgcttccagcatgacacttgttgctgtgtcctctggagggca

SEQ ID NO: 57606 - protein, 564 aa, Pseudomonas putida
MSKVFSYIRFSSAKQSAGDSYARQVKAAKAFCDEHGLEMADPREYLFFDAGRSAFKGKHLDDTGELARFLSYVEDGTIPSGSYLVVESLDRLSRERVRDALPRFLDLLAKGINVYTSVDKRLYTKDYNELDLIISIISMSRAHEESATKGDRVSSAWRAKQKEARTTGKPLGKLRPLWLDVRPDGYVLNADKAAVVRRIFDLSTKGHGSRIIAATLNQEGIPAFSAGRKNFSGLWGFSTVRHILDSRTVLGEYQPHVFIEGKRTPDGEPIKGYFPAAVTEDDFYLAQAARTSRKTHTVTKATTNFNVLAGILNCYKCGAAMHLQGQRGRKYYKCSKTTRGLCDAGIISAPRTEEVFKEILTKVDSLSLVQDSSGSLQKGLQIVEGRIASLKARQDDAAASHAEFPSRITAKLLHELEADIGALESERATISEQLVSDNVINKDDFFERLDLVSFEGRVAANNLIKRLGLFIFASKNGRTDETYWITKSNAIPLPFSAEAPNLLFYLMHRGKEIRFEAMYDEYVDLQVAQGEINEVEAIFDKTESWDELPSELLALLKARHGIAK

SEQ ID NO: 57607 - DNA, 50 bp, Pseudomonas putida
  source 1..50: mol_type = genomic DNA
agcagtgtattgttgcacaacatcaagaaatgctgcaacaattacctacc

SEQ ID NO: 57608 - DNA, 40 bp, Pseudomonas putida; identical to SEQ ID NO: 28678
  source 1..40: mol_type = genomic DNA

SEQ ID NO: 57609 - DNA, 40 bp, Pseudomonas putida
  source 1..40: mol_type = genomic DNA
cgccagcgggcacaaattcttgaaatgctgcgccagctac

SEQ ID NO: 57610 - DNA, 50 bp, Pseudomonas putida
  source 1..50: mol_type = genomic DNA
atcagtgtactattactcaacaagtttaaatgctagttccatttcctaca

SEQ ID NO: 57611 - protein, 551 aa, Pseudomonas aeruginosa
MPTAYAYIRYSSKAQGEAGKDSVDRQMASIQAITKQQGIDLLPENIFSDTGISGFDGSNKNKGKLKDLIDLIINQKIQEGDFVFVESIDRLSRQKMRLSKDLVYTILDRGVTLVTTIDGQMYSRNKDGMEQDIMLSVIAQRAHEESKTKSIRRKSAWNRAKKLADEEKEIFNGHNPPYGISFNKEVNRFEIVEEEAQEIRDIFESLKYVGVSLTIKKVNEYSKRKWTNRNIKHLLDTKYVLGSYMAQKRDENKKKVFERYIENYYPQIVSFELFNEAVASMKNRAHRKHYGNQTVGSLNIFRHSIKCSNCNASMLFEKQTNPKGVVYPYFQCFTRKELKNGCDQPRFRFDLAFGVFLELVKFATTSSESINPNEWNNETASVGTFHKTLFKLLTSTEKDKALEQKISHVKNLLLEQKNYQDNINKSFEAFKDGIIPAAFIKKASETEIKIEALERELAELNIESSTRNVSLMVHSYNDIISLYQTESGRQKINSFFTSNDIAFSFLFNQKTRILRCKIYYKDIHVDVINKKFPLHNPLKEFGIDNLNQYFN

SEQ ID NO: 57612 - DNA, 50 bp, Pseudomonas aeruginosa
  source 1..50: mol_type = genomic DNA
gtgtgagatttacccctaccattcgagagtggcaggtggtattctcacac

SEQ ID NO: 57613 - DNA, 40 bp, Pseudomonas aeruginosa
  source 1..40: mol_type = genomic DNA
ggtcctgcgcgaaccgctggaaagcggcgagatcgtcatt

SEQ ID NO: 57614 - DNA, 40 bp, Pseudomonas aeruginosa
  source 1..40: mol_type = genomic DNA
ggtcctgcgcgaaccgctgcaaagcggcgagatcgtcatt

SEQ ID NO: 57615 - DNA, 50 bp, Pseudomonas aeruginosa
  source 1..50: mol_type = genomic DNA
gtgtgagatgacaagctatcccagcattgtggcatggtgaattctcaccc

SEQ ID NO: 57616 - protein, 477 aa, Caproicibacter fermentans
MTGKHLTGTVIYGYLWADEKRERWIVDEEAAAVVRRIFAMTMEGHGPYQIAQQLTADKVEIPAVHLARHGEGVNKNKTFKDIHGWGSSTIVNILKKREYLGHTINFKTRKHFKDKKSHYVDESEWTIFENTHEAIIDQETFDNVQRIRGNVRRYPDGWGEAHPLTGLMYCAGCGGKMYVHRSNNGKRIPQYTCSQYSKVPVGMLCPTQHRINADVVMTLIADTLRAIAAYSKNDRAEFIQTVKDAQIAQQSGDIAQKKKRLAEAKKRSEELEKLLCQIYEDKILGKLPEARFATLDARYADEQDELSGEIEELEQAITIYEHKQQSTEKFIALIDKYENFDTLTNTMLNEFVEKIVVHERDHKGCQDTTQEVEIYFNFVGKYVPPHFGEISLTPEEQEAMRKKEGLRDRLHRNYLRRKANGAQKRYEDKVKATKKVEIEAKKAVLRTEDMAKGVFVPFGVLPKAEPQTSLLPIRPAI

SEQ ID NO: 57617 - DNA, 50 bp, Caproicibacter fermentans
  source 1..50: mol_type = genomic DNA
taccctgctttatgagaagattactaacgaatttttcgtccgggatacca

SEQ ID NO: 57618 - DNA, 40 bp, Caproicibacter fermentans
  source 1..40: mol_type = genomic DNA
ttcccgaataacgcatgttcaacgagtggtacgccagaga

SEQ ID NO: 57619 - DNA, 40 bp, Caproicibacter fermentans
  source 1..40: mol_type = genomic DNA
ttcccgaataacgcatgttacacgagtggtacgccagaga

SEQ ID NO: 57620 - DNA, 50 bp, Caproicibacter fermentans
  source 1..50: mol_type = genomic DNA
taccaagctttcaaagaagaacacacaccaattttcctcaaactattcca

SEQ ID NO: 57621 - protein, 540 aa, Caproicibacter fermentans
MLTVQQNYKVGIYVRLSKDDERAGESVSIENQKLMLTKYCEEQGWNDYFTYCDDGVSGTTFDRPGVSQLIEDAKDGKINLILVKDLSRFGRNYIQVGQFTDYLFPMIGCRFIALNDGVDTINSDNDIMPFRNLFNEFQSKDTSKKIKAVKQAHAKLGNYLGCYVPYGYRASPDDKHKFIIDEAVAENVRKMFRYRRQGLGFRKIAGLLNAEHILPPRDYYYLTKGTEDRGRRNHCWNEVTVKKMLRNEVYIGHMVQNKRGTMSYKNKKQIDKPKDEWIKVEHTHEPIIDMDTWNACAELDQRRCKMRSVKGTSEPSLFGGLLRCMDCGFKMRYTEENHTYPKKGHVKYISYMCGSYARSGKAACSAHIIYLRPLSELVLDDIRHRAKRVLEDEDRVRRELLEQKAKQNDRQSKADRTTLKATEKRLAELERLTQALYEDKVLGTVPEAVFKNLLTKYEAERVEKQSLVQSLKQKLADTAQDEHDIEQYLANIRKYVSMEQLDREMLLELINYIEIGERGEKNGQKYRDVVIHYNLVDKAG

SEQ ID NO: 57622 - DNA, 50 bp, Caproicibacter fermentans; identical to SEQ ID NO: 57617
  source 1..50: mol_type = genomic DNA

SEQ ID NO: 57623 - DNA, 40 bp, Caproicibacter fermentans; identical to SEQ ID NO: 57618
  source 1..40: mol_type = genomic DNA

SEQ ID NO: 57624 - DNA, 40 bp, Caproicibacter fermentans; identical to SEQ ID NO: 57619
  source 1..40: mol_type = genomic DNA

SEQ ID NO: 57625 - DNA, 50 bp, Caproicibacter fermentans; identical to SEQ ID NO: 57620
  source 1..50: mol_type = genomic DNA

SEQ ID NO: 57626 - protein, 550 aa, Oscillospiraceae bacterium
MWQHDKYSNTFVPGVLPSDGSQITACYTRLSQEDEQDGDSGSILNQRDFLLKYCTDLRLANVFFFSDDGYSGVSFDRPGFKELMDLVEQGRVKSIIVKDHSRLGRNRLAVGLLMERFEDSGVRYIAVADGIDSEKGLDDMVAVRELFNEFYPRDTSKKIRAVLTSKGNSGQRLCTQVPYGYTGNKYGWEVDDEAAQVVREIFRLCMNGLGPMQIAKRLKAAQILTPTAYKLQRGYSVPNHPREDPFDWDSRLVAKILDRMEYLGCTVNFKTRKKSYKSKKTLVLPPEERKVFENTHPAIIDRETWERVQELRKNKRRPTKTGRQSMFSGLLYCADCGAKLHYCTTVSFEDRQNHFVCSNYKSNTGTCSAHFIREVILYDIVLADLRDTIAYVRDYEQEFAQAVMDKSYAEQRKTTAQKRRELDQAQRRIPQLDTLFQRLYEDNVSGKLSDERYSKLAKGYEDEQRELTERVKVLQAELDEAQGKAVNLDRFISLVHENLELAELTPKIVNEFIRRIIVYAPDKSSGKRTQKVKIIYNLIGDVPKHARKTA

SEQ ID NO: 57627 - DNA, 50 bp, Oscillospiraceae bacterium
  source 1..50: mol_type = genomic DNA
atacttccttatcggcccccggatttaggcgggggccgataaggaagtag

SEQ ID NO: 57628 - DNA, 40 bp, Oscillospiraceae bacterium
  source 1..40: mol_type = genomic DNA
gccaaaaggaccgccggatttttccggcggtccttttatc

SEQ ID NO: 57629 - DNA, 40 bp, Oscillospiraceae bacterium
  source 1..40: mol_type = genomic DNA
gccaaaaggaccgccggattcttccggcggtccttttatc

SEQ ID NO: 57630 - DNA, 50 bp, Oscillospiraceae bacterium
  source 1..50: mol_type = genomic DNA
atacttacaaaatagaccctggattcaggtgtgggtctatgagcaagtga

SEQ ID NO: 57631 - protein, 479 aa, Streptomyces hygroscopicus
MTSPQARQRSSFTGERAAIYCRISQAHDDDQTGVDRQERICRETAERLGLSIEAASVYIDNNRSAWKRNRKRPGWDKLLTAMRDGDVQHVIVYHPDRLMRQPRDLEELLTIADEQQLTLHGQANRRDLSNADDRFFLRIEVAHACRSSDDTSRRLKDAMEDEAAAGNPHTGRRPYGYDKNGRTIIEAEAEIIREVFRRYLDGEAPGQIARKIHERGERTAYGKTWEEGTVRRLLDNPYVAGVRIFRGKEVGIGNWPAIIDRGTWDEVQQLRQVRAVQDRARRKPRRYYLLRGVVTCSCGQRMSGSGGSKANYRCTRKAVNDSDKRCQRIINAEPLERFARDVAIEVLKKLDLSGRTPAATSMSEADAQAHGDDEQQLRELNEMWTAKEISTPEYRSMRKTIDARMNKRQRKIVQRPIEVLEGLAGPQAAANWRRLEKAEDYARMNAVFRFLFAAVIIHPTTSRNSFDPDRIEIEPNPLD

SEQ ID NO: 57632 - DNA, 50 bp, Streptomyces hygroscopicus
  source 1..50: mol_type = genomic DNA
ggactgtatgaacagtggttgacatcggccaatgctcgttaatacagtcc

SEQ ID NO: 57633 - DNA, 40 bp, Streptomyces hygroscopicus
  source 1..40: mol_type = genomic DNA
ggtggcgctgctgttcggctcggccaaccgcgacccggcc

SEQ ID NO: 57634 - DNA, 40 bp, Streptomyces hygroscopicus
  source 1..40: mol_type = genomic DNA
ggtggcgctgctgttcggcgtggccaaccgcgacccggcc

SEQ ID NO: 57635 - DNA, 50 bp, Streptomyces hygroscopicus
  source 1..50: mol_type = genomic DNA
ggactgtggggagggtggtaaacagtggcccatgctgggcgctaaggcca

SEQ ID NO: 57636 - protein, 568 aa, Mycobacterium marinum
  SITE 119: note = misc_feature - Xaa can be any naturally occurring amino acid
  SITE 224: note = misc_feature - Xaa can be any naturally occurring amino acid
MKAAVVDDRPGRTTRALIVIRLSRVTDATTSPERQLEACRALCLQRGYEVVGVAEDLDVSAGKTSPFDRPQLGDWLSNRPHEFDVVVFFRADRIVRRLFDLADLIRWCRDYSVTLVSAXESHFDLSSEWGDIIAMLVAKVAEMELAAISERNASAARHNIRAGKYRGGVPPWGYRPDKATGEWRLVKDPEQVAVIREVVDRVLSGESLRSVAYALTERKNLTPXDTFARYQGRELGYQDKRCDGSDHVEACRCCDRYEWHSGGLKRSLTNETLLGYALYKGKIVRDDDGSPMVRADPILSREVFDRVGAELANRENRKEPTKRSTGLLLRVIYCAVCGQPAYRLKGGPGRSPRYRCASAQHASQKRGPNSHVEQSCGSKSILLDYADGAVERIVLSMLGESERLEREWDSGSDHSAELTEINDTLTDLTSLIGTDVYRAGTPQRTQLDARIAGYAARQAELSAEEVKPAGWRWKPTGEKFADWWARQDVTARNVWLRSMNVRLGFGPGELHLDLGDIFGLTQQMNARGPVADWQRILTDMRDNDIDGIEIRGDDIKIHPNTRKAHDDR

SEQ ID NO: 57637 - DNA, 50 bp, Mycobacterium marinum
  source 1..50: mol_type = genomic DNA
gtgttgtaaaacttgacagtcgaatactcgaacaactaggtttacaaccc

SEQ ID NO: 57638 - DNA, 40 bp, Mycobacterium marinum
  source 1..40: mol_type = genomic DNA
tgcgattgtgcccaaagcatattcgacggtggacatgccc

SEQ ID NO: 57639 - DNA, 40 bp, Mycobacterium marinum
  source 1..40: mol_type = genomic DNA
tgcgattgtgcccaaagcaaattcgacggtggacatgccc

SEQ ID NO: 57640 - DNA, 50 bp, Mycobacterium marinum
  source 1..50: mol_type = genomic DNA
gtgttgtaattacatactatagaaaactccaccaacctctatttcaaggt

SEQ ID NO: 57641 - protein, 565 aa, Dorea formicigenerans
MTDVKEDTKKIVRILLRVSSDQQLEANGDLSIQRKLVVEEVKKHEEWILDSKEYFEGSNSGYKNSVADRDVLQEALRDAENREYDILLAYKDDRLGRRMLEIPVYIMSLKQFGVDVYTVKDGLLTPDLGDVMGMLKLAMQYGMAEKSSSDTGMRVKDTAKKLVQQGKFMGGKAPYGYKLEYSGEYSKHQRALKHLVIVPEHAEVVKYIYKLSLYKEYGSGKIATTLNLDNRYKNLAPNDVWKSGTITSILTNPIYAGYTAYGRRQHTAGRYRSLSQEDWIIAEKPNDEITIIDRDMWEKVQISRQKRGTKYQKQPWNEKATVISRNDGQLALIDVAYCGYCGRKLTNGTKYDYWTIKGTGERRSSQKSIYKCQNVWQGVPHEKMKQIRADKIEPIVFKKLSEYVGRLQEDENIFEQILENQSFEKSQQEQILVREKRNLQEIEKNIDILNDAIPNAITGTYPLSLEDLAKSIERQKDKASKQKTVVEELETNIKNLSVSQEDWENLYHNLPTWQDIFMNADVATKRVLVNKLIERIDITDDTVVIHFKVDLDHFCPQPRMTNYDG

SEQ ID NO: 57642 - DNA, 50 bp, Dorea formicigenerans
  source 1..50: mol_type = genomic DNA
cccagaatgaccaattacgatggggtcacttcgtatatggtcactcaggg

SEQ ID NO: 57643 - DNA, 40 bp, Dorea formicigenerans
  source 1..40: mol_type = genomic DNA
atcgggtctatacagaatggtaccggaaccagggctatga

SEQ ID NO: 57644 - DNA, 40 bp, Dorea formicigenerans
  source 1..40: mol_type = genomic DNA
atcgggtctatacagaatgataccggaaccagggctatga

SEQ ID NO: 57645 - DNA, 50 bp, Dorea formicigenerans
  source 1..50: mol_type = genomic DNA
tccagagtctccatttacaggtggattacttattatctcatcactcaggg

SEQ ID NO: 57646 - protein, 432 aa, Dorea formicigenerans
MLKLAMQYGMAEKSSSDTGMRVKDTAKKLVQQGKFMGGKAPYGYKLEYSGEYSKHQRALKHLVIVPEHAEVVKYIYKLSLYKEYGSGKIATTLNLDNRYKNLAPNDVWKSGTITSILTNPIYAGYTAYGRRQHTAGRYRSLSQEDWIIAEKPNDEITIIDRDMWEKVQISRQKRGTKYQKQPWNEKATVISRNDGQLALIDVAYCGYCGRKLTNGTKYDYWTIKGTGERRSSQKSIYKCQNVWQGVPHEKMKQIRADKIEPIVFKKLSEYVGRLQEDENIFEQILENQSFEKSQQEQILVREKRNLQEIEKNIDILNDAIPNAITGTYPLSLEDLAKSIERQKDKASKQKTVVEELETNIKNLSVSQEDWENLYHNLPTWQDIFMNADVATKRVLVNKLIERIDITDDTVVIHFKVDLDHFCPQPRMTNYDG

SEQ ID NO: 57647 - DNA, 50 bp, Dorea formicigenerans; identical to SEQ ID NO: 57642
  source 1..50: mol_type = genomic DNA

SEQ ID NO: 57648 - DNA, 40 bp, Dorea formicigenerans; identical to SEQ ID NO: 57643
  source 1..40: mol_type = genomic DNA

SEQ ID NO: 57649 - DNA, 40 bp, Dorea formicigenerans; identical to SEQ ID NO: 57644
  source 1..40: mol_type = genomic DNA

SEQ ID NO: 57650 - DNA, 50 bp, Dorea formicigenerans; identical to SEQ ID NO: 57645
  source 1..50: mol_type = genomic DNA

SEQ ID NO: 57651 - protein, 565 aa, Dorea formicigenerans
MTDVKEDTKKIVRILLRVSSDQQLEANGDLSIQRKLVVEEVKKHEEWILDSKEYFEGSNSGYKNSVADRDVLQEALRDAENREYDILLAYKDDRLGRRMLEIPMYIMSLKQFGVDVYTVKDGLLTPDLGDVMGMLKLAMQYGMAEKSSSDTGMRVKDTAKKLVQQGKFMGGKAPYGYKLEYSGEYSKHQRALKHLVIVPEHAEVVKYIYKLSLYKEYGSGKIATTLNLDNRYKNLAPNDVWKSGTITSILTNPIYAGYTAYGRRQHTAGRYRSLSQEDWIIAEKPNDEITIIDRDMWEKVQISRQKRGTKYQKQPWNEKATVISRNDGQLALIDVAYCGYCGRKLTNGTKYDYWTIKGTGERRSSQKSIYKCQNVWQGVPHEKMKQIRADKIEPIVFKKLSEYVGRLQEDENIFEQILENQSFEKSQQEQILVREKRNLQEIEKNIDILNDAIPNAITGTYPLSLEDLAKSIERQKDKASKQKTVVEELETNIKNLSVSQEDWENLYHNLPTWQDIFMNADVATKRVLVNKLIERIDITDDTVVIHFKVDLDHFCPQPRMTNYDG

SEQ ID NO: 57652 - DNA, 50 bp, Dorea formicigenerans; identical to SEQ ID NO: 57642
  source 1..50: mol_type = genomic DNA

SEQ ID NO: 57653 - DNA, 40 bp, Dorea formicigenerans; identical to SEQ ID NO: 57643
  source 1..40: mol_type = genomic DNA

SEQ ID NO: 57654 - DNA, 40 bp, Dorea formicigenerans; identical to SEQ ID NO: 57644
  source 1..40: mol_type = genomic DNA

SEQ ID NO: 57655 - DNA, 50 bp, Dorea formicigenerans; identical to SEQ ID NO: 57645
  source 1..50: mol_type = genomic DNA

SEQ ID NO: 57656 - protein, 463 aa, Staphylococcus epidermidis
MKVAIYTRVSTAEQNLNGFSIHEQRKKLISFCEINEWKEYEVFTDGGFSGGSTKRPALQDLFNRLTQFDLVLVYKLDRLTRNVRDLLEMLERFEKYNVSFKSATEVFDTTTAIGKLFITIVGAMAEWERETIRERSLFGSRAAVESGKYIREQPFVYDNIEGKLVPNENTKYIEYIVKKFKEGNSANEIARLLNSKKKPFKIKNWNRQTIIRLIKNPVLRGHTKFGDIFMENTHEPVLSDDDYHKVINAIENKTHKSKSKHNAIFRGVLKCPQCNGNLHLYAGTIRPKNGRSYNVRRYTCDKCHRDKYSRNISFNESEIENKFIEELEKMDLTRFEIHKPKKVEINIESDKKRIKEQRTKLLRAYTMGYVEEEEFKIIMDETQRQLEDIKREENKETVQEIDEKQIKSIGNFIIEGWKTLTIKEKEKLILSSVDKIDIEFIPRKKNNNSNTNTVNIKKVHFIF

SEQ ID NO: 57657 - DNA, 50 bp, Staphylococcus epidermidis; identical to SEQ ID NO: 51802
  source 1..50: mol_type = genomic DNA

SEQ ID NO: 57658 - DNA, 40 bp, Staphylococcus epidermidis; identical to SEQ ID NO: 54878
  source 1..40: mol_type = genomic DNA

SEQ ID NO: 57659 - DNA, 40 bp, Staphylococcus epidermidis
  source 1..40: mol_type = genomic DNA
cataaatggcacaactaatagtgcaccggttcctcccata

SEQ ID NO: 57660 - DNA, 50 bp, Staphylococcus epidermidis
  source 1..50: mol_type = genomic DNA
aatgtgtttgcatgaattatagccagagggcttcaaagaatatccacaca

SEQ ID NO: 57661 - protein, 463 aa, Staphylococcus epidermidis
MKVAIYTRVSTAEQNLNGFSIHEQRKKLISFCEINEWKEYEVFTDGGFSGGSTKRPALQDLFNRLTQFDLVLVYKLDRLTRNVRDLLEMLERFEKYNVSFKSATEVFDTTTAIGKLFITIVGAMAEWERETIRERSLFGSRAAVESGKYIREQPFVYDNIEGKLVPNENTKYIEYIVKKFKEGNSANEIARLLNSKKKPSKIKNWNRQTIIRLIKNPVLRGHTKFGDIFMENTHEPVLSDDDYHKVINAIENKTHKSKSKHNAIFRGVLKCPQCNGNLHLYAGTIRPKNGRSYNVRRYTCDKCHRDKYSRNISFNESEIENKFIEELEKMDLTRFEIHKPKKVEINIESDKKRIKEQRTKLLRAYTMGYAEEEEFKIIMDETQRQLEDIKREENKETVQEIDEKQIKSIGNFIIEGWKTLTIKEKEKLILSSVDKIDIEFIPREKNNNSNTNTVNIKKVHFIF

SEQ ID NO: 57662 - DNA, 50 bp, Staphylococcus epidermidis; identical to SEQ ID NO: 51802
  source 1..50: mol_type = genomic DNA

SEQ ID NO: 57663 - DNA, 40 bp, Staphylococcus epidermidis; identical to SEQ ID NO: 54878
  source 1..40: mol_type = genomic DNA

SEQ ID NO: 57664 - DNA, 40 bp, Staphylococcus epidermidis; identical to SEQ ID NO: 57659
  source 1..40: mol_type = genomic DNA

SEQ ID NO: 57665 - DNA, 50 bp, Staphylococcus epidermidis; identical to SEQ ID NO: 57660
  source 1..50: mol_type = genomic DNA

SEQ ID NO: 57666 - protein, 506 aa, Burkholderia cenocepacia
MELDASLSLRDEGLSAYHQRHVRQGALGVFLRAVEDGHVPAGSVLIVEGLDRLSRAEPLQAQAQLAQIVNAGITVVTASDGREYNRERLKAQPMDLVYSLLVMIRAHEESDTKSKRVKAAIRRQCQGWIAGTWRAPIRVGKDPHWVKETEAGGFELANDRAAAVRLVIEMFKQGHGAVRIVRELADRGLKITDSGRSASSHIYRLLANRMLIGEKSVEVDGETFRLEGYYPALLTPAEFADLRYLAEQRGRRKGKGEIPGVVTGLGITYCGYCGAAIVAQNIMGRRRAADGRPYPGHRRLHCVTYSQSAGCKVSGSCSVVPVERALMLYCSDQINLTRLLEGDSGIDVLSAQLASARQHVEELDAQVQRVTDALLLDDGEAPVAVLRRVRELESQLANARRDVDSFEHRLAASASNGAPAAADAWQQLVNGVEQLDYDARMLARQLVADTFSKIVIYQSGFHPGDDEGIIGLILVAKRGTTRLLNVDRKTGAWRAAEEVNPLLFAT

SEQ ID NO: 57667 - DNA, 50 bp, Burkholderia cenocepacia
  source 1..50: mol_type = genomic DNA
agtttatttatgctgatcttcgggcacccgagggataccatacctatacg

SEQ ID NO: 57668 - DNA, 40 bp, Burkholderia cenocepacia
  source 1..40: mol_type = genomic DNA
atcgacgagcgctttcgggcacccgagggatacgaaccct

SEQ ID NO: 57669 - DNA, 40 bp, Burkholderia cenocepacia
  source 1..40: mol_type = genomic DNA
atcgacgagcgctttcgggctcccgagggatacgaaccct

SEQ ID NO: 57670 - DNA, 50 bp, Burkholderia cenocepacia
  source 1..50: mol_type = genomic DNA
tgtttattttcagagagctttgagctctccagggatgggcaactgataat

SEQ ID NO: 57671 - protein, 527 aa, Roseburia intestinalis; identical to SEQ ID NO: 52546

SEQ ID NO: 57672 - DNA, 50 bp, Roseburia intestinalis
  source 1..50: mol_type = genomic DNA
aggttccaaatagttacaaccatacatatagacgtaacaatgtagaacga

SEQ ID NO: 57673 - DNA, 40 bp, Roseburia intestinalis
  source 1..40: mol_type = genomic DNA
gattagcaagagtacggtacataaagatgttacagaacgc

SEQ ID NO: 57674 - DNA, 40 bp, Roseburia intestinalis
  source 1..40: mol_type = genomic DNA
gattagcaagagtacggtaaataaagatgttacagaacgc

SEQ ID NO: 57675 - DNA, 50 bp, Roseburia intestinalis
  source 1..50: mol_type = genomic DNA
agtttccattttattataaacataaatgatgacatagagttttagaaaga

SEQ ID NO: 57676 - protein, 598 aa, Pseudomonas tolaasii
MIFSHFIKRHRKSGMPTAYAYIRYSSKAQGEAGRDSVDRQMASIQAITKQQGIELPPENIYSDTGISAHDGSNKRKGKLKELIDMISDMHIKEGDYIFVESIDRLSRQRLLQAKELVNGILEKGVILITTIDGQRYEKPNETNRIDDLQQDILLSVIAKRAYEESKTKSVRRKSAWNRAKKLAEEENVIFNAHNPPYGIRYNTELNCFEINEEEAQEIRDFFESLKYVGVSLSIKKLNAYSKRKWSSRNIKHLIDTKYVLGAYMAQRRDENKKKVFERYIENYYPQIVSYELFNEAIAAMKNRAQRKNYGNQSVGSLNIFRHSIKCECCQASMLFEKQTNPKGVVYPYFQCYTRKELKNGCDQPRFRFDLAFGLFLELIYQSTTHEDFDVHPWQNEIEDTGIQYEWITRESGMKYRLPTQEDIDEEERTENFKELLIKLLSNRENQTKDNKKTVELTNLLLEQKSYRDNLMKSFAGFTSGVIPKEFLEVVSKTEATINDIEQNLAELQTQINIKKTTINIYSETDIIDLYKTEDGRLKINQFFVANDITFKFNFDKTTRTLFAKIFQNGFEIDRIAKQFSLHNPLKEFGINNLNEYFN

SEQ ID NO: 57677 - DNA, 50 bp, Pseudomonas tolaasii
  source 1..50: mol_type = genomic DNA
gtgtgagatttacccctaccattcgagagcggcagatgatattctcacac

SEQ ID NO: 57678 - DNA, 40 bp, Pseudomonas tolaasii
  source 1..40: mol_type = genomic DNA
agtactgcgcgaacccctggagtcaggccacatcgtgatt

SEQ ID NO: 57679 - DNA, 40 bp, Pseudomonas tolaasii
  source 1..40: mol_type = genomic DNA
agtactgcgcgaacccctgcagtcaggccacatcgtgatt

SEQ ID NO: 57680 - DNA, 50 bp, Pseudomonas tolaasii
  source 1..50: mol_type = genomic DNA
acctgagatctcagcttacccttccagggaggaagataccattctcaacc

SEQ ID NO: 57681 - protein, 470 aa, Rhodococcus rhodochrous
MRAAIYLRQSQDRTGDEYGIERQREQVQQLAAQRGWTIVATYVDNDVSATSRKPRPQFEQMLADLQTGAFDVICARHMDRLLRRLSDLERVLELCEPHGVAIVTAADGVDTTTDGGRLVARILGSVAQGEVERKSARQRAAVLQAAQQGRWVGGRRAFGYESDGVTLREDEAAAIRKGYEAVLAGEPVTAIARMWNDAGLSTTQLKRDGSPGQWQRSGTRDVLLNPRNAGLRRHRPEGDQSAFRKNPEAFVVGRAEWPAIVDEDTWRAAVRVLVSPDRRRAPTRGRQLLTGVGRCHCGSTVHTGGARRDYRTYRCKAQPGHLARKADPIEAYVEAVVVERLSRPDALRLLVPSPTVDTAALGAEADVLRRRLDDLAEDYADGVLTRQQFRTANDRVRARLAEIESTLAESGAGDLLAPILTGGDVAAAWADLSVARKRTVIDALMTVTLHPVGRGVRTFRPESVGIEWRR

SEQ ID NO: 57682 - DNA, 50 bp, Rhodococcus rhodochrous
  source 1..50: mol_type = genomic DNA
atccgctatcgagtagccctgcgggtcgccagtgcacttaaacagcggat

SEQ ID NO: 57683 - DNA, 40 bp, Rhodococcus rhodochrous
  source 1..40: mol_type = genomic DNA
agcggatcgcgcacttcgggtcgcgtggacgctgagcgac

SEQ ID NO: 57684 - DNA, 40 bp, Rhodococcus rhodochrous
  source 1..40: mol_type = genomic DNA
agcggatcgcgcacttcggcccgcgtggacgctgagcgac

SEQ ID NO: 57685 - DNA, 50 bp, Rhodococcus rhodochrous
  source 1..50: mol_type = genomic DNA
ggccgcgcttgaggagcccttcagcccgccagtgcactgtggcagcccct

SEQ ID NO: 57686 - protein, 455 aa, Rhodococcus qingshengii
MRTLIYCRISADREGAGLGVERQREDCEQLAETLGWEVVDTYADNDISAYSGKRRPAYESMLGALKDGRASAVIAWHTDRLHRSPAELETFIGICAEKSVVVRTVQAGELDLSTPTGQMTARIVGAVARHEIDHARKRMALAHAQGAANGKPHGRMPYGYRAVLDESGTKIAKRVPHEDQAPIVLEIVDRILTGESMWSIARDMNDRGVPTGGNTKAWRASNMVEMIQRPVYAAIRTHKGIATPGQWQALITVEQHDRLVAILSDPRRRTHQGSAPKHLLSGIATCGECGATVKRLKNHGYPAYACAGPNHCVSRSQAWVDKLVEQAIIEWCDQLDPAELEAKDGAPDYRAEERALQARLDEATDGYANQVLTLAMLSRIRATIEPQIAEAQRRARESSKNPLVSYLAGAGAAERWDGMNIVDRRSVVRALCTIGILKPPPGRRLDPADIVLAWL

SEQ ID NO: 57687 - DNA, 50 bp, Rhodococcus qingshengii
  source 1..50: mol_type = genomic DNA
tcaccccctttattcccgctaaaccagtagaccgggaatagggatggtgt

SEQ ID NO: 57688 - DNA, 40 bp, Rhodococcus qingshengii
  source 1..40: mol_type = genomic DNA
gacgatcacccagaaataccagtagagccagccagtggtg

SEQ ID NO: 57689 - DNA, 40 bp, Rhodococcus qingshengii
  source 1..40: mol_type = genomic DNA
gacgatcacccagaaatacctgtagagccagccagtggtg

SEQ ID NO: 57690 - DNA, 50 bp, Rhodococcus qingshengii
  source 1..50: mol_type = genomic DNA
tcagcccctcaccccgagctaaaactgtagaaaggggtgtacgaatgtat

SEQ ID NO: 57691 - protein, 550 aa, Brevibacterium linens
MSTTHPPLATAPDQIGATTTLAVTYLRVSTKEQASKGGQDEGFSIPAQRQANLRKAQEVNAIIVEEFVDAGESARQADRPALMQMIEYVKTHPVAYCIVHKVDRLARNRADDVAIHLALKEAGVLLVSATENIDETPSGMLLHGIMSTIAEFYSRNLANEVSKGMNQKAVTGGTNGKAPMGYLNVTRRDELGREVRTIDIDPQRGPILRWAFEAYATGNYSVATLRDELIDRGLTTVPTPKRPAKAPALSSIHRMLASPYYKGNVQFKGATYDGLHEPLVAPEVWYRVQTVLAAHQASGEKTQAHEHYLKGTVFCGTCGSRLILSNARSRSGVIYPYFICAGRHSKRTNCDRKSMFVPDVEAAVEDYYRRVQIPAHIVTALRELITSELDRLFATAKTERKAQVAERDRLYDERTKLLQAHYAGAVPLDLLKTEQDRIARQIAFLDSRVEASEIEYDQARAHLDDCLALAGNAHAIYMSIDDSLRRIANQAFFERLTVTDDDAIDAEPGVPFDTLLNPEVQATALARQQAGGNEADQTGNVAGLNNDALV

SEQ ID NO: 57692 - DNA, 50 bp, Brevibacterium linens
  source 1..50: mol_type = genomic DNA
tggtttgaacaacgacgctctggtgcacctcgctgggtggttctcaaacc

SEQ ID NO: 57693 - DNA, 40 bp, Brevibacterium linens
  source 1..40: mol_type = genomic DNA
tcaattgcctgcgcactgcgcccccggcggggctcgaacc

SEQ ID NO: 57694 - DNA, 40 bp, Brevibacterium linens
  source 1..40: mol_type = genomic DNA
tcaattgcctgcgcactgccaccccggcggggctcgaacc

SEQ ID NO: 57695 - DNA, 50 bp, Brevibacterium linens
  source 1..50: mol_type = genomic DNA
atagttgaaagaacaagctctggtcaacgttgctggtgcagtcttagagc

SEQ ID NO: 57696 - protein, 583 aa, Streptococcus macedonicus
MKKNNVEIIKADSLVRRRGVNVERHLKRVAAYCRVSSDSDDQKNSYESQVRHYKDYISQRSDWELADIYADEGISGTQVGKRQDFQRLINDCVNGEIDYIVTKAIARFARNTLDTLKYVRMLKDMQIGVYFEEENIDTLTMDGELLLTILSSVAQQEVENTSAHVKKGLKMKMQRGELIGFQGCLGYDYDVETKQLSINKKEAKIVRYIFERYLEGIGGKVIARELDELGYKSPRGLDHWNDTTVLGIIKNEKYKGDILMGKTFTVDPISKRRLSNFGEEDKYYIKDNHEPIISKEDFEKAQEIRLRRAGNKKTVANVNGKRERYSKMYAFSSMLECGFCGSLLSRRSWHCRSDYRKIVWHCVTSIKKGKKYCKHSKGLEELAIEGAFMEAYRQLYHSNENIVSDLLETIESELNDNSLNKELKKITNKLRTLLKKEENLVNLKLEGKISDSIYNEKYNELSLEKEYLAEEKVNVETTLKSEIDVKERLTEFKQLLSSQKMLTEFDRTVFESIVEKIIVGGVNSDGEIDPAMLTIISKTGETQNKDGKQFKSKRKNAKLEPDKLCPQNCDEDKKLCSQGIDNT

SEQ ID NO: 57697 - DNA, 50 bp, Streptococcus macedonicus
  source 1..50: mol_type = genomic DNA
tgtgttctcaaggaatagacaacacacgtggagtgcgtagtgttgctaca

SEQ ID NO: 57698 - DNA, 40 bp, Streptococcus macedonicus
  source 1..40: mol_type = genomic DNA
tttgttcccgaatacgcatcatgtggagacggtagcactg

SEQ ID NO: 57699 - DNA, 40 bp, Streptococcus macedonicus
  source 1..40: mol_type = genomic DNA
tttgttcccgaatacgcattgtgtggagacggtagcactg

SEQ ID NO: 57700 - DNA, 50 bp, Streptococcus macedonicus
  source 1..50: mol_type = genomic DNA
tgtgttctcaaattatagctcacatggatagagaacgttttcttgcttca

SEQ ID NO: 57701 - protein, 486 aa, Mycobacterium intracellulare
MSAPATALLKRAIIYTRVSSDRANGRSVAEQEAECRAECERRGWPVADVLADPDRSATRYATKDRPEYERLRTTLQPGDVLVVWEASRAGRSLDHYVDLRRLCSERGVLLSYSGRLFDMDDGDDRFATGLDALIAEREAEDIRKRIVRAHRANLAAGKPHGRVPYGYRIVRDPATGRATGREPDPARAPLVAEAARRILDGHSLEATVRWIAAKDPEPKWNGAKLRRILLNATNAGYRTQSAKVNGKRGPQVIHGEGTWKPILSAEQHNDLVALFAARKTGPRGPEPRNLLSGILACSVCGLPMWRGKGGRKKDGSHYDVYSCRSHCVGRNLQAVDEVVTAVVEGILSTPEARAELAASPAAQPDSTASVRLDELEAQLAAIEDQMADNRMPADVGARVATRLTERIAEARAAAAPTFTNPVVREVATAPDPVGLWRSLPLVQKREFIRAVMIIKIERVGRGRWHAKEDGIIITPRRKPTTAPAGA

SEQ ID NO: 57702 - DNA, 50 bp, Mycobacterium intracellulare
  source 1..50: mol_type = genomic DNA
ttatccgggtaaccacccaaataatgcttcattcgcatatactctgcttt

SEQ ID NO: 57703 - DNA, 40 bp, Mycobacterium intracellulare
  source 1..40: mol_type = genomic DNA
gtaggagcagtcgaacgcgtgcttgagggcgcccgagatg

SEQ ID NO: 57704 - DNA, 40 bp, Mycobacterium intracellulare
  source 1..40: mol_type = genomic DNA
gtaggagcagtcgaacgcgggcttgagggcgcccgagatg

SEQ ID NO: 57705 - DNA, 50 bp, Mycobacterium intracellulare
  source 1..50: mol_type = genomic DNA
ctctcctggagcaaaacccaatcaggcttctctggctctttctttgcttt

SEQ ID NO: 57706 - protein, 499 aa, Enterocloster clostridioformis
MNMKQNLSIPSKIQAAHLDREALVYVRQSTMAQVRFNQESTQRQYALQERALSLGWPEGHIRVIDGDLGISGSGRSKRPGFAQLVTSVSLGEVGAVFGLEISRLARSSADLMKLLELCSLFNTLVIDEDGIYDMSDFNDRLLIGLKGTMGEAELHFLHARMIGGKENAASRGELRFPLPVGYVYDPDGRTIIDPDEEVQHAVSTLFSVFRTSGSAYGVVRYFAENSILFPKRAYGGAWDGKLTWGTLTHSRVLSVIHNPAYTGVYVYGRYRDNKTVNADGHFEHHPVRLPDKEEWRVFIPGHHQAYISWDDFEANQKQLCSNQTNTELCGPAREGAALLPGLLICGKCGRRMTVRYTGNGGIRPLYECVGRWEHGNKATCSSVPAVPLDQAVSDKILSIMKPSELEISLKVMHSINDTDRMSDKQWLLAVERAHYEADRAERQFMLADPENRLVRRLSEPGRPDHPGRKKLHLCRCQMDPLQACYFRPLPEKPSRHLCC

SEQ ID NO: 57707 - DNA, 50 bp, Enterocloster clostridioformis
  source 1..50: mol_type = genomic DNA
tatctagcaggttgtccgtccgaaagtaggattgtaaatccatgctgacc

SEQ ID NO: 57708 - DNA, 40 bp, Enterocloster clostridioformis
  source 1..40: mol_type = genomic DNA
ctgtggttcaccgtgtcaaagtccgtgttggtatcggggt

SEQ ID NO: 57709 - DNA, 40 bp, Enterocloster clostridioformis
  source 1..40: mol_type = genomic DNA
ctgtggttcaccgtgtcaatttccgtgttggtatcggggt

SEQ ID NO: 57710 - DNA, 50 bp, Enterocloster clostridioformis
  source 1..50: mol_type = genomic DNA
tatctaggacccattccaagtgaattttgggttgtacttcccttctgaca

SEQ ID NO: 57711 - protein, 600 aa, Vibrio vulnificus; identical to SEQ ID NO: 12761

SEQ ID NO: 57712 - DNA, 50 bp, Vibrio vulnificus
  source 1..50: mol_type = genomic DNA
tgcgatactaatggatatccaaccaatgaagagtacgtgatagtatcgca

SEQ ID NO: 57713 - DNA, 40 bp, Vibrio vulnificus
  source 1..40: mol_type = genomic DNA
agcgatggttatcccaaccaacgaggaattcgtgatagcc

SEQ ID NO: 57714 - DNA, 40 bp, Vibrio vulnificus
  source 1..40: mol_type = genomic DNA
agcgatggttatcccaacccacgaggaattcgtgatagcc

SEQ ID NO: 57715 - DNA, 50 bp, Vibrio vulnificus
  source 1..50: mol_type = genomic DNA
agggatacatgcagagagccaacacatgaagaggactgaaaagcatcccc

SEQ ID NO: 57716 - protein, 580 aa, Pseudomonas putida
MPTAYAYIRYSSKAQGEAGRDSVDRQMSSIQAITKQQGIELLPENIFSDTGVSGFDGSNKNKGKLKDLIDLIISQTVQEGDYIFVESIDRLSRQKMRLSKELVYSILDRGVTLVTTIDGQMYSRNKDGMEQDIMLSVISTRAHEESKTKSVRRKSAWNRAKKLADDEKAIFNGHNPPYGISYNKEENRFEIVEDEAQEIRDIFESLKYVGVSLTIRKINAYAKRKWTNKNIHLLLQTKYVLGSYMAQRRDENKNKVFERFIENYYPQIVSYELFNEVLEAMKLRAHRKHYGNQTVGSLNIFRHSIKCDCCNASMLFEKQTNPKGVCYGYFHCFTRKELKTNCNQPRFRFDLAYGLFLELVYQATTKEDFDVHPWQQMELEEEKRDRDYVTIGESTRLYMGTPEDKEIEDKIESFRELLVSLLSNKKRQATDNKKLVELRNALLEQKSYKDNLMKSFAGFTNGIIPQEFLAVVSSTELKINDIEGELSKLQAEMNTRKTSINLYSENDVIELYSTEEGRLKINQFFIANDIVFKCNFEKATRTLYCKIHYQGMMIDKIAKQFDLHNPLKKFGINNLNDYFN

SEQ ID NO: 57717 - DNA, 50 bp, Pseudomonas putida
  source 1..50: mol_type = genomic DNA
tgtgtgatttttacccctaccattggagagcagggggtggtattctcaca

SEQ ID NO: 57718 - DNA, 40 bp, Pseudomonas putida
  source 1..40: mol_type = genomic DNA
aggtactgcgcgagccgctggagtcgggcgagatcgtgat

SEQ ID NO: 57719 - DNA, 40 bp, Pseudomonas putida
  source 1..40: mol_type = genomic DNA
aggtactgcgcgagccgctaaagtcgggcgagatcgtgat

SEQ ID NO: 57720 - DNA, 50 bp, Pseudomonas putida
  source 1..50: mol_type = genomic DNA
tgtgacatttgctgccttgccatcaaagagtaggtgcctttgtgctgaca

SEQ ID NO: 57721 - protein, 515 aa, Clostridium innocuum
MQYLIYLRKSRADQEAELRGEGETLARHEKALLELARRQHLPIADIYREVVSGETIASRPMMQQLLSEVEQGVWDGVLVMEVERLARGDTIDQGIVAQAFKLSDTKIITPIKTYDPNNEFDEEYFEFGLFMSRREYKTIKRRLNNGRQASVKEGKYVGNRPPYGYERIKIENDKGFTLKPLEKEAQVVRMMFRWYAYGAHGISTIADQLNEMAIPSKTGKQWVYPTVRDILQNPVYVGKIRWGWRGQRKRVKNGSVSVSRPRSDDYLLADGIHPPIIDQQLFDQVQKKFSMHKPLPTSAREMKNPLAGLVICAKCGAKMQRRPYQRENIRTGLICPNNKCRNVSAPFDDVEQKLIEVLAEYIKEEKLRISNGHTQIDDSILQILQNQLADLREETVDLNKQNDNIHDFLEKGIYDVDTFLQRSQKISSRITEIEEKQKTLQQEIIEENKRIESATSIIPMTEQLLLQYENMSALEKNSMLKEVLRCVKYERECSIRDGGTADNFTLYLYPKISHK

SEQ ID NO: 57722 - DNA, 50 bp, Clostridium innocuum
  source 1..50: mol_type = genomic DNA
gacggataacttttatgtacgcattcgtgagtacctaaaagttatccgtc

SEQ ID NO: 57723 - DNA, 40 bp, Clostridium innocuum
  source 1..40: mol_type = genomic DNA
catttccagatgagcaagctcttccgttccgatatccgtt

SEQ ID NO: 57724 - DNA, 40 bp, Clostridium innocuum
  source 1..40: mol_type = genomic DNA
catttccagatgagcaagcctttccgttccgatatccgtt

SEQ ID NO: 57725 - DNA, 50 bp, Clostridium innocuum
  source 1..50: mol_type = genomic DNA
caggaataagattaatttacgtatctgtgagaaacttcgtgatatacatc

SEQ ID NO: 57726 - protein, 553 aa, Clostridium symbiosum
MRKKCYIYIRVSTAMQVDGYSLEAQKERLMKFAEFQDMEVVREYCDAGKSGKSITGRPEFQRMLQDVSEERDGVAFILVFKLSRFGRNAADVLNSLQFIQDYGVNLICVEDGIDSSKDSGKLTITVLSAVAEIERENILVQTMEGRKQKAREGKWNGGQAPFGYDLDSGNSTLMVNEEEAEIVRIIYDKFVHTDMGADAICNYLNQRGYTKKKVRGHELNYFARGLIMKILDNPVYTGKIAYGKNVTEKVKGTRDEYRRVKTDDYLLADGLHEAIVDEETWEAAREKRKRTGVRFVKTHSLEHEHILTGLIRCPLCGGGMSGTVQRRQNKKTGEYKDTFYYRCHHRKKVDGKICDYKPMLNQKVFNAEVEEFIRYMVAGDEFRSFVQEKLEEKVDVSALETEREQLQKQLKQVQGSKLKLIQMLDRLDTGDKHYTRKYQDMQDRLDNMYDKVAEFEEAMKDIDAKIGASYGKEITGKKLYEFLLDFDILYDKMTDMEKKEFMNTFIEKIELKNETVNNGTSQGSRIEHIDLAFPVYYGDCKGTRIRMPEENTV

SEQ ID NO: 57727 - DNA, 50 bp, Clostridium symbiosum
  source 1..50: mol_type = genomic DNA
cgtatgcccgaagaaaacacagtcgagactgtgtgtcttttgggcaaacg

SEQ ID NO: 57728 - DNA, 40 bp, Clostridium symbiosum
  source 1..40: mol_type = genomic DNA
tccggggacggcgaatgtggaaagtattgtacggttgaag

SEQ ID NO: 57729 - DNA, 40 bp, Clostridium symbiosum
  source 1..40: mol_type = genomic DNA
tccggggacggcgaatgtgagaagtattgtacggttgaag

SEQ ID NO: 57730 - DNA, 50 bp, Clostridium symbiosum
  source 1..50: mol_type = genomic DNA
catctgctcacaagaaacacactcaggtctttgtctcttccaggcaaaga

SEQ ID NO: 57731 - protein, 611 aa, Rhodococcus opacus
MKPSSPGLRVLGRLRLSRLTDESTSIERQRETIQHWADVNGHTVVGWAEDADVSGAVDPFDTPQLGQWLKHRVEEYDVIAAWKLDRLGRNAIQLNKLFGWCLDHNKTLVSCSESIDLSSWAGRMLASVIAGLAEGELEAIRERARGSRVKLRESARFAGGKPPFGYRKKQRPGGGWMLEIDELAAGLVGEIVAAVLDGKPVSRVVSKLNDDGYRTPRDYYETVKVGKPSLILAEGEKRTLHWRSTALRNLLTNPALRGYVHHQGQVARGDDGMPLQLADVPLVDADEWEALQSIFDGHRERRSHYRRPDASPLVGLVFCYWCHSPLWHNRNVSRGHEYFYYRCPNIQQHERASMIPADQAEKAVAESFLDEAGDLPVMERVWVPGDSAEQELKEATTALDDVFAELETAKSEITRERARKRIAALDERISILEAKPKQEARWEYKQLGGTYREAWEALGESDRWQLILKSGMTFAFGLTDRGRGPNSVWVSSVYTPEPLKHTLVSGVKQRRTLADADPNRDVNPADHTTWLPEHWATMREAGIEGIETHQDKTVVVMKSGERVEIPRWLDEIGISEITNDDDVRIAWTTDGRGFYHQPAGEWIEVPLGDAE

SEQ ID NO: 57732 - DNA, 50 bp, Rhodococcus opacus
  source 1..50: mol_type = genomic DNA
gttttgtggaggttgttgtccaactcgtggaacatcaacctgtacacaac

SEQ ID NO: 57733 - DNA, 40 bp, Rhodococcus opacus
  source 1..40: mol_type = genomic DNA
attgggtgggattcggggttcgtggaacatcactcggaac

SEQ ID NO: 57734 - DNA, 40 bp, Rhodococcus opacus; identical to SEQ ID NO: 57733
  source 1..40: mol_type = genomic DNA

SEQ ID NO: 57735 - DNA, 50 bp, Rhodococcus opacus
  source 1..50: mol_type = genomic DNA
atttggtggctacagtatcctaagtcttggaacagcgcttggcacacaac

SEQ ID NO: 57736 - protein, 545 aa, Faecalibacterium prausnitzii; identical to SEQ ID NO: 1931

SEQ ID NO: 57737 - DNA, 50 bp, Faecalibacterium prausnitzii
  source 1..50: mol_type = genomic DNA
ctgcgtaccctttgcggtgcagcattccgtgctgcgcaaaaaagcgtgtt

SEQ ID NO: 57738 - DNA, 40 bp, Faecalibacterium prausnitzii
  source 1..40: mol_type = genomic DNA
agtccctttttgcaaaattttccgggcggcagcggccttt

SEQ ID NO: 57739 - DNA, 40 bp, Faecalibacterium prausnitzii
  source 1..40: mol_type = genomic DNA
agtccctttttgcaaaattggccgggcggcagcggccttt

SEQ ID NO: 57740 - DNA, 50 bp, Faecalibacterium prausnitzii
  source 1..50: mol_type = genomic DNA
ctccatactctgccccatgcagcaggccgtgctgcctcctctaggctgat

SEQ ID NO: 57741 - protein, 497 aa, Bittarella massiliensis
MRYVEDYSVSAVIVKDLSRLGREYSYMGQLQDFIFPAYDVRFIAINDDVDSAKGENDFAVFKNVFNDYYAKDTSKKIRAVVKMRGEAGEHLASNPPYGYIKDPQDKKKWIVDEEAAKVVQRIFNLCIAGKSPMQIAKILTADRVLTVTAYHARQKGWAMPENLCRWCTKSVSGILEWREYTGCTVNFKTYTKSLKFKKRMENPVENQRVFEDTQPAIIEKGQWERVQELRKNKRRPTKTGRTSMFSGLLYCADCGAKLYFCTCKSYKDDSQNHFVCSNYKSNTGSCKIHYIREQVLYRIVLETIQRTLTYVRMFRKDFKLEMLAQDEESRKAELAEKRKALSGAKKRMEDLDRIIQHIYEDNVLGKLSDSRYLKLSRQYEKEQAEIEQLAAVLEREIETQAGQVSDVNEFLKLVNKYLDIPELDAAILNELVSKIVVHSPVRENGRKQVRIDLYFTYVGQIRIPLKIGRESLNESEPACQVTPVPTKFLFTSLWDAA

SEQ ID NO: 57742 - DNA, 50 bp, Bittarella massiliensis
  source 1..50: mol_type = genomic DNA
ttacttccttatgggacgctgcataatggcagaggagcataaagaagtat

SEQ ID NO: 57743 - DNA, 40 bp, Bittarella massiliensis
  source 1..40: mol_type = genomic DNA
gcaaaaaagaggactggcaaaagccagtcctctttttttc

SEQ ID NO: 57744 - DNA, 40 bp, Bittarella massiliensis
  source 1..40: mol_type = genomic DNA
gcaaaaaagaggactggcattagccagtcctctttttttc

SEQ ID NO: 57745 - DNA, 50 bp, Bittarella massiliensis
  source 1..50: mol_type = genomic DNA
tttctttgtactttgtagctgtatttagtcagaggaatagatagaagtgt

SEQ ID NO: 57746 - protein, 465 aa, Staphylococcus kloosii
MTKVAIYTRVSTLEQANEGYSIEGQEKRLKSYCEINDWGKYELFVDAGKSAGSTDRAGLQNLISRLDEFDLILVYKLDRLTRSVRDLMSLLDTFEKHDVKFRSATEVFDTTSAIGKLFITLVGAMAEWERSTIAERTSQGRKMSAEKGNYTAPVPFYYDKIDGKLYPNENRKVVEYMAERVKAGVSLRAVAVELNNSKYMPPQSDLWNKNKIKDVLVAPVTRGHTQISDVFIENSHEAIISESDYEAILSTISTRKHSRGLKHTSVFRGLLSCHQCGQRLTLAITKRKKKNDEIFQYSHYSCARCKADKSVRSVNVIFSEVERAFLHYIKHSDLEAYEDKPTEKPNESIIDVEKIKQQRKKYQQAWAKDLMSDEEFEELIKETDELLDQHNKQLIDEKKKETNSDQIKTARNLILKGWSNMSDEDKETMLSSTISKIEYNFIEGGGVGSKRKPNAIEITKIKFKF

SEQ ID NO: 57747 - DNA, 50 bp, Staphylococcus kloosii
  source 1..50: mol_type = genomic DNA
gtctgggtctttggcaagtcatacaacgttgaacacccaaaaacccagac

SEQ ID NO: 57748 - DNA, 40 bp, Staphylococcus kloosii
  source 1..40: mol_type = genomic DNA
taccggtggtagtgcaatgaactttgaaagacctgttgaa

SEQ ID NO: 57749 - DNA, 40 bp, Staphylococcus kloosii
  source 1..40: mol_type = genomic DNA
taccggtggtagtgcaatgttctttgaaagacctgttgaa

SEQ ID NO: 57750 - DNA, 50 bp, Staphylococcus kloosii
  source 1..50: mol_type = genomic DNA
gtctgcatgattctcaagtcatacttcaacaaacacaataaaactcatat

SEQ ID NO: 57751 - protein, 499 aa, Mycobacteroides abscessus
MEKERAVLYARISLDRTGDEIGVARQLHDLRELAEARGWQVVAETVDNDISATKGLRRPGYEQVWDLVTRGQVDHVVTWQTSRFMRSRDDRARVISTFGAHNVDIVAAKGPSLDLRTAYGRGMADMMTSFDTMEGEVKSERVSAAIGDLARRGKSWGICPYGWDRIGKGVHAKQIENHHEADIVRELVNRLLSGESLNELYRDMNTRGEPSPGYAQWAKLSPEERERRERKGRKQPPREWAKATIRTLVVRDANIGIRRYRKRDNGGTELQGSWPAIVERVKHDRVVALLNAPDRRCHTGPRPGARKHLLTNGVGYCGVCRGPLRVARRRGSLDQTLIYTCEQRGCTGRNQARVDDLVTRVVLGRLAQPDALDWLLGDDEQARRASDRCEELQLRLDEAADSQADGKITIRQLERITARLTPEIEAAQQERDAAVQSMDLDTLRALAGPEAESRWDGMPVSVRRAVLEALGIEVVILPRTKHGPGFEPESVQIEWKTVS

SEQ ID NO: 57752 - DNA, 50 bp, Mycobacteroides abscessus
  source 1..50: mol_type = genomic DNA
acttccggttagtgcctaaccaggcaactataataaccctagagggaagt

SEQ ID NO: 57753 - DNA, 40 bp, Mycobacteroides abscessus; identical to SEQ ID NO: 20213
  source 1..40: mol_type = genomic DNA

SEQ ID NO: 57754 - DNA, 40 bp, Mycobacteroides abscessus
  source 1..40: mol_type = genomic DNA
acggtcggcgcattccaggtcactggtgataccgggcagc

SEQ ID NO: 57755 - DNA, 50 bp, Mycobacteroides abscessus
  source 1..50: mol_type = genomic DNA
ccttcctgacctctccaaaccatgtcactataaatgtcacagagccaagt

SEQ ID NO: 57756 - protein, 551 aa, Coprococcus comes
MSKEKIKVYLYTRVSTTMQIDGYSLDAQKTKMKAFCDYNEYKIVGEYEDAGKSGKSIEGRVSFNQMMEDIKSGKDGVSYVLVFKLSRFGRNAADVLATLQVMQDFGVNLICVEDGIDSSKDAGKLMISVLSAVAEIERENIRVQTMEGRMQKAREGKWNGGFAPYGYSLIDGKLVVNEEEAVAIRMIFDQYVNTDLGANGIAKYLENHGIHKIARQNGKNPLFDAALIRRIIQNPVYSGKISYGRRRTEKVHGTRNEYRQVKKDDYLLVDGLHEALVSEEVWEQAQVKVAAQAKKYEKVNRDKKEKIHLLSGILKCPVCGAGMYGNKSIKKRKDGSNYKDFYYYGCKHRNMTRGHKCDYKKQVHEEMLDASVAEVISKLVSNPKFSDLIRSKINMEVDTGALDQEIENYKIQLRKLYHNKDTILSDMDSLDYEDKHYQRRKTDLENHLYKTYDKIDEAEELLVSAKAKKRSLLADKITGDNIYKALIFFDKLYAQMNEAEKREFLSQLVDNVQIYEERKENGQWLKSIEFKLPIIEKEFTLSLDNDTQNET

SEQ ID NO: 57757 - DNA, 50 bp, Coprococcus comes
  source 1..50: mol_type = genomic DNA
gtttggacaatgatacacaaaatgagacggtagtactgctttcccacaaa

SEQ ID NO: 57758 - DNA, 40 bp, Coprococcus comes
  source 1..40: mol_type = genomic DNA
ccgatgagtgtgcatgtcgagacggttgttcttttgtccc

SEQ ID NO: 57759 - DNA, 40 bp, Coprococcus comes
  source 1..40: mol_type = genomic DNA
ccgatgagtgtgcatgtcggaacggttgttcttttgtccc

SEQ ID NO: 57760 - DNA, 50 bp, Coprococcus comes
  source 1..50: mol_type = genomic DNA
tttcagacagaaggaaaaaaaatggaatggtaagaaggccttcccagaaa

SEQ ID NO: 57761 - protein, 513 aa, Blautia producta
MVIGIYPRKSVYRDNSESIKVQIKLCKEYAKIMYKGEQLDFRVYGKDEGFSGKNTKRPSFQELMRDVKSNLLDVVMVYRLDRISRNVSEFSEMYDIMHAHNVTFLSVKESFDTSTPIGRTVMYILAAFSQFERESTSERVADNMHSLGASGKWTGGKLPAGMSSIRKTVDGKEHSFLVVEDERIGLVKMLYNMYLEGYTITALERYCRDHGLRTESGKFLSTSQIYCILSNPVYCSNSAAAYDYFKERGHTVPDKLFFDGTKGLVSYGKTKQSDKRVINDKYTISVGIHEPVIAAEDWIAVQNRFGVNKFYRSNKYEVGILKGVLKCSCGARMDIRTYVKNGNQFSYYYCARMAREGKNVCDTGYIRVDTIDDAFIKKLMQIKSNPDMIKVRTTELDFVDINKIEAELKSIEQAIENLTNTLSENSSSTAAAYIIKQIEKLDANKAKLESSLYSAMQNNKIVQSEKETKDIIYDYICCLLENFEFMSYQEKNELIKKAVKKCICSNDGIHIIF

SEQ ID NO: 57762 - DNA, 50 bp, Blautia producta
  source 1..50: mol_type = genomic DNA
attctatattttattcgtatcggtgttcctgtcaggataaaatatagaac

SEQ ID NO: 57763 - DNA, 40 bp, Blautia producta
  source 1..40: mol_type = genomic DNA
ttctacagctatgatcggtgttccagtctgccccatcatg

SEQ ID NO: 57764 - DNA, 40 bp, Blautia producta
  source 1..40: mol_type = genomic DNA
ttctacagctatgatcggttatccagtctgccccatcatg

SEQ ID NO: 57765 - DNA, 50 bp, Blautia producta
  source 1..50: mol_type = genomic DNA
tttctatttacttttggtatcagttatcccagcaggaagccctttataac

SEQ ID NO: 57766 - protein, 535 aa, Vibrio toranzoniae
MTEEKNRFAVTYQRFSSERQIGNSSLDRQTDTQKEWLKQNPDVTVIDSFVDEAMSGWSGKHLKDGSLGQLMKAIEDGIIQPGTLILVEHFSRLTRQNIDNAEELIKRIWKAGITVVTVRDNTEYTPEAVNNMSLRIRLIVEMEQAFKESEWRSAKVKASYKRREKLAREEGKAPKMRKPFWLKPDGTLNHLHQAVKDIFNWYLNGLGQQRIVVRLREKYPDPAIQKINPATVMRWIQADIVRGYWRENRVYEAAVDDQLFFDVQAIRKSRLYKNVKPDRKWPLSGLMQCGSCGKGMSIQKSGNCNPVVRCSSKQRDRSCDRKTTFPYFVVHMYMMTHVLQHAVRRHSDKSSNKGLQIELSKVERSLAVARTKLTNEKDYYKKVSDEGKSTVMILDLMNETYQTVSDLEEQENSLKASLKENNHSVSPESRDLVLTPETFNLEMHKLGFKIVVDEQVLSTIGFDKPVRKMVYAGYCKKKRAYQYSSASGNYLHVWPSSWVTDELLNMQNLKDYLDSSAGVRDVWNKLYQDDDKAES

SEQ ID NO: 57767 - DNA, 50 bp, Vibrio toranzoniae
  source 1..50: mol_type = genomic DNA
aatatgcacacctaatctttcgatgagctataggcatagatgtgcaactt

SEQ ID NO: 57768 - DNA, 40 bp, Vibrio toranzoniae
  source 1..40: mol_type = genomic DNA
acgtgatcacatgctttgtgagcttaaagcggctcagagc

SEQ ID NO: 57769 - DNA, 40 bp, Vibrio toranzoniae
  source 1..40: mol_type = genomic DNA
acgtgatcacatgctttgttagcttaaagcggctcagagc

SEQ ID NO: 57770 - DNA, 50 bp, Vibrio toranzoniae
  source 1..50: mol_type = genomic DNA
aaaattcacagttcttacttcgattacccttagttaaggaagtgcaactt

SEQ ID NO: 57771 - protein, 523 aa, Butyricicoccus pullicaecorum
MYFDNPSAYHAALYIRLSKEDEHEGPSQSVQNQQSLLQTFVQQHGLSVYDTYVDDGWSGTNFDRPGFQHMIADIESGKVNLVITKDLSRLGRDYILTGHYMERYFPEHRVRYISLLDGIDTGVDSTANDITPFRAIMNDMYAKDISKKIKSVKRDKQRKGLFIGGKPVYGYKMHPTEKNKIVIDENVAPVVRRIFALALSGMSCRQIAALLNQDGVLTPSAYAHLSITRPGMYSGLWSGERISEMLQNETYIGNMVQGRRVKISYKSKKCLNQSPEHWVIVEGTHEPIIDTETFQKVQALLNSRRHTRSRTYDFALKGLIFCHECGHPLSVINRKNAKGDDVLYLICRTYQRNTRAGVCTSHSIQEQTVTRAVFSKIQKLCASALQPDALFPIASKALQKAQANTAHLSELQGIQSKLDILTANLDQMYADHLSGLLSAEDFARIYQRVNQDRRALEERKHELSQQASCPVSAQDHAHTLVQQFLQTLDSNRALLVSLITRVELTQDKEIILYFRFHAPEAIF

SEQ ID NO: 57772 - DNA, 50 bp, Butyricicoccus pullicaecorum
  source 1..50: mol_type = genomic DNA
cactgacaataagcgcagcgcgatgtatcgcgccgtgcttattgtaagtg

SEQ ID NO: 57773 - DNA, 40 bp, Butyricicoccus pullicaecorum
  source 1..40: mol_type = genomic DNA
gggtatctcacgctcctatgtatcgcgcattgagaaaaaa

SEQ ID NO: 57774 - DNA, 40 bp, Butyricicoccus pullicaecorum; identical to SEQ ID NO: 57773
  source 1..40: mol_type = genomic DNA

SEQ ID NO: 57775 - DNA, 50 bp, Butyricicoccus pullicaecorum
  source 1..50: mol_type = genomic DNA
cacggactaactaagtagcccaaagtttggggcctttaactttgtaagtg

SEQ ID NO: 57776 - protein, 495 aa, Bacillus pumilus
MNIDKKSKVAVYSRKSREDPDTEDTLLKHREQLKALLTRYSFTDVEWFEEVVSSDSIDNRPIFSRLLPRIRSGEFDVVCVIANDRLSRGSQIDSGRIMEAFKESNTLLITPQKIYNMSNESDEMLSEFELVIARNEYRAIKRRLLNGRKGTVKEGRPHSGSVPYGFKWDKNDKTAKVDEEKIKIYRMMIDWFLKEEMSSAAIADRLNQLEIPPPSSRGKMWYGEVVTYLLLNDFHRGYVWYGNDEKNKGVHQPTKTEEEHTQIVERITKLRTYPDVGRRLNMNSHKLSGIVRCPYCLKVQNVHQPKGRQKHVRKCLRKSSAREPMCETTKGINEDILYSAILQEMKQYSSEIFKRNENIESAETTTISVHLIELKEKAIKKLRGRIERLKELYLDGDLDKNEYKEKLEKAQGNLMKSEKELGELYSSIEYQKAKALEKRTSLWQEQDVQALLESDEGMSDSEINIILKKLISHISYKVKDEDGKQPELSVKVYYN

SEQ ID NO: 57777 - DNA, 50 bp, Bacillus pumilus
  source 1..50: mol_type = genomic DNA
tgttgtacccaaacgatatctgtcgtaagcggtattgattgggtacaaca

SEQ ID NO: 57778 - DNA, 40 bp, Bacillus pumilus
  source 1..40: mol_type = genomic DNA
tgtcgtgacagggtctgtcgtcaccattattgggataacc

SEQ ID NO: 57779 - DNA, 40 bp, Bacillus pumilus
  source 1..40: mol_type = genomic DNA
tgtcgtgacagggtctgtctacaccattattgggataacc

SEQ ID NO: 57780 - DNA, 50 bp, Bacillus pumilus
  source 1..50: mol_type = genomic DNA
tgttgtgcccttaagggacctgtctaaagacgtatatctatgttagaact

SEQ ID NO: 57781 - protein, 420 aa, Azotobacter chroococcum
MEKEKLIAIPYLRFSSGRQAQGSSYERQHGMIAEWLQRHPQYVLSTMRFEDMGISGWSGAHLENGFGKLLEAINMGHIPTGSVVLCEAWDRIGRLEPLQMIGILSNILKAGVNIITLDDGTEYTRESANGPHLFLLAAKVQQANLFSENLSRRISESWESRRKKADNGEAIKKRLPVWLAKNNQIREEIAPIIVEAFELYAAGWGERRIRRRIKERCISEDGTILYPELHKVSPAGVQSWWDMKTAIGYWNDIPGVHPAVISMELWIRVQQERKSRYTGPKKSAPSKHPLTGLVICGNCGKNYRMKNDKRKTPVMTCGHRGRLGADACTNGKAIPVDVLEAVMMFTCLDYIKRAVISEHPSLNVKKLAEIEFRLGEVHKQLKSLADTIAITGAIDELVNKAKDLNEEKTALEYERTLLSC

SEQ ID NO: 57782 - DNA, 50 bp, Azotobacter chroococcum
  source 1..50: mol_type = genomic DNA
aagggacattctggacgtaaatataccctttaccatacaatgtgacccca

SEQ ID NO: 57783 - DNA, 40 bp, Azotobacter chroococcum
  source 1..40: mol_type = genomic DNA
caatggcgagcggttgaagacacacttgtagtggtcgacc

SEQ ID NO: 57784 - DNA, 40 bp, Azotobacter chroococcum
  source 1..40: mol_type = genomic DNA
caatggcgagcggttgaaggcacacttgtagtggtcgacc

SEQ ID NO: 57785 - DNA, 50 bp, Azotobacter chroococcum
  source 1..50: mol_type = genomic DNA
aagagacttgaagacagaaaatatgccttataacttttcttgtgccccca

SEQ ID NO: 57786 - protein, 577 aa, Pseudomonas aeruginosa
MPYAYPYIRFSSDAQKEGSSLLRQTQAIQAYLADNPHLEVDTRLNLEDLGKSGFAGRHLEKGGALHLFLGKIKSGEVEKGSVLIIEHFNRLSRLPLIKSITLFNEILASGVNIVVLEDRQMFTAENLTSIDYLKAVLRFEVAHQESLDKSNKGVDNWRLKKEKLRNADDPEKARLEFTKTVPLWLCVNDGKICIDKDSATKIRLIFELCSKMNYGFMKIAKHLNEQGISRLDNSGRAWTFDIVKRLVHNRALIGEYQPRVSVRKEGRKRLEYIPSSEQPIPGVFPVVIEPELFEEVQAKTQSRRVGGGGRRADMPNLFLKLLRCNECGGSIKHQRHHNGYKEYRYLKCFNSLYGHCVSPGNRAWRYDEFEAMFFEYAGRLNLDEIFSQADSEVQSVLADIASAEVLKAKAEKKIAQITRQIYESETVSNTFNSILIKLEQDLKDAVEEIRAKHQLLGNLRGRDIEQHKENLRNSKGLVEQSQSVPELRDKINAQLREILSSISVDFPSRYASIAFKNGVVREIHSGGVFANLAPRAEGEQREKDLAEIYEWASLTDEERAKRYQEAGVNIVPLELKL

SEQ ID NO: 57787 - DNA, 50 bp, Pseudomonas aeruginosa
  source 1..50: mol_type = genomic DNA
tatgcttctaatggttgcacgtaatggtcaatagtggcataattagaagc

SEQ ID NO: 57788 - DNA, 40 bp, Pseudomonas aeruginosa
  source 1..40: mol_type = genomic DNA
agcgtctacccgcgccaggtggtcaagcgcaccctggcgc

SEQ ID NO: 57789 - DNA, 40 bp, Pseudomonas aeruginosa
  source 1..40: mol_type = genomic DNA
agcgtctacccgcgccaggaagtcaagcgcaccctggcgc

SEQ ID NO: 57790 - DNA, 50 bp, Pseudomonas aeruginosa
  source 1..50: mol_type = genomic DNA
catgctgcagaatgatgaaactaaaagtcaaaattgctaaatttagaagc

SEQ ID NO: 57791 - protein, 565 aa, Burkholderia lata
MATSKKTNSKVYSYLRFSDPKQAAGSSADRQMEYAARWAAEHGMLLDASLTLRDEGLSAFHQRHIKQGALGVFLRAVEDGRILSGSVLIVEGLDRLSRAEPIQAQAQLAQIINAGITVVTASDGREYNRERLKAQPMDLVYSLLVMIRAHEESDTKSKRVKAAIRRQCEGWVAGTWRGVVRNGKDPHWVQQRKDGAFELYPERALAIRTMIDLFLAGHGATQIAHLLSERKLYVSNAGNYSTHMYRIVRNRALIGEKPLTVDGDEFRLAGYYPALLTDEEFATLQDAMNERGRRQGKGEIPGILTGLTITSCGYCGMAIASNNAMHKRAKGPELVRRLTCTGTRFNVGCPVAGTCDAETIERALMRYCSDQFNLTRLLEGDDGSARRTAQLAIARQRAAEIEAQIHRVTDALLSDDGAAPAAFMRRARELETELTQQRREIEALEHQIAASNAHEIPAAAEAWAQLVDGVLALDYDARLKARQLVADTFRKIVLFQRGFMPLDHAPADRRKRSGTIGLLLVTKRGGMRLLNIDRKTGQWEAEDNLDLAPAHADEVPLPQCVSGAA

SEQ ID NO: 57792 - DNA, 50 bp, Burkholderia lata
  source 1..50: mol_type = genomic DNA
tatgtattttgcctatccttcggcaacccgaaagttaggcaaaatacata

SEQ ID NO: 57793 - DNA, 40 bp, Burkholderia lata
  source 1..40: mol_type = genomic DNA
catggccgtcacgctcggcaatccgaagatcgcggttttc

SEQ ID NO: 57794 - DNA, 40 bp, Burkholderia lata
  source 1..40: mol_type = genomic DNA
catggccgtcacgctcggcagtccgaagatcgcggttttc

SEQ ID NO: 57795 - DNA, 50 bp, Burkholderia lata
  source 1..50: mol_type = genomic DNA
aatgtatcttggtaatctttagccaggcagcaagttttaataaaaacaaa

SEQ ID NO: 57796 - protein, 466 aa, Staphylococcus cohnii
MIKKVAIYTRVSTLEQANEGYSIEGQEQRLKAYCKVHDWDNFEFFVDAGQSASNTDRAGLQNLLNRLDEFDLVLVYKLDRLTRSVRDLMSLLDIFEEKDVKFRSATEVFDTTSAIGKLFITLVGAMAEWERSTITERTTQGRRVATEKGIYTTVPPFFYDKIEGKLYPNDKKEIVDYIVSRAKAGVSIRGITEELNNSVYNPPKGQRWDKSVISYVLMSPVSRGHTHIGDVFVENTHEPVISEDDFNIYMQSISQRTHSRGIKHTAIFRGKLTCPNCGHSLTLNTSKRTKRDGSVDYDERYVYDRCRSDKSAENITIQSKEVERAFIDFIQHGEIEVDVEDTEEQEEQSVIDLDKIKRQRKKYQQAWAMDLMSDDEFQALIKETDDLFDQHNRQQLRKKENKNNHEQIEATHDLILNVWDKMTSKDKEDLINASISNIQYNFYRGHGYGKNRTPNSINVTHIDYKL

SEQ ID NO: 57797 - DNA, 50 bp, Staphylococcus cohnii
  source 1..50: mol_type = genomic DNA
gatggggtttgtgggtacaggctcccgaataacacaccaaaaaccccaca

SEQ ID NO: 57798 - DNA, 40 bp, Staphylococcus cohnii; identical to SEQ ID NO: 54308
  source 1..40: mol_type = genomic DNA

SEQ ID NO: 57799 - DNA, 40 bp, Staphylococcus cohnii
  source 1..40: mol_type = genomic DNA
agcggtaggcgtccaattctagaaagtaccgcctcccata

SEQ ID NO: 57800 - DNA, 50 bp, Staphylococcus cohnii
  source 1..50: mol_type = genomic DNA
cacgtgggtatcgtgtaaaggccataaaatgacacatcgctaaccccata

SEQ ID NO: 57801 - protein, 593 aa, Sphingomonas taxi
MTLPATIYARFSNADQAQGNSKARQLTLCRDMLGRHGWEGSPDRELIDEGVSAYSGANRASGGLLHTFEQEALAGRYKNGHVLVVENLDRISRQGYDAVLPFLQQLTSQGVTVATVDGDRVYPAYERVTMVSVIEAVVKSELSREESEKKSRRLKAAQNKRVSDAQVNAGQHISSTATVPAWIDTKRISKPSERPIYRTSLNEARVAVLREIFQLTIDGFGTPAIAKILNGRGEPVWKHRNIASKNGWTVGYLTKIVLNRAVMGEYHPMNRPRSGEATSKGIAVLNHYPQGIDPVTFAKAAAARDSRKGTSGAWQITHNNLFSGIAKCGVCGGRMKQEVVVRKGGNRRNGKDRDAVYQSKQDISYLKCHNALNRVFDEERGLPRCSNRNWVRYEKLEQAVVQFAVGWLALNRQSAPSADIESMEVSIADARRFLADKQKQADNAAVSFTRTGSTTMERLMLQLEVEVAEDQKAIQVIEQQLSTLRTSAPPPDFLNQIEQQRTALYSDDETERTTTRVAMKQTLGSLIKSMECDTERNTHVILAGNSLLVSFDNEGELIGNKMGQGTVHLGPHGEIDWHPDFPDVEYEIHPEAL

SEQ ID NO: 57802 - DNA, 50 bp, Sphingomonas taxi
  source 1..50: mol_type = genomic DNA
aagtttgactcctataacgcacgggtcatactgttataggagttgggagc

SEQ ID NO: 57803 - DNA, 40 bp, Sphingomonas taxi
  source 1..40: mol_type = genomic DNA
cgtcgggacttggcttccggtcagcaacgtatagccgatc

SEQ ID NO: 57804 - DNA, 40 bp, Sphingomonas taxi; identical to SEQ ID NO: 57803
  source 1..40: mol_type = genomic DNA

SEQ ID NO: 57805 - DNA, 50 bp, Sphingomonas taxi
  source 1..50: mol_type = genomic DNA
aagactgacagatttaacgcaagggtcatctttttgtctaagtagggaag

SEQ ID NO: 57806 - protein, 491 aa, Mycobacterium dioxanotrophicus
MTKKQPLQVLGAVRLSRLTEESTSVARQRERIAWWTQGHDANVVCVSEDLDTSGAVSPFERDGLGIWLTDTPPQPWNTLVAWKLDRISRSSLDTENLLRWCTDRGKRIVCVDDGIDTDTQMGQVWVKLASIFAEVERNAIKERVLQSRKKLRAEARWGGEQLHYGLRPEKLPGGGWKLVHDAEAVAVIRRVIAEVHRGDSVQSIADQLTREGVLSSSDRARQLQGKPIRGSKWPTTTLHRLLESKTLLGYTTHGDDADPTVLKAPPILTAREFRELQAVLAERKKPRNFNRTGKASPLLGVAVCYGCGALLHHRSAEMKGKRYRYYYCRSKCTETAGNLPADWLEEVLEKKFLAELGDVEVYEQRVIPASDHTDELENAKLAMEDIAAAMAKASSAAVRAALAGQIEELDALIANLERLPVEPARTEDVPTGVTYGEQWEGADTEGRRRLLLGSGIYLRAMLEGKTRTQGGLFSGELLIPENIRARMKGTK

SEQ ID NO: 57807 - DNA, 50 bp, Mycobacterium dioxanotrophicus
  source 1..50: mol_type = genomic DNA
atttagcaatcacttgcgctggacaaccccaacgctatagattgcccaac

SEQ ID NO: 57808 - DNA, 40 bp, Mycobacterium dioxanotrophicus
  source 1..40: mol_type = genomic DNA
gttggtcgtcccgatcgacaaccccagctggtggctcata

SEQ ID NO: 57809 - DNA, 40 bp, Mycobacterium dioxanotrophicus
  source 1..40: mol_type = genomic DNA
gttggtcgtcccgatcgacttccccagctggtggctcata

SEQ ID NO: 57810 - DNA, 50 bp, Mycobacterium dioxanotrophicus
  source 1..50: mol_type = genomic DNA
accttgtaaccagatgcccgggacttccccagcgctggccgttccagaac

SEQ ID NO: 57811 - protein, 530 aa, Flavonifractor plautii
MQVDGYSLDAQRDKLRKYAAYEDMIVVGEYSDEGFSGKNIQGRQEFQRMLNDIQDGKDGISYVLVFKLSRFGRNAADVLNSLQLMQDFGVNLICVEDGIDSSKDAGKLMISVLSAVAEIERENIRTQTMAGREQKAREGKWNGGFAPYGYKLENGNLVIAEDEVEVIRVIYDRYIHTNEGVAGVAKYLNRNGFIKKLRQNNTIPGFSRNFVQDVLDNPVYMGKIAYGRRRTEKKQGTRNEMHVVEQSEFPVYDGQHEAIVSEEDWYLAQEKRKINSFKREKVNNPDHAHILSGILKCPCCGKSMYGNIAKAHSKDKKTRYYYYCKNTVTPTGHECSFRLNIEQAEINKFVAKVISAMVNNPRFVEAIQAKIGTAVDTEDMEKQIAVLQGQLKQAFGTKNRLERQMDTLDINDAHYDRKILDLQRRYDEQYDTIEEIEVQIAELQVQIRSIQQEKISGDNIYRLLLAFDEVYHSATEAEQKEFMKAFIERIEMFPEKRKDGSWIRKIVFNFPVPVDGEEVKELPLETETTV

SEQ ID NO: 57812 - DNA, 50 bp, Flavonifractor plautii
  source 1..50: mol_type = genomic DNA
cccttggaaaccgaaacaaccgtcgagacggttgtcttgctttccaaggg

SEQ ID NO: 57813 - DNA, 40 bp, Flavonifractor plautii; identical to SEQ ID NO: 33938
  source 1..40: mol_type = genomic DNA

SEQ ID NO: 57814 - DNA, 40 bp, Flavonifractor plautii
  source 1..40: mol_type = genomic DNA
cccccgcaccgcgcatgtgccaaccgtggcgcggctggaa

SEQ ID NO: 57815 - DNA, 50 bp, Flavonifractor plautii
  source 1..50: mol_type = genomic DNA
tcctgagaactagaaacaggcgtcccgatggtagtcacagcttcacaggt

SEQ ID NO: 57816 - protein, 472 aa, Mycobacterium kansasii
MRAAVYTRISSDPTGQQLGVTRQLDECTALAERLGWDITEIYTDNDLSAYSGKRRPGFEQMLADMKAGQFEALLCWHTDRLYRSMRDLEKLIEIADERRVQLRTVVGGDLDLSTSAGRMLGRILGATARQESEHKAERQRSANEQRAAAGAWVKAGLRPFGYTKNGEPLEPEASAYRQAVADVLAGRSLRSISTEWNQRGLLSSRGYKWSNLTLRKMLVNPLYAGLRTHRGKVVAQGDWQPLVDPDTHRGLQAFLSDPARRPGLAFEIKYMGSGRYICGRCGAKMYAARPNGPDRLLYVCRENYHLARAGKPLDEYVETLVLGYLSDPETRQRLTVLLDGETVDVDGLHTRRAALQARLDDLAAMFAAGDIDGSQLRRGTADLRQQLAGVDKVLADLARKSPAADLITAGDAIREHWDRLTPDLKGKVVSEICTVTVLPPPPGIKWFTAPSGPTQAEWERFGDYLDIAWKAT

SEQ ID NO: 57817 - DNA, 50 bp, Mycobacterium kansasii
  source 1..50: mol_type = genomic DNA
tattccatcaacccaacggtccttaacgggaaagttgggttgatgcacta

SEQ ID NO: 57818 - DNA, 40 bp, Mycobacterium kansasii
  source 1..40: mol_type = genomic DNA
ggtgatctggaccgcgcccaacggagggacctacaccacc

SEQ ID NO: 57819 - DNA, 40 bp, Mycobacterium kansasii
  source 1..40: mol_type = genomic DNA
ggtgatctggaccgcgcccctcggagggacctacaccacc

SEQ ID NO: 57820 - DNA, 50 bp, Mycobacterium kansasii
  source 1..50: mol_type = genomic DNA
tatgccatcagcacaagactccttctggggacccttttaaaaatgcactc

SEQ ID NO: 57821 - protein, 541 aa, Streptomyces sioyaensis
MMAKPLVSGTKHSTHSPKRMSPHLRGVSCLRLSVLTDETTSPERQHGANEGAAGALGIDLADRKAVDLGVSASKTTPFERPELGAWLRRPDDFDALLFWRFDRAIRSMDDMHELAKWAREHRKMVVFAEGPGGRLVLDFRNPLDPMAQLMVTLFAFAAQMEAHSIRERVAGAQAAMRTMALRWRGSRAPYGHLPAPLEGGGWTLVRDKEAVKVIERIIKDLVAGQTVNSIVYALNAEGVLCPAEHWAKYKGRKLKKPVLWNATTITRILRSETLIGWKVSDGKPVRDQNGAPVLATLDPILTRTEFDAVGALLDGRSINNSVRKDTNALLFGIVHCSSCGGRMYLNRQEGKPGQRPTYRCGASPRGEICEHPMNIRADWVDEYVTTEFLRILGGLEITYTRTIPGYDPQPEIDATLAEYEEHQAQQGRQKSNAAKTAWQKRADALDARLAELESREKVEARTEEIRTGRTYDEKWVKADTAARRKMLMNAGARLDIMAGTAGGWRSLDVRRVSLEILDPFHDAAADALAGVAAEVENADRI

SEQ ID NO: 57822 - DNA, 50 bp, Streptomyces sioyaensis
  source 1..50: mol_type = genomic DNA
aactggtagttcactgctttcggatctccgaaagctcccatctaggtgtt

SEQ ID NO: 57823 - DNA, 40 bp, Streptomyces sioyaensis
  source 1..40: mol_type = genomic DNA
gtcgtcgatcacatcgtgatcgtcgaagatcatgcagctg

SEQ ID NO: 57824 - DNA, 40 bp, Streptomyces sioyaensis
  source 1..40: mol_type = genomic DNA
gtcgtcgatcacatcgtgagggtcgaagatcatgcagctg

SEQ ID NO: 57825 - DNA, 50 bp, Streptomyces sioyaensis
  source 1..50: mol_type = genomic DNA
aattgattctcttatgctttgggaggttagaagtctgaattcaaggtgtt

SEQ ID NO: 57826 - protein, 465 aa, Mycobacteroides abscessus
MLAVVYTRISKDRVGAGLGVERQRDDCQQLADSLGWTVVETFSDNDLSAYSGKKRPAYEAMLAALEGDKARAVIAWHTDRLHRQPIELEGFIDLCERKKIEVRAVKAGTIDLSTPSGRMVARMLGAAARHEVEHMIERTKSQKKQAALDGKYRGGQRPFGYEPNGLRLREAEADAIRSGVESVLGGVSLRQIARDWNALGLRTSAGNKEFSSVEIRKVLLRPRNAGIALHQGQPVGKGQWDAIIDTDSFAALEAILRDPERAKHVSYIRKYQGSGVYLCGIDECGAVTRISSQGPAKGSRERRSVYVCSRTKHLGRLVEYVDEYVDEHVIRRLSEPDAHKVFVGPEVDLTTLHAQREGLRSRLNELSALFAEGAIDGPQLKRGSAELKEKLAAVDAELTSVRSASVVASLLEADDIEAEWKITSPDMRGRIIDTLMTVTILPIGRGRQRDGSYFDPSKIRIKWKS

SEQ ID NO: 57827 - DNA, 50 bp, Mycobacteroides abscessus
  source 1..50: mol_type = genomic DNA
aaagggcttagttgagggtttgacaggtcattaatcgacttgataccatt

SEQ ID NO: 57828 - DNA, 40 bp, Mycobacteroides abscessus; identical to SEQ ID NO: 34388
  source 1..40: mol_type = genomic DNA

SEQ ID NO: 57829 - DNA, 40 bp, Mycobacteroides abscessus
  source 1..40: mol_type = genomic DNA
gaaggcgttgccgtgcgagggatccagcaccagccagtcc

SEQ ID NO: 57830 - DNA, 50 bp, Mycobacteroides abscessus
  source 1..50: mol_type = genomic DNA
gaagtgcatgagaaaaggtttgaagggttgcttttctaggagataccatt

SEQ ID NO: 57831 - protein, 548 aa, Mycobacterium intracellulare; identical to SEQ ID NO: 45326

SEQ ID NO: 57832 - DNA, 50 bp, Mycobacterium intracellulare; identical to SEQ ID NO: 45967
  source 1..50: mol_type = genomic DNA

SEQ ID NO: 57833 - DNA, 40 bp, Mycobacterium intracellulare
  source 1..40: mol_type = genomic DNA
tcggctcagtcgtgtgtccgaggggggacttgaaccccca

SEQ ID NO: 57834 - DNA, 40 bp, Mycobacterium intracellulare
  source 1..40: mol_type = genomic DNA
tcggctcagtcgtgtgtccctggggggacttgaaccccca

SEQ ID NO: 57835 - DNA, 50 bp, Mycobacterium intracellulare; identical to SEQ ID NO: 28420
  source 1..50: mol_type = genomic DNA

SEQ ID NO: 57836 - protein, 513 aa, Prevotella brevis
MAKKIKQPKVTKFSELENKVAALWTRVSTERQEENNCSLETQERICREYAAKHGITIKKQYGGTHESAKTEGQLYRKMIAEVAADRDINIILVYSFDRFSRAGNEAIMTKAYLKSKGVYVISATQPIDTDSIAGEFMENILFLFNQFENSLRRDKAVTGMTACLKRGEWYGKAPLGYDHKKVGKTHVLTVNDDGRILKKAFLWKANEGMGDIEIVERLALEGLRIDRKHLNKILHNPFYCGKITHNLLGDEIVEGKQEKLIDEATFNKIQGITHAGYEHQEETEPFPLKRHVRCSDCGGYLTGYTVKSRGKDYYKCNKKGCKSNHSTERLHQQYCALLNTYSIPKPLVPILTKVLHKVFREYNQERSDTRTLLLKNKSELERKQVELKIRCGLGEIDKDIYNATSAHLNEQLTQIHKALQEAERDLSNEKKYIADVIAMSCKLGTLWQDGDFRTRQKLQNLVYPDGILYDKHLGSYRTENENEVFRIFRTISTGYIIEKEKAAKENAPLSPLV

SEQ ID NO: 57837 - DNA, 50 bp, Prevotella brevis
  source 1..50: mol_type = genomic DNA
aatgctcctttgtcgcctttggtcggcatcgctgacgaaatatcgaacat

SEQ ID NO: 57838 - DNA, 40 bp, Prevotella brevis
  source 1..40: mol_type = genomic DNA
cacttgccgccttttggtcgggatgaggcgactcgaacgc

SEQ ID NO: 57839 - DNA, 40 bp, Prevotella brevis
  source 1..40: mol_type = genomic DNA
cacttgccgccttttggtccagatgaggcgactcgaacgc

SEQ ID NO: 57840 - DNA, 50 bp, Prevotella brevis
  source 1..50: mol_type = genomic DNA
aatctttctcctgggcttctgatccacatctctcacagctgattggacat

SEQ ID NO: 57841 - protein, 498 aa, Streptomyces scabiei
MEATATTQLGREYLRVSKDKSGRQRSVDEQADDNKPACLGHGIQLGQPYVDNDRSASRYAKKARDGYDRLVTDLKNGTFGADVLVLWESSRGSRKVGEWVTLIDLLEEGGHKVFVTTHGRLYDPANGRDRRTLLEDAVDSEYDSYKTSARIRRTLTAQAAQGRPHGIPAYGYRSVYDPRTGDLVNREPHPTEAPVVVELFQRLQAGHSQMSIAQDFTRRGIRNRSGTPFTGPNLRSIVLKPAYIAKRVHHGQTTDAIWPMVCEYEGSGVSRDEFTAIYHAVQRRLLGRKPNSPRGGRATHELSRIIRCGPCGAGLSVYFYKEGQGPEGEMFYGCPARGCCMVGKKGVDELVIGAMLAYLASDKVYADFAAAPDNSPELVKLRARIAELRGNLAELEEATPTSLHETRLLARAIETVTGELVDLEAQEHALTMPSALRDLIQPGADVERRWKAAPISARREIARLLLSPDALGEVRIKRVGHGGRTPARERVEWRTTEH

SEQ ID NO: 57842 - DNA, 50 bp, Streptomyces scabiei
  source 1..50: mol_type = genomic DNA
gtccacccttagtaaggtgcgtctgaggtaccaccttgctaaaggtggaa

SEQ ID NO: 57843 - DNA, 40 bp, Streptomyces scabiei
  source 1..40: mol_type = genomic DNA
atcaccgtggtggccgacggaagcctggcgatggagttct

SEQ ID NO: 57844 - DNA, 40 bp, Streptomyces scabiei
  source 1..40: mol_type = genomic DNA
atcaccgtggtggccgacgcaagcctggcgatggagttct

SEQ ID NO: 57845 - DNA, 50 bp, Streptomyces scabiei
  source 1..50: mol_type = genomic DNA
gtccactattgtgagcgtgggtctcaggagtcatgtggataaaggtggaa

SEQ ID NO: 57846 - protein, 590 aa, Klebsiella pneumoniae
MSAHVTIPRNILLPVKLNVMNRPRLYSYIRYSSERQGKGNSIERQKSYIAEMAKQIAAEYDLEIFEEYEDLGVSAYKGKNVQEGALSDFIAQVESGVIPKGSFLLIESLDRFSRQNAMQAVNLFTSLLLNGITVITGIDKQVYRQTEVNNETLQQLMFSVMLFSRANEESSTKSHRTIARALSKIKRHQKRDPGDPVVAIKELGSDKWWTDSSSGYVKPHPVLFPIAKEIIRLKQDGWSNRMILIHLKNNYNGPIIGNKKSKGIWNMQHCSRILDPAIYGRKVITVNHTEYVLDDYYPAIVSKDEFEALKIQVGNKGFAPNRESNPEIPLLSGIGILYCAHCSCYMVKAKSTLKNHPHAYRYQCASRDLHRDCNKWGFRASTLERTILQLIADHIFLQEKPQPSGVEGKIADLQTQIDNYLLAIGSAKSPAIVNSLTSQIDQLEQEKESLVLEKRLYDESIVQMNTEGWDKFRKFDIDDALDPLRAKIRANIKTVILRVDCTRVDKKHNLFTITYRDQRQQRVVIENNSGWKKGNVFVDLHTINDAQILESEGLILHDHIDILINRDKFMTEVKERLEHPRTPIDELTGD

SEQ ID NO: 57847 - DNA, 50 bp, Klebsiella pneumoniae
  source 1..50: mol_type = genomic DNA
gatagggtctatattactttagtgaatactaaagtaaactacacctcatt

SEQ ID NO: 57848 - DNA, 40 bp, Klebsiella pneumoniae; identical to SEQ ID NO: 52443
  source 1..40: mol_type = genomic DNA

SEQ ID NO: 57849 - DNA, 40 bp, Klebsiella pneumoniae
  source 1..40: mol_type = genomic DNA
gctcggggtaaccatcggcttcaccgacggcaatatcatc

SEQ ID NO: 57850 - DNA, 50 bp, Klebsiella pneumoniae
  source 1..50: mol_type = genomic DNA
gatagtttattctttactttagtatttactaaataagatgccccctagct

SEQ ID NO: 57851 - protein, 521 aa, Mycobacterium colombiense
MPQRALIVIRLSRVTDATTSPKRQLETCRDLCRRREYEVVGIAEDLDVSAGKTSPFDRSQLGDWIKNRPHEFDVLVFFRADRIVRRLFDLADLIRWAREYSVTLVSATESHFDLSTEWGDIIALLVAKVAEMELAAIRERNASAARFNIRAGKYRGGVPPWGYLPDNATGEWRLVQDPEQVRVIHEVVERVLSGEPLRSVAHDLTARKILTPRDRFAQHQGREVKNYEWHSVGLKRSLTSETLLGYAVSGGKPVRADDGSPVIRADPILTREVFDRLAVELTERENRKEPTKRSTGLLLKVIHCGVCGRPAYRLKGGPGRSPRYRCASAQYKEPCGNASIPMEYADQCVERILLGMLGKSERLERVWESGSDHSADLAEIDARLVDLTGLIGSEDFRQGTPQRIALNQQISQLAARQAELSSLAVKPAGWTWEPTGELFGSWWARQGITERNVWLRSMNIRLEFRQGDFSLDLGDLFALTEHLKASGPVAEWQQLLTAMRDNDIAGIEIDGDDIQLTPKGA

SEQ ID NO: 57852 - DNA, 50 bp, Mycobacterium colombiense
  source 1..50: mol_type = genomic DNA
gggatgtaattctcgacattcgagtattcgaaagggtagctttacaccgt

SEQ ID NO: 57853 - DNA, 40 bp, Mycobacterium colombiense; identical to SEQ ID NO: 55888
  source 1..40: mol_type = genomic DNA

SEQ ID NO: 57854 - DNA, 40 bp, Mycobacterium colombiense
  source 1..40: mol_type = genomic DNA
cgcgatggtgccgatggcgcactcgaccgtcgacatgccc

SEQ ID NO: 57855 - DNA, 50 bp, Mycobacterium colombiense
  source 1..50: mol_type = genomic DNA
aggatataaacccaggcattcaagcattcaacagggagtggcaaccccct

SEQ ID NO: 57856 - protein, 470 aa, Ruegeria atlantica
MEGAGLSSQERSCRDYAKQCGMLVEEVFTDVISGAISNRPGMNALLDFLTRVDARDYMVIVDDVSRFARDVGAHTELRNRIMTAGAAIDSPKTKFGVDAESRFLEMLWALLASRDREKNAELSKTRTIARLKNGYWTFSAPVGYQYTKAPGGGKLLIRKEPEASIIQEALEGFASGRFQTQAEVKRFLESKPEFPRPRGAKEVKFDRVTSLLTRLVYAGHLEKTDWGVPLTKAQHEPLISYEEYLINQDRLKAKKVAPARKNLDRDFVLRGFLTCSECGYSLTSCWSKSGTGKRYPYYLCHHKGCNQRGKSIARDKIEAEFEHVLKSLAPTERTFELAAQMFKDAWVRYQSNSMQEASRHQARLRQINTEVNSLLDRAARTQHEETAKAYETRIAELRSESAVLEEKLSDRGPSKENFDKMFELSMNFLSNPWSLWEKGSFDLKRIVLRLAFAAPLTVSRENGLRTSETT

SEQ ID NO: 57857 - DNA, 50 bp, Ruegeria atlantica
  source 1..50: mol_type = genomic DNA
atttctctcaacgtcgaaaagtcaattggtgcacctaaagggagaaactt

SEQ ID NO: 57858 - DNA, 40 bp, Ruegeria atlantica
  source 1..40: mol_type = genomic DNA
gccaaaaatctgtcggggatatggtgcccaggagaggact

SEQ ID NO: 57859 - DNA, 40 bp, Ruegeria atlantica
  source 1..40: mol_type = genomic DNA
gccaaaaatctgtcggggaggtggtgcccaggagaggact

SEQ ID NO: 57860 - DNA, 50 bp, Ruegeria atlantica
  source 1..50: mol_type = genomic DNA
atttctttgattttggacaggtcaggtggtgcacatatcatgtgccacct

SEQ ID NO: 57861 - protein, 490 aa, Mycobacteroides abscessus
MEPQANRALVVIRLSRVTDATTSPERQREACLELCRQRGYEVVGTAEDLDVSGAVDPFKREHRPGLAPWLHGEREPFDVIVAYRVDRLTRSIRHLQTLVSWAQDNGKLIVSATEPHFDMTSTFAAIIIALMGTVAQMELEAISERNRSAAQHNMREGKYRGGPPPWGYRPEKIDGDWRFVQDDEQVAVINEVVRRVLDGEPLRQVAADLTDRAVLTPRDRVNQLKGREIKGYSWHSAKLREMLTSKSLLGHAVTASGSIRNDDGSPVIRATPILERDVFEQVQVELAGRENRKEPTKRSSSLLLRVLYCGVCCKPAYKLKGGKGRQDRYRCASAQYKSTCGNGMLLVADANEVLTDAVMFELGDKYRRDRVWDAGSDHSAELSDIDDTLADLTDQLGTGAFRKGTRQRERLDARIADLAERQAQLAAQATRPAGWTWVPTKELFRDWWGSQTIEQQNLWLRQMEVRMTWDHQGPHIDMRQLDKMAEQWAD

SEQ ID NO: 57862 - DNA, 50 bp, Mycobacteroides abscessus
  source 1..50: mol_type = genomic DNA
ggactgtaaaaaggtggtttcgagtattccaccagtatcatttacaacca

SEQ ID NO: 57863 - DNA, 40 bp, Mycobacteroides abscessus; identical to SEQ ID NO: 29263
  source 1..40: mol_type = genomic DNA

SEQ ID NO: 57864 - DNA, 40 bp, Mycobacteroides abscessus
  source 1..40: mol_type = genomic DNA
cgcgatagtcccgatcgcgacctcgaccgtggacatgcca

SEQ ID NO: 57865 - DNA, 50 bp, Mycobacteroides abscessus
  source 1..50: mol_type = genomic DNA
ggcctaaaaatgacaggtttcaagactgtcattagtctaaattacaaaca

SEQ ID NO: 57866 - protein, 574 aa, Actinomyces naeslundii
MEAGSTQGGAAAVGADPFAAMAAQLTPKRAVSYIRVSTREQAQRGGSEEGFSLPAQREANKRKAQSMGALVVKEFADRGESARSANRPELQKMLAYLKEDGGIDYVIVHKLDRLARNRADDVEINRAFEDAGVRLVSTSENIDQTPGGMLLHGIMSSIAEFYSRNLANEVIKGMGEKARNGGTLGKAPLGYVNVRARDENGREVRTVALDEERAPLVRLAFTEYATGNWTVRGLAEHLNNRGLTIPPTARKPTNPVSVRLLQTLLRNPYYKGIISFQDVEYAGAHEPLVDAATWQTVQDILTAHTNGERQRMHNHHLKSTIVCGLCGARLLVQHSTSRASGTYHYFVCARRHRVHDCTFKAVLIDEVEARVAELYQQIRLSSDDRRDIERYLRAEFAHIQANRQQDIQRLTTRQQQLEDQRHKLLEAHYAGAIPLDLLKKEQEQLTSSILAIQRELDGYTADAALVEQHLTQALDLLEDYHRLYLAVPDRLKKLLNQVFFERILVNPAVDEDGRPIIPPPALQTSLRAGRRRGTSGQTAATQSGEKTVESATSSRGEGLSRAARHFRVAMVKRS

SEQ ID NO: 57867 - DNA, 50 bp, Actinomyces naeslundii
  source 1..50: mol_type = genomic DNA
agggttcgtatacggagcttgtggtggccctccttacctctgtcaccaag

SEQ ID NO: 57868 - DNA, 40 bp, Actinomyces naeslundii
  source 1..40: mol_type = genomic DNA
gacgaggtcacgcctgtagtggacccggccggactcgaac

SEQ ID NO: 57869 - DNA, 40 bp, Actinomyces naeslundii
  source 1..40: mol_type = genomic DNA
gacgaggtcacgcctgtagccgacccggccggactcgaac

SEQ ID NO: 57870 - DNA, 50 bp, Actinomyces naeslundii
  source 1..50: mol_type = genomic DNA
agggttcccccgagggtcttgctgccgccctcgtcttctgagccaccaag

SEQ ID NO: 57871 - protein, 548 aa, Ruminococcus bicirculans
MNREGKKCVLYPRVSTEMQVDGYSLEGQKNGLKRFADREEMEIVGIYEDAGKSGKSIEGRPAFKKMLSDIKNGLEIDYILVYKLSRFGRNAADILNSLEFVQSYGINLICIEEGIDSSQTSGKLLISVLSAVAEIERENIIEQTMNGRREKARQGGWNGGFAPYGYYLKDNQLLIEETEAEAIRIIFDKFANSDIGLGGVAKYLNLQGIKKIPRQNGTLETWSSHFIRLILDNPVYCGKIAYGRRTREKVKGTKNEYKQVHAEDYILEDGQHEGIISEELWQKVHAKRMATGIKQPSKIGKDRSHLLTGILKCPLCGSSMYTNKHAWTNKDGTYKEVYYYICGRNKQERGHHCDYKASLRKTDIEPLVIEAVKELVSDKYFAKEIEKRIGVQNDTTAIDKELANYESKLKEVDLNKARLEREIDNLPIDARFRERKIHDMTLRLDALYDTIVELEERIEDAKLRKSSIEMETITLDNIYKLMLNFGKLYDIISDEEKKSLITYLIKEIQIYPNGESEQPLKSIEFNFPIYRDGQEVRRLLWEKGNTVE

SEQ ID NO: 57872 - DNA, 50 bp, Ruminococcus bicirculans
  source 1..50: mol_type = genomic DNA
ttgtgggaaaaaggtaataccgttgagacggttgtactgctttcccacaa

SEQ ID NO: 57873 - DNA, 40 bp, Ruminococcus bicirculans
  source 1..40: mol_type = genomic DNA
tgggagaacggggcatgtggagacggtttgtttgctgtca

SEQ ID NO: 57874 - DNA, 40 bp, Ruminococcus bicirculans
  source 1..40: mol_type = genomic DNA
tgggagaacggggcatgtgatgacggtttgtttgctgtca

SEQ ID NO: 57875 - DNA, 50 bp, Ruminococcus bicirculans
  source 1..50: mol_type = genomic DNA
ttgtgggaacaagttaataaagacatgaaagttatttaaatgtcccagaa

SEQ ID NO: 57876 - protein, 549 aa, Ruminococcus bicirculans
MNREGKKCVLYPRVSTEMQVDGYSLEGQKNGLKRFADREEMEIVGIYEDAGKSGKSIEGRPAFKKMLSDIKNGLEIDYILVYKLSRFGRNAADILNSLEFVQSYGINLICIEEGIDSSQTSGKLLISVLSAVAEIERENIIEQTMNGRREKARQGGWNGGFAPYGYYLKDNQLLIEETEAEAIRIIFDKFANSDIGLGGVAKYLNLQGIKKIPRQNGTLETWSSHFIRLILDNPVYCGKIAYGRRTREKVKGTKNEYKQVHAEDYILEDGQHEGIISEELWQKVHAKRMATGIKQPSKIGKDRSHLLTGILKCPLCGSSMYTNKHAWTNKDGTYKEVYYYICGRNKQERGHHCDYKASLRKTDIEPLVIEAVKELVSDKYFAKEIEKRIGVQNDTTAIDKELANYESKLKEVDLNKARLEREIDNLPIDARFRERKIHDMTLRLDALYDTIVELEERIEDAKLRKSSIEMETITLDNIYKLMLNFGKLYDIISDEEKKSLITYLIKEIQIYPNGESEQPLKSIEFNFPIYRDGQEVRRLLWEKGNTVET

SEQ ID NO: 57877 - DNA, 50 bp, Ruminococcus bicirculans; identical to SEQ ID NO: 57872
  source 1..50: mol_type = genomic DNA

SEQ ID NO: 57878 - DNA, 40 bp, Ruminococcus bicirculans; identical to SEQ ID NO: 57873
  source 1..40: mol_type = genomic DNA

SEQ ID NO: 57879 - DNA, 40 bp, Ruminococcus bicirculans; identical to SEQ ID NO: 57874
  source 1..40: mol_type = genomic DNA

SEQ ID NO: 57880 - DNA, 50 bp, Ruminococcus bicirculans; identical to SEQ ID NO: 57875
  source 1..50: mol_type = genomic DNA

SEQ ID NO: 57881 - protein, 550 aa, Ruminococcus bicirculans
MNREGKKCVLYPRVSTEMQVDGYSLEGQKNGLKRFADREEMEIVGIYEDAGKSGKSIEGRPAFKKMLSDIKNGLEIDYILVYKLSRFGRNAADILNSLEFVQSYGINLICIEEGIDSSQTSGKLLISVLSAVAEIERENIIEQTMNGRREKARQGGWNGGFAPYGYYLKDNQLLIEETEAEAIRIIFDKFANSDIGLGGVAKYLNLQGIKKIPRQNGTLETWSSHFIRLILDNPVYCGKIAYGRRTREKVKGTKNEYKQVHAEDYILEDGQHEGIISEELWQKVHAKRMATGIKQPSKIGKDRSHLLTGILKCPLCGSSMYTNKHAWTNKDGTYKEVYYYICGRNKQERGHHCDYKASLRKTDIEPLVIEAVKELVSDKYFAKEIEKRIGVQNDTTAIDKELANYESKLKEVDLNKARLEREIDNLPIDARFRERKIHDMTLRLDALYDTIVELEERIEDAKLRKSSIEMETITLDNIYKLMLNFGKLYDIISDEEKKSLITYLIKEIQIYPNGESEQPLKSIEFNFPIYRDGQEVRRLLWEKGNTVETV

SEQ ID NO: 57882 - DNA, 50 bp, Ruminococcus bicirculans; identical to SEQ ID NO: 57872
  source 1..50: mol_type = genomic DNA

SEQ ID NO: 57883 - DNA, 40 bp, Ruminococcus bicirculans; identical to SEQ ID NO: 57873
  source 1..40: mol_type = genomic DNA

SEQ ID NO: 57884 - DNA, 40 bp, Ruminococcus bicirculans; identical to SEQ ID NO: 57874
  source 1..40: mol_type = genomic DNA

SEQ ID NO: 57885 - DNA, 50 bp, Ruminococcus bicirculans; identical to SEQ ID NO: 57875
  source 1..50: mol_type = genomic DNA

SEQ ID NO: 57886 - protein, 468 aa, Bacillus wiedmannii
MKCVIYRRVSTDMQVEEGISLDMQRLRLEQYAKSQGWVVVNDYCDEGYSAKNTERPAFQKMIKDMKKRQFDIILVYRLDRFTRSVSDLHSILKTMDEHNVKFKSSTEIFDTTTATGRMFITLVATLAQWERETTAERVRDSMQKKAELGLRNGAKAPMGYNLNKGKLYINTTEAEIVKYIFEMYKTKGIISIVKSLNSRGVKTKQGKLFNYDAVRYIINNPIYIGKIRWGDDVLTDIAQEDFESFIDKNTWYTIQQVQSNRKIGKVRLQNFFVFSNVLRCSRCGKHFLGNKQVRAHNRIVMGYRCSSRHHKGMCDMPQIPEDVIEKEFLNLLENIIIDLDDTVDQPVELSNLQEQHNRIQDKKSRLKFLFIEGDISQNEYKKEMLIITQEEITIQKQLATTEDTVSSIEIKELLNRLKDEWPHLNNESKKAAVNSFVSSISVEVVKPARAGKNPIAPVIEIKDLQWKY

SEQ ID NO: 57887 - DNA, 50 bp, Bacillus wiedmannii
  source 1..50: mol_type = genomic DNA
tgttgtagttaagttgggtttaattgaccgaacaccatttaactacaaca

SEQ ID NO: 57888 - DNA, 40 bp, Bacillus wiedmannii
  source 1..40: mol_type = genomic DNA
ctgcggaccagtcattaattgaccgaaccaaggggattga

SEQ ID NO: 57889 - DNA, 40 bp, Bacillus wiedmannii
  source 1..40: mol_type = genomic DNA
ctgcggaccagtcattaatagaccgaaccaaggggattga

SEQ ID NO: 57890 - DNA, 50 bp, Bacillus wiedmannii
  source 1..50: mol_type = genomic DNA
ttttgtggtagcatttggtttagtagccagaaaaccctaatatttcacca

SEQ ID NO: 57891 - protein, 481 aa, Mycobacteroides abscessus
MASAASSRRAALYLRISLDQTGEGLAIDRQRKECQRIARQRRWRVVDEYVDNSISASDARKNRPGYDALVKAYEASEFDALICYDMDRLTRQPRQMEDWIDAAEKRGLDLVTANGECDLQTDAGQTFARVRMAFALGEVKRKSARQRAAAVQRADDGRPPLGVRLTGYTAKGETVPAEAEIVRQIFALFHGGESLRGIVRALTEGGHATRSGKPWNPSTIRDILVNPRYAGRAVYNGEPNGKRGNWEPLVSEDVFDAVQARLTDPRRATNRVGTDRRHLGSGLFLCDVCSSPVVSFSGGRYRCKSACVNRAHGPVDNDRVRRIIDKVDGEPGIAPPARGVDEFVTAVLAERLSRPDTATLLAPAPADTAPLRDEIATLRARLANFENDYAEGVITGRQLREASDKVTAALTNADRELRALVPGGTPLGGVLTAPDPASAFLDASLMGRRSVIDALCEVRLMRGTRGSKTFDHNTVRIQWRV

SEQ ID NO: 57892 - DNA, 50 bp, Mycobacteroides abscessus
  source 1..50: mol_type = genomic DNA
gacgttgcttgaaagcggaactccactacattacactgtcaataaatgtt

SEQ ID NO: 57893 - DNA, 40 bp, Mycobacteroides abscessus
  source 1..40: mol_type = genomic DNA
gacgttaaaccggaattccaccacgtcaccgtcaaccatg

SEQ ID NO: 57894 - DNA, 40 bp, Mycobacteroides abscessus
  source 1..40: mol_type = genomic DNA
gacgttaaaccggaattccctcacgtcaccgtcaaccatg

SEQ ID NO: 57895 - DNA, 50 bp, Mycobacteroides abscessus
  source 1..50: mol_type = genomic DNA
gacattgaaagttgacggaactcactgaagtgacacagcatataaatgat

SEQ ID NO: 57896 - protein, 583 aa, Hydrogeniiclostidium mannosilyticum
MKDVEIIKARNTLSSRAKTNLTKRLRVAAYCRVSTDSEDQINSYKSQVQYYTDLIKNNSEWSLAGIYADEAITGTQVTKREDFQHLINDCMNGDIDLIVTKSISRFARNTLDTLKYVRMLKEKGIAVFFEEENINTLTMDGELLLVILSSVAQQEVENISANVKKGLKMKMQRGELVGFQGCLGYDYHPEDKTITINEKEAEIVRYIFKRYIEGAGGSVIAQELQNLGYKTKRGSTTWAETTVIGIIKNEKYKGDILMGKTFTLDPISKRRLDNFGEEDQFYIRDHHEAIISEEVFDAAQEILKRRAKPRRLGTDGKREKFSRKYAFSCLLECGFCGGTLTRRSWHSGSQYNKIIWQCVTATKKGKKFCPDSKGIAEETIEQAFIESYRLLCQNNKDVLDEFIARTEEALSATNAGKQLAKTDKDIKVLEAKRTKLVDMHLDEIIDKATYEEKYLVLSEQIEQLKDTRRGLEEAAETESTMKRRISEFRKTLEQNEVLDTFDRYVFESIVEKVIVGGYDEDGNKDPAMLTFIYKTGFKNSVDGTTYKPPRKNGKATKRSDNLCSHSTDEAKSTCSHYSNDTCG

SEQ ID NO: 57897 - DNA, 50 bp, Hydrogeniiclostidium mannosilyticum
  source 1..50: mol_type = genomic DNA
cgtgttcccattatagtaacgacacatgtggagacaatagtgttgctaca

SEQ ID NO: 57898 - DNA, 40 bp, Hydrogeniiclostidium mannosilyticum
  source 1..40: mol_type = genomic DNA
tatgttcccacgcacggcgcatgtggagtgcgtggcgctg

SEQ ID NO: 57899 - DNA, 40 bp, Hydrogeniiclostidium mannosilyticum
  source 1..40: mol_type = genomic DNA
tatgttcccacgcacggcgcctgtggagtgcgtggcgctg

SEQ ID NO: 57900 - DNA, 50 bp, Hydrogeniiclostidium mannosilyticum
  source 1..50: mol_type = genomic DNA
tgtgtccacacaggagtcaagactcctgtggagacatgtactttgatatc

SEQ ID NO: 57901 - protein, 430 aa, Rhodococcus ruber
MDCARNGWTIIAELREDGIGASRWSGKDRPEYRRLQNLLVDADVLVTWEASRAHRDLEAYVELRRLCEEHGVLLRYSGRTFDLSQGDDRFATGLDALLAEKEAEQIRVRVLRGLESRAAAGEPHGKIPYGYRAAIDDAGNRVRVPRPEEAEVLRDAARMVRDGRSLRAIVKQLNAERRTNRGRDWTSVELRRKLLSPTYAGIRVHHGKQVPATWQPILSDEEHSAVTAILTDPDRLTQRGSEPVHLLTGIASCGKCGAPMGRRKNKSGSSSYACTGKFCVARSMGVVDEFVEAVVVKRLSRPDIAQALQSGDDSQRREAFAEIRSIRANLAAYEQQAIDGHLEPEEFLRLRNGLREKLADAEARANQSLGGSLLPAQIAGPDAAELWANLPMESKRGIVRAMCHVLIDPAQRSNVPNVDLIRIEWKTPSA

SEQ ID NO: 57902 - DNA, 50 bp, Rhodococcus ruber
  source 1..50: mol_type = genomic DNA
gagcaccccttggcagcagtgagcaatctgaacgtaccaaagcggtaccc

SEQ ID NO: 57903 - DNA, 40 bp, Rhodococcus ruber
  source 1..40: mol_type = genomic DNA
catcatggcagcagtgagcaaggtattcgcggcgaggctc

SEQ ID NO: 57904 - DNA, 40 bp, Rhodococcus ruber
  source 1..40: mol_type = genomic DNA
catcatggcagcagtgagcccggtattcgcggcgaggctc

SEQ ID NO: 57905 - DNA, 50 bp, Rhodococcus ruber
  source 1..50: mol_type = genomic DNA
gagccacctcatctaccagtgagccctctgcagggacttctgctggtccc

SEQ ID NO: 57906 - protein, 579 aa, Aeromonas rivipollensis
MQWMTYIKTHVYTRISKTSQQEGSGLDEQLSRIEAYIQSKSQQFQGEPQYWQDIGLSAYKNKNIVDGQLGEFIKLVEEGKIGKGHALVIYSLDRLSRRSSWDEDTIQKLVKAGVDIHDVSIPLVLNIDDSFSKIHMELIVQRGNNESKIKSERATAGWAKRLKDTLENGKVFTKRLPHWLKADEDNNIVLVPEHVELIKRIFKEYTNGLSSPMIAKRLNEEGIKTSTGSLWRADTLTKLIKDERLRGNHVQFNDQTLIPNIFPVIIDSELFTIANRIREQNIVSTKGRPRESKNEKVINNIISGFVRCSQCGSKVTTSSNSLGDRYVVCKGRRNFEICTQKGVLLKRLEKVVTTYAKQLDMSKIFSYEEVDTSLEAKLQSELQSLEADEKNCIAKIEQRKKEKKTYLALADALTDIQDRIEEVRKELQEVSVNEPLVAIENYNIDDLLDPTMKELRMSLRKYLVQVLDKVEFRSIDKNILIEVVYNKDVFRHVLITDSSVSTVLNEISIAKEDGLIKYNTNGFSIIEDEEAGTCTFKGLDSVSVEDYFLLANYMDSVEGKRWIIDFMHDPLNVETVLSN

SEQ ID NO: 57907 - DNA, 50 bp, Aeromonas rivipollensis
  source 1..50: mol_type = genomic DNA
atccgtgcaaaccttgttataaccgtgggtttgtgctaatctgcacacat

SEQ ID NO: 57908 - DNA, 40 bp, Aeromonas rivipollensis
  source 1..40: mol_type = genomic DNA
ggtctggcccgtcaatacggtgcagttttccaatcacacc

SEQ ID NO: 57909 - DNA, 40 bp, Aeromonas rivipollensis
  source 1..40: mol_type = genomic DNA
ggtctggcccgtcaatacgctgcagttttccaatcacacc

SEQ ID NO: 57910 - DNA, 50 bp, Aeromonas rivipollensis
  source 1..50: mol_type = genomic DNA
ccccacccatctagttttagaaccctggccttgtgctccactgcacactt

SEQ ID NO: 57911 - protein, 473 aa, Mycobacteroides abscessus
MAKKIPAVRSAAVYARISADVEGKSLGVQRQLEDCRKLAAERGWVVGREYVDNDVSAYSGKARAGYEAMCTDLAAGVRDAVIVYNLDRLHRRPAELEEFVALCEAAGVNQVATVTADIDLGNDDGLFMARIFAAFAAKESGRKSARMRRKYEQKAAQGLPHGPNRPFGYEEDKITIREAEAEVIRELVTRVIAGESLNSLTVWLNETGVAPVRGTRWASTAVRNIVSSPRIAGLRAYKGEVVGDAAWPAIISVAERDQVLAALAVRAWSRKRSPRKYLLSGLCRCGRCQARMFSAARLEAGAHKRRYVCSSSPDHGGCGRMTVVAEPLEKLITDAVLTRLDSKALADALAGKARANPDTAALSTQVEQAQARLDELTGLYSTGAISAREWIMARDPITDTITRLRREIAETLDTGPLAELAGQGSKLRAQWDELGLDRCHAIIRTVVDHVIIKPGQPGARGLDMGRVDPIWRT

SEQ ID NO: 57912 - DNA, 50 bp, Mycobacteroides abscessus
  source 1..50: mol_type = genomic DNA
aggtgacattaatgacttgttgggttgcttatttttcgttaaactgacct

SEQ ID NO: 57913 - DNA, 40 bp, Mycobacteroides abscessus
  source 1..40: mol_type = genomic DNA
gccgcaggcgaaggtcagattatcgatgtcggtgggcccg

SEQ ID NO: 57914 - DNA, 40 bp, Mycobacteroides abscessus
  source 1..40: mol_type = genomic DNA
gccgcaggcgaaggtcagactatcgatgtcggtgggcccg

SEQ ID NO: 57915 - DNA, 50 bp, Mycobacteroides abscessus
  source 1..50: mol_type = genomic DNA
aggtgctataaatggctggctgggctcgttatttaagacacaaatgacct

SEQ ID NO: 57916 - protein, 473 aa, Mycobacteroides abscessus
MAKKIPAVRSAAVYARISADVEGKSLGVQRQLEDCRKLAAERGWVVGREYVDNDVSAYSGKARAGYEAMCTDLAAGVRDAVIVYNLDRLHRRPAELEEFVALCEAAGVNQVATVTADIDLGNDDGLFMARIFAAFAAKESGRKSARMRRKYEQKAAQGLPHGPNRPFGYEEDKITIREAEAEVIRELVTRVIAGESLNSLTVWLNETGVAPVRGTRWASTAVRNIVSSPRIAGLRAYKGEVVGDAAWPAIISVAERDQVLAALAVRAWSRKRSPRKYLLSGLCRCGRCQARMFSAARLEAGAHKRRYVCSSSPDHGGGGRMTVVAEPLEKLITDAVLTRLDSKALADALAGKARANPDTAALSTQVEQAQARLDELTGLYSTGAISAREWIMARDPITDTITRLRREIAETLDTGPLAELAGQGSKLRAQWDELGLDRCHAIIRTVVDHVIIKPGQPGARGLDMGRVDPIWRT

SEQ ID NO: 57917 - DNA, 50 bp, Mycobacteroides abscessus; identical to SEQ ID NO: 57912
  source 1..50: mol_type = genomic DNA

SEQ ID NO: 57918 - DNA, 40 bp, Mycobacteroides abscessus; identical to SEQ ID NO: 57913
  source 1..40: mol_type = genomic DNA

SEQ ID NO: 57919 - DNA, 40 bp, Mycobacteroides abscessus; identical to SEQ ID NO: 57914
  source 1..40: mol_type = genomic DNA

SEQ ID NO: 57920 - DNA, 50 bp, Mycobacteroides abscessus; identical to SEQ ID NO: 57915
  source 1..50: mol_type = genomic DNA

SEQ ID NO: 57921 - protein, 551 aa, Roseburia hominis
MKNKKIKCDIYTRVSTTMQVDGYSLDAQKEKLKRYAEFQNMEIVNEYSDEGKSGKSVEGRPEFQRMLDNIENGTDEVQFVLVFKLSRFGRNAADVLNSLQRMQDFGVNLICVEDGIDSSKDSGKLMISVLSAVAEIERENILVQTMEGRKQKAREGKWNGGFAPYGYELVNGELQIAEDEAEIIRLIYDKFIHTNMGISAIAAWLNQHGYKKKKRQNNTLDAFASSFIKGVLDNPVYCGKLAYGRRKNEKVSGTRNEYRIVKQENYMLHDGIHEGIISETDWELAHQKREKTGVKYEKTHSLDHEHILSGILRCPLCGSGMYGNVNRKKKKDGTLYKDYFYYACKHRRLVDGHKCGYRKQWSEEKINNAVEEVIRKLVKNPKFEEAILNKIGSRIDTEEIEKEIEGLEKQHKQLTGAKARLGQQMDSLDIMDKFYEKKYQDMETRLYRLYDEIEGVENSIEEVKNRLLNIQQQKISEENVYQFLLYFDKLYDKFTDLEKKEFLNSFVEQVDIYEQEQPDGRFLKHIKFRFPVYFGDRETQELCWDNESTVE

SEQ ID NO: 57922 - DNA, 50 bp, Roseburia hominis
  source 1..50: mol_type = genomic DNA
tgttgggacaacgaaagtaccgttgagacagttgttcttttgtcccaaca

SEQ ID NO: 57923 - DNA, 40 bp, Roseburia hominis
  source 1..40: mol_type = genomic DNA
cccgtggacgaaacacgttgagacggtctgtttgatgtct

SEQ ID NO: 57924 - DNA, 40 bp, Roseburia hominis
  source 1..40: mol_type = genomic DNA
cccgtggacgaaacacgttctgacggtctgtttgatgtct

SEQ ID NO: 57925 - DNA, 50 bp, Roseburia hominis
  source 1..50: mol_type = genomic DNA
tgttaaaacaactaaaattcccttctcacaattgttgggacatctcaaca

SEQ ID NO: 57926 - protein, 478 aa, Rothia dentocariosa; identical to SEQ ID NO: 41161

SEQ ID NO: 57927 - DNA, 50 bp, Rothia dentocariosa
  source 1..50: mol_type = genomic DNA
caacgccataactcagacatgcgctagcgcatgtagcgattgcaacaccc

SEQ ID NO: 57928 - DNA, 40 bp, Rothia dentocariosa
  source 1..40: mol_type = genomic DNA
cggcgtgatcgacatgcgatacgagaacccgctgtatatg

SEQ ID NO: 57929 - DNA, 40 bp, Rothia dentocariosa
  source 1..40: mol_type = genomic DNA
cggcgtgatcgacatgcgacacgagaacccgctgtatatg

SEQ ID NO: 57930 - DNA, 50 bp, Rothia dentocariosa
  source 1..50: mol_type = genomic DNA
caaatccattgataatacatgacacagggcaactagaaagtgcaacagcc

SEQ ID NO: 57931 - protein, 472 aa, Ruminococcus gnavus
MSARYAYGYVRVSTDKQEELSPDSQEKLLREYAAKNNIIILKVFFELGISGRKADKRPEFQKMIGLAKSSDHPVDVILVWKFSRFARNQEESIVYKSLLRKQSNVDVVSVSEPLIDGPFGSLIERIIEWMDEYYSIRLSGEVLRGMKEKATKKGYQMSPPFGYRAVGNGDPYKIDQDEMKIVDFICDEFDYHNSDVTKITRKLNDMGVRTRRGNPFESRSVERILKNPFYYGLVAWNGITFMGTHEVHYSKERFEARMKKIQTTYKPLKRRDVSSCKHWLSGILKCGYCGASLAYNGANRHSPGFQCYRYSKGMHAESCSISEKKVVAALEEYFEKLLSGMDFEYSYRSAETGEKISERESLLSELDKISNREKRIRIAYENEVDTLEEYKRNKERLQKDREDILMQLENLDKNNEDTKTKSDVLKNVQTVYDVIKNDAIDYDTKGIFMRSLVEDIVYDKKNGKLIFHLYIS

SEQ ID NO: 57932 - DNA, 50 bp, Ruminococcus gnavus
  source 1..50: mol_type = genomic DNA
tgttataggttactgcaatccggtccaccaaataacaataacctataata

SEQ ID NO: 57933 - DNA, 40 bp, Ruminococcus gnavus
  source 1..40: mol_type = genomic DNA
agcgagctccccgtccgggccgccaaattgtgaaatgatc

SEQ ID NO: 57934 - DNA, 40 bp, Ruminococcus gnavus; identical to SEQ ID NO: 57933
  source 1..40: mol_type = genomic DNA

SEQ ID NO: 57935 - DNA, 50 bp, Ruminococcus gnavus
  source 1..50: mol_type = genomic DNA
tattttgtgaagaagcaatcttctccacaaaataagcctgacctataaaa

SEQ ID NO: 57936 - protein, 541 aa, Klebsiella pneumoniae
MPKAISYIRFSTKIQSVGDSTKRQSKYINDWLKRNPDYYLDESLRFQDLGISGFSGANAKSGAFGEFLAAVESGYIESGSVLLVESLDRVSRQDIDTAGEQLRKILRSGVEVVTLVDNEWYTKESLKDSLSMIKAMLVMERAHEESAMKSTRLRSVWAAKRERAAKGEIMSKRCAAWLKVSEDRSHFEFIPENVKAVQRVFQLRLEGLSHVKIAKQMNDEGFSTLNQFKSVTGGWSQSSVTELLSNRSVIGFKVPSKSMAVKGVSEIPNYYPSIITDEQFYAVQQLKQGSGRKPSSDLPLLTNLFKGVLRCSECGFIVVVAGVSAKRSGIYKCSMKSEGRCNSVGFSRLQTDRALVQGLLYNTYRLSLNHDNGSAIGALQTELEQLQKQRERLIKLAMLADDTESMAKDLKALNSQIKDAEKAVSEVHQREQSSQLETISHLDLTVKKDRIEAQIIIKRIVKEIRLNTAGKKCDVFLHNGLKLLNFPLDRVVDGAQWLEILPLIDGDEFDFEGFTTKPRHLVLEEAPEWVKEIEAQPNQPL

SEQ ID NO: 57937 - DNA, 50 bp, Klebsiella pneumoniae
  source 1..50: mol_type = genomic DNA
gtgtatctatagaaaggtctcttcaggattacacctttcttatgatacac

SEQ ID NO: 57938 - DNA, 40 bp, Klebsiella pneumoniae; identical to SEQ ID NO: 8148
  source 1..40: mol_type = genomic DNA

SEQ ID NO: 57939 - DNA, 40 bp, Klebsiella pneumoniae; identical to SEQ ID NO: 8149
  source 1..40: mol_type = genomic DNA

SEQ ID NO: 57940 - DNA, 50 bp, Klebsiella pneumoniae
  source 1..50: mol_type = genomic DNA
gtgtttctatcttgtgctctcttccagatcttaccatgtagttgatatgc

SEQ ID NO: 57941 - protein, 587 aa, Priestia flexa
MSGVEVIRANSNLANQKRGREIERLRVAAYCRVSTDSEDQLNSYKSQVAYYSDLIKKNMEWVLADIYADEAITGTQVTKREDFQRLINDCMNGDIDMVITKSISRFARNTLDTLKYVRMLKERDIAVYFEDEKINTLTMDGELLLVVLSSVAQQEVENISSNVKKGLKMKMKRGELVGFQGCLGYDYHPEDKSITVNEKEAEIVRYIFHRYVEGAGGSIIARELENLGYKTKRGTPTWAESTVLGIIKNEKYKGDLLMGKTFTLDPISKRRLENFGEEDQYYLRNHHEPIVSAEIFDKAQEIRLRRSRGRNTVEKNGGKREKFSRKYAFSCMIDCAYCGSTLTRRRWHSGTKYGKTIWQCVTSTKKGKRFCPDSKGIPEEAIEKAFLESYRIMCNNNKDVLEEFLQRMEEALSSNTIHKEVSKIEKEIQGLENKKNKLVDMRLEDIIDKETYEEKYNSLTREINEKVQKREKSLSNLEEEKDIKKRLLAFKKVLEQNEVIDTFDRYVFESVVEKVIVGGIDEDGNKDPAMITFVYKTGLSNSLDGERFKPARKNAKKETAKTSNELCSHTGNEDNKLYPLNSDDTCG

SEQ ID NO: 57942 - DNA, 50 bp, Priestia flexa
  source 1..50: mol_type = genomic DNA
tgtatccacttaatagtgacgacacatgtggagtgtgtatcgttgctaca

SEQ ID NO: 57943 - DNA, 40 bp, Priestia flexa
  source 1..40: mol_type = genomic DNA
tatgtttccgcatacgacgcatgtggaatcggtctcgcaa

SEQ ID NO: 57944 - DNA, 40 bp, Priestia flexa
  source 1..40: mol_type = genomic DNA
tatgtttccgcatacgacgggtgtggaatcggtctcgcaa

SEQ ID NO: 57945 - DNA, 50 bp, Priestia flexa
  source 1..50: mol_type = genomic DNA
tctatcccctataaagtgtcaacaggtgtgaagtcttgttggtttcacaa

SEQ ID NO: 57946 - protein, 547 aa, Glutamicibacter arilaitensis
MNTSRHQPGVNARPGRTGRSTVYPAYAQTGPESPTPGTKPIFLYLRLSKYHKDKADAIERQRIDLTRMLTAEGGWTIMGEYIDNDSASSAAIKTRKGWRQLNADIKAEKIGAVAFWKLDRTNRIASQCIEWIGDCQRAGVQLRSHQDSTDELNTATAGAKLVTGIKALLAEVETDSMSERQLASKRHLAEAGFHHGGMRPFGWMQGPRVTDAMGRTGIRLIPHPVEHQALKDAVDLVLAGKSLAQIGRYWKEQYGITTASGAYVYEATIYRSLVSPRMIGYRMRQVPEHQRGVKIDLLDYIARDASGEPVISQEPVCDRATWLRVRRLLEEAKTSKARKPWGSHEWLLTGLIYCQCGGRLYGHQKTRHRASGEKQVEYVYRCLTNRHRGAGNCPGSCTINANKAEAYVLGWFFSQITDEALAKARARRRAARSDAAVDDLLAQLDEATAEKNALLAKQGTSAYKGAMVTVLLGLIEDAQNRIDVLQRRVDAVELDHLVITDGPEVIRSWESKGIKEKRNFLRRMIQQIDALPGRGTIDQRIQITPVA

SEQ ID NO: 57947 - DNA, 50 bp, Glutamicibacter arilaitensis
  source 1..50: mol_type = genomic DNA
ggggtgcactttccattgggggctgaggcacgggatggaaagtgcacctc

SEQ ID NO: 57948 - DNA, 40 bp, Glutamicibacter arilaitensis
  source 1..40: mol_type = genomic DNA
gcggtgtgctgattcagctgatgcacgcaatataaagcca

SEQ ID NO: 57949 - DNA, 40 bp, Glutamicibacter arilaitensis
  source 1..40: mol_type = genomic DNA
gcggtgtgctgattcagctggtgcacgcaatataaagcca

SEQ ID NO: 57950 - DNA, 50 bp, Glutamicibacter arilaitensis
  source 1..50: mol_type = genomic DNA
tgagtgcaggctgcattgaggggtggggcacggggcaatccttacacatc

SEQ ID NO: 57951 - protein, 509 aa, Vibrio mediterranei
MEERKNAISYQRFSSDRQRNNSSLDRQSDAILNWLKQNPDVDLIDQYIDEAMSGWSGKHIEQGSLGKLLQAIEDGIVKPDTMILVEHFSRLSRQNIEKTEDLLRKIWGYGITIVTIRDNGVYPPSAINDMPLRIRLIIEIEQAFKESEWRSAKVKGSYAKREKEAKNGITPKMRRPFWLNEDGTLNENNTVIKDIFNWYMEGLGQQRIIVRLREKYPTVPSVQKMNPSTVMRWLSSEVVLGKWRGNKVYEAAVDETLFYNVRNVHQSRLYENVKPDRNWPLSGLLQCGVCGRGMSIQKSKGSLPVIRCSSKQRDKSCKRKTTFPYALAHHYMFNTVRKRANRVYTQRTVTKESTLRLGQIENDLVNLGSQTHEMKKLIKDLISQRKTPRSLIEMVSELDEEVAKLEAEREQLQNSIKAQNNLFISEEAHNLVLSPRNFNLEMHKLGFKIVVGEYTLNTTGFDNEAPEWVYRGYCRKKRAYKFNMLGKELYIPTSGFTEEILMLEDKEEV

SEQ ID NO: 57952 - DNA, 50 bp, Vibrio mediterranei
  source 1..50: mol_type = genomic DNA
cacatgcacacccatcactttagtgaactaatagcgtaggtgtgcagata

SEQ ID NO: 57953 - DNA, 40 bp, Vibrio mediterranei
  source 1..40: mol_type = genomic DNA
tatcgaccacttattgtgtgagttgaaagcaggccagtcg

SEQ ID NO: 57954 - DNA, 40 bp, Vibrio mediterranei
  source 1..40: mol_type = genomic DNA
tatcgaccacttattgtgtacgttgaaagcaggccagtcg

SEQ ID NO: 57955 - DNA, 50 bp, Vibrio mediterranei
  source 1..50: mol_type = genomic DNA
caaatgaaaaaaaatcactttaatacccaaatagaggaattgggtaaata

SEQ ID NO: 57956 - protein, 551 aa, Streptococcus dysgalactiae; identical to SEQ ID NO: 38046

SEQ ID NO: 57957 - DNA, 50 bp, Streptococcus dysgalactiae
  source 1..50: mol_type = genomic DNA
ttggacaatgatgaacaagttgagtgcatagcgttgatacaaagagtgaa

SEQ ID NO: 57958 - DNA, 40 bp, Streptococcus dysgalactiae; identical to SEQ ID NO: 52928
  source 1..40: mol_type = genomic DNA

SEQ ID NO: 57959 - DNA, 40 bp, Streptococcus dysgalactiae
  source 1..40: mol_type = genomic DNA
acagacgcatcatgtggagcacgtagtgttgctacaacga

SEQ ID NO: 57960 - DNA, 50 bp, Streptococcus dysgalactiae
  source 1..50: mol_type = genomic DNA
gtagacaaacatacagaaattaagcacacagcattcaggataggagtgaa

SEQ ID NO: 57961 - protein, 551 aa, Streptococcus dysgalactiae
MSKEKIKVYLYTRVSTSIQIEGYSLEAQKSRMKAFAIYNDYEIVGEYEDAGKSGKSIEGRIQFNRMMEDIKSGKDGVSFVLVFKLSRFARNAADVLSTLQIMQDYGVNLICVEDGIDSSKDAGKLMISVLSAVAEIERENIRIQTMEGRIQKAREGKWNGGFAPYGYKLEDGKLFINEEEALAIRTIFDQYVNTTIGANGISKYLENHGIRKIPRQNGKNPLFDAGLIRKILKNPVYNGKIAFGRRTLEKVHGTRNEYKQVEQDEYLISEGIHEAIVSDEVWQAAQVKLKSQAKKYEHVNKGKDTRTHLLSGIVKCPICGVGMFGNKCIKKKKDGTKYKDFYYYGCKHRQMIRGHKCTFSKQIREELLDDAVAEVIVKIVSNPKFASMMQEKINMKVDTSEIEKEIDNYQKELRKSHSTKFKLIEEIDNLDVDDKHYKRRKQDLDDRLYRMYDKIEELESLLIDAKAKKQTIEAEKLTGDNIYKVLIYFDKLYKVMNDVERRQLITALISEIQVYEEKQPNGQWLKSITFKLPIIDDDLNISLDNDEQVEC

SEQ ID NO: 57962 - DNA, 50 bp, Streptococcus dysgalactiae; identical to SEQ ID NO: 57957
  source 1..50: mol_type = genomic DNA

SEQ ID NO: 57963 - DNA, 40 bp, Streptococcus dysgalactiae; identical to SEQ ID NO: 52928
  source 1..40: mol_type = genomic DNA

SEQ ID NO: 57964 - DNA, 40 bp, Streptococcus dysgalactiae; identical to SEQ ID NO: 57959
  source 1..40: mol_type = genomic DNA

SEQ ID NO: 57965 - DNA, 50 bp, Streptococcus dysgalactiae; identical to SEQ ID NO: 57960
  source 1..50: mol_type = genomic DNA

SEQ ID NO: 57966 - protein, 526 aa, Mycobacterium paraintracellulare
MARVLGRVRLSRLTDESTSAERQRELIEQWSAINDHTVVGWAEDLDISGSVDPFDTPQLGDWLAHRAPEFDIVAAWKLDRLSRNTININGLFAWCIKHGKTVVSVTESIDLGTPVGRLIANVLAFLAEGELEAIRERTKAGRQKVVSLGRWPGGPAPYGFTTVKLDGGGFKLEPRADQVEVIKRIRDLILSGLSMEAVAKRLNEDGIPSPTGKKWRSARLFLIMESKLLLGHSTYKGQTVRDASGMPVMVSDPILEPDEWDRLQAAIQARRLPSAVKRTQNTSPLYGVIFCKSCGSMMYNRKYGHRESDRGYTYDYYMCPKSCGRMIHAELVYWMLDKIFTAEVGDEMVRERVYVPAESHETEMKEAQRAVDEITPLLGVITSETMRKQLTSQILALDSRIKTLESMPVRESHWEYRATGETYAQAWEAGDLAGRRELLVKSGITVSAFKPKTGAGLEFELVIPPDIREQMGLGPRQSTRVTMADLFAEMKKSGVAGITISGGEITFTHTSGKTYTEDLGDSFRRC

SEQ ID NO: 57967 - DNA, 50 bp, Mycobacterium paraintracellulare
  source 1..50: mol_type = genomic DNA
gttctacaaaccccctttaacgatccgtcgtcaggcgtgttgtgtagaat

SEQ ID NO: 57968 - DNA, 40 bp, Mycobacterium paraintracellulare
  source 1..40: mol_type = genomic DNA
gtcgacatcctttaacgatccgtccggtgaggcggagaag

SEQ ID NO: 57969 - DNA, 40 bp, Mycobacterium paraintracellulare
  source 1..40: mol_type = genomic DNA
gtcgacatcctttaacgataggtccggtgaggcggagaag

SEQ ID NO: 57970 - DNA, 50 bp, Mycobacterium paraintracellulare
  source 1..50: mol_type = genomic DNA
gttctatcataaatgttttatgagaggtgtgcaggcagtaggtgtaaaat

SEQ ID NO: 57971 - protein, 555 aa, Clostridium leptum
MIKQPNKITALYCRLSRDDEQDGLSGSIKNQQTILEKYAQENGFRNTRVLIDDGWSGTNFARPAFTEIMELAEKGLIGTLIVKDHSRLGRNRLIVGQLLEEGFDSLGIRYIAVMDNIDTAKGISNLVPMQDLFNEWHAKNTSQKVRNVFKSKGMSGAPLTTNPPYGYLKDPESRNGWIVDEAAAKIVRQIFAWCVDGLGPTQIAKRLKAGKIPTPTEHWGNIGRNCSKPPAVPYNWCSATVADILGKQEYCGDTVNFRSTTKSFKNKKRIDRPPEEWQIFKDTHPAIVDRETFALVQELRKHRRRPTKSGIVSLFSGLLYCADCGEKLYYSVTNNYKREQAYFFCSSYRKNSEVCSAHYIREKVVEQIVLESMQRILLNVQVFEKEFARKQMDCYTEDKKKLLAAKRRELGKVKKRIAEIDTLIQKIYEDNASGKLSDERYATLSLSYEEEQKTLKAAVPEMQAYLETETDKTESLQRFIQKVKQVTELKALTPELIHEFVDRIVVYAPRYLDGKRVQLLDIYYSGVGILHELTPEEMEEAFQQHLIERNKEKTA

SEQ ID NO: 57972 - DNA, 50 bp, Clostridium leptum
  source 1..50: mol_type = genomic DNA
caccttccttacggagggtgccccaagggagaggcttcgtaaggaagtcc

SEQ ID NO: 57973 - DNA, 40 bp, Clostridium leptum
  source 1..40: mol_type = genomic DNA
tggcaaaaagagagggcggaagtgccctctcttttatcaa

SEQ ID NO: 57974 - DNA, 40 bp, Clostridium leptum
  source 1..40: mol_type = genomic DNA
tggcaaaaagagagggcggttgtgccctctcttttatcaa

SEQ ID NO: 57975 - DNA, 50 bp, Clostridium leptum
  source 1..50: mol_type = genomic DNA
ccccttcctaataggggtttcctgttgggagaggctaaaacagagaggct

SEQ ID NO: 57976 - protein, 514 aa, Streptomyces sp CFMR 7
MGFVETPATTPYDGCGRCLVGVRRLSRKTEASHSPETQGDMILAVAEANDAHIIAWADDWEVSGAMDPLKRPKLGPWLTGRMGPYDGIAGAAVDRIGRNVRDVLNTAYTIHENGQMLLTADHEGVWDLDDDTQETELLIKAMGAQLEHRATLRRSTNGKINSRNRGRVFSKPSYGYEYFRAKPMGPVSEVRLRPSSSKEIRKVARRILVDQSGDITVHHEMKRLNREGVPSPQDELAMTYGREPTGVLWSDHSLRRILTSKAALGYLLYKGEPLLDEHGDPIKIAPELWDYSTHLALIEKCRPQPRKTKGKHALGRAGQGKQLYSGRGTCGNCGNKLRASQEGGYHCYARHKGIAPNCKPSPNMRVKLFDKEATRQFLDEFGDAQVMEKVFKPGTNYGAQIAELEASRARLREDRLAGMYQDEDDYDWFKREYQRMGEKIAELKEIPERPFAVITVPTGKTIRDQWESAESLAERQEILSEFGAQVILMSRSNEHRVRLIAVNPYAELELPEAA

SEQ ID NO: 57977 - DNA, 50 bp, Streptomyces sp CFMR 7
  source 1..50: mol_type = genomic DNA
aactgtgtttaagcgatgctccctagggcaaaaatccctagagaacagtc

SEQ ID NO: 57978 - DNA, 40 bp, Streptomyces sp CFMR 7
  source 1..40: mol_type = genomic DNA
gatcaggcccatccacggcagcgcgtacatcgtcagcgtg

SEQ ID NO: 57979 - DNA, 40 bp, Streptomyces sp CFMR 7
  source 1..40: mol_type = genomic DNA
gatcaggcccatccacggcaacgcgtacatcgtcagcgtg

SEQ ID NO: 57980 - DNA, 50 bp, Streptomyces sp CFMR 7
  source 1..50: mol_type = genomic DNA
aactgatttttgacaaggctaccaaaagcatacatggggatagaacagtc

SEQ ID NO: 57981 - protein, 478 aa, Brevibacterium aurantiacum
MVELVALRKTNEVAAYVRASMDRKGDRWTVDTQLRKIRALAEAKDWNVVEVYEDNAVSATKKRRAGTRWAEMLEDAKAGRFSMVVAVDMDRLLRSTKDLNTLIDLGLRVVTVDGEIDLSTADGEFRATMLAALARFEARRKAERQIRSNERRRAEGVPTSTWKAFGWTREGELIPEEAEAVRRAFDAFLGEPSLSIRRIREDLNSAGHLTARGSQFSVDAVRYLLANPQYSGYIKHYASGELYPVQGEVFPPIVSEQTWRAAVAKLEDNVRRSARQGNQPKYLLSAIGLCGKCGATLVSGTNSRKQPTYRCGEQFHLTRQREPVDAMVTEAVLTRLSSVDVHDLVMPQEDSGPDREELLTERNALVERVKELSPLLRDIHQPVLEITAAINDVKARIDEIDAELLDRSVSVAAKLLADVDEPVGTAERREVVESKWKVLDVDRRRMLVDELVTVTIEPVVPGHVKFDPDLIRIEPRRD

SEQ ID NO: 57982 - DNA, 50 bp, Brevibacterium aurantiacum
  source 1..50: mol_type = genomic DNA
cagagtaacaacccagatatgcgctagcgcatattgcggttataacactc

SEQ ID NO: 57983 - DNA, 40 bp, Brevibacterium aurantiacum; identical to SEQ ID NO: 27918
  source 1..40: mol_type = genomic DNA

SEQ ID NO: 57984 - DNA, 40 bp, Brevibacterium aurantiacum; identical to SEQ ID NO: 56274
  source 1..40: mol_type = genomic DNA

SEQ ID NO: 57985 - DNA, 50 bp, Brevibacterium aurantiacum
  source 1..50: mol_type = genomic DNA
tatagtaacattgcatatatgtgcatgcatatattgtgtacatatcctta

SEQ ID NO: 57986 - protein, 578 aa, Anaerobutyricum hallii
MEVKIIKANTPTELSSKRKIERLRVAAYCRVSTDDEDQTKSYQSMIKYYTDLIHNNKQWVFAGIFADKAITGTKADIREEFQRLIQECLSGKIDLVIAKSIPRFARNTLDTLKYVRMLKERNVAVYFEVEKINTLKDGEFLLTILSSVAQQEVENTSAYVKKGLKMKMKRGELVGFQKCLGYDYDPLTKTLSINEEGAKTVGYIFKRYVAGAGSTMIARELNEQEIPTVHGNRWSPSSVMGIINNEKYMGDLLLGKSFTVDPISKRRLTNMGEEDRFYIENHHEAIISKEIFEKAQEIRQRRSKGRVNGVETGKREKYSRQYAFSSMLECGFCGETVSRRCWHSHSKYEKIIWHCGRNIRKGKRFCPEAKGIPEQVIEKAFVESYQMLCSDHKDVLEEFIKRIEETLSGDSIKDRIKKIDQSIRNLKYRRRKLLDKYLDGGIAKDIYEEADLDLDKKIFKANQDLIELEQQYNSENSLQKRLKDFKKTLLKNQTLEEFDREIFESIVEKVIIGGYDENGKEDPYKIIFIYKTGFKDEIENAKKRYENTSGRVDGKLCSYITSEVKDLYPCNSDNTHRP

SEQ ID NO: 57987 - DNA, 50 bp, Anaerobutyricum hallii
  source 1..50: mol_type = genomic DNA
tgtatccttgtaatagtgacaacacacatcgacccgatggaagagataca

SEQ ID NO: 57988 - DNA, 40 bp, Anaerobutyricum hallii
  source 1..40: mol_type = genomic DNA
tatgtatggggcggtaagtcacatcgaccctgttgaattt

SEQ ID NO: 57989 - DNA, 40 bp, Anaerobutyricum hallii
  source 1..40: mol_type = genomic DNA
tatgtatggggcggtaagttacatcgaccctgttgaattt

SEQ ID NO: 57990 - DNA, 50 bp, Anaerobutyricum hallii
  source 1..50: mol_type = genomic DNA
tgtatccttatactatctacaacatacaggactcaggtaagacagataca

SEQ ID NO: 57991 - protein, 480 aa, Mycobacteroides abscessus
MAKTVPAVRSAAVYARISADVEGKSLGVQRQLEDCRKLAAERGWVVGREYVDNDVSAYSGKVRAGYESMCNDLAAGVRDAVIVYNLDRLHRRPAELEDFVALCEAAGVNQVATVTADIDLGNDDGLFMARIFLFMARIFAAFAAKESGRKSARMRRKYEQKAAQGLPHGPNRPFGYEPDKITIRESEADVIRELVVRVIAGESVNALTVWLNETGVAPVRGARWASTAVRNIVSSPRIAGLRAYKGEVVGDAAWPAIISTAQRDQVLAALAVRSWNRKRSPRKYLLSGLCRCGRCQTRMFSAARLEAGAHKRRYVCSSSTDHGGCGRMTVVAEPLEKLIADAVLTRLDSKALADAVAGKAAANPDTAVLSAQVEAAQARLDELTGLYSSGAISAREWIMARDPITDTITGLRREIAETIDVGPLAELAGQGSVLRGQWDDLGLDRCHAIIRTVIDHVVIKPGQPGARGLDMGRIDPIWRT

SEQ ID NO: 57992 - DNA, 50 bp, Mycobacteroides abscessus
  source 1..50: mol_type = genomic DNA
aggtccgatttacgacttgttaggttgcttatttttcgttaaactgacct

SEQ ID NO: 57993 - DNA, 40 bp, Mycobacteroides abscessus; identical to SEQ ID NO: 28128
  source 1..40: mol_type = genomic DNA

SEQ ID NO: 57994 - DNA, 40 bp, Mycobacteroides abscessus; identical to SEQ ID NO: 28129
  source 1..40: mol_type = genomic DNA

SEQ ID NO: 57995 - DNA, 50 bp, Mycobacteroides abscessus
  source 1..50: mol_type = genomic DNA
tggtcaaatcaattacttcttagaaagtctaatttttttcaaaatgacca

SEQ ID NO: 57996 - protein, 522 aa, Mesobacillus jeotgali
MEKTRFHKHVAIYLRISQEKRNENEETLKNHREILVEHAKAINCTYDIYGEVISGGKSNIEDRLELQRLFNNIENYDAILCIELSRLSRNGLISQTVKQYCMDFDKPIITPFYEYDLANNENDRLMFDLGSLIASHEHGVIGKRSKINKIQMSKAGLHVSGNVPFGYVRNNETKKLEINDKEAKIVRYIFDLHSSGLGSFKIREILNKEGYKTKKNNHFELPTIKRIIKNPVYKGTIVFNDRKRKKKDGKFVYEIVETIVVDKAHPWIISPEEWERANQDCLERAKNARQFREKPAIKTGYTMLKDLIYCGVCGRKMTIRKDNKNTSTYTIKRCEYLLIGGEKCQNCGIKLEFVENEVYDELQEYKNKLTESLRMIQLNDETKLKNQLTERLVKVEKKLKDVLRQQKRLIDFAVEGIFTTEQIREKKQELLTLQQNLEKEKKDLLNEINNPSFENITKNIQGVIHSIENLKNMNTVEVNQTLKTFIKKIFYTRVIPAELLVKSTQNKQRRYYPYQLEFEYKK

SEQ ID NO: 57997 - DNA, 50 bp, Mesobacillus jeotgali
  source 1..50: mol_type = genomic DNA
gtacttacaataaaaaacgctgtcccgacagtattttttataggaagtat

SEQ ID NO: 57998 - DNA, 40 bp, Mesobacillus jeotgali
  source 1..40: mol_type = genomic DNA
tacgtccggctacgcagtcccaacattcgttgttgatgcg

SEQ ID NO: 57999 - DNA, 40 bp, Mesobacillus jeotgali
  source 1..40: mol_type = genomic DNA
tacgtccggctacgcagtctaaacattcgttgttgatgcg

SEQ ID NO: 58000 - DNA, 50 bp, Mesobacillus jeotgali
  source 1..50: mol_type = genomic DNA
atactttcagagaaaaaagctgtgtaaatattttccagtcaaggaagtat

SEQ ID NO: 58001 - protein, 507 aa, Escherichia coli; identical to SEQ ID NO: 5406

SEQ ID NO: 58002 - DNA, 50 bp, Escherichia coli
  source 1..50: mol_type = genomic DNA
tcgtgtctttagaccttgatgattttcatcagacacgtttaaatacacca

SEQ ID NO: 58003 - DNA, 40 bp, Escherichia coli; identical to SEQ ID NO: 5188
  source 1..40: mol_type = genomic DNA

SEQ ID NO: 58004 - DNA, 40 bp, Escherichia coli; identical to SEQ ID NO: 5189
  source 1..40: mol_type = genomic DNA

SEQ ID NO: 58005 - DNA, 50 bp, Escherichia coli
  source 1..50: mol_type = genomic DNA
tcctggctgccctcattgctcattagcatcagacactcccaccagcacca

SEQ ID NO: 58006 - protein, 528 aa, Escherichia coli; identical to SEQ ID NO: 50311

SEQ ID NO: 58007 - DNA, 50 bp, Escherichia coli; identical to SEQ ID NO: 50277
  source 1..50: mol_type = genomic DNA

SEQ ID NO: 58008 - DNA, 40 bp, Escherichia coli; identical to SEQ ID NO: 34068
  source 1..40: mol_type = genomic DNA

SEQ ID NO: 58009 - DNA, 40 bp, Escherichia coli; identical to SEQ ID NO: 34069
  source 1..40: mol_type = genomic DNA

SEQ ID NO: 58010 - DNA, 50 bp, Escherichia coli; identical to SEQ ID NO: 28815
  source 1..50: mol_type = genomic DNA

SEQ ID NO: 58011 - protein, 521 aa, Escherichia coli
MKVPVWCYARISTLKQIDGFGIQRQINTINQFLQCVELDHRLPFTLDVDNVTQMVAEGKSAFRDKNWNEKTKLGQYRKLVMDGVISDSVLIVENIDRLTRLDPYMAIEIISGLVNRGTTILEIETGMTYSRYIPESITVLVMQCNRANGESKRKSIMMQKSHANRYGKVSKVRPRWFDVVEIDGIKQYRPNETAKAIQRMYNDYINGIGAAHIVRTYGNTDNGKAWTLVTVLRALSDKRVADDARYPPIIDKKLYDSVQALKAATNKKGNTHQKNMLNIFSGMSRCPVCNQSIIVKRNSHGNLFTVCLGKRTNKTCEARSISYFALERPLLTAIRDLDFSEVYKHEDKNVLTLRDQWIQNERDIAAFRERLSKASRYEKFVILDELETMNREQEELTIRLKSVDVPKDIQLTFDDDKLDLDTNYRIELNNRIKKLIQHINIVREDVTKSSYTIYCTIKYWTDVISHLVIIDVNIKRTGTGGTNTLTTTLRSVSSLNMDGTVSGNPDSDAWEYWKSFLDNLK

SEQ ID NO: 58012 - DNA, 50 bp, Escherichia coli; identical to SEQ ID NO: 50237
  source 1..50: mol_type = genomic DNA

SEQ ID NO: 58013 - DNA, 40 bp, Escherichia coli; identical to SEQ ID NO: 34068
  source 1..40: mol_type = genomic DNA

SEQ ID NO: 58014 - DNA, 40 bp, Escherichia coli; identical to SEQ ID NO: 34069
  source 1..40: mol_type = genomic DNA

SEQ ID NO: 58015 - DNA, 50 bp, Escherichia coli; identical to SEQ ID NO: 28815
  source 1..50: mol_type = genomic DNA

SEQ ID NO: 58016 - protein, 521 aa, Escherichia coli; identical to SEQ ID NO: 50431

SEQ ID NO: 58017 - DNA, 50 bp, Escherichia coli; identical to SEQ ID NO: 50237
  source 1..50: mol_type = genomic DNA

SEQ ID NO: 58018 - DNA, 40 bp, Escherichia coli; identical to SEQ ID NO: 34068
  source 1..40: mol_type = genomic DNA

SEQ ID NO: 58019 - DNA, 40 bp, Escherichia coli; identical to SEQ ID NO: 34069
  source 1..40: mol_type = genomic DNA

SEQ ID NO: 58020 - DNA, 50 bp, Escherichia coli; identical to SEQ ID NO: 28815
  source 1..50: mol_type = genomic DNA

SEQ ID NO: 58021 - protein, 521 aa, Escherichia coli
MKVPVWCYARISTLKQIDGFGIQRQINTINQFLQYVVLDHRLPFTLDVDNVTQMVAEGKSAFRGKNWNEKTKLGQYRKMVMDGVINDSVLIVENIDRLTRLDTFQAVEIISGLVNRGTTILEIETGMTYSRYIPESITVLVMQCNRANGESKRKSIMMQKSHANRYGKVSKVRPRWFDVVEIDGIKQYRPNETAKAIQRMYNDYINGIGAAHIVRTYGNTDNGKAWTLVTVLRALSDKRVADDARYPPIIDKELYDSVQALKAATNKKGNTHQKNMLNIFSGMSRCPVCNQSIIVKRNSHGNLFTVCLGKRTNKTCEARSISYFALERPLLTAIRGLDFSEVYKHEDKNVLTLRDQWIQNERDIAAFRERLNKASRHEKFAILDELEIMNREQEELTIRLKSVDVPKDIQLTFDDDKLDLDTNYRIELNNRIKKLIQHINIVREDVSKSSYTIYCTIKYWTDVISHLVIIDVNIKRTGTGGTNTLTTTLRSVSSFNMDGTVSGNPDSDAWEYWKSFLDNLK

SEQ ID NO: 58022 - DNA, 50 bp, Escherichia coli; identical to SEQ ID NO: 50237
  source 1..50: mol_type = genomic DNA

SEQ ID NO: 58023 - DNA, 40 bp, Escherichia coli; identical to SEQ ID NO: 34068
  source 1..40: mol_type = genomic DNA

SEQ ID NO: 58024 - DNA, 40 bp, Escherichia coli; identical to SEQ ID NO: 34069
  source 1..40: mol_type = genomic DNA

SEQ ID NO: 58025 - DNA, 50 bp, Escherichia coli; identical to SEQ ID NO: 28815
  source 1..50: mol_type = genomic DNA

SEQ ID NO: 58026 - protein, 528 aa, Escherichia coli; identical to SEQ ID NO: 34446

SEQ ID NO: 58027 - DNA, 50 bp, Escherichia coli; identical to SEQ ID NO: 50237
  source 1..50: mol_type = genomic DNA

SEQ ID NO: 58028 - DNA, 40 bp, Escherichia coli; identical to SEQ ID NO: 34068
  source 1..40: mol_type = genomic DNA

SEQ ID NO: 58029 - DNA, 40 bp, Escherichia coli; identical to SEQ ID NO: 34069
  source 1..40: mol_type = genomic DNA

SEQ ID NO: 58030 - DNA, 50 bp, Escherichia coli; identical to SEQ ID NO: 28815
  source 1..50: mol_type = genomic DNA

SEQ ID NO: 58031 - protein, 521 aa, Escherichia albertii
MKVPVWCYARISTLKQIDGFGIQRQINTINQFLQCVELDHRLPFTLDVDNVTQMVAEGKSAFREKNWNEKTKLGQYRKMVMDGVVKESVLITESIDRLTRLDPYKAVEILSGLINRGTTILEVDTGMTYSRYIPESLSVLTIQINRANGESRRKSIMMQKSHANRYGKVSKVRPRWFDVVEIDGIKQYRPNETAKAIQRMYNDYINGIGAAHIVRTYGNTDNGKAWTLVTVLRALSDKRVADDARYPPIIDKKLYDSVQALKAATNKKGNTHQKNMLNIFSGMSRCPVCNQSIIVKRNSHGNLFTVCLGKRTNKTCEARSISYFALERPLLTAIRGLDFSEVYKHEDKNVLTLRDQWIQNERDIAAFRERLNKASRHEKFAILDELETMNREQEELTIRLKSVDVPKDIQLTFDDDKLDLDTNYRIELNNRIKKLIQYINIVREDVTKSSYTIYCTIKYWTDVISHLVIIDVNIKRTGTGGTNTLTTTLRSVSSLNMDGTVSGNPDSDAWEYWKSFLDNLK

SEQ ID NO: 58032 - DNA, 50 bp, Escherichia albertii; identical to SEQ ID NO: 50237
  source 1..50: mol_type = genomic DNA

SEQ ID NO: 58033 - DNA, 40 bp, Escherichia albertii
  source 1..40: mol_type = genomic DNA
cggccccatcagcagcaatgaacagtcagttgtaccaccg

SEQ ID NO: 58034 - DNA, 40 bp, Escherichia albertii
  source 1..40: mol_type = genomic DNA
cggccccatcagcagcaatccacagtcagttgtaccaccg

SEQ ID NO: 58035 - DNA, 50 bp, Escherichia albertii; identical to SEQ ID NO: 28815
  source 1..50: mol_type = genomic DNA

SEQ ID NO: 58036 - protein, 521 aa, Escherichia coli; identical to SEQ ID NO: 50471

SEQ ID NO: 58037 - DNA, 50 bp, Escherichia coli; identical to SEQ ID NO: 50237
  source 1..50: mol_type = genomic DNA

SEQ ID NO: 58038 - DNA, 40 bp, Escherichia coli; identical to SEQ ID NO: 34068
  source 1..40: mol_type = genomic DNA

SEQ ID NO: 58039 - DNA, 40 bp, Escherichia coli; identical to SEQ ID NO: 34069
  source 1..40: mol_type = genomic DNA

SEQ ID NO: 58040 - DNA, 50 bp, Escherichia coli; identical to SEQ ID NO: 28815
  source 1..50: mol_type = genomic DNA

SEQ ID NO: 58041 - protein, 528 aa, Escherichia coli; identical to SEQ ID NO: 50311

SEQ ID NO: 58042 - DNA, 50 bp, Escherichia coli; identical to SEQ ID NO: 50237
  source 1..50: mol_type = genomic DNA

SEQ ID NO: 58043 - DNA, 40 bp, Escherichia coli; identical to SEQ ID NO: 34068
  source 1..40: mol_type = genomic DNA

SEQ ID NO: 58044 - DNA, 40 bp, Escherichia coli; identical to SEQ ID NO: 34069
  source 1..40: mol_type = genomic DNA

SEQ ID NO: 58045 - DNA, 50 bp, Escherichia coli; identical to SEQ ID NO: 28815
  source 1..50: mol_type = genomic DNA

SEQ ID NO: 58046 - protein, 593 aa, Sphingomonas taxi
MTLPATIYARFSNADQAQGNSKARQLTLCRDMLERHGWEGSPDRELIDEGVSAYSGANRASGGLLHTFEQEALAGRYKNGHVLVVENLDRISRQGYDAVLPFLQQLTSQGVTVATVDGDRVYPAYERVTMASVIEAVVKSELSREESEKKSRRLKAAQNKRVSDAQANAGQHISSTATVPAWIDTRRISKTSERPIYRMSLNAARVAVLREIFQLTIDGFGTPAIAKILNGRGEPVWKHRNIASKNGWTVGYLTKIVLNRAVMGEYHPMNRPRSGEATSKGVDVLNHFPQAIDPVTFAKAAAARESRKGTSGAWQITHNNLFSGIAKCGVCGGRMKQEVVVRKGGNRRNGKNPDAVYQSRQDISYLKCHNALNRVFDEERGLPRCSNRNWVRYEKLEQAVVQFAVGWLALNRQSAPSADIESMEVSIADARRFLADKQKQADNAAVSFTRTGSTTMERLMLQLEVEVAEDQKAIQVIEQQLSTLRTSAPSPDFLNHIEKQRTALYSNDETERTTTRVAMKQTLGSLIKTMECDTERNTHVILAGNSLLFSFDNEGELIGNEMGQGTIHLGPYGEIDWHPDFPDADYAIHPAAL

SEQ ID NO: 58047 - DNA, 50 bp, Sphingomonas taxi
  source 1..50: mol_type = genomic DNA
gggtttgactcctataacgcacgggtcatactgtaataggagttgggaac

SEQ ID NO: 58048 - DNA, 40 bp, Sphingomonas taxi
  source 1..40: mol_type = genomic DNA
cgtcgggacctggctgccggtcagcaatgtataaccgatc

SEQ ID NO: 58049 - DNA, 40 bp, Sphingomonas taxi
  source 1..40: mol_type = genomic DNA
cgtcgggacctggctgccgaacagcaatgtataaccgatc

SEQ ID NO: 58050 - DNA, 50 bp, Sphingomonas taxi
  source 1..50: mol_type = genomic DNA
gggtttcacagttggaaagcatggaacatgaagaaagatgttttgggagc

SEQ ID NO: 58051 - protein, 477 aa, Bacillus oceanisediminis
MFNHRGERRLSFCIGGIVLVRQKKDKKEEIMQVAVYIRVSTQEQVENYSIESQKERIEAYCKAKGWGIYDVYIDPGYSGSNTDRPGLQRMLQDVNKVDAVVVYKLDRLSRSQRDTLDLIEEHFLKNNVDFVSITETLDTSTPFGKAMIGILSVFAQLERETIAERMRMGHIKRAENGYRTSGGDYDPAGYARVNGNLEIKKDEAQHIKLAYDLYEQYLSITKVQNRLKELGYKVWRFRRYHDILHNRLYCGYVSFAGEYYVGKHEPIISEDQFERVQELLTRNKGRNANKAKESLFTGLITCGCCGENYVTFTSTDRGKKYRYYLCRARRYHAEYDEKCTNKNWNSKNLEDLIVDRINNMITDKSFINQEMELVDYDRLLREIDDKEGRLIDLYTIKKMDKNKLAERFQALEEEKLELTRKKVAQEKKKTNMISEDDLKQYSLDLLTAEFPERQAIVQKLIKQIYINGDTVEIAWNL

SEQ ID NO: 58052 - DNA, 50 bp, Bacillus oceanisediminis
  source 1..50: mol_type = genomic DNA
cttatgcattcatttcccgctattcaaacggctggttatgaatgcataag

SEQ ID NO: 58053 - DNA, 40 bp, Bacillus oceanisediminis
  source 1..40: mol_type = genomic DNA
ttccgttttcccagcgccgcaaactgcccagataaggagc

SEQ ID NO: 58054 - DNA, 40 bp, Bacillus oceanisediminis
  source 1..40: mol_type = genomic DNA
ttccgttttcccagcgccggcaactgcccagataaggagc

SEQ ID NO: 58055 - DNA, 50 bp, Bacillus oceanisediminis
  source 1..50: mol_type = genomic DNA
cttattcatttttctatcactagtgcaaagcccaatgtcaaatgcataag

SEQ ID NO: 58056 - protein, 489 aa, Mycobacteroides abscessus
MSKPLRALVGARVSVLRGEQKVSHIAQKETGTKWVLDRGHEIVGTFEDLDVSASVSPFHRPDLGPWLTPEREHEWDVLVFSKIDRMFRSTRDCVRFAEWAEDHKKILVFAEDGMTLNYRDKDTSNSLESMMSELFIYIGSFFAQLELNRFKTRTMDSHRVLRGMDRWAGGTAPLGYRVVDHPSGKGNALDTDPESKAVLHDIASKLLDGWSIIRITQWLNDNHVLSNRDKARMAKGKEAKERPWAVSTVTRALTSLKTQGYKMHRQKPLLDGNGEMIRMAPPTFDDDTWRRIQETVALRQATKSRTNSSNPMLGIGYCDECGASLAQKILRKNGKEYRYYRCGRSPMQCSGVNYKADDADKLLEESFLARYGHRNVTRRVFVPGEDNSHELEQVRATIERLRRESDAGLVVTPEDEEIYLQRMRSLIDRRTALESTPVRSAGWVTETLNTTYADAWGDQDHHKLLTERGVKFYLSPGHPRMYVPELEGE

SEQ ID NO: 58057 - DNA, 50 bp, Mycobacteroides abscessus
  source 1..50: mol_type = genomic DNA
ggtagtcaatgagtggtaatctgtgtacggattgctgtacactgacaact

SEQ ID NO: 58058 - DNA, 40 bp, Mycobacteroides abscessus
  source 1..40: mol_type = genomic DNA
ctttccgatggccttcggggttcacgtcgcgatggccacc

SEQ ID NO: 58059 - DNA, 40 bp, Mycobacteroides abscessus
  source 1..40: mol_type = genomic DNA
ctttccgatggccttcgggcttcacgtcgcgatggccacc

SEQ ID NO: 58060 - DNA, 50 bp, Mycobacteroides abscessus
  source 1..50: mol_type = genomic DNA
ggttctcaacctgggataattagtctacagattttttaactgtcacaact

SEQ ID NO: 58061 - protein, 489 aa, Mycobacteroides abscessus
MPETLRALVGARVSVLRGEQKVSHIAQKETGTKWVLDRGHDIVGTFEDLDVSASVSPFNRPDLGPWLTPEREHEWDVLVFSKIDRMFRSTRDCVRFAEWAEDHKKILVFAEDGMTLNYRDKDTSNSLESMMSELFIYIGSFFAQLELNRFKTRTMDSHRVLRGMDRWAGGTAPLGYRVVDHPSGKGNALDTDPESKAVLHDIAGKLLDGWSIIRITQWLNDNHVLSNRDKARMAKGKEAKERPWAVSTVTRALTSLKTQGYKMHRQKPLLDGNGEMIRMAPPTFDDDTWRRIQETVALRQATKSRTNSSNPMLGIGYCDECGASLAQKILRKNGKEYRYYRCGRSPMQCSGVNYKADDADKLLEESFLARYGHRNVTRRVFVPGEDNSHELEQVRATIERLRRESDAGLVVTPEDEEIYLQRMRSLIDRRTALESTPVRSAGWVTETLNTTYADAWGDQDHHKLLTERGVKFYLSPGHPRMYVPELEGE

SEQ ID NO: 58062 - DNA, 50 bp, Mycobacteroides abscessus
  source 1..50: mol_type = genomic DNA
ggtagtcaaagagtggtaatctgtgtacggattgctgtacactgacaact

SEQ ID NO: 58063 - DNA, 40 bp, Mycobacteroides abscessus; identical to SEQ ID NO: 58058
  source 1..40: mol_type = genomic DNA

SEQ ID NO: 58064 - DNA, 40 bp, Mycobacteroides abscessus; identical to SEQ ID NO: 58059
  source 1..40: mol_type = genomic DNA

SEQ ID NO: 58065 - DNA, 50 bp, Mycobacteroides abscessus; identical to SEQ ID NO: 58060
  source 1..50: mol_type = genomic DNA

SEQ ID NO: 58066 - protein, 441 aa, Pseudomonas alliivorans
MTILVDMERANAESKRKSDFGSAGWAKAHVRMEAGDVTTDKVAQWLEVERIDGERRFKVKEDIAEQIRALFTASLQYGVAESCRRVNEQFGSGWKIHQVQYLLKNRRLIGEHTITNYSEQAGKNMPSDRVLTDYYPVVVDKNLFAEVQAVINKRKPFAGKQDASNLNIYRGLVKCAACGGSVRFMFKAGKEYFHCTASMSNSCTRPGIRSIRGEHLRRLLFKFEHWTNLRTYFMQSSEDLKTLRRERDALLALIEKIVTRTSQTQQRLMDEEDSDRQSVLLDMLTKAKRDDRHAHAKLAATETQLSELEDAFTIAGLDIGNRVEWMLNDRSEAAALERSRINRYLSNIFETLVIDFEGKSLSTVVKSAFKGKVTKFQATISSPPDKRFKVAKGRVRIAGKSRRVPSTMPDAFTPEELETLKGAQWKAPIPLLSPVMKKTLG

SEQ ID NO: 58067 - DNA, 50 bp, Pseudomonas alliivorans
  source 1..50: mol_type = genomic DNA
tatgtaccaattaggtactacagtcagatatactcgccaataagaaccaa

SEQ ID NO: 58068 - DNA, 40 bp, Pseudomonas alliivorans
  source 1..40: mol_type = genomic DNA
cctggcgaagcagtagatgcagccgtgttaacaccctcga

SEQ ID NO: 58069 - DNA, 40 bp, Pseudomonas alliivorans
  source 1..40: mol_type = genomic DNA
cctggcgaagcagtagatggtgccgtgttaacaccctcga

SEQ ID NO: 58070 - DNA, 50 bp, Pseudomonas alliivorans
  source 1..50: mol_type = genomic DNA
taggtaccatcccagacttaccgagtcaaaaactcagcatgaagaaccaa

SEQ ID NO: 58071 - protein, 544 aa, Burkholderia pseudomallei
MAETIELQEKRAVAYSYVRFSTARQELGDSLRRQVAMAEEFCAKYGLDLHPVSYRDLGVSAFKRKNVERGALAAFIDAVKTGKVEKGSYLVIEQFDRLSRAEVDVALKLLLDLVHSGIKLVTLVDEKIWDRESVKDIGNLILAIVFMSRANNESAAKADRLSQAWTQKKKAALESGKIMSRECPRWLTVNADKSAFVVLEDRAESVRRVFAMRINGHGVVSIVNRANREMWPVPGKGDTWHTSLVGRLLSNRALLGEYQPHRSGSEDDKRIPVGELVRDYYPAIIDEQTFLRAQAVRERKGAFPGRRDISYRNWLQGLLKCSCGHSFVRKNKTSSKQPGYARYYCTARNRGVTDCPSMNAREIETAIIHAVSGIAPHFWNGTARLEELNTLLDVQQVDLTAAVSQRDRFAEAIGASKAPIPVLLERLTAAEIEVEKAEKALATTRAEISELQGDSDSVFENIVKAVENVDSLDARAALREDLSRVLVKCVVDVKAGIVNVYIRGEELPLTVPLREDAVIPGAAAGQMTEEEFRRTFGRGPDELE

SEQ ID NO: 58072 - DNA, 50 bp, Burkholderia pseudomallei
  source 1..50: mol_type = genomic DNA
cggtgcatatacttctttacaatgtccatcgtggagctataattgcacca

SEQ ID NO: 58073 - DNA, 40 bp, Burkholderia pseudomallei
  source 1..40: mol_type = genomic DNA
caacgggctgccgtcgttctcgatcgtcgggctgcccgat

SEQ ID NO: 58074 - DNA, 40 bp, Burkholderia pseudomallei
  source 1..40: mol_type = genomic DNA
caacgggctgccgtcgttcaagatcgtcgggctgcccgat

SEQ ID NO: 58075 - DNA, 50 bp, Burkholderia pseudomallei
  source 1..50: mol_type = genomic DNA
ctgtgaataacatcatttccaatgaaaatcatggagtcttactttcccta

SEQ ID NO: 58076 - protein, 496 aa, Curtobacterium flaccumfaciens
MEERRTVGSAQKGLPTAIYARISRDKAGAGLGVDRQEADCRALAERLGWDVVAVFVDNDISAYDRRKVRPEYRSMLEAVRTGQVRGVVAWHPDRLHRRAAELEEFITVAEAHSLEIQTVQTGSYDLATSSGRMVARMLGAAAQHEVDHSRERVQRAKEQAAASGKYRGGIRPFGFEKDGVTIRESEAQVIRDATKAVLAGRTLAALTRELNERGVQTSGRSETWKYGALRDMLIRPRNAGLLARGLPGKKGQSYEFEVLGPASWPAIVSEDEWRALVGLVTDPSRRLTPSNETKWLGSGIYRCGVPIVDEKGQEYSCGGTLRATPHGGTYARQYERRYLYRCTESAHLTVGQKQTDEYVRGVVAELVRDPRIVAAMSPGTPDLAADREKRTALSARLEAFETDYALGNITGTQLAKATATVEAELAKVDARLAKGLSRSASSSVLRAPDPGQAFLDAPIDVQRAVLASVLRVEVLPALSRGSKWSAERLRVTAVTP

SEQ ID NO: 58077 - DNA, 50 bp, Curtobacterium flaccumfaciens
  source 1..50: mol_type = genomic DNA
atctgtcaaaaagttggtttcgactcgtcgaaaccgtaaaattgacacta

SEQ ID NO: 58078 - DNA, 40 bp, Curtobacterium flaccumfaciens
  source 1..40: mol_type = genomic DNA
gtccgcgcacggggtggtctcgtcgacgtggcgcccgccg

SEQ ID NO: 58079 - DNA, 40 bp, Curtobacterium flaccumfaciens
  source 1..40: mol_type = genomic DNA
gtccgcgcacggggtggtcatgtcgacgtggcgcccgccg

SEQ ID NO: 58080 - DNA, 50 bp, Curtobacterium flaccumfaciens
  source 1..50: mol_type = genomic DNA
ctctctctaaaacttggtttacacatctccaaaatgaggcgtttacacta

SEQ ID NO: 58081 - protein, 496 aa, Curtobacterium flaccumfaciens
MEERPTAGTAQKSLPAAIYARISRDKAGAGLGVDRQEADCRALAERLGWDVVAVFVDNDISAYDRRKVRPEYRSMLEAVRTGQVRGVVAWHPDRLHRRAAELEEFITVAEAHSLEIQTVQTGSYDLATSSGRMVARMLGAAAQHEVDHSRERVQRAKEQAAASGKYRGGIRPFGFEKDGVTIRESEAQVIRDATKAVLAGRTLAALTRELNERGVQTSGRSETWKYGALRDMLIRPRNAGLLARGLPGKKGQSYEFEVLGPASWPAIVSEDEWRALVGLVTDPSRRLTPSNETKWLGSGIYRCGVPIVDENGQEHPCGGTLRATPHGGTYARQYERRYLYRCTESAHLTVGQKQTDEYVRGVVAELVRDPRIVAAMSPGTPDLAADREKRTALSARLEAFETDYALGNITGTQLAKATATVEAELAKVDARLAKGLSRSASSSVLRAPDPGQAFLDAPIDVQRAVLASVLRVEVLPAQSRGSKWTPERLRIETFAA

SEQ ID NO: 58082 - DNA, 50 bp, Curtobacterium flaccumfaciens; identical to SEQ ID NO: 58077
  source 1..50: mol_type = genomic DNA

SEQ ID NO: 58083 - DNA, 40 bp, Curtobacterium flaccumfaciens; identical to SEQ ID NO: 27538
  source 1..40: mol_type = genomic DNA

SEQ ID NO: 58084 - DNA, 40 bp, Curtobacterium flaccumfaciens
  source 1..40: mol_type = genomic DNA
gtccgcgcacggggtggtcatgtcgacgtggcgaccgccg

SEQ ID NO: 58085 - DNA, 50 bp, Curtobacterium flaccumfaciens; identical to SEQ ID NO: 58080
  source 1..50: mol_type = genomic DNA

SEQ ID NO: 58086 - protein, 549 aa, Faecalibacterium prausnitzii
MKKARTKCYIYTRVSTAMQVDGYSLDAQREKLRKYADYEDMVIAGEYSDEGFSGKNIQGRHEFQQMLRDVQDCKDGVSYVLVFKLSRFGRNAADVLNSLQLMQDFGVNSICVEDGIDSSKDSGKLMISVLSAVAEIERENIRAQTMAGREQKAREGKWNGGFAPYGYRLENGELSIADDEVEVIRVIFDRFIHTNDGVAGIARYLNTHGYVKKLRQNGTIPKFSAVFVRGILDNPIYCGKIAFGRRKVEKKLGTRNEMHVVKQSEFPVYVGQHEAIVSEDDWNLAQTKRQRTTGRREKVRDPDHAHILSGLLKCPCCGRNLYGNVSKAHSKDNKTRYYYFCKSIKGQTGHECSFRLNIEQNEINQMVASIVSAMVHDPRFVDAIKEKIGSAVDTSELDRQADAIKAQLRQRLSTKSRLEHQMDTLDFNDPYYDRKALDLQRRYDEQYELIEDMETQLAEIQGQIDDIHQEKITADNIYHLLLAFDEVYNAATEVEQKEFMRAFIERIDIFPEKQPNGNWIRNIVFAFPVPYNGKEIREFPLESQSTVEC

SEQ ID NO: 58087 - DNA, 50 bp, Faecalibacterium prausnitzii
  source 1..50: mol_type = genomic DNA
ttggaatcgcaatcaaccgtcgagtgcgtcattgcactttccaagggtga

SEQ ID NO: 58088 - DNA, 40 bp, Faecalibacterium prausnitzii
  source 1..40: mol_type = genomic DNA
gaggacgaagcattgcgaatgcgtactcttgatgtcaaaa

SEQ ID NO: 58089 - DNA, 40 bp, Faecalibacterium prausnitzii
  source 1..40: mol_type = genomic DNA
gaggacgaagcattgcgaaaccgtactcttgatgtcaaaa

SEQ ID NO: 58090 - DNA, 50 bp, Faecalibacterium prausnitzii
  source 1..50: mol_type = genomic DNA
ttggaatttaaatgatctttggagacagtcattgtattgaaaaagggtgt

SEQ ID NO: 58091 - protein, 440 aa, Paenibacillus dendritiformis
MIEDSNKQAFTGILVYQLDRFARNRYDSAIYKSKLKKNGVRVYSAKENISDDASGILVEGLLESMAEYYSAELSQKIRRGMEINASKGKATGGNIALGYKLDENRRFIVDEEAAAVVRMVFEMYANGHSIVRICEYLNSKGFKTSRRAEFNKNSLRLMLRNKRYIGIYTYKGEETDVSIPRIVSDELFEQVAVKLEKNQKAPARAKAKAEYLLTTKLFSGYCREMMTGESGTSKTGKVHHYYKCVLARKKQCSKKPVKKAYIEDLVIAQCRQLLTNENIEKITKEVVALCEREQAASELKRLGKLLKEVERKKANMINAIAECNMVDVRKSLYEHLHTLESERGNIEIQIAKEQISQVTLTEPEIKFFLTQLRKGNVNDEKYRSTWINVFVNAVYLYDDKVTLIFNSSDRPVTVEQSLVDEIEASNREFESSYLGKDAPP

SEQ ID NO: 58092 - DNA, 50 bp, Paenibacillus dendritiformis
  source 1..50: mol_type = genomic DNA
agttcgtatttaggtaaggatgctccaccaaccttattaaaaacgaacac

SEQ ID NO: 58093 - DNA, 40 bp, Paenibacillus dendritiformis
  source 1..40: mol_type = genomic DNA
ggttcgaatcccctcgcctccaccatcaggaaagccgacc

SEQ ID NO: 58094 - DNA, 40 bp, Paenibacillus dendritiformis
  source 1..40: mol_type = genomic DNA
ggttcgaatcccctcgcctgaaccatcaggaaagccgacc

SEQ ID NO: 58095 - DNA, 50 bp, Paenibacillus dendritiformis
  source 1..50: mol_type = genomic DNA
aatttgtatgaattaaaagattctgaagcaatcctgaggaaaaagaacac

SEQ ID NO: 58096 - protein, 533 aa, Bacteroides thetaiotaomicron
MENFELKGFAKGKKQQKEQVGGNAIIYTRVSSSEQVDGQSLEVQIDKCREYANMHSYNIVGEFGGTYESAKSDKERKEFSRMLTFIKQSNKKGSNQIVKTVIVFSTSRFSRTGSTTIIEEVEARGAYVVSATSNYDPRTPVGKYMQLMELANARFQNDEKRATTVENSVKALLKGRWIGKAPRGYDQKTTKKEQIITINEEGKLIRKAFLWKANNKLSNEEIRHRLAAEGLHICKQKLSELFKNPFYCGYMAHKFLQGDIVLGNHPPLIPKEIFLKVNGELSKNHSGYEQKIDKEYAPLLGSIKCPCCGNNLSASISTKMRKKFGRTDIGYYVCSRKGCKYNSSTKNVHEAFEEEANKYVLSDKVSELLKLQLTITFENMNKENKERAQSIKSNIKAKEKELEQVETNYALCSDTKKQEICVKVMTRLEAEIRGLQVEYSKVNTEILNLDKFIDYAFAMRSNLFNLWELQGLEGRRRLQKLVFPDGFIYDKNNERIEPKTVNQFFLLNYSFTTNNGDKKRETNSDNHRSSLQV

SEQ ID NO: 58097 - DNA, 50 bp, Bacteroides thetaiotaomicron
  source 1..50: mol_type = genomic DNA
taatcaccgttcgtcccttcaagtacccttaacggatgaaatattgaacc

SEQ ID NO: 58098 - DNA, 40 bp, Bacteroides thetaiotaomicron; identical to SEQ ID NO: 55103
  source 1..40: mol_type = genomic DNA

SEQ ID NO: 58099 - DNA, 40 bp, Bacteroides thetaiotaomicron
  source 1..40: mol_type = genomic DNA
tttaatcaggaatactcgtaatcgaagcgggacttgaacc

SEQ ID NO: 58100 - DNA, 50 bp, Bacteroides thetaiotaomicron
  source 1..50: mol_type = genomic DNA
ttgtcagcggcagccctttcagggaaccataactgcagtcatattgaatc

SEQ ID NO: 58101 - protein, 557 aa, Burkholderia pseudomallei
MHNFSRVYAYLRFSSDGQSDGLSFERQRELAYQWTRAQGLPDSAVEFIEDPGRSAYSGAHLSKGELGLLLKRLKETRREGNELLLFEAVDRSSRQGLFLFSSMIADFLKTGIFIHFLGEASPFSLSYPADSLLQLKLGIYASLAQQESARKSALSGNNWRSKRKRAREANDENAVVILTRECPRWLKVVNGKFVELPKQIEAIKGVFERARDGWGVTKIVRHANENKWAAPGKKGTWHNSLVNRLLENRALLGEYQPCVRINGKRVPEGDPILGYYPKVIDQELFYAVRGIRSTVSTFPNRRDKNNYNYLQGVAKCHCGGSWRRLNKNSGKQAGYALYGCSNRQRGVTACRNIPAKFFDHHFIAELCLNIPAFLAKIQAASTITSDSLRSYLGDVERRLLNLSESIERNGDPVGMLTSRMRQLADEKIEVLAKIEQASFSSNANPESFDAYQAATVYIPAFLNRYDDDPEGAEQAFTTRALFRARLLSAVSNVTVNQDRRIATVMLRSGEKLPLTLPSIDEIAGAAEYGVSAEEDLYPEEIAEDRRLADELARRFLN

SEQ ID NO: 58102 - DNA, 50 bp, Burkholderia pseudomallei
  source 1..50: mol_type = genomic DNA
ctatctagttgaaattcaacgttggaggacgtatactctcaactagattt

SEQ ID NO: 58103 - DNA, 40 bp, Burkholderia pseudomallei
  source 1..40: mol_type = genomic DNA
atcgggcagcccgacgatcgagaacgacggcagaccgttg

SEQ ID NO: 58104 - DNA, 40 bp, Burkholderia pseudomallei
  source 1..40: mol_type = genomic DNA
atcgggcagcccgacgatcaagaacgacggcagaccgttg

SEQ ID NO: 58105 - DNA, 50 bp, Burkholderia pseudomallei
  source 1..50: mol_type = genomic DNA
ctttctaatcttaattcattgtggaaggaagtagtcaaaataataaattt

SEQ ID NO: 58106 - protein, 478 aa, Rothia dentocariosa; identical to SEQ ID NO: 41161

SEQ ID NO: 58107 - DNA, 50 bp, Rothia dentocariosa
  source 1..50: mol_type = genomic DNA
caacgccataactcagacatgcgctagcacatgtagcggttgcaacacca

SEQ ID NO: 58108 - DNA, 40 bp, Rothia dentocariosa
  source 1..40: mol_type = genomic DNA
cggcgtgatcgacatgcgctacgagaacccgctgtacatg

SEQ ID NO: 58109 - DNA, 40 bp, Rothia dentocariosa
  source 1..40: mol_type = genomic DNA
cggcgtgatcgacatgcgccacgagaacccgctgtacatg

SEQ ID NO: 58110 - DNA, 50 bp, Rothia dentocariosa
  source 1..50: mol_type = genomic DNA
ctgcaccagcactagcacattcaccagcaccagtagcacaagcaacacca

SEQ ID NO: 58111 - protein, 543 aa, Pseudomonas aeruginosa
MGKNGARVYSYLRFSDPRQATGSSADRQLAYASAWASKHGMELDATLTLRDEGLSAYHETHVKQGALGAFLRAVDEGRIPAGSVLIVEGLDRLSRAEPLLAQAQLGQIVNAGITVVTASDGREYNREGLKAEPMNLVYSLLVMIRAHEESDTKSKRVKAAVRRQCEAWVAGSYRGRIVSGKDPQWLAWDGDSWQFIPERVEAVRFALDAYRSGIGAARLVRLMHEKGMVLSDWGIAAQQVYRLVRLPALRGAKRISIDGEDFMLEDYYPRLLSDEEFSELETLVGQRYRRRGKDEIVGIVTGIGITRCGYCGTALVAQNLMQRVKADGSLEDGHRRLHCVSYSKNGGCNGGSCSSVPIERAVLAYCSDQMNLQRLLEPTSAGEDLRPRLVEAQKGVAEIERQLERVTDALLADDSGAAPLAFVRKARELEEDLERHRSAVRALEQELVAKSASAPAAGASKWAELAERAKSMADVDAREQARQLVMDTFETLVVYMRGVIPNPKGRYIDVMMKSRAGQTRWIRVDRRTGVWKEGADRPTTRRP

SEQ ID NO: 58112 - DNA, 50 bp, Pseudomonas aeruginosa
  source 1..50: mol_type = genomic DNA
agtttacttttctattcgttggggcaccctaacgaaacccatcctatact

SEQ ID NO: 58113 - DNA, 40 bp, Pseudomonas aeruginosa; identical to SEQ ID NO: 54108
  source 1..40: mol_type = genomic DNA

SEQ ID NO: 58114 - DNA, 40 bp, Pseudomonas aeruginosa
  source 1..40: mol_type = genomic DNA
gtcgaccagcgccttggggtgtccaagactgacgaagccg

SEQ ID NO: 58115 - DNA, 50 bp, Pseudomonas aeruginosa
  source 1..50: mol_type = genomic DNA
agtttactactgtcttagtcagggtgccctagagaaacagaaccaatagg

SEQ ID NO: 58116 - protein, 543 aa, Pseudomonas aeruginosa; identical to SEQ ID NO: 55806

SEQ ID NO: 58117 - DNA, 50 bp, Pseudomonas aeruginosa; identical to SEQ ID NO: 58112
  source 1..50: mol_type = genomic DNA

SEQ ID NO: 58118 - DNA, 40 bp, Pseudomonas aeruginosa; identical to SEQ ID NO: 54108
  source 1..40: mol_type = genomic DNA

SEQ ID NO: 58119 - DNA, 40 bp, Pseudomonas aeruginosa; identical to SEQ ID NO: 58114
  source 1..40: mol_type = genomic DNA

SEQ ID NO: 58120 - DNA, 50 bp, Pseudomonas aeruginosa; identical to SEQ ID NO: 58115
  source 1..50: mol_type = genomic DNA

SEQ ID NO: 58121 - protein, 543 aa, Pseudomonas aeruginosa
MGKNGARVYSYLRFSDPRQATGSSADRQLAYASAWASKHGMELDATLTLRDEGLSAYHETHVKQGALGAFLRAVDEGRIPAGSVLIVEGLDRLSRAEPLLAQAQLGQIVNAGITVVTASDGREYNREGLKAEPMNLVYSLLVMIRAHEESDTKSKRVKAAVRRQCEGWVTGSYRGRIVSGKDPQWLAWDGDSWQFIPERVEAVRFALDAYRSGIGAARLVRLMHEKGMVLSDWGIAAQQVYRLVRLPALRGAKRISIDGEDFMLEDYYPRLLSDEEFSELETLVGQRYRRRGKDEIVGIVTGIGITRCGYCGTALVAQNLMQRVKSDGSLEDGHRRLHCVSYSKNGGCNGGSCSSVPIERAVLAYCSDQMNLQRLLEPSSAGEDLRPRLVEAKKGVAEIERQLERVTDALLADDTGAAPMAFVRKARELEEDLERRRSAVRALEQELVTKSASTPAAGASKWAELAERAKSMTDVEAREQARQLVMDTFETLVVYMRGVMPTPKGRHIDLMMRSRAGQTRWLRVDRRSGVWRESGDSSRRLEG

SEQ ID NO: 58122 - DNA, 50 bp, Pseudomonas aeruginosa; identical to SEQ ID NO: 58112
  source 1..50: mol_type = genomic DNA

SEQ ID NO: 58123 - DNA, 40 bp, Pseudomonas aeruginosa; identical to SEQ ID NO: 54108
  source 1..40: mol_type = genomic DNA

SEQ ID NO: 58124 - DNA, 40 bp, Pseudomonas aeruginosa; identical to SEQ ID NO: 58114
  source 1..40: mol_type = genomic DNA

SEQ ID NO: 58125 - DNA, 50 bp, Pseudomonas aeruginosa; identical to SEQ ID NO: 58115
  source 1..50: mol_type = genomic DNA

SEQ ID NO: 58126 - protein, 543 aa, Pseudomonas aeruginosa
MGKNGARVYSYLRFSDPRQATGSSADRQLAYASAWASKHGMELDATLTLRDEGLSAYHETHVKQGALGAFLRAVDEGRIPAGSVLIVEGLDRLSRAEPLLAQAQLGQIVNAGITVVTASDGREYNREGLKAEPMNLVYSLLVMIRAHEESDTKSKRVKAAVRRQCEAWVAGSYRGRIVSGKDPQWLAWDGDSWQLIPERVEAVRFALDAYRSGIGAARLVRLMHEKGMVLSDWGIAAQQVYRLVRLPALRGAKRISIDGEDFMLEDYYPRLLSDEEFSELETLVGQRYRRRGKDEIVGIVTGIGITRCGYCGTALVAQNLMQRVKADGSLEDGHRRLHCVSYSKNGGCNGGSCSSVPIERAVLAYCSDQMNLQRLLEPSSAGEDLRPRLVEAQKGVAEIERQLERVTDALLADDSGAAPLAFVRKARELEEDLERRRSAVRALEQELVAKSASAPAAGASKWAELAERAKSMADVDAREQARQLVMDTFETLVVYMRGVIPNPKGRYIDVMMKSRAGQTRWIRVDRRTGVWKEGADRPTTRRP

SEQ ID NO: 58127 - DNA, 50 bp, Pseudomonas aeruginosa; identical to SEQ ID NO: 58112
  source 1..50: mol_type = genomic DNA

SEQ ID NO: 58128 - DNA, 40 bp, Pseudomonas aeruginosa; identical to SEQ ID NO: 54108
  source 1..40: mol_type = genomic DNA

SEQ ID NO: 58129 - DNA, 40 bp, Pseudomonas aeruginosa; identical to SEQ ID NO: 58114
  source 1..40: mol_type = genomic DNA

SEQ ID NO: 58130 - DNA, 50 bp, Pseudomonas aeruginosa; identical to SEQ ID NO: 58115
  source 1..50: mol_type = genomic DNA

SEQ ID NO: 58131 - protein, 543 aa, Pseudomonas aeruginosa
MGKNGARVYSYLRFSDPRQATGSSADRQLAYASAWASKHGMELDATLTLRDEGLSAYHETHVKQGALGAFLRAVDEGRIPAGSVLIVEGLDRLSRAEPLLAQAQLGQIVNAGITVVTASDGREYNREGLKAEPMNLVYSLLVMIRAHEESDTKSKRVKAAVRRQCEGWVTGSYRGRIVSGKDPQWLAWDGDSWQFIPERVEAVRFALDAYRSGIGAARLVRLMHEKGMVLSDWGIAAQQVYRLVRLPALRGAKRISIDGEDFMLEDYYPRLLSDEEFSELETLVGQRYRRRGKDEIVGIVTGIGITRCGYCGTALVAQNLMQRVKSDGSLEDGHRRLHCVSYSKNGGCNGGSCSSVPIERAVLAYCSDQMNLQRLLEPSSAGEDLRPRLVEAKKGVAEIERQLERVTDALLADDTGAAPMAFVRKARELEEDLERRRSAVRALEQELVTKSASTPAAGASKWAELAERAKSMTDVEAREQARQLVMDTFETLVVYMRGVMPTPKGCYIDLMMRSRAGQTRWLRVDRRSGVWRESGDSSRRLEG

SEQ ID NO: 58132 - DNA, 50 bp, Pseudomonas aeruginosa; identical to SEQ ID NO: 58112
  source 1..50: mol_type = genomic DNA

SEQ ID NO: 58133 - DNA, 40 bp, Pseudomonas aeruginosa; identical to SEQ ID NO: 54108
  source 1..40: mol_type = genomic DNA

SEQ ID NO: 58134 - DNA, 40 bp, Pseudomonas aeruginosa; identical to SEQ ID NO: 58114
  source 1..40: mol_type = genomic DNA

SEQ ID NO: 58135 - DNA, 50 bp, Pseudomonas aeruginosa; identical to SEQ ID NO: 58115
  source 1..50: mol_type = genomic DNA

SEQ ID NO: 58136 - protein, 543 aa, Pseudomonas aeruginosa; identical to SEQ ID NO: 55831

SEQ ID NO: 58137 - DNA, 50 bp, Pseudomonas aeruginosa; identical to SEQ ID NO: 58112
  source 1..50: mol_type = genomic DNA

SEQ ID NO: 58138 - DNA, 40 bp, Pseudomonas aeruginosa; identical to SEQ ID NO: 54108
  source 1..40: mol_type = genomic DNA

SEQ ID NO: 58139 - DNA, 40 bp, Pseudomonas aeruginosa; identical to SEQ ID NO: 58114
  source 1..40: mol_type = genomic DNA

SEQ ID NO: 58140 - DNA, 50 bp, Pseudomonas aeruginosa; identical to SEQ ID NO: 58115
  source 1..50: mol_type = genomic DNA

SEQ ID NO: 58141 - protein, 543 aa, Pseudomonas aeruginosa
MGKNGARVYSYLRFSDPRQATGSSADRQLAYASAWASKHGMELDATLTLRDEGLSAYHETHVKQGALGAFLRAVDEGRIPAGSVLIVEGLDRLSRAEPLLAQAQLGQIVNAGITVVTASDGREYNREGLKAEPMNLVYSLLVMIRAHEESDTKSKRVKAAVRRQCEGWVTGSYRGRIVSGKDPQWLAWDGDSWQFIPERVEAVRFALDAYRSGIGAARLVRLMHEKGMVLSDWGIAAQQVYRLVRLPALRGAKRISIDGEDFMLEDYYPRLLSDEEFSELETLVGQRYRRRGKDEIVGIVTGIGITRCGYCGTALVAQNLMQRVKSDGSLEDGHRRLHCVSYSKNGGCNGGSCSSVPIERAVLAYCSDQMNLQRLLEPTSAGEDLRPRLVEAQKGVAEIERQLERVTDALLADDSGAAPLAFVRKARELEEDLERRRSAVQALEQELVAKSASAPAAGASKWAELAERAKSMADVDAREQARQLVMDTFETLVVYMRGVIPNPKGRYIDVMMKSRAGQTRWIRVDRRTGVWKEGADRPTTRRP

SEQ ID NO: 58142 - DNA, 50 bp, Pseudomonas aeruginosa; identical to SEQ ID NO: 58112
  source 1..50: mol_type = genomic DNA

SEQ ID NO: 58143 - DNA, 40 bp, Pseudomonas aeruginosa; identical to SEQ ID NO: 54108
  source 1..40: mol_type = genomic DNA

SEQ ID NO: 58144 - DNA, 40 bp, Pseudomonas aeruginosa; identical to SEQ ID NO: 58114
  source 1..40: mol_type = genomic DNA

SEQ ID NO: 58145 - DNA, 50 bp, Pseudomonas aeruginosa; identical to SEQ ID NO: 58115
  source 1..50: mol_type = genomic DNA

SEQ ID NO: 58146 - protein, 543 aa, Pseudomonas aeruginosa
MGKNGARVYSYLRFSDPRQATGSSADRQLAYASAWASKHGMELDATLTLRDEGLSAYHETHVKQGALGAFLRAVDEGRIPAGSVLIVEGLDRLSRAEPLLAQAQLGQIVNAGITVVTASDGREYNREGLKAEPMNLVYSLLVMIRAHEESDTKSKRVKAAVRRQCEAWVAGSYRGRIVSGKDPQWLAWDGDSWQFIPERVEAVRFALDAYRSGIGAARLVRLMHEKGMVLSDWGIAAQQVYRLVRLPALRGAKRISIDGEDFMLEDYYPRLLSDEEFSELETLVGQRYRRRGKDEIVGIVTGIGITRCGYCGTALVAQNLMQRVKADGSLEDGHRRLHCVSYSKNGGCNGGSCSSVPIERAVLAYCSDQMNLQRLLEPSSAGEDLRPRLVEAQKGVAEIERQLERVTDALLADDSGAAPLAFVRKARELEEDLERRRSAVRALEQELVAKSASAPAAGASKWAELAERAKSMVDVDAREQARQLVMDTFETLVVYMRGVIANPKGRYIDVMMKSRAGQTRWIRVDRRTGVWKEGADRPTTRRP

SEQ ID NO: 58147 - DNA, 50 bp, Pseudomonas aeruginosa; identical to SEQ ID NO: 58112
  source 1..50: mol_type = genomic DNA

SEQ ID NO: 58148 - DNA, 40 bp, Pseudomonas aeruginosa
  source 1..40: mol_type = genomic DNA
gtcgaccagcgccttggggcaaccaagactgacgaagccg

SEQ ID NO: 58149 - DNA, 40 bp, Pseudomonas aeruginosa
  source 1..40: mol_type = genomic DNA
gtcgaccagcgccttggggtgaccaagactgacgaagccg

SEQ ID NO: 58150 - DNA, 50 bp, Pseudomonas aeruginosa; identical to SEQ ID NO: 58115
  source 1..50: mol_type = genomic DNA

SEQ ID NO: 58151 - protein, 543 aa, Pseudomonas aeruginosa
MGKNGARVYSYLRFSDPRQATGSSADRQLAYASAWASKHGMELDATLTLRDEGLSAYHEAHVKQGALGAFLRAVDEGRIPAGSVLIVEGLDRLSRAEPLLAQAQLGQIVNAGITVVTASDGREYNREGLKAEPMNLVYSLLVMIRAHEESDTKSKRVKAAVRRQCEAWVAGSFRGRIVSGKDPQWLAWDGDSWQFIPERVEAVRFALDAYRSGIGAARLVRLMHEKGMVLSDWGIAAQQVYRLVRLPALRGAKRISIDGEDFMLEDYYPRLLSDEEFSELETLVGQRYRRRGKDEIVGIVTGIGITRCGYCGTALVAQNLMQRVKADGSLEDGHRRLHCVSYSKNGGCNGGSCSSVPIERAVLAYCSDQMNLQRLLEPSSAGEDLRPRLVEAQKGVAEIERQLERVTDALLADDSGAAPLAFVRKARELEEDLERRRSAVRALEQELVTKSASTPAAGASKWAELAERAKSMTDVEAREQARQLVMDTFERIVVYMRGVVPEGRRSKYIDVLLVSRAGQSRWLRVGRRTGAWSAGGDWNGSAP

SEQ ID NO: 58152 - DNA, 50 bp, Pseudomonas aeruginosa; identical to SEQ ID NO: 58112
  source 1..50: mol_type = genomic DNA

SEQ ID NO: 58153 - DNA, 40 bp, Pseudomonas aeruginosa; identical to SEQ ID NO: 54108
  source 1..40: mol_type = genomic DNA

SEQ ID NO: 58154 - DNA, 40 bp, Pseudomonas aeruginosa; identical to SEQ ID NO: 58114
  source 1..40: mol_type = genomic DNA

SEQ ID NO: 58155 - DNA, 50 bp, Pseudomonas aeruginosa; identical to SEQ ID NO: 58115
  source 1..50: mol_type = genomic DNA

SEQ ID NO: 58156 - protein, 543 aa, Pseudomonas aeruginosa
MGKNGARVYSYLRFSDPRQATGSSADRQLAYASAWASKHGMELDATLTLRDEGLSAYHETHVKQGALGAFLRVVDEGRIPAGSVLIVEGLDRLSRAEPLLAQAQLGQIVNAGITVVTASDGREYNREGLKAEPMNLVYSLLVMIRAHEESDTKSKRVKAAVRRQCEAWVAGSYRGRIVSGKDPQWLAWDGDSWQFIPERVEAVRFALDAYRSGIGAARLVRLMHEKGMVLSDWGIAAQQVYRLVRLPALRGAKRISIDGEDFMLEDYYPRLLSDEEFSELETLVGQRYRRRGKDEIVGIVTGIGITRCGYCGTALVAQNLMQRVKADGSLEDGHRRLHCVSYSKNGGCNGGSCSSVPIERAVLAYCSDQMNLQRLLEPTSAGEDLRPRLVEAQKGVAEIERQLERVTDALLADDSGAAPLAFVRKARELEEDLERRRSAVRALEQELVAKSASAPAAGASKWAELAERAKSMADVDAREQARQLVMDTFETLVVYMRGVIPNPKGRYIDVMMKSRAGQTRWIRVDRRTGVWKEGADRPTTRRP

SEQ ID NO: 58157 - DNA, 50 bp, Pseudomonas aeruginosa; identical to SEQ ID NO: 58112
  source 1..50: mol_type = genomic DNA

SEQ ID NO: 58158 - DNA, 40 bp, Pseudomonas aeruginosa; identical to SEQ ID NO: 54108
  source 1..40: mol_type = genomic DNA

SEQ ID NO: 58159 - DNA, 40 bp, Pseudomonas aeruginosa; identical to SEQ ID NO: 58114
  source 1..40: mol_type = genomic DNA

SEQ ID NO: 58160 - DNA, 50 bp, Pseudomonas aeruginosa; identical to SEQ ID NO: 58115
  source 1..50: mol_type = genomic DNA

SEQ ID NO: 58161 - protein, 543 aa, Pseudomonas aeruginosa; identical to SEQ ID NO: 55806

SEQ ID NO: 58162 - DNA, 50 bp, Pseudomonas aeruginosa
  source 1..50: mol_type = genomic DNA
agtttacttctctattcgttggggcaccctaacgaaacccatcctatact

SEQ ID NO: 58163 - DNA, 40 bp, Pseudomonas aeruginosa; identical to SEQ ID NO: 54108
  source 1..40: mol_type = genomic DNA

SEQ ID NO: 58164 - DNA, 40 bp, Pseudomonas aeruginosa; identical to SEQ ID NO: 58114
  source 1..40: mol_type = genomic DNA

SEQ ID NO: 58165 - DNA, 50 bp, Pseudomonas aeruginosa; identical to SEQ ID NO: 58115
  source 1..50: mol_type = genomic DNA

SEQ ID NO: 58166 - protein, 543 aa, Pseudomonas aeruginosa
MGKNGARVYSYLRFSDPRQATGSSADRQLAYASAWASKHGMELDATLTLRDEGLSAYHEAHVKQGALGAFLRAVDEGRIPAGSVLIVEGLDRLSRAEPLLAQAQLGQIVNAGITVVTASDGREYNREGLKAEPMNLVYSLLVMIRAHEESDTKSKRVKAAVRRQCEAWVAGSYRGRIVSGKDPQWLAWDGDSWQFIPERVEAVRFALDAYRSGIGAARLVRLMHEKGMVLSDWGIAAQQVYRLVRLPALRGAKRISIDGENFMLEDYYPRLLSDEEFSELETLVGQRYRRRGKDEIVGIVTGIGITRCGYCGTALVAQNLMQRVKADGSLEDGHRRLHCVSYSKNGGCNGGSCSSVPIERAVLAYCSDQMNLQRLLEPSSAGEDLRPRLVEAQKGVAEIERQLERVTDALLADDSGAAPLAFVRKARELEEDLERRRSAVQALEQELVAKSASAPAAGASKWAELAERAKSMADVDAREQARQLVMDTFETLVVYMRGVIPNPKGRYIDVMMKSRAGQTRWIRVDRRTGVWKKGADRPTTRRP

SEQ ID NO: 58167 - DNA, 50 bp, Pseudomonas aeruginosa; identical to SEQ ID NO: 58112
  source 1..50: mol_type = genomic DNA

SEQ ID NO: 58168 - DNA, 40 bp, Pseudomonas aeruginosa; identical to SEQ ID NO: 54108
  source 1..40: mol_type = genomic DNA

SEQ ID NO: 58169 - DNA, 40 bp, Pseudomonas aeruginosa; identical to SEQ ID NO: 58114
  source 1..40: mol_type = genomic DNA

SEQ ID NO: 58170 - DNA, 50 bp, Pseudomonas aeruginosa; identical to SEQ ID NO: 58115
  source 1..50: mol_type = genomic DNA

SEQ ID NO: 58171 - protein, 472 aa, Mycobacteroides abscessus
MRVLGRVRLSRLTEESTSVERQRELIKKWSEMNDHTIVGWAEDVDVSGSIDPFEAPELGPWFQEDKRGDWDILVAWKLDRIGRRAIPLNKVFGWMLEHEKTLVCVSDNIDLSTWVGRLVANVIAGVAEGELEAIRERTKASRKKLLESGRWTGGPVPYWLIPEKLPEGGWVLSLNTETAPILRRAIDEVLDGTAVHTVAERLNDQGVPSPGGKKWTSQTLWRILQHKYLKGHSTDRGKTVRDSSGVPISNCEALLTPSEWDRLQAVLTQWKLPETSNRVKNTSPLLGVVVCYICDKPLYYRSYTRNYGKGLYRSYYCRNHRTPGIKADMLDEYLEENLMREVGDKNVLERYFVPAENHQIELDEAIRATEELTALLGTMTSATMRSSLTAQLAALDSRIASLEKLPTSESRWEYRELPRTYREMWESDDDPQFRRELLLKSGITLAATMTGGQKLHLHIPDDILERMALKGE

SEQ ID NO: 58172 - DNA, 50 bp, Mycobacteroides abscessus
  source 1..50: mol_type = genomic DNA
catctacaatagttgtactacgacttgtcgtatgggaacggttgtagact

SEQ ID NO: 58173 - DNA, 40 bp, Mycobacteroides abscessus; identical to SEQ ID NO: 54533
  source 1..40: mol_type = genomic DNA

SEQ ID NO: 58174 - DNA, 40 bp, Mycobacteroides abscessus
  source 1..40: mol_type = genomic DNA
cggcgtgatcacctacgactaggcgtgcgccgtgcagatg

SEQ ID NO: 58175 - DNA, 50 bp, Mycobacteroides abscessus
  source 1..50: mol_type = genomic DNA
tatttacaaaagcagttgtcagactaggcctatgggctggtttgtggacc

SEQ ID NO: 58176 - protein, 500 aa, Bacillus intestinalis
MIAIYVRVSTEEQAIKGSSIDSQIEACIKKAGTKDVLKYADEGFSGELLERPALNRLREDASKGLISQVICYDPDRLSRKLMNQLIIDDELRKRNIPLIFVNGEYANSPEGQLFFAMRGAISEFEKAKIKERTSSGRLQKMKKGMIIKDSKLYGYKFVKEKRTLEIFEEEAKIIRMIFNYFTDHKSPFFGRVNGIALHLTQMGVKTKKGAKVWHRQVVRQILMNSSYKGEHRQYKYDTEGSYVSKQAGNKSIIKIRPEEEQITVAIPAIVPAEQWDYAQELLGQSKRKHLSISPHNYLLSGLVRCGKCGNTMTGKKRKSHGKDYYVYTCRKNYSGAKDRGCGKEMSENKLNRHVWSEIFKFITNPQKYASFKEIEQSNHLSDELELIQKEIEKTKKGRKRLLTLISLSDDDDLDIDEIKAQIIELQKKQNQLTEKCNEIQSKMKVLDDTSSSENALKRAIDYFQSIGADNLTLEDKKTIVNFIVKEVTVVDSDTVYIETY

SEQ ID NO: 58177 - DNA, 50 bp, Bacillus intestinalis; identical to SEQ ID NO: 39562
  source 1..50: mol_type = genomic DNA

SEQ ID NO: 58178 - DNA, 40 bp, Bacillus intestinalis; identical to SEQ ID NO: 52453
  source 1..40: mol_type = genomic DNA

SEQ ID NO: 58179 - DNA, 40 bp, Bacillus intestinalis
  source 1..40: mol_type = genomic DNA
gcgcaaatgcatgaggattttattttcaatacaccgcgcg

SEQ ID NO: 58180 - DNA, 50 bp, Bacillus intestinalis; identical to SEQ ID NO: 29010
  source 1..50: mol_type = genomic DNA

SEQ ID NO: 58181 - protein, 493 aa, Nocardia farcinica
MAATSLRALVGARVSVLKGAEKVSNLAQIGTGSSWVVSRGHRIVGTFEDLDVSADKYTPFDRPDLGRWLTDERAHEWDMLVFSKVDRAFRSIRDTVDLARWIEARKKILVFAEDGMVLNYRDDVDSFERMMSEFFIMVASFFAQMELNRFKSRAKDAHRIIRQTDRWANGVPPYGFWTAPHPSGKGRCLVPDPEGRRVLREVIAPRLLAGDSFSSIVAHLNATGVLTNMNRAKVEAGREPKADPWTVTNLRDMLTSLRTQGIKMSQGKPVLTEDGSMIRLADPTFDDETWTRIQEAVAARSHSGKRRVNSPNPLLSVGFCGKCGSNLSHQVQQNVPGGKEFRYYRCQKCKLRTRADEAEFLLEELFIETYGQQAVTRRIFVPGSDNSRELEEVEAAIKRLRMESDAGLITTEEDQNLYMTRLSSLVGRRNALQANPVVAPTWREETTGETNAEVWARSSQEERRKLLQERGIRFVLHPGKRWELVDIMGEKIT

SEQ ID NO: 58182 - DNA, 50 bp, Nocardia farcinica
  source 1..50: mol_type = genomic DNA
cattggaagtctgtttgattcggctgtccgagactgatagagttcccatt

SEQ ID NO: 58183 - DNA, 40 bp, Nocardia farcinica
  source 1..40: mol_type = genomic DNA
catcggaatcccgttcggctgggccaatctgaaattcatc

SEQ ID NO: 58184 - DNA, 40 bp, Nocardia farcinica
  source 1..40: mol_type = genomic DNA
catcggaatcccgttcggcgaggccaatctgaaattcatc

SEQ ID NO: 58185 - DNA, 50 bp, Nocardia farcinica
  source 1..50: mol_type = genomic DNA
ctctgggaggcgagctgagtcggggatccgaggctgctgacctccgcatt

SEQ ID NO: 58186 - protein, 536 aa, Pectobacterium aquaticum
MRKAISYIRFSSKAQATGDSTKRQSRLITNWLKQHPDYYLDDSLRFQDLGISGFSGANAKTGAFGEILAAIQSGFIEAGSVLLVESLDRVSRQDIDLAGEQLRKILRAGVDVVTLVDNEHYTKESLKDALSMIKALLVMERAHEESVMKSHRLRAVWASKRDKALSDGTIMSKRCVAWLKVSDDRKTFEFVPDNVMAVQRVFQLRLEGLSHIKIARQMNIEGFATLNQYSPKAKNGWSQTSVTELLSNRAVIGVKVPSKSMLAKGTPDIPNYYPAIITPEQFYAVQQLKILSKGRRPSSDNPFATNLFKGVMRCGECGLIMIVSGATADGKRQGLYKCSNKGLGRCNSAGISRLQTDKALVQGLLYNTNRLDLQATSDITPLQEELSELVTRKEKLLKLAELADDVQSVAIRLKELNANITSVNAAIADHHQRLASSHTETLLHLDLSEKKHRVEAQIIIKRIIKSVVMNTAKRTCDITFHNGVKLNNYPLSYIIDGSRFGDMVSLMDDKEFTFTENSRAFTPPHIRPDWVSEYDE

SEQ ID NO: 58187 - DNA, 50 bp, Pectobacterium aquaticum
  source 1..50: mol_type = genomic DNA
gtgcattattagatgtgtctcttcaggattacacccatcttatgatacac

SEQ ID NO: 58188 - DNA, 40 bp, Pectobacterium aquaticum
  source 1..40: mol_type = genomic DNA
gtgaaccgggcggctgtcgaggatcacgcggttaattctg

SEQ ID NO: 58189 - DNA, 40 bp, Pectobacterium aquaticum
  source 1..40: mol_type = genomic DNA
gtgaaccgggcggctgtcgtagatcacgcggttaattctg

SEQ ID NO: 58190 - DNA, 50 bp, Pectobacterium aquaticum
  source 1..50: mol_type = genomic DNA
gtgcatgatcgctgttttcctttctatattacacacattcaagcacacac

SEQ ID NO: 58191 - protein, 536 aa, Pectobacterium atrosepticum
MRKAISYIRFSSKAQATGDSTKRQSRLITNWLKQHPDYYLDDSLRFQDLGISGFSGANAKTGAFGEILAAIQSGFIEAGSVLLVESLDRVSRQDIDLAGEQLRKILRAGVDVVTLVDNEHYTKESLKDALSMIKALLVMERAHEESVMKSHRLRAVWASKRDKALSDGTIMSKRCVAWLKVSDDRKTFEFVPDNVMAVQRVFQLRLEGLSHIKIARQMNIEGFATLNQYSPKAKNGWSQTSVTELLSNRAVIGVKVPSKSMLAKGTPDIPNYYPAIITPEQFYAVQQLKILSKGRRPSSDNPFATNLFKGVMRCGECGLIMIVSGATADGKRQGLYKCSNKGVGRCNSAGISRLQTDKALVQGLLYNTNRLDLQATSDITPLQEELSELVTRKEKLLKLAELADDVQSVAIRLKELNANITSVNAAIADHHQRLASSHTETLLHLDLSEKKHRVEAQIIIKRIIKSVVMNTAKRTCDITFHNGVKLNNYPLSYIIDGSRFGDMVSLMDDKEFTFTENSRGFTPPHIRPDWVSEYDE

SEQ ID NO: 58192 - DNA, 50 bp, Pectobacterium atrosepticum; identical to SEQ ID NO: 58187
  source 1..50: mol_type = genomic DNA

SEQ ID NO: 58193 - DNA, 40 bp, Pectobacterium atrosepticum
  source 1..40: mol_type = genomic DNA
atgaaccggacggctgtcgagaatcacgcggttgatgcca

SEQ ID NO: 58194 - DNA, 40 bp, Pectobacterium atrosepticum
  source 1..40: mol_type = genomic DNA
atgaaccggacggctgtcgtaaatcacgcggttgatgcca

SEQ ID NO: 58195 - DNA, 50 bp, Pectobacterium atrosepticum; identical to SEQ ID NO: 58190
  source 1..50: mol_type = genomic DNA

SEQ ID NO: 58196 - protein, 538 aa, Streptomyces anulatus
MTMTFEDQWPADLLDEMGWSPAERRELGDLWERMQALPPTASRVLLSIRLSILTEETTSPIRQELDLVRMAVERESRVVGIARDLGVSATKVPPWKRPQLGEWITNRAPEFDEILFWKLDRFVRRISDLHLMIEWCKEYAKTLAAKNDPIDLSTEFGQFMVTIIAGMARIEAANTGVRIESLWKFARTAEKRWVIGKPVYGYRSVDQGDGTKALVIDPERARVLRWVYSMVVRGTSLYRACRLLTRAGILPPNKGKWGSGNLKVILINPALMGYRVYRPKGLKQGQPSLIAYNTEGEPIRLAEGIFTKEEFDRLQEILAARANKEVRQQNNRTPFLGTMKCGVCGSNWYDTQKVWERKSGEVMRATRLRCSSYVNGGSCGMKAFDDPQEVYDLLKNTVLEEIGDFQVIHRKYTRGDDSLAQKIKLEEQISHYMSELEPGGSYRDGGFIEAKAKETLTSLGRQLAAIDPESVEDRWTYESQGVTYREHWEKHGLKKMEEDLVRSGITFVIFEDHADLNVPEDVQQRLVVRKDFFGQKKV

SEQ ID NO: 58197 - DNA, 50 bp, Streptomyces anulatus
  source 1..50: mol_type = genomic DNA
tcttgggaattgatgtagttgtacaccaagaactagagcaactaccctac

SEQ ID NO: 58198 - DNA, 40 bp, Streptomyces anulatus
  source 1..40: mol_type = genomic DNA
ccggttcaggtagttgtacacggtgaaccgggagacgccc

SEQ ID NO: 58199 - DNA, 40 bp, Streptomyces anulatus
  source 1..40: mol_type = genomic DNA
ccggttcaggtagttgtaccaggtgaaccgggagacgccc

SEQ ID NO: 58200 - DNA, 50 bp, Streptomyces anulatus
  source 1..50: mol_type = genomic DNA
tctcgggaaggatcgtggttgtgccagaaggattgtttcctccagcctac

SEQ ID NO: 58201 - protein, 597 aa, Enterobacter hormaechei
MKQKLYSYQRWSSAVQSDGTTKARQTFAAEEYAKRNDLEVVEIVDAGISGFKSDNSKSGALAKFLAAVDEGLIPNNAYLFVESLDRITRDEIDVALELFMGILRRGITIVTGMDNKVYTRAGIKGNPIDLLTSILLFTRAHEESKTKQNRTNGNALAMIRRFQSGLPTTIKAVGSHPWWIDCSTDKFEAVRRHPTLWQPAQDAINMFMEGVSVFKVVEYLDKTYPHMYKGKAWKTANIRKLRFNKAVYGLREITVDGKDYALPNYFPALITEGQFLRLEKIRETTKYIGKVGEGKTVTDEEGNSKVIAERNNINLLAGMKLFRCGHCNSTMMAMRHGDTIRYLCEKGRGHQNDCKTWSLPGLLVEHTLMLVTTIAYINIQRKGGVEKEDYTAQIASTEQLIEDISKKISNSTKLVLAGLDDVDEVIEQIQELKDSRSNLVLELEVLQRKQLLAQDSTFDSLMMDFFNYAQYGVLQDPVHEYRSKLRDIVYSSIGEVKAWKVERRLMISFQIKGDEDYYTFSAGDEPYNYIFYYGSPVQLGEDLAPQGNYELPEEIKRRIRDHSDVYGARMDVLKTARDLLSVVNYPDLDGRLFWPRK

SEQ ID NO: 58202 - DNA, 50 bp, Enterobacter hormaechei
  source 1..50: mol_type = genomic DNA
agatgtgcagaaattcatgcagggaatcctaaacgagtttctacacatta

SEQ ID NO: 58203 - DNA, 40 bp, Enterobacter hormaechei; identical to SEQ ID NO: 29043
  source 1..40: mol_type = genomic DNA

SEQ ID NO: 58204 - DNA, 40 bp, Enterobacter hormaechei; identical to SEQ ID NO: 29044
  source 1..40: mol_type = genomic DNA

SEQ ID NO: 58205 - DNA, 50 bp, Enterobacter hormaechei; identical to SEQ ID NO: 29045
  source 1..50: mol_type = genomic DNA

SEQ ID NO: 58206 - protein, 597 aa, Klebsiella pneumoniae
MKRKLYSYQRWSSAVQSDGTTKARQTFAAEEYAKRNDLEVVEIVDAGISGFKSDNSKSGALSKFLAAVDEGLIPNNAYLFVESLDRITRDEIDVALELFMGILRRGITIVTGMDNKVYTRAGIKGNPIDLLTSILLFTRAHEESKTKQNRTNGNALAMIRRFQSGLPTTIKAVGSHPWWIDCSTDKFEAVRRHPTLWQPAQDAINMFMEGVSVFKVVQYLNEKYPHAYKSKAWKTANIRKLRFNKAVYGVREITVDGTDYALPNYFPSLITEGQFLRLEKIRETTKYIGKVGEGKTVTDEEGNSKVIAERNNINLLAGMKLFRCGHCGGTMMAMRHGDTIRYLCEKGRGHQNDCKTWSLPGILVEHTLMLVTTIAYINMQRKGGVDKEDYTAQISSTEKLIEDISKKISNGTSLVLGGLGDVEEVIAQLQELKDSRSNLVLELEVLQRKQLLAEDHTFEGLMMDFFTYAQYGVLQDPIHEYRRKLRDIVYSSIGDVRAWKVDRRLMISFQIKGDDEYYTFSAGDEQYNYIFYYGSPVQLKEGLSPQGNYELPEEIKQRIREHRGVYEATMALMNTAHELLATVNYPQLDGRLFWPRK

SEQ ID NO: 58207 - DNA, 50 bp, Klebsiella pneumoniae; identical to SEQ ID NO: 49162
  source 1..50: mol_type = genomic DNA

SEQ ID NO: 58208 - DNA, 40 bp, Klebsiella pneumoniae; identical to SEQ ID NO: 5423
  source 1..40: mol_type = genomic DNA

SEQ ID NO: 58209 - DNA, 40 bp, Klebsiella pneumoniae
  source 1..40: mol_type = genomic DNA
tatgattagccatccgggtcatccgaaattcccggtggat

SEQ ID NO: 58210 - DNA, 50 bp, Klebsiella pneumoniae; identical to SEQ ID NO: 29045
  source 1..50: mol_type = genomic DNA

SEQ ID NO: 58211 - protein, 597 aa, Klebsiella pneumoniae
MKRKLYSYQRWSSAVQSDGTTKARQTFAAEEYAKRNDLEVVEIVDAGISGFKSDNSKSGALSKFLAAVDEGLIPNNAYLFVESLDRITRDEIDVALELFMGILRRGITIVTGMDNKVYTRAGIKGNPIDLLTSILLFTRAHEESKTKQNRTNGNALAMIRRFQSGLPTTIKAVGSHPWWIDCSTDKFEAVRRHPTLWQPAQDAINMFMEGVSVFKVVQYLNEKYPHAYKSKAWKTANIRKLRFNKAVYGVREITVDGTDYALPNYFPSLITEGQFLRLEKIRETTKYIGKVGEGKTVTDEEGNSKVIAERNNINLLAGMKLFRCGHCGGTMMAMRHGDTIRYLCEKGRGHQNDCKTWSLPGILVEHTLMLVTTIAYINMQRKGGVDKEDYTAQISSTEKLIEDISKKISNGTSLVLGGLGDVEEVIAQLQELKDSRSNLVLELEVLQRKQLLAEDHTFEGLMMDFFTYAQYGVLQDPIHEYRSKLRDIVYSSIGDVRAWKVDRRLMISFQIKGDDEYYTFSAGDEQYNYIFYYGSPVQLKEGLSPQGNYELPEEIKQRIREHRGVYEATMALMNTAHELLATVNYPQLDGRLFWPRK

SEQ ID NO: 58212 - DNA, 50 bp, Klebsiella pneumoniae; identical to SEQ ID NO: 49162
  source 1..50: mol_type = genomic DNA

SEQ ID NO: 58213 - DNA, 40 bp, Klebsiella pneumoniae; identical to SEQ ID NO: 5423
  source 1..40: mol_type = genomic DNA

SEQ ID NO: 58214 - DNA, 40 bp, Klebsiella pneumoniae; identical to SEQ ID NO: 58209
  source 1..40: mol_type = genomic DNA

SEQ ID NO: 58215 - DNA, 50 bp, Klebsiella pneumoniae; identical to SEQ ID NO: 29045
  source 1..50: mol_type = genomic DNA

SEQ ID NO: 58216 - protein, 520 aa, Pseudomonas koreensis
MPTAYSYIRFSTGKQAKGSSLERQEAMLDAWADHNPWYTLNRTLTFRDLGISGRSGKHLKNGFGKLLEAIDQGAIKAGDAVLVEAIDRAGRMEPGIMSEILIKILNSGVSLVTLDDNMTYTQESLRGGNYYILVGKVQAAFNYSQTLSDRMRASYKSRNTLAANGVIPKRYTPVWLTSKGELIQEIAPFIRQAFEDYASGLGERRIYERILEAGGKEFSCFVKMAPSTVKRWMKNRTAIGEWQGIPNVYPAVVTPDLFYRVQRKLEEGYVERSAPTKHRYTGLVVCGECGKNFNTKHYAKRKNGVTPPPPVMECSTRARRGSTACSNSKGIPEAVIAIAFQLSCWEHVHRALQGQVLTESMKREVVIDGLLSDLSLKITKVAKVVAEVDDVEELIVTLQTLKAERKALEVEKQSLQHSTATLRDTILNNTEVMKDPIKANALLQGVGYQIVCNPDRTIETPVGRFVYDGWSRSKDTYKVINPEGKLMEIPIMRDKPRKESCRIDVMKGLADRLANVKITM

SEQ ID NO: 58217 - DNA, 50 bp, Pseudomonas koreensis
  source 1..50: mol_type = genomic DNA
aaaccccacatcgcggaatactgggtgaaggtagcggcgttgtggggttt

SEQ ID NO: 58218 - DNA, 40 bp, Pseudomonas koreensis
  source 1..40: mol_type = genomic DNA
ctcgtagtacaccggctgggtgaagatcatgtcgtagatc

SEQ ID NO: 58219 - DNA, 40 bp, Pseudomonas koreensis
  source 1..40: mol_type = genomic DNA
ctcgtagtacaccggctgggagaagatcatgtcgtagatc

SEQ ID NO: 58220 - DNA, 50 bp, Pseudomonas koreensis
  source 1..50: mol_type = genomic DNA
gatgcaaacagacaggaatcctgggagaaggtagcagacaggtgggtgct

SEQ ID NO: 58221 - protein, 478 aa, Micrococcus luteus
MVELVALRKTNEVAAYVRASMDRKGDRWTVDTQLRKIRALAEAKDWNVVEVYEDNAVSATKKRRAGTRWAEMLDDARAGRFSMVVAVDMDRLLRSTKDLNTLIDLGLRVVTVDGEIDLSTADGEFRATMLAALARFEARRKAERQIRSNERRRAEGIPASTWKAFGWTREGELIEEEAAAVRRAFDAFLGEPSLSIRRIREDLNSAGHLTARGSEFSVDAVRYLLANSLYAGFIRHYKTGELYPVQGEAFPPIVGEQTWRAAVAKLEDNVRRSARQGNQPKYLLSTIGLCGKCGATLVSGTNSRKQPTYRCGEQFHLTRQREPVDAMVTETVLTRLSSVDVHDLVMPQEAAGPDREELLTERNALVERVKELSPLLRDIHQPVLEITAAINDVKARIDEIDAELLDRSVSVAAKLLAEVDEPVGTAERREVVESKWKALDMDRRRMLVDELVTVTIEPIMPGHVKFDPDLVRIEPRRD

SEQ ID NO: 58222 - DNA, 50 bp, Micrococcus luteus
  source 1..50: mol_type = genomic DNA
caacgccacaagcccgacatgcggtagcgcatgtcggggttgcaacactc

SEQ ID NO: 58223 - DNA, 40 bp, Micrococcus luteus
  source 1..40: mol_type = genomic DNA
cggcgtgatcgacctgcggtatgagaaccccctgtacatg

SEQ ID NO: 58224 - DNA, 40 bp, Micrococcus luteus
  source 1..40: mol_type = genomic DNA
cggcgtgatcgacctgcgggatgagaaccccctgtacatg

SEQ ID NO: 58225 - DNA, 50 bp, Micrococcus luteus
  source 1..50: mol_type = genomic DNA
cacggccaggctcgcgcccctcgggagcgcttgtgggaagcgcaaccctc

SEQ ID NO: 58226 - protein, 540 aa, Nocardiopsis dassonvillei
MVHYVPTKRAGSLRTMGAVALGQLRAVVAVRLSDFTDTSTSPERQTDAGNEAARDLGARVVGYPVDLDVSASKTTPWERPQLAEWLNKPDEFDVLIWWRMDRAVRSMADMSALGHWAREHNKRLVFAEGPTGGRLELDMGSATGELMAILMAFAAQMEAQAIRERVTGSRAQLRRTGRWGGGQPPYGTQPIPNPDGPGVVLGEDADAVQVLRYGQKLLHAGMRPHPIAEHLNGMAIPNATRHFALKAGTSTDKAGNWTGFAFKKIMRNPALLGYAVHGGTIVRDERGEPVIVGPEIFTREEFDAVGVILDEMENPNADKRPRKDSGSRMLNVGFCGGCGGKLYPTKPTKKAARRYMCRKASAGVKCARPVSIRADWLEDYAEREFLKRFGRMDVVRVVSHGGYDPGPEMDEVTRELRVMIARLTEAKTRTTQAVWQERVDALEARAATLEATPVTEPYEEQIPTGEKYAAMWHNADDMGKRRMMQDAGVRIVVQRKAPAEGKTRTGRVTRLDESLLSFDVATNRDPVADAEAEALYQATS

SEQ ID NO: 58227 - DNA, 50 bp, Nocardiopsis dassonvillei
  source 1..50: mol_type = genomic DNA
gttagtacttagtgctacagcggcccgccgatggtgcactatgtaccaac

SEQ ID NO: 58228 - DNA, 40 bp, Nocardiopsis dassonvillei
  source 1..40: mol_type = genomic DNA
tactgcctagtccagcggaccgccggcgacgtagaggacc

SEQ ID NO: 58229 - DNA, 40 bp, Nocardiopsis dassonvillei
  source 1..40: mol_type = genomic DNA
tactgcctagtccagcggaaggccggcgacgtagaggacc

SEQ ID NO: 58230 - DNA, 50 bp, Nocardiopsis dassonvillei
  source 1..50: mol_type = genomic DNA
gttcttaatcctggctgaaggggcaggcctaggatgaagtttgtaccatc

SEQ ID NO: 58231 - protein, 554 aa, Mycolicibacterium parafortuitum
MSQRALIAVRLSRVTDATTSPERQLKACRELCEQRGYEVVGVAEDLDVSAGSTSPFDRPQLGDWLTNRLGEFDVIVFFRMDRIVRRLLDLADLIRWCQAHSVTVVSATEQFLDLTMPFGDVIAMLVAKVAEMELAAISERNASAFRHNLRAGKWRGGIPPWGYLPQRDEAGTWRLVQDPEQVSIIREVVERVLSGEPLRSVAHDLTERKVLTPRDRFAQAQGREVRGYEWHSSGLKRALTSQTLLGYALTREPLRDAQGRIQRDTKGRKIFGPETVVLTDDNSPLVRAEPIITRGVFNRLGQELADRENRKEPTKRSKGLLLQVIYCGVCGRPAYRLKGGPGRKPRYRCSSAQYRENCGNKSIPLDYADDAVERSLLRVLGESERMERVWDAGSDHSAELAEVNDRLVDLTSLLGSGPYRAGTPQRQALDRQIASLAARQEELSAEAVRPAGWTWKPTGEKFADWWNRQDTTARNIWLRSMNIRLDFWCSAGANGRIEVERLNLDLGDLFKLTEQMVPKGRASDWAGVFAHMQDNDIAGIEVRDGEVHLIAKGD

SEQ ID NO: 58232 - DNA, 50 bp, Mycolicibacterium parafortuitum
  source 1..50: mol_type = genomic DNA
cgggtgtaaacctagacaactgactactcgattgccgataattacaacca

SEQ ID NO: 58233 - DNA, 40 bp, Mycolicibacterium parafortuitum
  source 1..40: mol_type = genomic DNA
cggcatgtccactgtcgagtacgcgatcggcacgatcgcc

SEQ ID NO: 58234 - DNA, 40 bp, Mycolicibacterium parafortuitum
  source 1..40: mol_type = genomic DNA
cggcatgtccactgtcgagcccgcgatcggcacgatcgcc

SEQ ID NO: 58235 - DNA, 50 bp, Mycolicibacterium parafortuitum
  source 1..50: mol_type = genomic DNA
ctgatgaaaatgcagacagctgaccccttgatttccaccttataagaccc

SEQ ID NO: 58236 - protein, 550 aa, Intestinimonas butyriciproducens
MTANTNYPNNITALYARLSQEDALDGESNSIANQKKILLKYATDNGFPNPTFFIDDGVSGVTFDRPGWNEMIRLAEAGKVKTVIVKDMSRMGRDYLKVGYYTESFFAERDIRYIAINDGVDSDKGDNDFTPFRNLFNDFYARDTSKKIRAVMRAKGNAGEHLCTNPPYGYQKDPADKKKWIVDGEAAEIVKRIFDLCIAGKGPMQIAKLLTAEHVLTVKAHYAQRDGKPLPEKPYQWSPKSVAGILERPEYTGSTVNFKTYSKSHKLKKRLHNTPENQRIFPNTQPAIIDEQVFARVQELRENKRRPAKQAERQGLFSGLLYCADCGSKLHFATGKNMTPQQDCYRCSQYKSNTGDCTMHFIREETLKRFVLQRIFDVTALFFDDAMAFEEAARKQRFQEAEKEAKKRKREIAQAEKRISELDRIFKRIYEDDISGAISHERFLKLSADYEAEQKELTEQVKVWRQAVETFEQDQADFASFAAIVRKYVGIRELTPTIVNEFVKKIIVHAPDKSSGHRRQKIELVWNFIGEVNLPGDNETVERQRKGRTA

SEQ ID NO: 58237 - DNA, 50 bp, Intestinimonas butyriciproducens
  source 1..50: mol_type = genomic DNA
ttacttccttatgggtgcacgccttttggtgaacgccgataaggaagtat

SEQ ID NO: 58238 - DNA, 40 bp, Intestinimonas butyriciproducens; identical to SEQ ID NO: 57173
  source 1..40: mol_type = genomic DNA

SEQ ID NO: 58239 - DNA, 40 bp, Intestinimonas butyriciproducens
  source 1..40: mol_type = genomic DNA
gagaaaggggcgatgccggtcgcggcggcgccccttttaa

SEQ ID NO: 58240 - DNA, 50 bp, Intestinimonas butyriciproducens
  source 1..50: mol_type = genomic DNA
ttatttccgacccactgggcgccatcgggtgaagccagtgcaggaagtct

SEQ ID NO: 58241 - protein, 555 aa, Paenibacillus ihbetae
MINFAENQFKDVAIYPRVSSDDQQERETIQSQIEFAIKYCELHGLNIVDWYKDDGVSGTIPLDERPEGKRLLEDAKAGKFKSVLIYNMKRLGRKARVTLDAIYQLEEYGVTIKSMTEPFDTSTPMGRFVITVLAGQAEFDRDTLLETFWHGANRVARQGQWLGGIVPYGYVVVDKFLQVNEDPLPGKEDLSEAGVIRLMYHLVGNERWSTVQVADYFNSLKIPPSYVKDGRKLKKGKRKENTAGVWTPGRIRNMIVNTTYKGLHVYGKRSKKERELIEREVPSIVSTDLWNKAQEALRDNQIEAFRNQTRDNLLRSLIKCGSCGLTYHGAAFAGVGRKPKAYYICGGKTAYRGPAQGKCRSKNIPAEWIEDHVWNECVRFIENPGEALEQLNAAMDIRKSKIGEYISEKEIVLKSIADKQNERQGILTLYRQKMITALDVEKQLQEIMSETATLENRIYELDLLISAENDLSKDFKTAEELLYDLRMKIIAGNNAPTFSTRREIVKTLVHEIIVDTIPSPTGGRPKASVNVKYAFNKAVPADLAFAQGKNHTVVR

SEQ ID NO: 58242 - DNA, 50 bp, Paenibacillus ihbetae
  source 1..50: mol_type = genomic DNA
tgcccaaggtaaaaatcacacggttgtccgtgcagagaacacctctggca

SEQ ID NO: 58243 - DNA, 40 bp, Paenibacillus ihbetae
  source 1..40: mol_type = genomic DNA
cgcttgctcgatgaatccgtgtccgtgcggctattacggc

SEQ ID NO: 58244 - DNA, 40 bp, Paenibacillus ihbetae
  source 1..40: mol_type = genomic DNA
cgcttgctcgatgaatccgcctccgtgcggctattacggc

SEQ ID NO: 58245 - DNA, 50 bp, Paenibacillus ihbetae
  source 1..50: mol_type = genomic DNA
tgcccgtgcccccagccacacagccctccgtgaagctaccctctctggca

SEQ ID NO: 58246 - protein, 530 aa, Sinorhizobium fredii
MRRRAVGYSRFSTDLQNEKSIADQEALIRRYAQQHDYEIIKLYSDAAQSGASTLNRDGLLDLLEDAKDGKFDAVIVEELDRLSRDMEDLAGIHKRLSFKNIEIIAIHEGVASTVTVGLRGLVGQLFREDNARKVRRGLQGKVRAGLSAGGKAYGYRPDPLNKGKLIIVKEEADIVRRIFEEFAEGSSPRAIAHRLAAENVPPPRGCVWSGNAIYGWAERGSGILRNRLYAGEIVWNKIRMVKDPDTGKRISRANPPEEWQRHKVPELQIVDRELFERVQVMIKPKERDHAERVRMRRPQRLLSGLLRCGACGGGMSAKGTDKSGRTRIECSRQRDSGTCPDPQTFYLDKVEEIAFQLLRKELEHPELLVEFVQQYNQARMEYAHKMIERRATLEARVKTLDQELTRLVSYIAKGIGDADRIGEEIMAREAEFKAAKEELSREPEPISPVMLHPASIAAYRNALYELQAAVRDRTNAGYPKLVECLREVIHDVIIRRGPEKGQIDVTLRGKLRVLLSQPLKKRVGGTVVAE

SEQ ID NO: 58247 - DNA, 50 bp, Sinorhizobium fredii
  source 1..50: mol_type = genomic DNA
agtggggggaacagtggtagcggaggcccgatacgggagtaccccccaca

SEQ ID NO: 58248 - DNA, 40 bp, Sinorhizobium fredii
  source 1..40: mol_type = genomic DNA
cgcaaccaatggtagcggaggagggattcgaacccccgac

SEQ ID NO: 58249 - DNA, 40 bp, Sinorhizobium fredii
  source 1..40: mol_type = genomic DNA
cgcaaccaatggtagcggactagggattcgaacccccgac

SEQ ID NO: 58250 - DNA, 50 bp, Sinorhizobium fredii
  source 1..50: mol_type = genomic DNA
agaggtggggagcatggtaggggactgaagactcggaccagccccccatt

SEQ ID NO: 58251 - protein, 614 aa, Blautia massiliensis
MKIKDKRFKITALYERLSKDDEVQGESNSIVNQKRMLTQYAEQHGYENIEHYTDDGWTGTNFDRPDWKRMLADIEAGKVGTVIVKDMSRIGRDYLQVGFYTEVMFREKGVHFIAISNGVDSERRESAEFAPFLNIMNEWYVRDTSRKITTVLKARGMSGKAHTTNRCCYGYKKSAENPDKWVIDEEAAEVVRRIFNMCLNGKGPYQIARELAEDKVERPEYYLGIRGRGVNIKSFDMEHPYMWRGGTVKTILTRMEYTGCTVNFRTKKESYKDKRPTKVDSSEWIIFEDTQEPIIDKHTWETVQKLLDTPRRKGVFEENNPLTGKVFCADCGAKMYHHRNAQGIWKKNYFKAGEMIYHAPEDRYDCSNNIRGRQRYEKLCCSHSITTKALETLVLETIKRTCDYAVENEAEFRETVCSISEEQQGELSVRLEKRLAKKQKRVNEVNRLIKKLYEDNISGKLNDKRFNAMLSDYESELEALEEDIDRDNAELEGMSAKKTDVDVFMELVKKHTTFEELTPAILNEFVDKIMVYKAVGSGANRTQDVDIYLNYIGRFVVPEVVVELTEEEKLAEAKRQEKLEKKRASNRKYMARKREEARKAWAEIEAEKAKAVGQ

SEQ ID NO: 58252 - DNA, 50 bp, Blautia massiliensis; identical to SEQ ID NO: 48367
  source 1..50: mol_type = genomic DNA

SEQ ID NO: 58253 - DNA, 40 bp, Blautia massiliensis
  source 1..40: mol_type = genomic DNA
accgccgaagcattatacggaggatacgctccttagtgcc

SEQ ID NO: 58254 - DNA, 40 bp, Blautia massiliensis
  source 1..40: mol_type = genomic DNA
accgccgaagcattatacgtaggatacgctccttagtgcc

SEQ ID NO: 58255 - DNA, 50 bp, Blautia massiliensis
  source 1..50: mol_type = genomic DNA
atcctaccttccagaaagcacatatatgtaaactaataaatgattaggcc

SEQ ID NO: 58256 - protein, 614 aa, Clostridioides difficile; identical to SEQ ID NO: 48366

SEQ ID NO: 58257 - DNA, 50 bp, Clostridioides difficile; identical to SEQ ID NO: 48367
  source 1..50: mol_type = genomic DNA

SEQ ID NO: 58258 - DNA, 40 bp, Clostridioides difficile
  source 1..40: mol_type = genomic DNA
tccacctaaaccgtatactgaggacacacttttaaaggct

SEQ ID NO: 58259 - DNA, 40 bp, Clostridioides difficile
  source 1..40: mol_type = genomic DNA
tccacctaaaccgtatacttaggacacacttttaaaggct

SEQ ID NO: 58260 - DNA, 50 bp, Clostridioides difficile; identical to SEQ ID NO: 58255
  source 1..50: mol_type = genomic DNA

SEQ ID NO: 58261 - protein, 458 aa, Staphylococcus aureus; identical to SEQ ID NO: 41121

SEQ ID NO: 58262 - DNA, 50 bp, Staphylococcus aureus; identical to SEQ ID NO: 11827
  source 1..50: mol_type = genomic DNA

SEQ ID NO: 58263 - DNA, 40 bp, Staphylococcus aureus
  source 1..40: mol_type = genomic DNA
gtatggaggcacttgtatcaatataggatgtataccttcg

SEQ ID NO: 58264 - DNA, 40 bp, Staphylococcus aureus
  source 1..40: mol_type = genomic DNA
gtatggaggcacttgtatcattataggatgtataccttcg

SEQ ID NO: 58265 - DNA, 50 bp, Staphylococcus aureus
  source 1..50: mol_type = genomic DNA
ttgtggaaataaagacagtatttcattaataagtttttgaacatccataa

SEQ ID NO: 58266 - protein, 458 aa, Staphylococcus aureus; identical to SEQ ID NO: 13066

SEQ ID NO: 58267 - DNA, 50 bp, Staphylococcus aureus; identical to SEQ ID NO: 11827
  source 1..50: mol_type = genomic DNA

SEQ ID NO: 58268 - DNA, 40 bp, Staphylococcus aureus; identical to SEQ ID NO: 58263
  source 1..40: mol_type = genomic DNA

SEQ ID NO: 58269 - DNA, 40 bp, Staphylococcus aureus; identical to SEQ ID NO: 58264
  source 1..40: mol_type = genomic DNA

SEQ ID NO: 58270 - DNA, 50 bp, Staphylococcus aureus; identical to SEQ ID NO: 58265
  source 1..50: mol_type = genomic DNA

SEQ ID NO: 58271 - protein, 458 aa, Staphylococcus aureus; identical to SEQ ID NO: 11826

SEQ ID NO: 58272 - DNA, 50 bp, Staphylococcus aureus; identical to SEQ ID NO: 11827
  source 1..50: mol_type = genomic DNA

SEQ ID NO: 58273 - DNA, 40 bp, Staphylococcus aureus; identical to SEQ ID NO: 58263
  source 1..40: mol_type = genomic DNA

SEQ ID NO: 58274 - DNA, 40 bp, Staphylococcus aureus; identical to SEQ ID NO: 58264
  source 1..40: mol_type = genomic DNA

SEQ ID NO: 58275 - DNA, 50 bp, Staphylococcus aureus; identical to SEQ ID NO: 58265
  source 1..50: mol_type = genomic DNA

SEQ ID NO: 58276 - protein, 458 aa, Staphylococcus aureus
MKVAIYTRVSTLEQKEKGHSIEEQERKLRAYSDINDWTIQGVYVDAGYSGAKTDRPELNRLKENLSKIDLVLVYKLDRLTRNVKDLLDLLEIFERENVSFRSATEVYDTSTAMGRLFVTLVGAMAEWERETIRERAMMGKQAAIRKGMILTPPPFYYDRVDNKYIPNKYKDVVVWAYEEVKKGNSAKGIARKLNASDIPPPNGIQWEDRTITRALRSPLSKGHYFWGDIFIENSHEPIITDEMYNEIKERLNERVNAKTITHTSVFRGKLICPNCNGRLCLNTSYRKLKRGDVIHKNYYCNNCKVNKNGDFSFTEKEALKVFYDYLSKLDLSKYKTKEKEDKKIVTIDINKVMEQRKRYHKLYANGMMQEEELFELIKETDEKISEYEKQKERVPKKRLDVSKIKKFKNILLDSWNAFTLEDKADFIKMAIKSIEIEYIHVKRGKTKHSIKIKNIDFY

SEQ ID NO: 58277 - DNA, 50 bp, Staphylococcus aureus; identical to SEQ ID NO: 11827
  source 1..50: mol_type = genomic DNA

SEQ ID NO: 58278 - DNA, 40 bp, Staphylococcus aureus; identical to SEQ ID NO: 58263
  source 1..40: mol_type = genomic DNA

SEQ ID NO: 58279 - DNA, 40 bp, Staphylococcus aureus; identical to SEQ ID NO: 58264
  source 1..40: mol_type = genomic DNA

SEQ ID NO: 58280 - DNA, 50 bp, Staphylococcus aureus; identical to SEQ ID NO: 58265
  source 1..50: mol_type = genomic DNA

SEQ ID NO: 58281 - protein, 458 aa, Staphylococcus aureus
MKVAIYTRVSTLEQKEKGHSIEEQERKLRAYSDINDWTIQGVYVDAGYSGAKTDRPELNRLKENLSKIDLVLVYKLDRLTRNVKDLLDLLEIFERENVSFRSATEVYDTSTAMGRLFVTLVGAMAEWERETIRERAMMGKQAAIRKGMILTPPPFYYDRVDNKYIPNKYKDVVVWAYEEVKKGNSAKGIARKLNASDIPPPNGIQWEDRTITRALRSPLSKGHYFWGGIFIENSHEPIITDEMYNEIKERLNERVNAKTITHTSVFRGKLICPNCNGRLCLNTSYRKLKRGDVIHKNYYCNNCKVNKNGAFSFTEKEALKVFYDYLSKLDLSKYKTKEKEDKKIVTIDINKVMEQRKRYHKLYANGMMQEEELFELIKETDEKISEYEKQKERVPKKRLDVSKIKNFKNILLDSWNAFTLEDKADFIKMAIKSIEIEYIHVKRGKTKHSIKIKNIDFY

SEQ ID NO: 58282 - DNA, 50 bp, Staphylococcus aureus; identical to SEQ ID NO: 11827
  source 1..50: mol_type = genomic DNA

SEQ ID NO: 58283 - DNA, 40 bp, Staphylococcus aureus; identical to SEQ ID NO: 58263
  source 1..40: mol_type = genomic DNA

SEQ ID NO: 58284 - DNA, 40 bp, Staphylococcus aureus; identical to SEQ ID NO: 58264
  source 1..40: mol_type = genomic DNA

SEQ ID NO: 58285 - DNA, 50 bp, Staphylococcus aureus; identical to SEQ ID NO: 58265
  source 1..50: mol_type = genomic DNA

SEQ ID NO: 58286 - protein, 576 aa, Bacteroides intestinalis
MRGAIYSRVSTIDQDYNRQTNELKEYAKYMGIEITHVFEEKESGFNDDRPEFAKLKELTKDDIDIVLVWELSRLSRRSLYLQQQIEYFTKKGICVYAKKENLRTLDENGEEDRNTKFIIGIIAMIAEQEVATLKSRSISSKRNKIIKEGNSYTYKAPYGYDYSTETKKLSINEEEAKTVRRVIELSANDYSSARIALILNAENIPTRSKTKIWTMGTINTMLSNPVYKGEAEYMLKGTEPKKGKRYKRPIEVAIVKTPAIVSAELFDLSREKMKGRAFRSKSTGVKHFQLLRGLIYCPYCKIKYTYEGGRDLYVCHDKHKKAKNKPDCFSKAIKATRIEKIVWELVRLLFSQELATGKAQEQEEPLRQEIEAHKKLLIGIENKLNDLTAQANAIVNAAIDIKREMPNMPDLYINKLREAASLDKESKKYQYEKDRLNKLILSCEDKIKAINSLSNEKVLVDSITDDMERYELIHKVIDHMVIYGEDSIYSLVVVTFKTGQEVYIGYKSKGYQYYTIFHPSQSVWFDTEKRLGYITTMKSPDSLVLSLETVTKEYSVTNFIKVLDVPKNRRYYENQS

SEQ ID NO: 58287 - DNA, 50 bp, Bacteroides intestinalis
  source 1..50: mol_type = genomic DNA
ggttgtacctgctaatgttaaatcttgataacacatttgcaggtacaact

SEQ ID NO: 58288 - DNA, 40 bp, Bacteroides intestinalis
  source 1..40: mol_type = genomic DNA
cgtataaatctgcgtggttttgacgtttgtatgtcccatc

SEQ ID NO: 58289 - DNA, 40 bp, Bacteroides intestinalis
  source 1..40: mol_type = genomic DNA
cgtataaatctgcgtggttctgacgtttgtatgtcccatc

SEQ ID NO: 58290 - DNA, 50 bp, Bacteroides intestinalis
  source 1..50: mol_type = genomic DNA
ggttctacaggatcatgtaaaatacttagaacacatgacaagacacatat

SEQ ID NO: 58291 - protein, 584 aa, Agrobacterium salinitolerans
MTKAYSYIRFSTPEQAQGDSLRRQVAKAEAWANGRGLVLDDSHRDLGISAYHGANRTNGALRSFLQMVEDGKIERDSYLIVESLDRLSRETVIDAATQLFALIQAGVVVVTLSDGQEYSATRLRQDWTPLVISLAVMARAHDESRVKSERVGEAWRQKKAAARAGGKPITPRCPEWLEVRDGKFIERPDRVEIVHRIFRETIEGFGRREIVCRLNGEGKLPFKADEKRKKPSTGWQTSSVAKIVQNRAVMGEYQPHTGTHKARNRKPEGDPIKDYYPRIVEDDVFWRAQASVENRRQQTGGRRGNNGAHILQGLAKCAACGGPMHVMNKGKPPKGGIYLVCSANRRNTGCDNSRAWRVDKLEEAVLLCLTSFKTQSFESLNGTVVNQGQRVDALRAELDDLNRRNKVLMRLAESEDEQAEARFLENAKEIKAKKTELTAAEAELATHQSDPGDAVRLAEILQLSTDFFRTEGEERLESRIRLSSLIRRIVDLIECDPVRGAYMVLPIDTKIWRVNAPTEGAFAYQLDLQPRAIDAPPPRFLFLLLKNPNDEARDAFYQGKGGQVMAADGIKGFPSPHAFKSREK

SEQ ID NO: 58292 - DNA, 50 bp, Agrobacterium salinitolerans
  source 1..50: mol_type = genomic DNA
cttcgattaatgtagcacaatgtcagcaaattgtgctacattaattccat

SEQ ID NO: 58293 - DNA, 40 bp, Agrobacterium salinitolerans
  source 1..40: mol_type = genomic DNA
accgggcgggccaaccatcagcagattgtggccacccgca

SEQ ID NO: 58294 - DNA, 40 bp, Agrobacterium salinitolerans
  source 1..40: mol_type = genomic DNA
accgggcgggccaaccatcctcagattgtggccacccgca

SEQ ID NO: 58295 - DNA, 50 bp, Agrobacterium salinitolerans
  source 1..50: mol_type = genomic DNA
gctctattattacttcacattgtcctcaaattgtgttttccaaatactct

SEQ ID NO: 58296 - protein, 555 aa, Chromobacterium vaccinii
MKNSKVYSYLRFSDPRQATGSSADRQIQYATRWAAEHGLVLDDALTLRDEGLSAYHQRHVKQGALGAFLEAISAGRISAGSVLIVEGLDRLSRAEPILAQAQLAQIINAGITVVTASDGKEYNRELIKNNPMDLVYSLLIMIRAHEESDTKSKRIKAAVKRQAEAWIAGTFRGRIVNGRDPQWLDWDGEKWIPIPERVEAFKIAFRMYKDGYGAKPIFQHLFKLGLTMTNKGLPNHANFYRSIRNPALYGTRILEVGGEKFELKNYYPAIITEEEYNSLQTEAGGRFKFSQNGGIIGVVSGLGILRCGYCGAAAVVKNYLNRKKESNGNIKDSHRRLMCLGAITTGIHSCPMPATSSVAPVENAIMEYCSDQFNLLSLQNGEDQSLSIRAKLSDKKTELISIENKIQKITNTILESELNAPKFLIKKASELESLQELAKDQIEKLENELVLLSQNLIEPALAETWAGLTDGVKNLENESRISARKLISDTFEKIIVYTNSINPPARISKTRKFSTIDLVLIPKRGNSRTLRVNRLTGKWVTGEDLLSTHQTLQKS

SEQ ID NO: 58297 - DNA, 50 bp, Chromobacterium vaccinii
  source 1..50: mol_type = genomic DNA
tatccacctttgacatcgcttgctaaccccagcgatactataggtgtacg

SEQ ID NO: 58298 - DNA, 40 bp, Chromobacterium vaccinii
  source 1..40: mol_type = genomic DNA
catgcgcatctcgctggaaaaaccatacgcgtccgtcgat

SEQ ID NO: 58299 - DNA, 40 bp, Chromobacterium vaccinii
  source 1..40: mol_type = genomic DNA
catgcgcatctcgctggaagtaccatacgcgtccgtcgat

SEQ ID NO: 58300 - DNA, 50 bp, Chromobacterium vaccinii
  source 1..50: mol_type = genomic DNA
ttgctacccactgtgtcccttgctgtccccagtgcttttgaaggtgtcag

SEQ ID NO: 58301 - protein, 514 aa, Bacillus subtilis
MAKELTKTASVAAYLRKSREDADQDDTLARHRKQLIDLVKQRGFENVDWYEEIGSADSIKNRPVFSDLLKKIENDEYDAVCVVAYDRLSRGNQIESGIISKAFKDTETLLITPTRTYDWSIEGDEMLSEFESMIARSEYRVIKKRLKQGKINAVKNGRLHSGNVPYGYKWDKNDKTAKIDKEKHEIYRLMVKWFLDEEYSATEIADKLNELGIPSPSGGSTWYSEVVADILTNDFHRGLVWYGKYRARKNGIGIEKNPDSSSIIMHKGNHEPMKSDEEHGAIIRRISKLRTFKPGRKLNKNTFKLSGLVRCPHCGKVQVVHTPKNRNPHVRKCLKKSKTRTTECNNTTGIPEEALYKAIVMKIREYNEVLFSKDSSEKKDEEARTYMNQILSLHEKAISKSNKRIEKIKEMYMDEIIDKDEFKSRIDKEKKSILEAENEIRTLKESADYHDEIEHEQRKIKWNHEKVQEFIESDQGFTPSEINLILKLIISHVSYTMVKNEYGEFDVDLRVNFN

SEQ ID NO: 58302 - DNA, 50 bp, Bacillus subtilis
  source 1..50: mol_type = genomic DNA
agtagtacccgattaaggttgcttgtgtgaaacttaatttgggtactaca

SEQ ID NO: 58303 - DNA, 40 bp, Bacillus subtilis; identical to SEQ ID NO: 32788
  source 1..40: mol_type = genomic DNA

SEQ ID NO: 58304 - DNA, 40 bp, Bacillus subtilis
  source 1..40: mol_type = genomic DNA
ggtcgtgacaggctctgttggtacgattatcggtattaca

SEQ ID NO: 58305 - DNA, 50 bp, Bacillus subtilis
  source 1..50: mol_type = genomic DNA
agtactacattgtcaccattgtttggttggagcttatgtctggtaccaca

SEQ ID NO: 58306 - protein, 514 aa, Bacillus subtilis
MAKELTKTASVAAYLRKSREDADQEDTLARHRKQLIDIVKQRGFENVDWYEEIGSADSIKNRPVFSDLLKKIENDEYDAVCVVAYDRLSRGNQIESGIISKAFKDTETLLITPTRTYDWSIEGDEMLSEFESMIARSEYRVIKKRLKQGKINAVRNGRLHSGNVPYGYKWDKNDKTAKIDKEKHEIYRLMVKWFLDEEYSATEIADKLNELGIPSPSGGSTWYSEVVADILTNDFHRGLVWYGKYRARKNGIGIEKNPDSSSIIMHKGNHEPMKSDEEHGAIIRRISKLRTFKPGRKLNKNTFKLSGLVRCPHCGKVQVVHTPKNRNPHVRKCLKKSKTRTTECNNTTGIPEEALYKAIVMKIREYNEVLFSKDSSEKKDEEARTYMNQILSLHEKAISKSNKRIEKIKEMYMDEIIDKDEFKSRIDKEKKSILEAENEIRTLKESADYHDEIEHEQRKIKWNHEKVQEFIESDQGFTPSEINLILKLIISHVSYTMVKNEYGEFDVDLRVNFN

SEQ ID NO: 58307 - DNA, 50 bp, Bacillus subtilis; identical to SEQ ID NO: 58302
  source 1..50: mol_type = genomic DNA

SEQ ID NO: 58308 - DNA, 40 bp, Bacillus subtilis; identical to SEQ ID NO: 32788
  source 1..40: mol_type = genomic DNA

SEQ ID NO: 58309 - DNA, 40 bp, Bacillus subtilis; identical to SEQ ID NO: 58304
  source 1..40: mol_type = genomic DNA

SEQ ID NO: 58310 - DNA, 50 bp, Bacillus subtilis; identical to SEQ ID NO: 58305
  source 1..50: mol_type = genomic DNA

SEQ ID NO: 58311 - protein, 578 aa, Blautia obeum
MENSAINTLPFYNTPLDRNSPRNMVFYGRVSTEHEAQLSALQNQIQWYDDQLKSHPNWNLVERYIDEGITGTQAKKRPGFLNMIDDAKKGKFDLIVTREVCRFARNTVDTLIYTRELKNKYNIEVYFVDDNIWTMDGDGELRLTLMATLAQEESRKTSDRVKAGQKVSRENGALYGNGNILGYDRVGDTYIINEEQAETVRMIYDMYLNKGLGSMKIAKELSIQKRKNASGNIKWSAERVMRVLKKSTYAGIIAYGQSHSNNYLEQKRINNLNRDTYMYQKIDIPVIIPKEEWDKVQEIIASRTQKMGDDLRGKKEVKEFWSKKLLCKCGSSFRRNKWRTNKTGEEVFGYQCQRQINYGSKQFREKNGLDTEGYCDIRMVADWKLDMMAKIIIEQIWKNKGESIILALKMIADNYEEDVSPVKKNNKEIELKIEKLQNRMKNLIEMRADGEITKEDFTEFKNSINDQISILNSELVIEEIESDKPESIEKKIDTIRQIIDESIDFSQPKLPRYIIDRFISKVVVLDNNKFRWYLTLGDNPDDDMYIDAQVEGRKNNSSVQILSSEDSLLTFHSSTGSN

SEQ ID NO: 58312 - DNA, 50 bp, Blautia obeum
  source 1..50: mol_type = genomic DNA
gcctacttaccttccatagcagcacaggcagcaattgcagaaacaaaggc

SEQ ID NO: 58313 - DNA, 40 bp, Blautia obeum
  source 1..40: mol_type = genomic DNA
cgctcgtcttgcagcagcacaggcagcaatcgctgagaag

SEQ ID NO: 58314 - DNA, 40 bp, Blautia obeum
  source 1..40: mol_type = genomic DNA
cgctcgtcttgcagcagcaaaggcagcaatcgctgagaag

SEQ ID NO: 58315 - DNA, 50 bp, Blautia obeum
  source 1..50: mol_type = genomic DNA
gtatatttcaaagacacagaagcaaaggcagcaataaatgggaaaaagcc

SEQ ID NO: 58316 - protein, 519 aa, Adlercreutzia equolifaciens
MGTIKPDGRYAMLLRKSREDVEAEARGQMETLALHEDALRLLASNLGIKISKVYRELVSGDRLDERPETVQLVHEVMRGEWDGVLAYDIQRISRGDMIDQGVIMNAFKYSRTIIITPGKIFDLADDYDSNAVEMNLMMGRVELGWIKKRLIAGKENRTRRGEYLGSIAPFGWEKCTVDHMKTLRPGEHHERLFQMYTDIASWARAPKGMADDLNRQGFPTPRGKHWDAKTITSIIRNPVNIGYVRWNQRKTRVQFDEEMNRRKVRGVPKDDERILAEGLHRGAGLITDELFYAANRQLDAHGGTSEHTGKPLRNPLAGVLVCKGCGRAMARSIFPGERRGDGRGKTEWYTHPQSNRYECHMQGAVMRDVVDLAVDALLSVTRDIEVAIDADDGQKVEAARQVAKSLRRSLAEEDAARDNLFRLVERGIITDAEFASRKVLADGRRASLEAQLAQAEAEAADDHGEALARVVALREVVDSLRNYEGRAKEVNDMVKSIVSRIEYERDPQTGEIRLGVSLR

SEQ ID NO: 58317 - DNA, 50 bp, Adlercreutzia equolifaciens
  source 1..50: mol_type = genomic DNA
gggttatatcatgcgctgaatatctcgatattacaccaacgatataaggt

SEQ ID NO: 58318 - DNA, 40 bp, Adlercreutzia equolifaciens
  source 1..40: mol_type = genomic DNA
agactagctggcgaagatctcgatggtctcgccctcggcc

SEQ ID NO: 58319 - DNA, 40 bp, Adlercreutzia equolifaciens
  source 1..40: mol_type = genomic DNA
agactagctggcgaagatcgggatggtctcgccctcggcc

SEQ ID NO: 58320 - DNA, 50 bp, Adlercreutzia equolifaciens
  source 1..50: mol_type = genomic DNA
tgtttctatatgtatatgaataatgggatattacatacacaatttgaggt

SEQ ID NO: 58321 - protein, 518 aa, Klebsiella pneumoniae
MPKAISYIRFSTKIQSVGDSTKRQSKYINDWLKRNPDYYLDESLRFQDLGISGFSGANAKSGAFGEFLAAVESGYIEAGSVLLVESLDRVSRQDIDTAGEQLRKILRAGVEVVTLVDNEWYTKESLKDSLSMIKAMLVMERAHEESAMKSTRLRSMWAGKRERAANGEIMSKRCAAWLKVSEDRSHFEFIPENVKAVQRVFQLRLEGLSHVKIAKQMNDEGFSTLNQFKPVKGGWSQSSVTELLSNRSVIGFKVSSKSMAVKGVSEIPNYYPSIITDEQFYAVQQLKQGSGRKPSSDLPLLTNLFKGVLRCSECGFIVVVAGVSAKRSGIYKCSMKSEGRCNSVGFSRLQTDRALVQGLLYNTNRLSLNRDNGSAIGAIQSELEHLQKQRERLIKLAMLADDTESMAKDLKALNSQIKDAEKAVSEVHQREQSSQLETISHLDLTVKKDRIEAQIIIKRIVKEIRLNTAGKKCDVFLHNGLKLLNFPLDRVVDGEIFLEVLPVLEADEFDFDTYRMIE

SEQ ID NO: 58322 - DNA, 50 bp, Klebsiella pneumoniae
  source 1..50: mol_type = genomic DNA
gtgtatcaatagaaaggtctcttcaggaatacacctttcttatgatacac

SEQ ID NO: 58323 - DNA, 40 bp, Klebsiella pneumoniae; identical to SEQ ID NO: 8148
  source 1..40: mol_type = genomic DNA

SEQ ID NO: 58324 - DNA, 40 bp, Klebsiella pneumoniae
  source 1..40: mol_type = genomic DNA
atggaccgggcggctgtcgtagatcacgcggttgacgtta

SEQ ID NO: 58325 - DNA, 50 bp, Klebsiella pneumoniae
  source 1..50: mol_type = genomic DNA
atatatcaaaaacaaggcctattttaaaataaacctgatatattttacaa

SEQ ID NO: 58326 - protein, 518 aa, Klebsiella pneumoniae
MPKAISYIRFSTKIQSVGDSTKRQSKYINDWLKRNPDYYLDESLRFQDLGISGFSGANAKSGAFGEFLAAVESGYIEAGSVLLVESLDRVSRQDIDTAGEQLRKILRAGVEVVTLVDNEWYTKESLKDSLSMIKAMLVMERAHEESAMKSTRLRSMWAGKRERAANGEIMSKRCAAWLKVSEDRSHFEFIPENVKAVQRVFQLRLEGLSHVKIAKQMNDEGFSTLNQFKPVKGGWSQSSVTELLSNRSVIGFKVPSKSMAVKGVSEIPNYYPSIITDEQFYAVQQLKQGSGRKPSSDLPLLTNLFKGVLRCSECGFIVVVAGVSAKRSGIYKCSMKSEGRCNSVGFSRLQTDRALVQGLLYNTNRLSLNRDNGSAIGTLQSELEQLQKQRERLIKLAMLADDTESMAKDLKALNSQIKDAEKAVSEVHQREQSSQLETISHLDLTLKKDRIEAQIIIKRIVKEIRLNTAQKKCDVFLHNGLRLLNFPLDRVVDGEIFLEVLPLLEADEFDFDTYRMIE

SEQ ID NO: 58327 - DNA, 50 bp, Klebsiella pneumoniae; identical to SEQ ID NO: 58322
  source 1..50: mol_type = genomic DNA

SEQ ID NO: 58328 - DNA, 40 bp, Klebsiella pneumoniae; identical to SEQ ID NO: 8148
  source 1..40: mol_type = genomic DNA

SEQ ID NO: 58329 - DNA, 40 bp, Klebsiella pneumoniae; identical to SEQ ID NO: 58324
  source 1..40: mol_type = genomic DNA

SEQ ID NO: 58330 - DNA, 50 bp, Klebsiella pneumoniae; identical to SEQ ID NO: 58325
  source 1..50: mol_type = genomic DNA

SEQ ID NO: 58331 - protein, 518 aa, Klebsiella variicola; identical to SEQ ID NO: 33171

SEQ ID NO: 58332 - DNA, 50 bp, Klebsiella variicola; identical to SEQ ID NO: 58322
  source 1..50: mol_type = genomic DNA

SEQ ID NO: 58333 - DNA, 40 bp, Klebsiella variicola; identical to SEQ ID NO: 33068
  source 1..40: mol_type = genomic DNA

SEQ ID NO: 58334 - DNA, 40 bp, Klebsiella variicola
  source 1..40: mol_type = genomic DNA
gtggaccgggcggctatcgtagatcacgcggttaacgttg

SEQ ID NO: 58335 - DNA, 50 bp, Klebsiella variicola; identical to SEQ ID NO: 58325
  source 1..50: mol_type = genomic DNA

SEQ ID NO: 58336 - protein, 518 aa, Raoultella ornithinolytica
MPKAISYIRFSTKIQSVGDSTKRQSRYINDWLKRNPDYYLDESLRFQDLGISGFSGANAKSGAFGEFLAAVESGYIEAGSVLLVESLDRVSRQDIDTAGEQLRKILRAGVEVVTLVDNEWYTKESLKDSLSMIKAMLVMERAHEESAMKSTRLRSVWAGKRERAANGEIMSKRCAAWLKVSEDRSHFEFIPENVKAVQRVFQLRLEGLSHVKIAKQMNDEGFSTLNQFKPVKGGWSQSSVTELLSNRSVIGFKVPSKSMAVKGVSEIPNYYPSIITDEQFYAVQQLKQGSGRKPSSDLPLLTNLFKGVLRCSECGFIVVVAGVSAKRSGIYKCSMKSEGRCNSVGFSRLQTDRALVQGLLYNTNRLSLNRDNGSAIGAIQSELQHLQKQRERLIKLAMLADDTESMAKDLKALNSQIKDAEKAVSEVHQREQSSQLETISHLDLTVKKDRIEAQIIIKRIVKEIRLNTAGKKCDVFLHNGLKLLNFPLDRVVDGEIFLEVLPVLEADEFDFDTYRMIE

SEQ ID NO: 58337 - DNA, 50 bp, Raoultella ornithinolytica; identical to SEQ ID NO: 58322
  source 1..50: mol_type = genomic DNA

SEQ ID NO: 58338 - DNA, 40 bp, Raoultella ornithinolytica; identical to SEQ ID NO: 33093
  source 1..40: mol_type = genomic DNA

SEQ ID NO: 58339 - DNA, 40 bp, Raoultella ornithinolytica
  source 1..40: mol_type = genomic DNA
atgcaccgggcggctgtcgtagatggcgcgattcacgtga

SEQ ID NO: 58340 - DNA, 50 bp, Raoultella ornithinolytica; identical to SEQ ID NO: 58325
  source 1..50: mol_type = genomic DNA

SEQ ID NO: 58341 - protein, 518 aa, Raoultella ornithinolytica
MPKAISYIRFSTKIQSVGDSTKRQSKYINDWLKRNPDYYLDESLRFQDLGISGFSGANAKSGAFGEFLAAVESGYIEAGSVLLVESLDRVSRQDIDTAGEQLRKILRSGVEVVTLVDNEWYTKESLKDSLSMIKAMLVMERAHEESAMKSTRLRSMWAAKRERAANGEIMSKRCAAWLKVSEDRSHFEFIPDHVKAVQRVFQLRLEGLSHIKIAKQMNDEGFYTLNQHKSVKGGWSQSSVTELLSNRSVIGFKVPSKSMAVKGVSEIPNYYPAIISEQQFHAVQQLKQGAGRKPSSDLPLLTNLFKGVLRCSECGFIIIVSGVTANRSGNYRCSMRYEGRCNAKGFSRLQTDRALVQGLLYNTNRLSLNRDNGSAIGTLQSELEQLQKQRERLIKLAMLADDTESMAKDLKALNSQIKDAEKAVSEVHQREQSSQLETISHLDLTVKKDRVEAQIIIKRIVKEIRLNTAQKKCDVFLHNGLRLLNFPLDRVVDGEIFLEVLPLLEADEFDFDTYRMIE

SEQ ID NO: 58342 - DNA, 50 bp, Raoultella ornithinolytica; identical to SEQ ID NO: 58322
  source 1..50: mol_type = genomic DNA

SEQ ID NO: 58343 - DNA, 40 bp, Raoultella ornithinolytica; identical to SEQ ID NO: 33093
  source 1..40: mol_type = genomic DNA

SEQ ID NO: 58344 - DNA, 40 bp, Raoultella ornithinolytica; identical to SEQ ID NO: 58339
  source 1..40: mol_type = genomic DNA

SEQ ID NO: 58345 - DNA, 50 bp, Raoultella ornithinolytica; identical to SEQ ID NO: 58325
  source 1..50: mol_type = genomic DNA

SEQ ID NO: 58346 - protein, 519 aa, Klebsiella pneumoniae
MPKAISYIRFSTKIQSVGDSTKRQSKYINDWLKRNPDYYLDESLRFQDLGISGFSGANAKSGAFGEFLAAVESGYIEAGSVLLVESLDRVSRQDIDTAGEQLRKILRSGVEVVTLVDNEWYTKESLKDSLSMIKAMLVMERAHEESAMKSTRLRSMWAGKRERAANGEIMSKRCAAWLKVSEDRSHFEFIHENVKAVQRVFQLRLEGLSHIKIAKKMNDEGFYTLNQHKSIKGGWSQSSVTELLSNRSVIGFKVPSKSMAVKGVSEIPNYYPSIITDEQFYAVQQLKQGSGRKPSSDLPLLTNLFKGVLRCSECGFIVVVAGVSAKRSGIYKCSMKSEGRCNSVGFSRLQTDRALVQGLLYNTNRLSLNRDNGSAIGALQSELEQLQKQRERLIKLAMLADDTESMAKDLKALNSQIKDAEKAVSEVHQREQSSQLEALSHLDLTVKKDRVEAQIIIRRIVKEIRLNTAGKKCDVFLHNGLKLYNFPLDKVVDGEIFLEVLPLLEADEFDFDTYRLISP

SEQ ID NO: 58347 - DNA, 50 bp, Klebsiella pneumoniae
  source 1..50: mol_type = genomic DNA
gtgtatcaatagaaaggtctctttaggattacacctttcttatgatacac

SEQ ID NO: 58348 - DNA, 40 bp, Klebsiella pneumoniae; identical to SEQ ID NO: 8148
  source 1..40: mol_type = genomic DNA

SEQ ID NO: 58349 - DNA, 40 bp, Klebsiella pneumoniae; identical to SEQ ID NO: 58324
  source 1..40: mol_type = genomic DNA

SEQ ID NO: 58350 - DNA, 50 bp, Klebsiella pneumoniae; identical to SEQ ID NO: 58325
  source 1..50: mol_type = genomic DNA

SEQ ID NO: 58351 - protein, 518 aa, Klebsiella pneumoniae; identical to SEQ ID NO: 58336

SEQ ID NO: 58352 - DNA, 50 bp, Klebsiella pneumoniae; identical to SEQ ID NO: 58322
  source 1..50: mol_type = genomic DNA

SEQ ID NO: 58353 - DNA, 40 bp, Klebsiella pneumoniae; identical to SEQ ID NO: 8148
  source 1..40: mol_type = genomic DNA

SEQ ID NO: 58354 - DNA, 40 bp, Klebsiella pneumoniae; identical to SEQ ID NO: 58324
  source 1..40: mol_type = genomic DNA

SEQ ID NO: 58355 - DNA, 50 bp, Klebsiella pneumoniae; identical to SEQ ID NO: 58325
  source 1..50: mol_type = genomic DNA

SEQ ID NO: 58356 - protein, 550 aa, Stenotrophomonas maltophilia
MVTKARVYSYLRFSDPKQAAGSSADRQLEYAKRWAAEHGMALDAALSMQDEGLSAYHQRHVTKGALGVFLAAIDEGRIPAGSVLIVEGLDRLSRAEPIQAQAQLAQIINAGITVVTASDGREYNRAGLKAQPMDLVYSLLVMIRAHEESDTKSKRVRAAIHRQCKGWQDGTWRGVIRNGKDPSWTRLDPETKTFQLVPERAEAVKLAIRMFRDGHGAIRIMRTLAEEGLQLTNGGNPAGQLYRILRNRALIGEKVLEIDGEEYRLAGYYPPLLSAEQFADLQQATEQRAKQKGTGEIPGLITGLRISYCGYCGSAMVAQNLMNRGRREDGGPQHGHRRLICVGNSQGLGCAVAGSCSVVPIEHAIMSYCADQMNLARLFEGGDRSEALTGRLAIARARVADTTAKIERITDAMLADDAGDAPAAFMRRARELEAALVEQQAEVDALEHELAAVASSPTPAVAKAWADLQEGVKALDYDARTKARQLVADTFERISIYHRGTEPEQTRSWKGTIDLVLVAKRGSSRILHIDRRTGDWRHGEEASIVDLTDD

SEQ ID NO: 58357 - DNA, 50 bp, Stenotrophomonas maltophilia
  source 1..50: mol_type = genomic DNA
agtttatttcacccgacgttcgggcaccccaatgaaataaaccctatact

SEQ ID NO: 58358 - DNA, 40 bp, Stenotrophomonas maltophilia; identical to SEQ ID NO: 21998
  source 1..40: mol_type = genomic DNA

SEQ ID NO: 58359 - DNA, 40 bp, Stenotrophomonas maltophilia
  source 1..40: mol_type = genomic DNA
atcgacgagggccttcgggttgccaaggctgacgaagccg

SEQ ID NO: 58360 - DNA, 50 bp, Stenotrophomonas maltophilia
  source 1..50: mol_type = genomic DNA
agtttatttaatggcagtcttgggttccccaatcagtgtagctctttcct

SEQ ID NO: 58361 - protein, 523 aa, Klebsiella pneumoniae
MRQVITYLRFSSKPQERGDSIRRQKGLFERWLKDNPDAKVVDEYSDEGASAYHGHHLKGDFGRMLQKIQDGKYLSGQTVLLVESETRLNRQKARNTENLVDLITGKGVDVICLESGKIYTSTNIDDLDTSIQLKIAAHIAHQQSKEKSIKVSAAWEHRAQLALEGKQQLTKNVPGWIDPDTRKLNEHSSTVVTIFDLLLSGESLHNIARYLQANNIKSFSRREKANGFSVHSVRTILRSESTVGTLAASKRNDRPAIPNYYEPAIDVATFNKAQEILSKNRVGRAPASDNPITINLFKGIIRCQCGASVHPTGVKATYQGVYRCNNVPDGRCNVPTIKRKPFDKWMLDNIIGFLERSDGSNTDKRKAEIEYQISLVTSKLKKAATLLLELDDVTELKEQVKELNIQRINMQSELDELNQRETLSDKPLHHLSEIDLTTKAGRVEAQLILSKFVQSIELQREMIIITLRNGAVIGKSRDLSPALSQDLMKQVVSSSSPRDIDMLSVITSDEEFRKSGKPVTKRS

SEQ ID NO: 58362 - DNA, 50 bp, Klebsiella pneumoniae; identical to SEQ ID NO: 40272
  source 1..50: mol_type = genomic DNA

SEQ ID NO: 58363 - DNA, 40 bp, Klebsiella pneumoniae
  source 1..40: mol_type = genomic DNA
gcggcgaggtaaatcaagggtcattgcgctcatagtcgta

SEQ ID NO: 58364 - DNA, 40 bp, Klebsiella pneumoniae
  source 1..40: mol_type = genomic DNA
gcggcgaggtaaatcaaggagcattgcgctcatagtcgta

SEQ ID NO: 58365 - DNA, 50 bp, Klebsiella pneumoniae
  source 1..50: mol_type = genomic DNA
tcccagaatgattaagattcaagtagttttgtatttcacaaaattcacga

SEQ ID NO: 58366 - protein, 655 aa, Vibrio vulnificus; identical to SEQ ID NO: 46381

SEQ ID NO: 58367 - DNA, 50 bp, Vibrio vulnificus; identical to SEQ ID NO: 46322
  source 1..50: mol_type = genomic DNA

SEQ ID NO: 58368 - DNA, 40 bp, Vibrio vulnificus; identical to SEQ ID NO: 56593
  source 1..40: mol_type = genomic DNA

SEQ ID NO: 58369 - DNA, 40 bp, Vibrio vulnificus
  source 1..40: mol_type = genomic DNA
aacggcgccaagccctatgtgaatggtgctaatggccgcg

SEQ ID NO: 58370 - DNA, 50 bp, Vibrio vulnificus
  source 1..50: mol_type = genomic DNA
gtaagtactgacctaaaaccaatgtgaatatttcatgaaactgtgcagtg

SEQ ID NO: 58371 - protein, 655 aa, Vibrio vulnificus
MKPTIITYLRYSSKQQADGLSEFRQSEINRKFVEKFCAEHDVDLNEVISLKDLGVSAYRGLNLTLGSFSQTIKKFKSGEIKKRFNEDGEINTYLIVESLDRITRTGPFKSTQIFTELLEYTNIVVLADGEKKIYSKKSIDSTHGMMDLFMALISLQRSHTESLMKEFRSRKSWEKKREDLLNYFTLPEEERIGLERPKNATAMCPFWLTAKKDGRGYEFIPENKKVMDFLIEKLLDGNGMTRAVRLLNDEIDAGNLKPKLKKANRKTRHFRAAAYSGLFNSEISTVKGDYLLTESYYPTEDDVEQGKYPEKHLGKRVRKEVAVLKNYYPALMTESQAAYIRKMMDERRSSGTKPNKSIKNLAQGILRCPNCNSTYIKSKDRRNVYLRCNLAREGLCNAKVIKHGVFEHNLLQFCKGLNINKIISNQSSDQVIDSSLKELEQKMMPLKVKKSQLEDDIEQIVKNISSIKIPSLLEKVQDDYLKKENELKKVVQEIDLIETSIMKLQHQIAMSDGDNSLQELIDLTLDEHADDEIRQRFNVELKKVVKSMTVLYRDTDDNPFGYHMISIQFLDGVHRLIPVHEKMTDKIHNILPYQDAVKVDSVDFSETVILPEDYVEGREKGKYPNLDGMAKYYQENPTKYLRLKHKMDQVHEIHA

SEQ ID NO: 58372 - DNA, 50 bp, Vibrio vulnificus; identical to SEQ ID NO: 46322
  source 1..50: mol_type = genomic DNA

SEQ ID NO: 58373 - DNA, 40 bp, Vibrio vulnificus; identical to SEQ ID NO: 56593
  source 1..40: mol_type = genomic DNA

SEQ ID NO: 58374 - DNA, 40 bp, Vibrio vulnificus; identical to SEQ ID NO: 58369
  source 1..40: mol_type = genomic DNA

SEQ ID NO: 58375 - DNA, 50 bp, Vibrio vulnificus; identical to SEQ ID NO: 58370
  source 1..50: mol_type = genomic DNA

SEQ ID NO: 58376 - protein, 522 aa, Clostridioides difficile; identical to SEQ ID NO: 36056

SEQ ID NO: 58377 - DNA, 50 bp, Clostridioides difficile; identical to SEQ ID NO: 36057
  source 1..50: mol_type = genomic DNA

SEQ ID NO: 58378 - DNA, 40 bp, Clostridioides difficile; identical to SEQ ID NO: 55443
  source 1..40: mol_type = genomic DNA

SEQ ID NO: 58379 - DNA, 40 bp, Clostridioides difficile
  source 1..40: mol_type = genomic DNA
cgtagccaatgctttttgtacagcagccatatcctcatgt

SEQ ID NO: 58380 - DNA, 50 bp, Clostridioides difficile
  source 1..50: mol_type = genomic DNA
ttgtgcacacctgtagttgcagctactggggagaccggggcagaagatcg

SEQ ID NO: 58381 - protein, 580 aa, Pseudomonas aeruginosa; identical to SEQ ID NO: 48961

SEQ ID NO: 58382 - DNA, 50 bp, Pseudomonas aeruginosa; identical to SEQ ID NO: 48962
  source 1..50: mol_type = genomic DNA

SEQ ID NO: 58383 - DNA, 40 bp, Pseudomonas aeruginosa; identical to SEQ ID NO: 33993
  source 1..40: mol_type = genomic DNA

SEQ ID NO: 58384 - DNA, 40 bp, Pseudomonas aeruginosa
  source 1..40: mol_type = genomic DNA
taccggcatgtggttggtcgtgaagtagataccgaccatc

SEQ ID NO: 58385 - DNA, 50 bp, Pseudomonas aeruginosa
  source 1..50: mol_type = genomic DNA
ttggtaagtgttgactaggtggttgtgacccagtgtggttaactctcaaa

SEQ ID NO: 58386 - protein, 517 aa, Clostridioides difficile
MKVAIYCRLSEEDRNKQFETDDSNSIQNQKSMLLQYAMEQGWELYNIYSDDDYTGADRRRPEFNRLLKDAEQHRFDIILCKTQSRFTRELELVEKYIHGLFPIWGIRFISIVDNADTANKGNKKSRQINGLVNEWYLEDMSENIRSVLTNRRKNGFHIGAFALYGYKKDPNQKGHLIVDEEAAAVVREVFTLFSQGYGKTAIARMLNDRGIPNPTEYKRLHGLRYQQPKTRNSTLWKYFAISDMLINEIYIGNMVQGKYGSVSYKTKQNKPRPKSEWYIVEGTHEPIIDRELWDRVQALIEQRAKPFDVGTIGLFARKARCANCGYTMRSSKNHNKHYLQCSNRHVAKDACIGSFISVDKLERLVIDELNRLATEYLDKDELEQNIEFCDNLQEQKARLLSDLTVYQKKVDEYSKGIRELYMDKVKGLISESDYVDMSKGFTTERDRLERVIADGEKQLAEIEEKIAAGDNRRELIEQYTNLEHLTREIVETLIDYISVGKRIPGTRDVPIEIHWNF

SEQ ID NO: 58387 - DNA, 50 bp, Clostridioides difficile; identical to SEQ ID NO: 38102
  source 1..50: mol_type = genomic DNA

SEQ ID NO: 58388 - DNA, 40 bp, Clostridioides difficile
  source 1..40: mol_type = genomic DNA
acatgaggatatggctgctgaacaaaaagcattggctacg

SEQ ID NO: 58389 - DNA, 40 bp, Clostridioides difficile
  source 1..40: mol_type = genomic DNA
acatgaggatatggctgctggacaaaaagcattggctacg

SEQ ID NO: 58390 - DNA, 50 bp, Clostridioides difficile
  source 1..50: mol_type = genomic DNA
aggttgtctgagcagactgcagcaggtggtaggccatggtaagaactgga

SEQ ID NO: 58391 - protein, 517 aa, Anaerobutyricum hallii
MKVAIYCRLSEEDRNKQFETDDSNSIQNQKSMLLQYAMEQGWELYNIYSDDDYTGSDRRRPEFNRLLKDAEQHRFDIILCKTQSRFTRELELVEKYIHGLFPIWGIRFISIVDNADTANKGNKKSRQINGLVNEWYLEDMSENIRSVLTNRRKNGFHIGAFALYGYKKDPNQKGHLIIDEEAAAVVREVFTLFSQGYGKTAIARMLNDRGIPNPTEYKRLHGLRYQQPKTRNSTLWKYFAISDMLINEIYIGNMVQGKYGSVSYKTKQNKPRPKSEWYIVEGTHEPIIDRELWDRVQALIEQRAKPFDVGTIGLFARKARCANCGYTMRSSKNHNKHYLQCSNRHVAKDACIGSFISVDKLEKMVIDELNRLAAEYLDKDELEQNIEFCDNLQGQKKRLLSDLTVYQKKVDEYSKGIRELYMDKVKGLISESDYVDMSKGFTTERDRLERVIADGEKQLTEIEEKIAAGDNRRELIEQYTNLEHLTREIVETLIDYISVGKRIPGTRDVPIEIHWNF

SEQ ID NO: 58392 - DNA, 50 bp, Anaerobutyricum hallii
  source 1..50: mol_type = genomic DNA
agttgttcttatatgattgcagcagatggtacgactgcataagaacaaca

SEQ ID NO: 58393 - DNA, 40 bp, Anaerobutyricum hallii
  source 1..40: mol_type = genomic DNA
gtttgaagatctggcagcagaacagaaggcacgctccacc

SEQ ID NO: 58394 - DNA, 40 bp, Anaerobutyricum hallii
  source 1..40: mol_type = genomic DNA
gtttgaagatctggcagcaggacagaaggcacgctccacc

SEQ ID NO: 58395 - DNA, 50 bp, Anaerobutyricum hallii; identical to SEQ ID NO: 58390
  source 1..50: mol_type = genomic DNA

SEQ ID NO: 58396 - protein, 562 aa, Bifidobacterium crudilactis
MSTLVDDHIKVDSLVSPSEPADGPTAVIYLRVSTKEQAEKGGGEEGYSIPAQRNANLAKADQLGASVVQEFVDAGESARKADRPALMRMIKYVAEHRINYCIVHKVDRLARNRADDVAIHLALRDAGVMLVSASENIDETPSGMLLHGIMSSIAEFYSRNLASETIKGLTQKAAQGGTIGAAPVGYENVGVRNEHGREERTVRIDPERGELVTWAFQVFASGLWTVSEMQRELERRGLTTRPTPKRPARPLSKTTLRRMLRNSYYKGDITYKDVTYRGTHEPLVPREVWYQVQSVLDSHVSAADKSQVHDHYLKGTVYCGQCGSRLIVCHARNHQGSIYPYFVCSGRHSRSTDCTRHAILIEDVERLIEEYYKTIQVSAQVREDVAGMLHAEFDRLMASETKELEQLTRQRDKLEGERFKLLQAHYADAVPLDMLKREQSRIGAALETIDNHIAAHNNEYLEARENLEDSLGLLANIADIYQRCDDLNRKLCNQAFFTRIYIDEDGERRVRAEFQKPFDMLCDPEVQGNALNWAAEAKKKGQAQTGPRMVPLVEGLNLAQVG

SEQ ID NO: 58397 - DNA, 50 bp, Bifidobacterium crudilactis
  source 1..50: mol_type = genomic DNA
aggtttgaatttggcccaagtggggtcacgcatggccctactcttgaacc

SEQ ID NO: 58398 - DNA, 40 bp, Bifidobacterium crudilactis
  source 1..40: mol_type = genomic DNA
tgtagggctttcgaatggggtggctaacgcggctcgaacg

SEQ ID NO: 58399 - DNA, 40 bp, Bifidobacterium crudilactis
  source 1..40: mol_type = genomic DNA
tgtagggctttcgaatgggaaggctaacgcggctcgaacg

SEQ ID NO: 58400 - DNA, 50 bp, Bifidobacterium crudilactis
  source 1..50: mol_type = genomic DNA
aggtttgaagcactccctcgtgggaactctcttgccgctgcttttggggc

SEQ ID NO: 58401 - protein, 545 aa, Bordetella bronchiseptica
MNMLSPTVTARAALYLRVSTARQAEHDISIPDQKRQGEAYCEQRGYQLVETYIEPGATATNDKRPEFQRMIEAGTSKPAPFDIVVVHSFSRFFRDHFEMEFYVRKLAKNGVKLVSITQEMGDDPMHQMMRQIMALFDEYQSKENAKHVLRAMNENARQGFWNGARPPIGYRIVAAEQRGSKTKKKLEIDPLHADTVRLIYRLYLEGDGTSGAMGVKAIATYLNERRFFTRDGGKWGLAQIHAILTRTTYIGEHRFNTRSHKDREKKPESEVAIMAVPPLIEREIYDAVQARLKSRDPLVTPARVSSGPTLLTGICFCAKCGGAMTLRTGRGSAGQTYRYYTCSTKARQGKTGCKGRTIPMDKLDHLVADHIGDRLLQPKRLETVLASVIDRRQERAERRREHLAELHRRITEADQRLGRLFDAIEGGMIDKDDTMAKERMVSLKALRDQAAADAERTQLALDSSGNQGITPNMLKGFASKARERMRLDDGGYHRDHLRALAQRVEVADDEVRIMGSKSELLRTLVAASSVETAAFGVQSSVLKWR

SEQ ID NO: 58402 - DNA, 50 bp, Bordetella bronchiseptica
  source 1..50: mol_type = genomic DNA
gcgttcagagttctgtactgaaatggcgcaccgcgccgggtgatgatgac

SEQ ID NO: 58403 - DNA, 40 bp, Bordetella bronchiseptica
  source 1..40: mol_type = genomic DNA
aaacggcaaccgtaaatgtggcgcgcccggcaggattcga

SEQ ID NO: 58404 - DNA, 40 bp, Bordetella bronchiseptica
  source 1..40: mol_type = genomic DNA
aaacggcaaccgtaaatgtgtcgcgcccggcaggattcga

SEQ ID NO: 58405 - DNA, 50 bp, Bordetella bronchiseptica
  source 1..50: mol_type = genomic DNA
gcattgagaagactcttctgaaacgtcgctcagagctcagggaagctgac

SEQ ID NO: 58406 - protein, 487 aa, Ruminococcus champanellensis
MIALYARQSVDKPDSISISQQLELCRYEARGAPCRCFADRGYSGKNTERPAFGEMMAAVAAGQIRTVIVYKLDRISRSVLDFARMMQQFEQQGVQFISATEKFDTGSPMGRAMLNICIVFAQLERETIQKRVADAYAARSDRGLYMGGPVPFGFRRIPAVLGGVHTSVYVPEPEEAAQLSLIYRLYADPAVSLGEVAARLRAEGMQKRGRDWERARIREVLRNPVYVQADRQVYAFFAARGAQLVNPQSDYIGENGCYCYKSRDASGGEGCLQNRRIVLAPHRGLIPADLWLACQQKNTKAPTVRHGDGSWLSGLLYCGACGSGLTAKQGSRGRYLYCARRLHKGVCSGIGTLEAGALEQAVEQLVLDRLNGLGTLYGETLPDPALTGLEHALTETEQELTALLEKLPQADTALFSYINNRVTGLHLRRAQLEGQLAEQTAKASGQGILPDAALWHGMSPADRRRAAGVLIRRVEADPEQITIYWRL

SEQ ID NO: 58407 - DNA, 50 bp, Ruminococcus champanellensis
  source 1..50: mol_type = genomic DNA
tgtagtttccctgtacggaacggggaagcgttccgcacagagaaactttt

SEQ ID NO: 58408 - DNA, 40 bp, Ruminococcus champanellensis
  source 1..40: mol_type = genomic DNA
gcatttccagcgattcggggaagcgttgcgcatcacacag

SEQ ID NO: 58409 - DNA, 40 bp, Ruminococcus champanellensis; identical to SEQ ID NO: 58408
  source 1..40: mol_type = genomic DNA

SEQ ID NO: 58410 - DNA, 50 bp, Ruminococcus champanellensis
  source 1..50: mol_type = genomic DNA
tttagttttaagggacagatcagggaaggcttcacactggagaaactttt

SEQ ID NO: 58411 - protein, 556 aa, Salinicola tamaricis
MLDCSEPRLQASVMAQAISYIRFSSALQRGGSSTDRQSRMIADWLKAHPDVSLSPISASDEGRSGFSGAHLQHGLGQILAAIEDGKIATGDFILIEAMDRLGRLPPLEMLSLLQRIVGAGVNVVTLEDSQTYSKESLNEKIGDLFILVGKISQAHEYSKNLSRRMKAAYESKRQKAKDGETIKRYTPFWLTSDGKIIEEWKEGIERVVEYYLKGWGPRNIVIELVSKNLIPENTTTQSVRKWLRSKALVGSWDNNGDEIENVVDAVIDRETFYRVQTEIKRREVDHSPRSTFKLSGLIKCKECGSSYYITKKMVKGYPQHSAKCLGREKKGADFCSNQKQLPYVVLLHALESYLPEQLSQLAYDSSLDEELNKISALKSERTAIDDQLNVLLDMLLSMPDQSNLKAKFEQLSASKDEIETKIANLEVSLVDRGASVSINSVVMNANMSIDEILSDDTATRETLKKTNWRIIAFDSKFSVNVGSAGNVDYEIVKRRAKFNALYVTRTVPEHEVFNESTDEYDVIEAETEWLAFVSGELVATAQSEDKVENILGEKNA

SEQ ID NO: 58412 - DNA, 50 bp, Salinicola tamaricis
  source 1..50: mol_type = genomic DNA
gttaacgacacttcacctttcatggtgaagaatgttagactgtagtgaac

SEQ ID NO: 58413 - DNA, 40 bp, Salinicola tamaricis
  source 1..40: mol_type = genomic DNA
ccccacgacctgcatgtaggtcgtgaagtaggtggtaaac

SEQ ID NO: 58414 - DNA, 40 bp, Salinicola tamaricis
  source 1..40: mol_type = genomic DNA
ccccacgacctgcatgtagttcgtgaagtaggtggtaaac

SEQ ID NO: 58415 - DNA, 50 bp, Salinicola tamaricis
  source 1..50: mol_type = genomic DNA
gttcacgacgtctcatcgttcatgttggagagggtaatgacatagttaag

SEQ ID NO: 58416 - protein, 511 aa, Burkholderia pseudomallei; identical to SEQ ID NO: 41196

SEQ ID NO: 58417 - DNA, 50 bp, Burkholderia pseudomallei; identical to SEQ ID NO: 41197
  source 1..50: mol_type = genomic DNA

SEQ ID NO: 58418 - DNA, 40 bp, Burkholderia pseudomallei
  source 1..40: mol_type = genomic DNA
gtcgacgagggccttcgggcacccgagcgaaaccataccc

SEQ ID NO: 58419 - DNA, 40 bp, Burkholderia pseudomallei
  source 1..40: mol_type = genomic DNA
gtcgacgagggccttcgggttcccgagcgaaaccataccc

SEQ ID NO: 58420 - DNA, 50 bp, Burkholderia pseudomallei
  source 1..50: mol_type = genomic DNA
gaatcaattaccttctcctccggtttcccgtaggattttgtacctatgct

SEQ ID NO: 58421 - protein, 511 aa, Burkholderia pseudomallei
MLLDNSLSLRDEGLSAYHQRHVTQGALGVFLRAVEDGRIPAGSVLIVEGLDRLSRAEPIQAQAQLAQIINAGITVVTASDGREYNRARLKAQPMDLVYSLLVMIRAHEESDTKSKRVKAAIRRQCQGWIAGTWRQPVRVGKDPQWIREVANQFELIPERAAAIRLIVAMYKQGHGAVRIVRELSERGLAVSDTGRTSSAHIYKILANRMLIGEKTVELDGEEYRLEGYYPAVISSAEFAELRHFAEQRFRRKGKGEIPGVVTGLGLTYCGYCGTAVTAQNIMGRRRDTEGRPQPGHRRLSCFAYRTGSGCPVSGSVSVAPIERALMHYCSDQINLSRLLEGDSNSAGLSAHLAQTRQRVINIEAQIQRVTDVLLSEVDAPPAAVLRRIRELEAQLQRDRNEISSLEDRLAAESSAMPAVAQAWAELVEGVEELNYDARMQARQLVADTFSRIVVYHRGFTPRANSNTIGLLLVGKRGVTRLIKIDRKTGKWKAAEEIRIRGMVANELPLPS

SEQ ID NO: 58422 - DNA, 50 bp, Burkholderia pseudomallei
  source 1..50: mol_type = genomic DNA
ggtttatttaccctatccttcgggtacccgagggatactatacctatact

SEQ ID NO: 58423 - DNA, 40 bp, Burkholderia pseudomallei
  source 1..40: mol_type = genomic DNA
gtcgacgagggctttcgggcacccgagcgaaaccataccc

SEQ ID NO: 58424 - DNA, 40 bp, Burkholderia pseudomallei
  source 1..40: mol_type = genomic DNA
gtcgacgagggctttcgggttcccgagcgaaaccataccc

SEQ ID NO: 58425 - DNA, 50 bp, Burkholderia pseudomallei; identical to SEQ ID NO: 58420
  source 1..50: mol_type = genomic DNA

SEQ ID NO: 58426 - protein, 505 aa, Streptomyces ipomoeae
MPIGPEYLHLVRPDLAPYDAFLYGRNSHDPKRKTRSVNDQLGDGRALCEQYGWPVKREFKDPGISASRHARRKRDDFEAMLAGIAAGECRIVVAWEASRYYRDLEVYVRLRNACFEAGVLLCYNGQLYDLSKREDRKATAMDAVSAEDEGEGIRDRNLRTTRRVANEGGPHGPAPLGYRHVYDPDTGELLERVADPKTVKLVNDMFQWAEEGEPLAAIARKLNGRGLTTRLGKTWNARTVHMMLRNRAYIGKRVHLGTVREGMWDGIVDEERFANVQAILDARVKGSGHDTSVKHLLSGIPYCSVHEPVTLKHEPTTRGREIYRCDNGDLSIQADAFQAYVEEGVLAWLSSDKAAAAFRSKPKDDKARKARVRLKTLQEQLEEARMKARTLRPDGKGMVLSIDSLSAIEAGLLPQIEKARAEAEEVKVPQLLRDLLSKPRPDIERAWNEQLTLHQRRTVLRLIVTIRLFKARAQGVKRIEPGRVTLSFFGEPGFTPMARPARSRA

SEQ ID NO: 58427 - DNA, 50 bp, Streptomyces ipomoeae
  source 1..50: mol_type = genomic DNA
gtaggggtcaatctgcactcctcctcccaggactaccacttgacccgtat

SEQ ID NO: 58428 - DNA, 40 bp, Streptomyces ipomoeae
  source 1..40: mol_type = genomic DNA
ctcggggtagaagtggtcctcccacacgtgcagcccgtcc

SEQ ID NO: 58429 - DNA, 40 bp, Streptomyces ipomoeae
  source 1..40: mol_type = genomic DNA
ctcggggtagaagtggtcctgccacacgtgcagcccgtcc

SEQ ID NO: 58430 - DNA, 50 bp, Streptomyces ipomoeae
  source 1..50: mol_type = genomic DNA
gccgcgcactgcaaacactcctcgtgccaggacgactcgttgactcgcat

SEQ ID NO: 58431 - protein, 537 aa, Micromonospora noduli
MSGKRTKARGLGVIRLSKHSNRPDDPSTSPERQKHHILDAADKRGIEIVGWAEDLNVSARKIAPWKRPQLGLWLPNLAQETPTGGRSDEFDCLIFWKIDRIARSVGDFAQLIKWAGENDKNLIATDGTVDLSTNYGKAMAQIVAVFAELEADIIKERVNDGRQALRDEGRWGGGRYPYGFIPRQQDSGGWKLEHHPENAEVLREIVRRVIAGESMNAIGRRFDVRGVPTPSGGKLWEQMHLTPILRHRALIGESTYNGEPVRDDLGRIIQACDPLITRTEWDSLQKRLDAVSIPKNRQPGVSMLLRIGFCGRCGFPLWLRRKTIKGVEYRYSGCSGAWCATQKRTCDALGIRADFLEGMIEEMLMSAIGDLEMIEQIDTMGEDRREELAEKSAKLADLLVASAGAPESVKIRLAPDIEALTVRVTELESQPVIEPVRTQVGTGQTYRQLWESSDDKERRRLLVESGIRVEATKLDGTNQGMSVALIERPGREDDAIMIKQERGISVTLFIPHNLAQRATGNPAVKLLWRRSPLPVAV

SEQ ID NO: 58432 - DNA, 50 bp, Micromonospora noduli
  source 1..50: mol_type = genomic DNA
gttccacataatgaccgccaagaccggtcttgtcaactgagatgttcaag

SEQ ID NO: 58433 - DNA, 40 bp, Micromonospora noduli
  source 1..40: mol_type = genomic DNA
gctcgcctgcgggctcgaccgtccgtacccgatgggcaac

SEQ ID NO: 58434 - DNA, 40 bp, Micromonospora noduli
  source 1..40: mol_type = genomic DNA
gctcgcctgcgggctcgaccatccgtacccgatgggcaac

SEQ ID NO: 58435 - DNA, 50 bp, Micromonospora noduli
  source 1..50: mol_type = genomic DNA
gttcctcctcctggcctcaaggcccagtcttggcagggcccatggacaag

SEQ ID NO: 58436 - protein, 534 aa, Mesorhizobium ciceri; identical to SEQ ID NO: 37566

SEQ ID NO: 58437 - DNA, 50 bp, Mesorhizobium ciceri
  source 1..50: mol_type = genomic DNA
cggggtcttttgtccacatcatgagcatgttatggacagaggaccccctc

SEQ ID NO: 58438 - DNA, 40 bp, Mesorhizobium ciceri
  source 1..40: mol_type = genomic DNA
cccggcggaccgatcatcagcatgttgtggccgccggccg

SEQ ID NO: 58439 - DNA, 40 bp, Mesorhizobium ciceri
  source 1..40: mol_type = genomic DNA
cccggcggaccgatcatcagtatgttgtggccgccggccg

SEQ ID NO: 58440 - DNA, 50 bp, Mesorhizobium ciceri
  source 1..50: mol_type = genomic DNA
tggggtatctgtcccaaagcatgagtctgggagggccgggtgaccccctc

SEQ ID NO: 58441 - protein, 478 aa, Christensenellaceae bacterium
MTNQAEKTSYIENVAAYIRVSTQEQKLHGISIEAQEEKLTEYADSHGMKIVKFYKDEGVSGRKLIRKRPALQAMIQDAEKGNFRRIIFIKLDRFFRSVAEYHECMKRLAAGGVIWTATEEKYDLSTPSGEAFVNMKLTMAQFEADQVGERIRMINEYKVKSGQPLYGSQALPFCYQVKQSGDGDRRKYIAKRDEIIMEDLIDHFCKNRSVRAALHYINAKYSRAFSYSTIKNALTSELICGTYRGNPAYCEGYMTPAAFETMQKYIQHNPRTSQREHSYIFGGLIRCPCCGNMLVGSPTVLNRIGKSGQKLSYKYYGYRCYRGNLEKKCDFRTMAFEHRLEAIMLSEVEAVMRGKQMYLLRLQNAPQRVAQHDLAELQQELARLNYAWQKGRIKTAADYDRQYDDLMTRIDAANAERQELAANPDYRKISRILSDGWKQLYISLDNDHKRAFWRAFIEEIQLEWTKGVKRIRDITFFT

SEQ ID NO: 58442 - DNA, 50 bp, Christensenellaceae bacterium
  source 1..50: mol_type = genomic DNA
ttatgcggggtgatgggggagccgaacggctccccaatcaccccgcagca

SEQ ID NO: 58443 - DNA, 40 bp, Christensenellaceae bacterium
  source 1..40: mol_type = genomic DNA
gatggcgtcgagcgcgccgaacggctcatcaagcagcaga

SEQ ID NO: 58444 - DNA, 40 bp, Christensenellaceae bacterium
  source 1..40: mol_type = genomic DNA
gatggcgtcgagcgcgccgctcggctcatcaagcagcaga

SEQ ID NO: 58445 - DNA, 50 bp, Christensenellaceae bacterium
  source 1..50: mol_type = genomic DNA
tgcggcgggcgcggggcggagcccctctgctccggactcgtccctccgca

SEQ ID NO: 58446 - protein, 534 aa, Geobacter sulfurreducens
MAEIADNDRKCALYVRVSTINQAEDGESLDEQVQTLKSYCAYRKWQDCTVYREEGFSGKDLKRPAFQQMVGDIRKGKINTVIVKKIDRLSRSIIDFENVYKSFQDQGVDLISTQENFDTSTAIGRSVIRIVLIFAQLEREQTSERTIDVMAHRAKQGMFNGGYPRLGYDIDYENKCLVPNEDEIPIAKEVFTTYLKLGSLSETAKSLNDRGYRVKTWTTQAGRTRGGDKFQKNNVSRMLNDPVYIGKVRYKSGIYDGQQPAIISEELFEAVQTILQANNISKTGYRQNENTFYLKGLVRCGSCRSSMSPSFSYSKGKKYYYYRCMVNNDHSKDQCRIGSVHARKLEDLVVNELKFLAGDPRIIDGVVENASKEQREKIKALAAKKKVLADRLTQVDKKAKNLLEVLGEGGSQNNRSGYITKELDGLEIQAKQMRKEIEAIEFESNDLENKILSADMIRENFKIFKDVYDHLTHDEKYDLLHLLVKKVVYFEEEGKDKDGKKVGKIKMDLWELPPIDPSILSSAKDFAERHVWLP

SEQ ID NO: 58447 - DNA, 50 bp, Geobacter sulfurreducens
  source 1..50: mol_type = genomic DNA
attttgctgagcgtcacgtttggctccccacgcgggactcccaccgcaat

SEQ ID NO: 58448 - DNA, 40 bp, Geobacter sulfurreducens
  source 1..40: mol_type = genomic DNA
cggccatggttagtatggctccccaacccggactcgaacc

SEQ ID NO: 58449 - DNA, 40 bp, Geobacter sulfurreducens
  source 1..40: mol_type = genomic DNA
cggccatggttagtatggcttcccaacccggactcgaacc

SEQ ID NO: 58450 - DNA, 50 bp, Geobacter sulfurreducens
  source 1..50: mol_type = genomic DNA
tttttgctgcaaatcaggtttttcttctcacgggggcacaccaccaaatc

SEQ ID NO: 58451 - protein, 463 aa, Staphylococcus argenteus
MKVAIYTRVSSAEQANEGYSIHEQKRKLISFCEVNDWNRYEIFSDPGVSGGSMKRPSLQKLFDRLEEFDLVLVYKLDRLTRNVRDLLEMLEVFEKNNIAFKSATEVFDTTSAIGKLFITMVGAMAEWERETIRERSLMGSHAAVRSGKYIRAQPFCYDLIDDKLKPNQHAKYIRFMVDKLMIGKSANEVVRQLESKKKPPGITNWNRKTVLSWIKNPVMRGHTKFGNLLIENTHEPIISEDEYLKLIDIIEKRTYKSKSKHKAIFRGVLECPRCQSKLHLSRSIKKYDSGKTYEVRRYLCDKCHRDNTVKNISFNESEMEREFINTLLKKGTDNFKISVPKKKSYDIEDNKVKINEQRAKYTRSWSLGYIKDEEYFMLMDETENLLKDIEEKAESHADEKLNEEQIRTVKNLLIKGFKIATLEDKEDLITSSVDLIKIEFIPKEFNKNKTLNTVKINEIQFKF

SEQ ID NO: 58452 - DNA, 50 bp, Staphylococcus argenteus
  source 1..50: mol_type = genomic DNA
gatgaatggtatgttacatggtaggtcgtagtagttacaaaacattcacg

SEQ ID NO: 58453 - DNA, 40 bp, Staphylococcus argenteus
  source 1..40: mol_type = genomic DNA
cataaaaggcacgaccaatgttgcacccgtacccccaaat

SEQ ID NO: 58454 - DNA, 40 bp, Staphylococcus argenteus
  source 1..40: mol_type = genomic DNA
cataaaaggcacgaccaatagtgcacccgtacccccaaat

SEQ ID NO: 58455 - DNA, 50 bp, Staphylococcus argenteus
  source 1..50: mol_type = genomic DNA
caagaatggcttaatacaggccagagagtaggagtttttgatcattcagc

SEQ ID NO: 58456 - protein, 538 aa, Pseudomonas chlororaphis
MAKNGARVYSYLRFSDPRQATGSSADRQLQYAQRWAAEKGLVLDESLSLRDEGLSAYHQRHVKQGALGVFLQAVEDGRIADGSVLVVEGLDRLSRAEPIQAQAQLAQIINAGITVVTASDGREYNRAGLKAQPMDLVYSLLVMIRAHEESDTKSKRVKAAIRRQCEGWIAGTYRGVIRNGKDPQWLRWDGQEFRLIPERAEGVRFVIELFRRGYGSVRIIREMAQRGLALTDKGVTALQVHRLARLPALMGVKVLELEGESYRLDGYYPPILTADEFAELSALVDGRVKRKGRGEIPGLVTGLGISYCGYCGTAVVGQNMMFKARPDGSLADGHRRLICVGYSHNEGCPVGGSCSVVPIEKALMSYCTDRMNLSGLLEGSDQTQAIQARLAKAKAEVVLIEQQLERVSEALLAAEGGAAPLIFVRKARELEEQHADKRKEVAQAERELVAISSHDQPGLAEAWAQLASGVESLDYDARMRVRQLVRDTFERIVVYHHGMQASGREGKVIDLLLVGKGGQPRLLRIDRKTGDWQLGFGA

SEQ ID NO: 58457 - DNA, 50 bp, Pseudomonas chlororaphis
  source 1..50: mol_type = genomic DNA
cgtgtattttgattatctttcgggcaccctaacgatatcatacctacacg

SEQ ID NO: 58458 - DNA, 40 bp, Pseudomonas chlororaphis
  source 1..40: mol_type = genomic DNA
atcgaccagcgctttcgggcaacccagggaaacgaagccg

SEQ ID NO: 58459 - DNA, 40 bp, Pseudomonas chlororaphis
  source 1..40: mol_type = genomic DNA
atcgaccagcgctttcgggaaacccagggaaacgaagccg

SEQ ID NO: 58460 - DNA, 50 bp, Pseudomonas chlororaphis
  source 1..50: mol_type = genomic DNA
cgtttattttttatatctttgggtaaaggtaacattccattacctacgag

SEQ ID NO: 58461 - protein, 478 aa, Kocuria palustris
MVELVALRKTNEVAAYVRASMDRKGDRWTVDTQLRKIRALAEAKDWNVVEVYEDNAVSATKKRRAGTRWAEMLDDARAGRFSMVVAVDMDRLLRSTKDLNTLIDLGLRVVTVDGEIDLSTADGEFRATMLAALARFEARRKAERQIRSNERRRFEGIPTSAWKAFGWTREGELIPEEADAVRRAFAAFLGEPSLSIRRIREDLNGAGHLTARGSEFSVDAVRYLLANPLYAGYIKHYASGELYPVQGDAFPPIVGEQTWRAAVAKLEDNVRRSARQGNQPKYLLSTIGLCGKCGATLVSGTNSRKQPTYRCGEQFHLTRQREPVDAMVAEAVLTRLSSVDVHNLVMPQEDDGPDHEELLTERNALVERVKELSPLLRDIHQPVLEITAAINDVKARIDEIDAELLDRSVSVAAKLLADVDEPVGTAERREVVEAKWKTLDVDRRRMLVDELVTVTIEPIAPGHVKFDPDLIRIEPRRD

SEQ ID NO: 58462 - DNA, 50 bp, Kocuria palustris
  source 1..50: mol_type = genomic DNA
aacgagagccataacacgaacatgcgctagagcatgtcgcggttgtgaca

SEQ ID NO: 58463 - DNA, 40 bp, Kocuria palustris
  source 1..40: mol_type = genomic DNA
caccggcgtcatcgacatgcgctacgagaaccccctctac

SEQ ID NO: 58464 - DNA, 40 bp, Kocuria palustris
  source 1..40: mol_type = genomic DNA
caccggcgtcatcgacatgaactacgagaaccccctctac

SEQ ID NO: 58465 - DNA, 50 bp, Kocuria palustris
  source 1..50: mol_type = genomic DNA
aacaagaacagggacaagaacaagaacaagaacacgaactagtagttaga

SEQ ID NO: 58466 - protein, 577 aa, Burkholderia multivorans
MSNTQATKPVAYSYIRFSTAQQALGDSLRRQVESTEQYCEEHGLALARASAYRDLGVSAFRKKNIEAGKLAEFIRAVKSGKVSPGSYLIIEQFDRLSRAEVNVALRLFLDLVDAGIVVVTLADKKVWNKDSVADVGDLITAIIYMSRANDESERKSDRLSAVWEQKKKRAADGTATRIVTSEAPRWLRANADKTGFDVVPELADSVRRVFEMRINGAGVVAICRRANQERWPLPGKMPVKKLGESDEDFAERRQASGQWHQSLVARILKNRAVLGEYQPRRLDTDGTGERVPVGEPIQRYYPSIIDETTFLRAQATALRRGIRPGRRDPHARNWLYGLVKCGACGNSLVRKNKTSTKQPGYSRYYCVARVRGSTKCPSVNSAQLEGLVSYVAASWLPANWSADASIDMLKAQADALELEIAALKKNIDGLADLAGGVTTASAKKSLIERLDAEGDALDAKEKELAHIRAKLADRTFFGGDDDVHERLQQISREIDAIASGREGLDGALRLREELARIFQKVTVHQAEGYIELFIKGRAEPVWLPLDFVSLEPPSEPSAEQLEAAERDIDALRQAMGD

SEQ ID NO: 58467 - DNA, 50 bp, Burkholderia multivorans
  source 1..50: mol_type = genomic DNA
tggtgcaattaattctcgacattcgacatcgtggatatataattgcaccc

SEQ ID NO: 58468 - DNA, 40 bp, Burkholderia multivorans
  source 1..40: mol_type = genomic DNA
atcgggcaggccgacgatcgagaacgacggcaacccgttg

SEQ ID NO: 58469 - DNA, 40 bp, Burkholderia multivorans
  source 1..40: mol_type = genomic DNA
atcgggcaggccgacgatcaggaacgacggcaacccgttg

SEQ ID NO: 58470 - DNA, 50 bp, Burkholderia multivorans
  source 1..50: mol_type = genomic DNA
tggtgcaagcaatcctccaaactcagcctcctgagtacagcagtgcacca

SEQ ID NO: 58471 - protein, 487 aa, Corynebacterium glutamicum; identical to SEQ ID NO: 29436

SEQ ID NO: 58472 - DNA, 50 bp, Corynebacterium glutamicum
  source 1..50: mol_type = genomic DNA
cgtacccacttcccgtgttctgttaataacgaatgtggtttgtgggtacg

SEQ ID NO: 58473 - DNA, 40 bp, Corynebacterium glutamicum
  source 1..40: mol_type = genomic DNA
cggcgctactggtagcggaaaatccgaacttttaagaaca

SEQ ID NO: 58474 - DNA, 40 bp, Corynebacterium glutamicum
  source 1..40: mol_type = genomic DNA
cggcgctactggtagcggaatatccgaacttttaagaaca

SEQ ID NO: 58475 - DNA, 50 bp, Corynebacterium glutamicum; identical to SEQ ID NO: 29440
  source 1..50: mol_type = genomic DNA

SEQ ID NO: 58476 - protein, 487 aa, Corynebacterium glutamicum
MTLRAAIYARISLDRKDEAGVKRQAHLATKLAEAEEATIVAEYTDNNASAFSGAYRPEYENLLKSIEAGELDVVYVYALDRLTRRTKDTLALFELCEKHNVRIKATQGYSIDPSDPSSRIIIVILGLIAEQESIDRAARIRASYVDRARVGRPKTGGRRMLGYEADAETIIETEAQAIRDAAVMILAGKTLRETVREIFKARGITATSGRDMTAPTLRDILLNPRVQGISTFNPTDPVTGYRLIRDRQIIGPGQWPAIIDEATGEKLDAVLRDPSRRRSHAGNAPTRYLASVLTCTCGDPMYSRTRAREDGSRKRYYACGRGIPGGTHVTIGDEVDSLIERVIIGRMSKPDGLELLQQSLSTNKDSTETEELQELVSQRNALLARLELLEDSLVDGEIGVDAFTRLEKKIAEQLTGIDDRLQNLTSARSADPLAAELVGVTDFALWWENASVEDKRRLTRILMDIHILPGTHGAKKFDPNRVQVTWH

SEQ ID NO: 58477 - DNA, 50 bp, Corynebacterium glutamicum; identical to SEQ ID NO: 58472
  source 1..50: mol_type = genomic DNA

SEQ ID NO: 58478 - DNA, 40 bp, Corynebacterium glutamicum; identical to SEQ ID NO: 58473
  source 1..40: mol_type = genomic DNA

SEQ ID NO: 58479 - DNA, 40 bp, Corynebacterium glutamicum; identical to SEQ ID NO: 58474
  source 1..40: mol_type = genomic DNA

SEQ ID NO: 58480 - DNA, 50 bp, Corynebacterium glutamicum; identical to SEQ ID NO: 29440
  source 1..50: mol_type = genomic DNA

SEQ ID NO: 58481 - protein, 495 aa, Coprococcus comes
MSLKYAYGYIRVSTHDQEEISPDSQEHLLRDYAAKNNIVILKIFTDLGISGRKADKRPGFQEMIGLAKGPDHPVDCILVWKFSRFARNQEESIVYKSLLKKQHNVDVISISEPLADGPFGSLIERIIEWMDEYYSIRLSGEVFRGMKENATRGAYQARPPLGYKVIERGKPPVIVPEEAAIVRMIFDKYVNGKMSFFDIARHLNSLGLKTSHGKAFERRSIEYIIQNPSYCGMIRWNRMENATNRIKDQDEWIIADGMQEAIISKELFDAAQERLKKIYKPVGKRPSSTYKHWLSGLLKCPVCGRTLTATTMKRANGEKYAYFSCYGYSKGKCDKPHGVSSLVIEKEVLKALEEALGSNSIVYEMREIRPQELSNERTLINERLVSLKGKEDRIRASYREGIDTLEEYKENKALIAKERDSLERQLAELEENTPDKILDDPTPKMLDRVSSVHDILVSDSYSLVQKNEALKQIIDKIVYDRESDTLKIHFFLYHS

SEQ ID NO: 58482 - DNA, 50 bp, Coprococcus comes
  source 1..50: mol_type = genomic DNA
ctttataggttgtgacaatttggtcaaccattttgtcacaaccgataaag

SEQ ID NO: 58483 - DNA, 40 bp, Coprococcus comes; identical to SEQ ID NO: 29453
  source 1..40: mol_type = genomic DNA

SEQ ID NO: 58484 - DNA, 40 bp, Coprococcus comes; identical to SEQ ID NO: 29454
  source 1..40: mol_type = genomic DNA

SEQ ID NO: 58485 - DNA, 50 bp, Coprococcus comes; identical to SEQ ID NO: 29455
  source 1..50: mol_type = genomic DNA

SEQ ID NO: 58486 - protein, 525 aa, Pseudomonas aeruginosa
MPSAFSYVRFSSGKQAKGSSEQRQRSMLGQWLEQHPSFTLSDLRFEDLGRSGFSGEHLDHGLGQLLAAIDSGAIQSGDVILVEAVDRIGRLEPLEMLPLFSRIVRAGVSVITLEDGHIYSKDSVNETSLFLLVAKVQQAHDYSNRLSRRINASYTARREKARAGLGVKRETPVWLTTDGQLVPHVAPHIAQAFQDYADGLGERRICRKLRESGLEEFSKTNATTVRRWLKNRTAIGYWNDIPDVYPHVVDPALFYRVQQRLDAPKVDRAKPSAHYLTGLVKCAVCGRNYNFKQRKHTDPAMLCTSRARLAGEGCTNSKTYPVIVLDQVRKLTSLPFLQHAMENASSQADPSSQRLAVIDGEIGELSRKISEATKALLVLGFTPEIQESLEQLKTAREALEEERATLLLPQAEKLTAAQLEAFSNGLLDDEPMKLNHVLQTAGYSMVVHPDGSIDVDGKRFVYEGASRKEKVYKLRLLGEDKQWSLPILTPARAESLAKSVAGGYLPPDTPEDVARYFEKVKHLVR

SEQ ID NO: 58487 - DNA, 50 bp, Pseudomonas aeruginosa
  source 1..50: mol_type = genomic DNA
cgtgtccatcttgagtcttctttctcgaaggacgatacgaaatagacaca

SEQ ID NO: 58488 - DNA, 40 bp, Pseudomonas aeruginosa; identical to SEQ ID NO: 20278
  source 1..40: mol_type = genomic DNA

SEQ ID NO: 58489 - DNA, 40 bp, Pseudomonas aeruginosa; identical to SEQ ID NO: 20279
  source 1..40: mol_type = genomic DNA

SEQ ID NO: 58490 - DNA, 50 bp, Pseudomonas aeruginosa
  source 1..50: mol_type = genomic DNA
cctggccatgactggtgttcttataagaagaagggccacacagagacaca

SEQ ID NO: 58491 - protein, 587 aa, Streptococcus pyogenes
MKKDVKVIKGDTTLKRTASGCVERSIKRVAAYCRVSTDTEDQINSYNSQVEHYTEFIQKNNEWTLAGIYADEAITGTQVDRRIDFQRLINDCMNGDIDMIITKSISRFARNTLDTLKYVRKLKEFNVAVFFEEENINTLTMDGELLLTILSSVAQQEVENISANVKKGLRMKMERGEMVGFQGCLGYDYDPETKSISINEKEAEIVRYIFRRYIEGVGGMVISRELEEQGYLSPRGNKRWTETTVLGIIKNEKYKGDLMMGKTYTVDPISKRRLDNYGEQDKFYIENHHEPIISEEDFEKAQGIRLRRSKNRNTVANNGGKREKYSRKYAFSSMLECGFCGHNLSRRNWHSSSEYTKVIWQCVNATKNGKKYCPHSKGIEEEAIEKAFMESYRQVCHNNVEITNEFLKTVEEELKDNSLAKDLKKITNQLDKILKKEKDLVELRLNESISMDIYQDKYNEITVSKEKLLAEKRTLEVTLTDEKALKKRLEGFKKLLESNKYLEEFDRAVFESIVDKIIIGGTNDEGEIDPAMITIIYKTGKKDSQDGRLFKSRRKNAKEVNEGNDNKLYPQSSDEVNNLSSYPMDNT

SEQ ID NO: 58492 - DNA, 50 bp, Streptococcus pyogenes
  source 1..50: mol_type = genomic DNA
gagttcctatcctatggacaacacatgtggagtgcatagcgttgatacaa

SEQ ID NO: 58493 - DNA, 40 bp, Streptococcus pyogenes; identical to SEQ ID NO: 23708
  source 1..40: mol_type = genomic DNA

SEQ ID NO: 58494 - DNA, 40 bp, Streptococcus pyogenes
  source 1..40: mol_type = genomic DNA
ttgtttccgcaaacgcatctagtcgagtgcgtagtgttgc

SEQ ID NO: 58495 - DNA, 50 bp, Streptococcus pyogenes
  source 1..50: mol_type = genomic DNA
gactatacaaagaatgaacaaaactagagaagtgcaggcgtttgatacca

SEQ ID NO: 58496 - protein, 451 aa, Pseudoleptotrichia goodfellowii
MKAIVYARVSTEMQEEGRSLEFQIQKCKEFCEYNNYKLKEIIQDVESGGNDNREGFLKLQQEIKKKSFDVLVVYESSRISRITLTMLNFVLELQKSDIKFVSISQSEINTTTPTGMLFFQIFAVLADYERKQISMRVKSNKWARAKAGIWQGGTIPIGYKKDGNGNIVVDIDTSEDVISIFNTYLETKSLSETAKIFNRHISSIKWILQNEFYIGNLMYGKKENNINTGIVKINKEAKIFKGNHPAIIDKEVFEEVQRQMLFKQRVIKKDNKFLFTGIIECSCGGKMFKNGPNYRCDKCRKSIAQRKAEDFIINKLLSLKELEFLNEKPNLDKYISDKENFKAQCQKLDKERNKYIELYSKELITESELKTKLEELKTRKEFFETSLQDVERIINEKTISEKELDNIKILKEVLENMDDTDRYDLFTMFRLLIKKIKIKKYQPIEILIILN

SEQ ID NO: 58497 - DNA, 50 bp, Pseudoleptotrichia goodfellowii
  source 1..50: mol_type = genomic DNA
tgtgtggggctttttggtgcgagagtgcatactctacttaacaccacaat

SEQ ID NO: 58498 - DNA, 40 bp, Pseudoleptotrichia goodfellowii
  source 1..40: mol_type = genomic DNA
ttaaataaatggtgcgagaggagggactcgaaccctcatg

SEQ ID NO: 58499 - DNA, 40 bp, Pseudoleptotrichia goodfellowii
  source 1..40: mol_type = genomic DNA
ttaaataaatggtgcgagaccagggactcgaaccctcatg

SEQ ID NO: 58500 - DNA, 50 bp, Pseudoleptotrichia goodfellowii
  source 1..50: mol_type = genomic DNA
agtctggggcattaaggggctggacctcagtctctagtccccaccccaat

SEQ ID NO: 58501 - protein, 547 aa, Mycobacteroides abscessus
MMKEVKKKRALICIRLSRVTDATTSPERQRQACEELCKARDYDVVGIAEDLDISAGKTSPFDRPQLGQWLRDPTRYDVIVFMRVDRFVRRLFDLADAIRWSQDHGVTLVSATESHFDLSTKLGGVVALLVASIAEMELDAISERNSSAFKHNFTLGKWRGGQAPWGYVPEKIDGEWRLVQDPAQVEAIHEVVAKVLEGQPLRAVAHELTTRGIPTPRDSFAMHQGREVKGYAWHPSRLKAFLTSQTLLGRVVMREQLKDSQGRPQRDAKGRKIFGDDVLVTNDDGSPVVRAEPILTMSVFKRLCAELEGRENRKEPTKRSTGLLLRIIYCGVCGQAAYRLKGGAGRKPRYRCASAQGSSVHQCDNRTISLEWADGEVERQILETMGPLERKRRIWFSGNDHTDELTEVNDMLEDLVDQLGTGVFKRGTPQRERLDQRIAVLTARQTELSASPRVEPGWVYEGTGETLADWWADASDQDKNIWLRQYGFRYEWVSHSGDNGRIVVDEFKQVGDLTMDLDADTLLGPVWDIVSAMSDPANIEAYNALPD

SEQ ID NO: 58502 - DNA, 50 bp, Mycobacteroides abscessus
  source 1..50: mol_type = genomic DNA
ggggtgtaaagcgcaacattcgattacgcgattgatcgagtttcataccc

SEQ ID NO: 58503 - DNA, 40 bp, Mycobacteroides abscessus
  source 1..40: mol_type = genomic DNA
tggcatgtccacggtcgaatacgcgatcgggactatcgcg

SEQ ID NO: 58504 - DNA, 40 bp, Mycobacteroides abscessus
  source 1..40: mol_type = genomic DNA
tggcatgtccacggtcgaacacgcgatcgggactatcgcg

SEQ ID NO: 58505 - DNA, 50 bp, Mycobacteroides abscessus
  source 1..50: mol_type = genomic DNA
tgggtgtatgagaaaacatttgatcaggagattgatatctatcaaaaact

SEQ ID NO: 58506 - protein, 499 aa, Paenibacillus polymyxa
MIGIYPRVSTDEQARTGFSIDFQIREGKKKAGTDDVKIYSDEGYSGEFLERPGLTQLRKDVKAGIITKVICLDPDRLARKLMLQLIITDEFERSGAELIFINGDYAKTPEGQLFYSMRGAIAEFEKAKINERMSRGRKEKANQGKVVKNNFTYGYDFDKQNNANVINEYEARVVQLIFNLFTQPNEIAEGINGIAVYLTGQKIPTKRGAKVWHKQVVRQILMNETYTGRFAQNKWDTEGMLGNKHKPKEEKKPIKLRPKEEWIWVDCPQIITEFQFEQAQKLLGEARRRFAKSGNRKYLLSGLVRCGLCENTMTGRRQKNWNTYKLEYSDVKNTAGAKNKGCGMKIACETIDTIVWDRVHTWLSQPEEIAAASMEETQDSFADQELERIENDLEKMKAARKRLIKLFSSDIGMGEEEIREELKELAEREEGLKQRHAELTAEADNIQNFESSRNLLKETLEYYLTLNPDELTFEDKQNLIRRVVREVRVTKDEVNIITF

SEQ ID NO: 58507 - DNA, 50 bp, Paenibacillus polymyxa
  source 1..50: mol_type = genomic DNA
agcacccctattgtcatggggatagagatcttaattactatagaggtgaa

SEQ ID NO: 58508 - DNA, 40 bp, Paenibacillus polymyxa
  source 1..40: mol_type = genomic DNA
agcccgttgtatagaaaatgaaatcctgatgcatttgcga

SEQ ID NO: 58509 - DNA, 40 bp, Paenibacillus polymyxa
  source 1..40: mol_type = genomic DNA
agcccgttgtatagaaaattaaatcctgatgcatttgcga

SEQ ID NO: 58510 - DNA, 50 bp, Paenibacillus polymyxa
  source 1..50: mol_type = genomic DNA
aaaaagcctaggatcagggggatttagagctgaattctaccagaggtaca

SEQ ID NO: 58511 - protein, 521 aa, Klebsiella oxytoca
MPKAISYIRFSTKIQSVGDSTKRQSKYINDWLKRNPDYYLDESLRFQDLGISGFSGANAKSGAFGEFLAAVESGYIEAGSVLLVESLDRVSRQDIDTAGEQLRKILRAGVEVVTLVDNEWYTKESLKDSLSMIKAMLVMERAHEESAMKSTRLRSMWAGKRERAANGEIMSKRCAAWLKVSEDRSHFEFIPENVKAVQRVFQLRLEGLSHVKIAKQMNDEGFSTLNQFKPVKGGWSQSSVTELLSNRSVIGFKVPSKSMAVKGVSEIPNYYPSIITDEQFYAVQQLKQGSGRKPSSDLPLLTNLFKGVLRCSECGFIVVVAGVSAKRSGIYKCSMKSEGRCNSVGFSRLQTDRALVQGLLYNTNRLSLNRDNGSAIGSLQSELEQLQKQRERLIKLAMLADDTESMAKDLKALNRQIKDAEKAVSEVHQREQSSQLETISHLDLTVKKDRIEAQIIIKRIVKEIRLNTAGKKCDVFLHNGLKLLNFPLDRIVDGEIFLEVLPVLEADEFDFDTYRVVEQAP

SEQ ID NO: 58512 - DNA, 50 bp, Klebsiella oxytoca
  source 1..50: mol_type = genomic DNA
gtgtatcaatagaaaggtctcttcaggaatacccctttcttatgatacac

SEQ ID NO: 58513 - DNA, 40 bp, Klebsiella oxytoca
  source 1..40: mol_type = genomic DNA
gtgaaccgggcggctatcgaggataacgcgattgacgttt

SEQ ID NO: 58514 - DNA, 40 bp, Klebsiella oxytoca
  source 1..40: mol_type = genomic DNA
gtgaaccgggcggctatcgttgataacgcgattgacgttt

SEQ ID NO: 58515 - DNA, 50 bp, Klebsiella oxytoca
  source 1..50: mol_type = genomic DNA
atttaccaacaaataggtctactcttggattcccccacttacttatacac

SEQ ID NO: 58516 - protein, 533 aa, Mesorhizobium opportunistum
MLWTEDPHSCKAQPMTKHAPRAPLTNRPKAYSYVRFSTPEQERGDSLRRQTEGAARYAALHGLDLDDKLTFRDLGVSAFKGANEETGRLGEFLAAVEYQDIKAGSYLLVESLDRLSRQKPRKAVKVLERICEAGITVVTLDDGRVYTEAVLDDDPTALMVALLVAARANEESAKKGRRVGEAWANKRRNAATKPLSALCPGWLRLREDETGFDLVPERAEVVRRVFDMTLAGRGQHAIAEAFNREGVPMFGRGSHWHRSYIKKMLADASTIGAFTPHRVETVGGKKRRIPTETVEGYFPAVVDHEVFERVNALSSGRSVREGSSAMANILAGLAKCPKCGATMTRVNKGGKKGGRPYLVCTTAKAGAGCEYRQVRIEDVEAAIIDKAGWLNASLPATEGALQMELEGANNLDMAVSDEIENVVAAIGQTGHSPALLDRLRQNEAAREDIRRTIAGLERRIADTLTNRVQVTAAQFVDATEAEEPRNVALINATLRQLFSKVEVDWPSGHLVFHWKHAPGETTGVMYAWPREDG

SEQ ID NO: 58517 - DNA, 50 bp, Mesorhizobium opportunistum
  source 1..50: mol_type = genomic DNA
cgagggtcttttgtacacagcatgaacatgttatggacagaggaccctca

SEQ ID NO: 58518 - DNA, 40 bp, Mesorhizobium opportunistum
  source 1..40: mol_type = genomic DNA
gccgggaggcccgaccatcaacagattgtggccgccggcc

SEQ ID NO: 58519 - DNA, 40 bp, Mesorhizobium opportunistum
  source 1..40: mol_type = genomic DNA
gccgggaggcccgaccatctgcagattgtggccgccggcc

SEQ ID NO: 58520 - DNA, 50 bp, Mesorhizobium opportunistum
  source 1..50: mol_type = genomic DNA
tgaagttctcagagacacagcgagtgcaggttatgatctgatggccatca

SEQ ID NO: 58521 - protein, 560 aa, Enterocloster aldenensis
MARRSRTITDTKKQEFRVWRIAIYIRLSKEDARNNDESESVSNQRAIIEEHIASFNDGDEYIIVDEYVDDGISGTTDDERDDFQRMLGDIKKGRINCVIVKDLARSFRNYSDQGYYLDDWFPRFNVRFISLYHQSLDSYKEPQNMRSIAVPIQGVLNENHCAETSDKIREVFDMKRRNGEHIGSFAAYGYIKDPNHKNALIVDEEAAEVVRDIFAKFLDGMSKNAIVQYLNEHGVLSPAAYKRERLGLKYQNPGIDPAKRPLWGAVTITTILKNRMYCGDMVQGRYRVKSYKIHVQEVVPEDEWYIVENTHEAIIDRDTFDKVQRLLLRDTRTAPQKKQIYLFSGFLRCADCGKAMTRSKVGGTVYYYCRTYKNQSKSACTKHTIKHNRLEVAVLYAIQQQVYLAVDYTKTIERINRAPLVKSQSKKLADAIKQKERELAKIARYKQAIYQDWKDGEITHSDYRHMKEDYGEQAEALNKVIEKLRAEQAELENGIDTENPFLKAFRQYGNIEKLTRDVLIELVDHIKVYEGGNISIVFRFADELRRIQEFIEVNNPSEAV

SEQ ID NO: 58522 - DNA, 50 bp, Enterocloster aldenensis
  source 1..50: mol_type = genomic DNA
cgctttccttataaaaatggcccggtagcgccgttgttaaaaggaaaatg

SEQ ID NO: 58523 - DNA, 40 bp, Enterocloster aldenensis
  source 1..40: mol_type = genomic DNA
catgggtccggcaggcccggtaggtcccatgggtccggtt

SEQ ID NO: 58524 - DNA, 40 bp, Enterocloster aldenensis
  source 1..40: mol_type = genomic DNA
catgggtccggcaggcccggcaggtcccatgggtccggtt

SEQ ID NO: 58525 - DNA, 50 bp, Enterocloster aldenensis
  source 1..50: mol_type = genomic DNA
agctttccttcataaaatagcacagcattgcagttttatggaggaagttg

SEQ ID NO: 58526 - protein, 560 aa, Enterocloster aldenensis
MARRSRTITDTIKQEFRVWRIAIYIRLSKEDARNNEESESVSNQRAIIEEHIASFNDGDEYIIVDEYVDDGISGTTDDERDDFQRMLGDIKKGRINCVIVKDLARSFRNYSDQGYYLDDWFPRFNVRFISLYHQPLDSYKEPQNMRSIAVPIQGVLNENHCAETSDKIREVFDMKRRNGEHIGSFAAYGYIKDPNHKNALIVDEEAAEVVRDIFAKFLDGMSKNAIVQYLNEHGVLSPAAYKRERLGLKYQNPGIDPAKRPLWGAVTITTILKNRMYCGDMVQGRYRVKSYKIHVQEVVPEDEWYIVENTHEAIIDRDTFDKVQRLLLRDTRTAPQKKQIYLFSGFLRCADCGKAMTRSKVGGTVYYYCRTYKNQSKSACTKHTIKHNRLEVAVLYAIQQQVYLAVDYTKTIERINRAPLVKSQSKKLADAIKQKERELAKIARYKQAIYQDWKDGEITHSDYRHMKEDYGEQAEALNKVIEKLRAEQAELENGIDTENPFLKAFRQYGNIEKLTRDVLIELVDHIKVYEGGNISIVFRFADELRRIQEFIEVNNPSEAV

SEQ ID NO: 58527 - DNA, 50 bp, Enterocloster aldenensis; identical to SEQ ID NO: 58522
  source 1..50: mol_type = genomic DNA

SEQ ID NO: 58528 - DNA, 40 bp, Enterocloster aldenensis; identical to SEQ ID NO: 58523
  source 1..40: mol_type = genomic DNA

SEQ ID NO: 58529 - DNA, 40 bp, Enterocloster aldenensis; identical to SEQ ID NO: 58524
  source 1..40: mol_type = genomic DNA

SEQ ID NO: 58530 - DNA, 50 bp, Enterocloster aldenensis; identical to SEQ ID NO: 58525
  source 1..50: mol_type = genomic DNA

SEQ ID NO: 58531 - protein, 584 aa, Pseudomonas syringae
MPTAYAYIRYSSKAQGEAGRDSVDRQMASIQAITKQQGIELPPENIYSDTGISAHDGSNKRKGKLKELIDMISDMHIKEGDYIFVESIDRLSRQRLLQAKELVNGILEKGVILITTIDGQRYEKPNETNRIDDLQQDILLSVIAKRAYEESKTKSVRRKSAWNRAKKLAEEEKVIFNAHNPPYGIRYNKELNCFEIEEEEAQEIRDFFESLKYVGVSLSIKKLNAYSKRKWSSRNIKHLIDTKYVLGAYMAQRRDENKKKVFERYIENYYPQIVSYELFNEAIAAMKNRAQRKNYGNQSVGSLNIFRHSIKCDCCEASMMFEKQTNPKGVVYPYFQCYTRKELKNGCDQPRFRFDLAFGLFLELIYQSTTNEDFDVHPWQNEDPNPERQHEWITRESGMIYRLPTQDDIDEEERVENFRELLIKLLSNRESQTKDNKKIVELNNLLLEQKSYRDNLMKSFAGFTSGVIPKEFLEVVSKTEANINDIEQNLAELQTQINIKKTTINIYSENDIIDLYKTEDGRLKINQFFVANDITFKFNFEKTTRTLFAKIFQNGFEIDRIAKQFSLHNPLKEFGINNLNEYFN

SEQ ID NO: 58532 - DNA, 50 bp, Pseudomonas syringae
  source 1..50: mol_type = genomic DNA
gtgtggaataaccccctaccattcgagactggtaggtggtattctcacac

SEQ ID NO: 58533 - DNA, 40 bp, Pseudomonas syringae
  source 1..40: mol_type = genomic DNA
ggttctacgtgagccgctggagtcggggcatatcgtgatt

SEQ ID NO: 58534 - DNA, 40 bp, Pseudomonas syringae
  source 1..40: mol_type = genomic DNA
ggttctacgtgagccgctgaggtcggggcatatcgtgatt

SEQ ID NO: 58535 - DNA, 50 bp, Pseudomonas syringae; identical to SEQ ID NO: 29590
  source 1..50: mol_type = genomic DNA

SEQ ID NO: 58536 - protein, 584 aa, Pseudomonas aeruginosa
MPTAYAYIRYSSKAQGEAGRDSVDRQMASIQAITKQQGIELPPENIYSDTGISAHDGSNKRKGKLKELIDMISDMHIKEGDYIFVESIDRLSRQRLLQAKELVNGILEKGVILITTIDGQRYEKPNETNRIDDLQQDILLSVIAKRAYEESKTKSVRRKSAWNRAKKLAEEEKVIFNAHNPPYGIRYNTELNCFEIEEEEAQEIRDFFESLKYVGVSLSIKKLNAYSKRKWSSRNIKHLIDTKYVLGAYMAQRRDENKKKVFERYIENYYPQIVSYELFNEAIAAMKNRAQRKNYGNQSVGSLNIFRHSIKCEYCQASMLFEKQTNPKGIVYPYFQCYTRKELKNGCDQPRFRFDLAFGLFLELIYQSTTGEDFDVHPWQNEIENTEIQYEWITRESGMRYRLPTQEDIDEEERVENFKELLIKLLSNRENQTKDNKKIVELNNLLLEQKSYRENLMKSFAGFTSGVIPKEFLEVVSKTEASINDIEQNLAELQTQINIKKTTINIYSENDIIDLYKTEDGRLKINQFFVANDITFKFNFDKTTRTLFAKIFQNGFEIDRIAKQFSLHNPLKEFGINNLNQYFN

SEQ ID NO: 58537 - DNA, 50 bp, Pseudomonas aeruginosa
  source 1..50: mol_type = genomic DNA
gtgtggaataaccccctaccattcgagagcggtagctgctattctcacac

SEQ ID NO: 58538 - DNA, 40 bp, Pseudomonas aeruginosa; identical to SEQ ID NO: 22678
  source 1..40: mol_type = genomic DNA

SEQ ID NO: 58539 - DNA, 40 bp, Pseudomonas aeruginosa
  source 1..40: mol_type = genomic DNA
ggtcctgcgcgagccgctgagaagcggcgagatcgtcatt

SEQ ID NO: 58540 - DNA, 50 bp, Pseudomonas aeruginosa; identical to SEQ ID NO: 29590
  source 1..50: mol_type = genomic DNA

SEQ ID NO: 58541 - protein, 458 aa, Staphylococcus epidermidis
MNYERSYLRSCQVSTLEQKEHGYSIEEQERKLKSFCEINDWSISDVFIDAGFSGAKRERPELQRMMKDIKRFDLVLVYKLDRLTRNVRDLLDLLEIFEQNNVAFRSATEVYDTSTAMGRLFVTLVGAMAEWERETIRERVMMGKRAAIKQGMILTPPPFYYDRVDNTYVPNNYKKVVLWAYDEVLKGVSSKGIARKLNDSDIPPPNGKRWEDRTITRALRSPITRGHYTWGDVFIENSHEPIITEEMYQQIKERLEERINTKIVSHVSVFRGKFICPKCGGTLTMNTATRKRKKGYVTYKTYYCNTCKAKKQSFGFSENEALRVFRDYLSKLDLDKYEVKTKQKDDVVTIDIDKVMEQRKRYHKLYAKGLMQEEELFELIKETDETIAEYEKQKELVPRKILDIDKIKKFKNALLESWKIFSLEDKADFIKMAIKSIDIEYVKLKNRHSIKINDIEFY

SEQ ID NO: 58542 - DNA, 50 bp, Staphylococcus epidermidis; identical to SEQ ID NO: 51602
  source 1..50: mol_type = genomic DNA

SEQ ID NO: 58543 - DNA, 40 bp, Staphylococcus epidermidis; identical to SEQ ID NO: 52823
  source 1..40: mol_type = genomic DNA

SEQ ID NO: 58544 - DNA, 40 bp, Staphylococcus epidermidis
  source 1..40: mol_type = genomic DNA
gtatggcggtacatgcattcctatcggatgtataccaact

SEQ ID NO: 58545 - DNA, 50 bp, Staphylococcus epidermidis; identical to SEQ ID NO: 29600
  source 1..50: mol_type = genomic DNA

SEQ ID NO: 58546 - protein, 458 aa, Staphylococcus epidermidis
MNYERSYLRSCQVSTLEQKEHGYSIEEQERKLKSFCEINDWSVSDVFIDAGFSGAKRERPELQRMMNDIKRFDLVLVYKLDRLTRNVRDLLDLLEIFEQNNVAFRSATEVYDTSTAMGRLFVTLVGAMAEWERETIRERVMMGKRAAIKQGMILTPPPFYYDRVDNTYIPNDYKKVVLWAYDEVMKGNSSKAIARKLNDSDIPPPNGKRWEDRTITRALRSPITRGHYTWGDVFIENSHEPIITEEMYQQIKERLEERINTKIVSHVSVFRGKFICPRCGGTLTMNTATRKRKKGYVTYKTYYCNTCKTKKQSFGFSENEALRVFRDYLSKLDLDKYEVKTKQKDDVVTIDIDKIMEQRKRYHKLYAKGLMQEEELFELIKETDETIAEYEKQKELVPRKSLDIDKIKKFKNALLESWKIFSLEDKADFIKMAIKSIDIEYVKIKNRHSIEIKDIEFY

SEQ ID NO: 58547 - DNA, 50 bp, Staphylococcus epidermidis; identical to SEQ ID NO: 51602
  source 1..50: mol_type = genomic DNA

SEQ ID NO: 58548 - DNA, 40 bp, Staphylococcus epidermidis; identical to SEQ ID NO: 26028
  source 1..40: mol_type = genomic DNA

SEQ ID NO: 58549 - DNA, 40 bp, Staphylococcus epidermidis; identical to SEQ ID NO: 29604
  source 1..40: mol_type = genomic DNA

SEQ ID NO: 58550 - DNA, 50 bp, Staphylococcus epidermidis; identical to SEQ ID NO: 29600
  source 1..50: mol_type = genomic DNA

SEQ ID NO: 58551 - protein, 544 aa, Nocardioides sp JS614
MRARKAVAEMSHDQQERTAGNEPNDQATAQASPSLRAVVYVRISDDPEGTERGVDRQEADCRAYAAAHGWEVAQVYRENDTSAFKQRTITLPTGERVRRVVRPEFRAMLKHLSEQRAGVMIAYDLDRAVRDPRDLEDLIDAKVLNGFSVRSVTGSLRLDTDSDVAMARVLVAMANKSSADTARRVARAAKQQAIEGTWHGGQVPFGYRAENHTLVIDPEAAELVREAARRVLAGETLYRILTDWNRRGIRTTHGCRWSDRTLKLVLRNPSIKGVREYRPLLPDGTRSKTSLMQTTAAWPAILDEDTWQQVSDVLDARKQARNFHQPGSGAAKRLYPFSGLIRCSTCGRAMLHRGQVYQCVQQVPGGCNRSIRSGDLTKLVEEAVLATFEQITLNPAKRQSPGADQAARVGLAATLDADRERLARLDDDYYDGLIDKSMWVRQRSRIAERIERTRREYAATVPEHIGPSIDMTTVAQEWADRTPMWQHQAASLVLEAVLVHALPRGMNGATPARRRNETVEAFHARREVYRAGILAHRVEFVWRA

SEQ ID NO: 58552 - DNA, 50 bp, Nocardioides sp JS614
  source 1..50: mol_type = genomic DNA
gtgcgtttgcagaacctcggctacccgaggttctgtaaacgcacctacct

SEQ ID NO: 58553 - DNA, 40 bp, Nocardioides sp JS614
  source 1..40: mol_type = genomic DNA
ggatgcggaaccggcatagccggcatcgacggaccggcag

SEQ ID NO: 58554 - DNA, 40 bp, Nocardioides sp JS614
  source 1..40: mol_type = genomic DNA
ggatgcggaaccggcatagcaggcatcgacggaccggcag

SEQ ID NO: 58555 - DNA, 50 bp, Nocardioides sp JS614
  source 1..50: mol_type = genomic DNA
gtgcttttcaaggacctcggattgcaggggatctgtaaaccctgctacat

SEQ ID NO: 58556 - protein, 562 aa, Pseudomonas chlororaphis
MGKVFSYIRFSSAKQSAGDSYARQVRAAKAFCDENDLELADPREYLFFDAGRSAFKGKHLDDTGELARFLSYVEDGTIPPGSYLVVESLDRLSRERVRDALPRFLDLLAKGINVYTSVDKRLYTKDYNELDLIISIISMSRAHEESATKGGRVSSAWRAKQKDARTTGKPLGKLRPLWLDVTPDRYVLNPDKAAIVRRIFVLSTKGHGSRIIAATLNQEGIPAFSSGRKNFSGLWGFSTVRHILDSRTTLGEYQPHIFIDGKRTPDGEPIKGYFPAVVTEDEFYLAHAARSSRKTHTVTKTTTNFNVLTGILNCYKCGAAMHLQGQRGRKYYKCSKATRGLCDAGIISAPRAEEVFKEMLPKVDSLSLVQDSSGRLQKSLQVVEGRIASLKARQNDAEASHAEFPSRITAKLLHELEAEIGALESERAAISEQLASDKVMNKDDFFKKLDLVSFEGRVAANNLIKRLGLYIFVNKNGRTDETYWVSKNNAIPLPFSAETPNLLFYLMHRGKEIRFEAMYDEYVDLQVAQDELSEVEAIFAKTESWDELPPELLALWKARHGV

SEQ ID NO: 58557 - DNA, 50 bp, Pseudomonas chlororaphis; identical to SEQ ID NO: 42462
  source 1..50: mol_type = genomic DNA

SEQ ID NO: 58558 - DNA, 40 bp, Pseudomonas chlororaphis
  source 1..40: mol_type = genomic DNA
cgccagcgggcagaaattcaagaagtgctgcgccagctac

SEQ ID NO: 58559 - DNA, 40 bp, Pseudomonas chlororaphis
  source 1..40: mol_type = genomic DNA
cgccagcgggcagaaattcaggaagtgctgcgccagctac

SEQ ID NO: 58560 - DNA, 50 bp, Pseudomonas chlororaphis
  source 1..50: mol_type = genomic DNA
gataggcataggtgacaggaagtgagaaagtgttgtcagtttcagctact

SEQ ID NO: 58561 - protein, 562 aa, Pseudomonas chlororaphis
MGKVFSYIRFSSAKQSAGDSYARQVRAAKAFCDENDLELADPREYLFFDAGRSAFKGKHLDDTGELARFLSYVEEGTIPPGSYLVVESLDRLSRERVRDALPRFLDLLAKGINVYTSVDKRLYTKDYNELDLIISIISMSRAHEESATKGGRVSSAWRAKQKDARTTGKPLGKLRPLWLDVTPDRYVLNPDKAAIVRRIFVLSTKGHGSRIIAATLNQEGIPAFSSGRKNFSGLWGFSTVRHILDSRTTLGEYQPHIFIDGKRTPDGEPIKGYFPAVVTEDEFYLAHAARSSRKTHTVTKTTTNFNVLTGILNCYKCGAAMHLQGQRGRKYYKCSKATRGLCDAGIISAPRAEEVFKEMLPKVDSLSLVQDSSGRLQKSLQVVEGRIASLKARQNDAEASHAEFPSRITAKLLHELEAEIGALESERAAISEQLASDKVMNKDDFFKKLDLVSFEGRVAANNLIKRLGLYIFVNKNGRTDETYWVSKNNAIPLPFSAETPNLLFYLMHRGKEIRFEAMYDEYVDLQVAQDELSEVEAIFAKTESWDELPPELLALWKARHGV

SEQ ID NO: 58562 - DNA, 50 bp, Pseudomonas chlororaphis; identical to SEQ ID NO: 42462
  source 1..50: mol_type = genomic DNA

SEQ ID NO: 58563 - DNA, 40 bp, Pseudomonas chlororaphis; identical to SEQ ID NO: 58558
  source 1..40: mol_type = genomic DNA

SEQ ID NO: 58564 - DNA, 40 bp, Pseudomonas chlororaphis; identical to SEQ ID NO: 58559
  source 1..40: mol_type = genomic DNA

SEQ ID NO: 58565 - DNA, 50 bp, Pseudomonas chlororaphis; identical to SEQ ID NO: 58560
  source 1..50: mol_type = genomic DNA

SEQ ID NO: 58566 - protein, 583 aa, Pseudoflavonifractor phocaeensis
MTQTQIHATISPCTPILSADPTVKEDAMLDQQKITILYCRLSNEDALDGESNSIQNQKEFLTRYAAEHGYTNLKILVDDGYTGTNFDRPGVQEGFALVKQGLVGCWLVKDLSRFGRDYLTVGQYTDIIFPSYDVRFIAVNDGVDSERGDSDGFAAIRNLFNEWYPRDTSKKVRVVFRQKGTSGKHLGKPPYGYRTDPADKDHWIIDEDAAPVVKRIFDLAIDGKGPEQIARILEKDKVLTTKALYAKQSENHPDPKKRKKMPERPYHWIGQSVAGILERMEYTGCTCNFKTYSKSYKLKKRIPNAIEDMCIFPDTQEAIVSQAQWDRVQELRKNKRRPTKAERQGLFSGLLFCPDCGNKLHFATCKSFDGKQDHYVCSSYKSGRGTCSAHYIREDVLRELVLERIRAVNTYIRQDVEGFQEEWLQCRRSDQERNIREDRKRVEQAKKRLADLDVLLSRLYEDFVLGDLSKERYKKMTADYEAEQERLKLEIEVTEEWLETQETMSADVDAFVALTQKYVDVPELTPTIVNEYIKKIEVFAPDKSSGKRVQKVKIYFNFVDDVEIPVISEPVVAKSTLGRRKTA

SEQ ID NO: 58567 - DNA, 50 bp, Pseudoflavonifractor phocaeensis
  source 1..50: mol_type = genomic DNA
atagtaccttatcactattacgccttggcttaacagtgataaggaactaa

SEQ ID NO: 58568 - DNA, 40 bp, Pseudoflavonifractor phocaeensis
  source 1..40: mol_type = genomic DNA
caaaaaacaccccctccgctttgcggagggggtgttttca

SEQ ID NO: 58569 - DNA, 40 bp, Pseudoflavonifractor phocaeensis
  source 1..40: mol_type = genomic DNA
caaaaaacaccccctccgccctgcggagggggtgttttca

SEQ ID NO: 58570 - DNA, 50 bp, Pseudoflavonifractor phocaeensis
  source 1..50: mol_type = genomic DNA
atagtaccttcaaaatcttactccccagcttaacatctccattgccttaa

SEQ ID NO: 58571 - protein, 512 aa, Mesorhizobium opportunistum
MTKPKSPRARAYSYIRFSTPEQGAGDSLRRQTDKAVKYAAQHNLILDDTTTFRDLGVSAFRGANVAVGALGDFLSLVQSGDIKPGSFLLVENFDRISRDSILDAQAVFTGLLSAGITVVTLSNDRAYSRESIRQNQFAIFEIIIGFIRANDESARKQELLRAAWHGKRLKLKEQGIPMTRLSPGWVRLREDRLGFDLIPERAEVVRRVFDLTLAGQGQHAIAQRLNREGVPVFGTGKMWHRSYIKKMLADPSVVGVHTPHRVERIGGKKRRIPTEPMEGYFPTAVDRETFERVATLSTGRGAGRTVNGIENVLAGLAVCPKCASTMTRVNKGSRSRPSLVCVRAKAGKGCAYKSIPCQQVEFALAEKAGEFWRTLPAPDAALEAKWQQLLADEENHDEAISNIVDAIKEGGASAVLLDSLRQVEADREKIRTEVSEVGEKVADALTNRTQQTVDRLVEGLKATTHDVVAINATMRQLFTKVTVDWPRGYLWFHWKHAPGEETGLMFAWPSDP

SEQ ID NO: 58572 - DNA, 50 bp, Mesorhizobium opportunistum
  source 1..50: mol_type = genomic DNA
tgaaggtctttcgtccacagcatgaacatgatatggacgttagacccaac

SEQ ID NO: 58573 - DNA, 40 bp, Mesorhizobium opportunistum; identical to SEQ ID NO: 58518
  source 1..40: mol_type = genomic DNA

SEQ ID NO: 58574 - DNA, 40 bp, Mesorhizobium opportunistum
  source 1..40: mol_type = genomic DNA
gccgggaggcccgaccatccccagattgtggccgccggcc

SEQ ID NO: 58575 - DNA, 50 bp, Mesorhizobium opportunistum
  source 1..50: mol_type = genomic DNA
tggaggtcaacgggccacaccaggcctatggcatgttctttagacctaaa

SEQ ID NO: 58576 - protein, 542 aa, Pseudomonas putida
MTKKCFPYVRFSSTRQEDGSTRTRQNELIDAFVTKHGLDVDRHLEDAGTSAHRGKNAGSEGVLGQFLRQVRMGEIDKGSYLLIENFDRLSRDKIVRSNKIFTDLLYAGIKIVILDKNKIYDAENLDFGDWISALVEFERANAESERKSDFSSKAWRFNREKMRAGEIVTKKVPTWLRVENNAFVIDHAKVERINTLFKLSLSKGLQEATREYNDLYSEKLAIHQTQYLLSNRKLIGEHSPQKIHYDESGQLKRKDEGEAIPNYYPSVVDEKLFYQVQEVIKSRRPFAGRYSNQRYNVFRDLIYCKWCGGTIRYMNKGERDYFICTNSMTGKCDLNSHFGQLSIRGKKLFSMFFSFTEGLNVSALLEENTQAEELKTKIMKMEANRNKITSRLEDFKIDVKNMIMSGKPIPSTYNELIAELETNRTHIDHEIEIDTKKLDQIYMSEKSFSGLKSNDISEIIYDRSDESIEKRVRYNSELKKIIKHIRIDYLETALEIEFFNGVQRFIDQDGNTGDQIIGFEPPEFEPEDEERFDLKAGYQSQE

SEQ ID NO: 58577 - DNA, 50 bp, Pseudomonas putida
  source 1..50: mol_type = genomic DNA
ttggaacctttaacagaacatatccagacatgttaggctatacgttccat

SEQ ID NO: 58578 - DNA, 40 bp, Pseudomonas putida
  source 1..40: mol_type = genomic DNA
gcgggcatagcagtagatgcaaccatgctcgcagccacgg

SEQ ID NO: 58579 - DNA, 40 bp, Pseudomonas putida
  source 1..40: mol_type = genomic DNA
gcgggcatagcagtagatgaaaccatgctcgcagccacgg

SEQ ID NO: 58580 - DNA, 50 bp, Pseudomonas putida
  source 1..50: mol_type = genomic DNA
tgggaacctgttggtactcatctcaagacatgggagaccccatcttccat

SEQ ID NO: 58581 - protein, 502 aa, Nitrosospira multiformis
MDKAVIYCRVSTKRQTKEGDGLASQATRCREFARYRNLEVIEVFQDSESGSLIDRPGMRAMLKFARAHRKDNLTIIIDDLSRLARGVEAHIRLRTKIAEVGAKLASPSIEFGEDSDSVLVEHLLASVSQHHRQKNAEQTRNRRRARMLNGYWVHFAPIGYKYASKPGHGKVLVRNEPLASIVAEGLEGYASGRFQLKAEVKRFFEQFPEFPKDAKGEISNENVNRILSRVIYAGHIQSDIMDVSLRPAQSEPLISLETYQKIQMRMQEKPKIPARKNLNEDFPLRSAVRCGDCDNPLTACWTKGRNKHYPYYYCFTKRCESYGKAIQREKIEGEFEALLHTLEPAAPLFKTATRMFETWWNYRQAQIAQRGKALEDEIRKLDGKIEQLMDRLVETDSDSMVKAYETRIKKFETDRAVLVEKSSQLLRPMRSFDAALRTALDFISNPHKLWGSGRLCDRHAVLKLVVPGGFQYHRNTGLRTADTPLPFKVLGGFTSKRFQLAE

SEQ ID NO: 58582 - DNA, 50 bp, Nitrosospira multiformis
  source 1..50: mol_type = genomic DNA
caagcaagcgatttcaattggcggagacggagcgtgaaacttcgaaccgc

SEQ ID NO: 58583 - DNA, 40 bp, Nitrosospira multiformis
  source 1..40: mol_type = genomic DNA
ttagtttggtgggtggcggagagagagggattcgaaccct

SEQ ID NO: 58584 - DNA, 40 bp, Nitrosospira multiformis
  source 1..40: mol_type = genomic DNA
ttagtttggtgggtggcggctagagagggattcgaaccct

SEQ ID NO: 58585 - DNA, 50 bp, Nitrosospira multiformis
  source 1..50: mol_type = genomic DNA
taaccaaggcctctcaagaggcggctacggatcctagcggatcgacacgc

SEQ ID NO: 58586 - protein, 587 aa, Streptococcus pyogenes; identical to SEQ ID NO: 10801

SEQ ID NO: 58587 - DNA, 50 bp, Streptococcus pyogenes; identical to SEQ ID NO: 1787
  source 1..50: mol_type = genomic DNA

SEQ ID NO: 58588 - DNA, 40 bp, Streptococcus pyogenes; identical to SEQ ID NO: 23708
  source 1..40: mol_type = genomic DNA

SEQ ID NO: 58589 - DNA, 40 bp, Streptococcus pyogenes
  source 1..40: mol_type = genomic DNA
ttgtttccgcaaacgcatcgtgtcgagtgcgtagtgttgc

SEQ ID NO: 58590 - DNA, 50 bp, Streptococcus pyogenes
  source 1..50: mol_type = genomic DNA
ttgttaccatttactgaacaacacgtgttgattgtagaaaattgggaaaa

SEQ ID NO: 58591 - protein, 587 aa, Streptococcus pyogenes; identical to SEQ ID NO: 10016

SEQ ID NO: 58592 - DNA, 50 bp, Streptococcus pyogenes; identical to SEQ ID NO: 1787
  source 1..50: mol_type = genomic DNA

SEQ ID NO: 58593 - DNA, 40 bp, Streptococcus pyogenes; identical to SEQ ID NO: 23723
  source 1..40: mol_type = genomic DNA

SEQ ID NO: 58594 - DNA, 40 bp, Streptococcus pyogenes
  source 1..40: mol_type = genomic DNA
ttgtttccgcaaacgcatcgtgtcgagtgtgtagtgttgc

SEQ ID NO: 58595 - DNA, 50 bp, Streptococcus pyogenes; identical to SEQ ID NO: 58590
  source 1..50: mol_type = genomic DNA

SEQ ID NO: 58596 - protein, 587 aa, Streptococcus pyogenes; identical to SEQ ID NO: 10721

SEQ ID NO: 58597 - DNA, 50 bp, Streptococcus pyogenes; identical to SEQ ID NO: 1787
  source 1..50: mol_type = genomic DNA

SEQ ID NO: 58598 - DNA, 40 bp, Streptococcus pyogenes; identical to SEQ ID NO: 23723
  source 1..40: mol_type = genomic DNA

SEQ ID NO: 58599 - DNA, 40 bp, Streptococcus pyogenes; identical to SEQ ID NO: 58594
  source 1..40: mol_type = genomic DNA

SEQ ID NO: 58600 - DNA, 50 bp, Streptococcus pyogenes; identical to SEQ ID NO: 58590
  source 1..50: mol_type = genomic DNA

SEQ ID NO: 58601 - protein, 587 aa, Streptococcus pyogenes; identical to SEQ ID NO: 10721

SEQ ID NO: 58602 - DNA, 50 bp, Streptococcus pyogenes; identical to SEQ ID NO: 1787
  source 1..50: mol_type = genomic DNA

SEQ ID NO: 58603 - DNA, 40 bp, Streptococcus pyogenes; identical to SEQ ID NO: 23708
  source 1..40: mol_type = genomic DNA

SEQ ID NO: 58604 - DNA, 40 bp, Streptococcus pyogenes; identical to SEQ ID NO: 58589
  source 1..40: mol_type = genomic DNA

SEQ ID NO: 58605 - DNA, 50 bp, Streptococcus pyogenes; identical to SEQ ID NO: 58590
  source 1..50: mol_type = genomic DNA

SEQ ID NO: 58606 - protein, 587 aa, Streptococcus pyogenes; identical to SEQ ID NO: 10016

SEQ ID NO: 58607 - DNA, 50 bp, Streptococcus pyogenes; identical to SEQ ID NO: 1787
  source 1..50: mol_type = genomic DNA

SEQ ID NO: 58608 - DNA, 40 bp, Streptococcus pyogenes; identical to SEQ ID NO: 23708
  source 1..40: mol_type = genomic DNA

SEQ ID NO: 58609 - DNA, 40 bp, Streptococcus pyogenes; identical to SEQ ID NO: 58589
  source 1..40: mol_type = genomic DNA

SEQ ID NO: 58610 - DNA, 50 bp, Streptococcus pyogenes; identical to SEQ ID NO: 58590
  source 1..50: mol_type = genomic DNA

SEQ ID NO: 58611 - protein, 587 aa, Streptococcus pyogenes; identical to SEQ ID NO: 9821

SEQ ID NO: 58612 - DNA, 50 bp, Streptococcus pyogenes; identical to SEQ ID NO: 37077
  source 1..50: mol_type = genomic DNA

SEQ ID NO: 58613 - DNA, 40 bp, Streptococcus pyogenes; identical to SEQ ID NO: 23708
  source 1..40: mol_type = genomic DNA

SEQ ID NO: 58614 - DNA, 40 bp, Streptococcus pyogenes; identical to SEQ ID NO: 58589
  source 1..40: mol_type = genomic DNA

SEQ ID NO: 58615 - DNA, 50 bp, Streptococcus pyogenes; identical to SEQ ID NO: 58590
  source 1..50: mol_type = genomic DNA

SEQ ID NO: 58616 - protein, 587 aa, Streptococcus pyogenes; identical to SEQ ID NO: 10791

SEQ ID NO: 58617 - DNA, 50 bp, Streptococcus pyogenes; identical to SEQ ID NO: 37077
  source 1..50: mol_type = genomic DNA

SEQ ID NO: 58618 - DNA, 40 bp, Streptococcus pyogenes; identical to SEQ ID NO: 23708
  source 1..40: mol_type = genomic DNA

SEQ ID NO: 58619 - DNA, 40 bp, Streptococcus pyogenes; identical to SEQ ID NO: 58589
  source 1..40: mol_type = genomic DNA

SEQ ID NO: 58620 - DNA, 50 bp, Streptococcus pyogenes; identical to SEQ ID NO: 58590
  source 1..50: mol_type = genomic DNA

SEQ ID NO: 58621 - protein, 608 aa, Streptococcus pyogenes; identical to SEQ ID NO: 10746

SEQ ID NO: 58622 - DNA, 50 bp, Streptococcus pyogenes; identical to SEQ ID NO: 1787
  source 1..50: mol_type = genomic DNA

SEQ ID NO: 58623 - DNA, 40 bp, Streptococcus pyogenes; identical to SEQ ID NO: 23708
  source 1..40: mol_type = genomic DNA

SEQ ID NO: 58624 - DNA, 40 bp, Streptococcus pyogenes; identical to SEQ ID NO: 58589
  source 1..40: mol_type = genomic DNA

SEQ ID NO: 58625 - DNA, 50 bp, Streptococcus pyogenes; identical to SEQ ID NO: 58590
  source 1..50: mol_type = genomic DNA

SEQ ID NO: 58626 - protein, 590 aa, Streptococcus intermedius
MKKDVKVIKGDTTLKRTASGCVERSIKRVAAYCRVSTDTEDQINSYNSQVEHYTEFIKKNKEWTLAGIYADEAITGTQVDRRIDFQRLINDCMNGDIDMIITKSISRFARNTLDTLKYVRKLKEFNVAVFFEEENINTLTMDGELLLTILSSVAQQEVENISANVKKGLRMKMERGEMVGFQGCLGYDYDPETKSISINEKEAEIVRYIFRRYIEGVGGMVISRELEEQGYLSPRGNKRWTETTVLGIIKNEKYKGDLMMGKTYTVDPISKRRLDNFGEQDKFYIKNHHEPIISEEDFEKAQGIRLRRSKNRNTVANNGGKREKYSRKYAFSSMLECGFCGHNLSRRNWHSSSEYTKVIWQCVNATKNGKKYCPHSKGIEEEAIEKAFMESYRQVCHNNVEITNEFLKTVEEELKDNSLAKDLKKITNQLDKILKKEKDLVELRLNESISMDIYQDKYNEIAISKEKLLAEKRTLEVTLTDEKALKKRLEGFKKLLESNKYLEEFDRAVFESIVDKIIIGGTNDEGEIDPAMITIIYKTGKKDSQDGRLFKSRRKNAKEVNEETDNKLYPHSSDEVNNLCSYPMDNTCRV

SEQ ID NO: 58627 - DNA, 50 bp, Streptococcus intermedius; identical to SEQ ID NO: 1787
  source 1..50: mol_type = genomic DNA

SEQ ID NO: 58628 - DNA, 40 bp, Streptococcus intermedius
  source 1..40: mol_type = genomic DNA
ctatttccgcaaacgcaccatgtcgagtgtgttgctctgc

SEQ ID NO: 58629 - DNA, 40 bp, Streptococcus intermedius
  source 1..40: mol_type = genomic DNA
ctatttccgcaaacgcaccgtgtcgagtgtgttgctctgc

SEQ ID NO: 58630 - DNA, 50 bp, Streptococcus intermedius; identical to SEQ ID NO: 58590
  source 1..50: mol_type = genomic DNA

SEQ ID NO: 58631 - protein, 587 aa, Parvimonas micra
MKKDVKVIKGDTTLKRTASGCVERSIKRVAAYCRVSTDTEDQINSYNSQVEHYTEFIKKNKEWTLAGIYADEAITGTQVDRRIDFQRLINDCMNGDIDMIITKSISRFARNTLDTLKYVRKLKEFNVAVFFEEENINTLTMDGELLLTILSSVAQQEVENISANVKKGLRMKMERGEMVGFQGCLGYDYDPETKSISINEKEAEIVRYIFRRYIEGVGGMVISRELEEQGYLSPRGNKRWTETTVLGIIKNEKYKGDLMMGKTYTVDPISKRRLDNFGEQDKFYIENHHEPIISEEDFEKAQGIRLRRSKNRNTVANNGGKREKYSRKYAFSSMLECGFCGHNLSRRNWHSSSEYTKVIWQCVNATKNGKKYCPHSKGIEEEAIEKAFMESYRQVCHNNVEITNEFLKTVEEELKDNSLAKDLKKITNQLDKILKKEKDLVELRLNESISMDIYQDKYNEIAISKEKLLAEKRTLEVTLTDEKALKKRLEGFKKLLESNKYLEEFDRAVFESIVDKIIIGGTNDEGEIDPAMITIIYKTGKKDSQDGRLFKSRRKNAKEVNEETDNKLYPHSSDEVNNLCSYPMDNT

SEQ ID NO: 58632 - DNA, 50 bp, Parvimonas micra; identical to SEQ ID NO: 37057
  source 1..50: mol_type = genomic DNA

SEQ ID NO: 58633 - DNA, 40 bp, Parvimonas micra
  source 1..40: mol_type = genomic DNA
agatatttcctaacacgtcatctcgaccgtagtgtaacgg

SEQ ID NO: 58634 - DNA, 40 bp, Parvimonas micra
  source 1..40: mol_type = genomic DNA
agatatttcctaacacgtcgtctcgaccgtagtgtaacgg

SEQ ID NO: 58635 - DNA, 50 bp, Parvimonas micra; identical to SEQ ID NO: 58590
  source 1..50: mol_type = genomic DNA

SEQ ID NO: 58636 - protein, 478 aa, Rothia dentocariosa; identical to SEQ ID NO: 41161

SEQ ID NO: 58637 - DNA, 50 bp, Rothia dentocariosa
  source 1..50: mol_type = genomic DNA
tccgtccaacgccataactcagacatgcgctagcacatgtagcggttgca

SEQ ID NO: 58638 - DNA, 40 bp, Rothia dentocariosa
  source 1..40: mol_type = genomic DNA
tggtaccggcgtgatcgacatgcgctacgagaacccgctg

SEQ ID NO: 58639 - DNA, 40 bp, Rothia dentocariosa
  source 1..40: mol_type = genomic DNA
tggtaccggcgtgatcgacaagcgctacgagaacccgctg

SEQ ID NO: 58640 - DNA, 50 bp, Rothia dentocariosa
  source 1..50: mol_type = genomic DNA
tctgtacaataaaaaaactcagagaagccgtagaactcgctgttgttgaa

SEQ ID NO: 58641 - protein, 567 aa, Pseudomonas aeruginosa
MPTAYAYLRYSSKAQGGDDKDSIDRQMASIRALTAHYGVDLLPENIYRDDGVSSFDGSNKKTGKLKDLIDLILNQSIKDGDIVFVESIDRLSRQKFRLSKELVYSILDKGVILITTIDNRIYQKTDDNSKEFEQDLYLSLIAQRAHEESKTKSIRRKSAWNKAKQRAENENKIFNGHNPPYGIIYNKELDKFEIDEDKANEIRFIFKSLQSTGVSNTIKKVNEFSIKKWTNKTIQILLESKYPLGYYKAQKRDENKKKVFDRFIENYYPAIITFEDYNNAVSSMKNRSHRKHYGNQSVSSLNIFRHSLFCDECNATMFFETNKNPKGLKFSYYHCSRKKETRQGCDAKRLRFEHVIGLLFEAIEKTFEEYELIKDFTNEELKELENAIEKDLEKGSEFYKSVLWMKQLAELLSGKNKKDDFSEKIKSLNNTLIKEKMKLENLNKSIDDLGGSIPKIVLQKIIETENNIEKYEIELNTLKNQNVSEAVLNIASVQDFIELIKTEYGRIEINNFFIKNEIKFYAGFSELEDSPYLEIYKDNQRIFWNFKKFDLHNPLKKYGFTKITDYE

SEQ ID NO: 58642 - DNA, 50 bp, Pseudomonas aeruginosa
  source 1..50: mol_type = genomic DNA
gtgtggagaacacccctacccgttgagagcggagggtggtattctcacac

SEQ ID NO: 58643 - DNA, 40 bp, Pseudomonas aeruginosa; identical to SEQ ID NO: 22678
  source 1..40: mol_type = genomic DNA

SEQ ID NO: 58644 - DNA, 40 bp, Pseudomonas aeruginosa
  source 1..40: mol_type = genomic DNA
ggtcctgcgcgagccgctgaaaagcggcgagatcgtcatt

SEQ ID NO: 58645 - DNA, 50 bp, Pseudomonas aeruginosa
  source 1..50: mol_type = genomic DNA
cggtgtagacaccacctacccatcaagaggagaggccttactcctctcac

SEQ ID NO: 58646 - protein, 500 aa, Bacillus vallismortis; identical to SEQ ID NO: 52226

SEQ ID NO: 58647 - DNA, 50 bp, Bacillus vallismortis
  source 1..50: mol_type = genomic DNA
atgcaccccccttttgtaattacaatttcattattcattacaaaaggggg

SEQ ID NO: 58648 - DNA, 40 bp, Bacillus vallismortis
  source 1..40: mol_type = genomic DNA
tgcgcgcaaatgcatgaggatctcgttctcaatacaccgc

SEQ ID NO: 58649 - DNA, 40 bp, Bacillus vallismortis
  source 1..40: mol_type = genomic DNA
tgcgcgcaaatgcatgaggtactcgttctcaatacaccgc

SEQ ID NO: 58650 - DNA, 50 bp, Bacillus vallismortis
  source 1..50: mol_type = genomic DNA
tggtcccctaaatatgttattacatattcattcatgaagggaaaagaggg

SEQ ID NO: 58651 - protein, 491 aa, Gordonia terrae
MSTAPSSHVHEPRRSPTRAVIYTRVSRDLASGRSVAEQEAECRVVCDRNGWPVADVLTDNDRSATRFATKDRPQYARLNEVLHPGDVLVVWEPSRAGRSMEHYVDLRRLCTDRGVMLSYSGKLFDLDDGDDRFTTGLDALIAEREAEDIRKRIKRAHRENLAQGRPHGRVPYGYKIIRDPETGKSVGRTPDPDRAPLIQEAARRVLAGQSFGSVVRWIETQDPLGWNSAKLRRILTNATYAGYRTNSTTANGKRGPQEIHSKGTWEPILTDEQHHDLVALFAGRRTGPRGAPVKYLLSGIARCAVCGDHLWRARSGRRKDGSNYEVYQCKTHCVGRNMAAIDAVINSVVEGVLTSPESLTALAEEPATDPTAPARLAELRQRLEDVENEIAEGRMPAGTGARVATRLEAQIAEMEAETAPVFTDPVVRELATAPDPVTTWRELPLESRREFIRATMTITVDRVGHRWHAPTEGITITPVTPSHSTGIVSQP

SEQ ID NO: 58652 - DNA, 50 bp, Gordonia terrae
  source 1..50: mol_type = genomic DNA
catggggggtatcgcgaactcaaatgtttatttgtcatatactcccctac

SEQ ID NO: 58653 - DNA, 40 bp, Gordonia terrae
  source 1..40: mol_type = genomic DNA
gtagctcacgtcgaacgcgtgtttcagtgcgccgctgatg

SEQ ID NO: 58654 - DNA, 40 bp, Gordonia terrae
  source 1..40: mol_type = genomic DNA
gtagctcacgtcgaacgcgtttttcagtgcgccgctgatg

SEQ ID NO: 58655 - DNA, 50 bp, Gordonia terrae
  source 1..50: mol_type = genomic DNA
aatagggggtgatatgaactcaagttgttagtttacctcacctctccttc

SEQ ID NO: 58656 - protein, 476 aa, Streptococcus suis
MDRNKVAIYVRVSTQGQVDDGYSLDEQVDLLTNYCKLKEWTLYDVYVDPGISGKNMHRPEIERLTRDAKRKLFDIVLIYDLKRLGRSQKENIVLVEDVFNPNGIRLVSFTENFDASTPVGKMVFGMLSAYAELDRANIAERMMMGKIGRAKAGKAMSWGMPPFAYNYNKETGDLELDEVKAPIVEMIYSEFLKGASVNKIVQKLNSMNYHGKNHDWKHHAVTVIIDNPVYCGMMKYMGQTYQAKHTPIIDKKTFELAQLERKKRLAKYHNAEWVPPFQRKYIGSKICYCGLCGAHLKSEKDKKNKLTGIRSISFFCPNTRSRGTGECTNPRFKQSVLEGYILNEVAKLQQNPEKLKDIKPAEDNELHNKIATYEKKIKQNTSKLSKLNDLYLNDLISLDDLKQQSKSLLNENEFMEEQIKLLSATTREDELRKKIDTFLAFPDILTADYDTQKQAVELVISRVEATKEGIDIFFNF

SEQ ID NO: 58657 - DNA, 50 bp, Streptococcus suis; identical to SEQ ID NO: 41502
  source 1..50: mol_type = genomic DNA

SEQ ID NO: 58658 - DNA, 40 bp, Streptococcus suis
  source 1..40: mol_type = genomic DNA
accatcctatagcagctttaagatgcgtgagggacaagat

SEQ ID NO: 58659 - DNA, 40 bp, Streptococcus suis
  source 1..40: mol_type = genomic DNA
accatcctatagcagctttgggatgcgtgagggacaagat

SEQ ID NO: 58660 - DNA, 50 bp, Streptococcus suis
  source 1..50: mol_type = genomic DNA
aaccttgtccttgaacacagaattggattacttacaaatgtaaaactgga

SEQ ID NO: 58661 - protein, 476 aa, Streptococcus suis
MDRNKVAIYVRVSTQGQVDDGYSLDEQVDLLTNYCKLKEWTLYDVYVDPGISGKNMHRPEIERLTRDAKRKLFDIVLIYDLKRLGRSQKENIVLVEDVFNPNGIRLVSFTENFDASTPVGKMVFGMLSAYAELDRANIAERMMMGKIGRAKAGKAMSWGMPPFAYNYNKETGDLELDEVKAPIVEMIYSEFLKGASVNKIVQKLNSMNYHGKNHDWKHHAVTVIIDNPVYCGMMNYMGQTYQAKHTPIIDKKTFELAQLERKKRLAKYHNAEWVPPFQRKYIGSKICYCGLCGAHLKSEKDKKNKLTGIRSISFFCPNTRSRGTGECTNPRFKQSVLEGYILNEVAKLQQNPEKLKDIKPAEDNELHNKIATYEKKIKQNTSKLSKLNDLYLNDLISLDDLKQQSKSLLNENEFMEEQIKLLSATTREDELRKKIDTFLAFPDILTADYDTQKQAVELVISRVEATKDGIDIFFNF

SEQ ID NO: 58662 - DNA, 50 bp, Streptococcus suis; identical to SEQ ID NO: 41502
  source 1..50: mol_type = genomic DNA

SEQ ID NO: 58663 - DNA, 40 bp, Streptococcus suis; identical to SEQ ID NO: 58658
  source 1..40: mol_type = genomic DNA

SEQ ID NO: 58664 - DNA, 40 bp, Streptococcus suis; identical to SEQ ID NO: 58659
  source 1..40: mol_type = genomic DNA

SEQ ID NO: 58665 - DNA, 50 bp, Streptococcus suis; identical to SEQ ID NO: 58660
  source 1..50: mol_type = genomic DNA

SEQ ID NO: 58666 - protein, 584 aa, Streptococcus pneumoniae; identical to SEQ ID NO: 9321

SEQ ID NO: 58667 - DNA, 50 bp, Streptococcus pneumoniae; identical to SEQ ID NO: 18192
  source 1..50: mol_type = genomic DNA

SEQ ID NO: 58668 - DNA, 40 bp, Streptococcus pneumoniae; identical to SEQ ID NO: 32783
  source 1..40: mol_type = genomic DNA

SEQ ID NO: 58669 - DNA, 40 bp, Streptococcus pneumoniae
  source 1..40: mol_type = genomic DNA
tctatttcctcaaacgcataacgtcgagacggtagcactt

SEQ ID NO: 58670 - DNA, 50 bp, Streptococcus pneumoniae
  source 1..50: mol_type = genomic DNA
ggcagtctcagttcacagagtacaaacatagaatgccttcgttttttaca

SEQ ID NO: 58671 - protein, 560 aa, Anaerotignum lactatifermentans; identical to SEQ ID NO: 1631

SEQ ID NO: 58672 - DNA, 50 bp, Anaerotignum lactatifermentans; identical to SEQ ID NO: 1632
  source 1..50: mol_type = genomic DNA

SEQ ID NO: 58673 - DNA, 40 bp, Anaerotignum lactatifermentans
  source 1..40: mol_type = genomic DNA
aacaggagccaccggtgaaacaggtcccacaggacctacg

SEQ ID NO: 58674 - DNA, 40 bp, Anaerotignum lactatifermentans
  source 1..40: mol_type = genomic DNA
aacaggagccaccggtgaacgaggtcccacaggacctacg

SEQ ID NO: 58675 - DNA, 50 bp, Anaerotignum lactatifermentans
  source 1..50: mol_type = genomic DNA
agatgtgcaccctcccactccccccgtgccccatcacctaatgcacaatg

SEQ ID NO: 58676 - protein, 643 aa, Lentzea guizhouensis
MNTPNNPEIDPPAPALAARFPAALTVVPSGPSGLSDYAVSPLGMPTALLRNEVRVAFLARTSTDDQQDPRQSMLRQLGNCKAAIPESWVIVAHFYDVESGRMELDQRGRGENYERYDIPIARDGGVTDLLDEATHPGRRFDVVICESVSRVARRTFEGLSIERELERVEVPLFASNEPITLAGSRAQRILQRRINQSVAEYEVLNTLEQSWGGLCTHVREGWNIGKPPYGYKAKVYRHPNPTKAAKGQTKTRLEPDGLQGETVTQIAAWRFHEGLGYDTIADRLNADPAKYPPPEPPGKVRARGAWGKTSVYEILRNPKYTGYQVFNRRASRSRRGKINDPVKWVWSTEPAHEPLIPKWMFDELNARRQVKRGSRDGNELNTHPATARTYVLRGMVFDSCGRRMFGSQRGERAYYLCWPRNNNRGRPDNYPDHAKTVYIRESKLLDAIAAFYADRVFGPHRRAILAAELATVDDRQTQERQAQRERLQRSIADIARRQDTILRQAQSGDPDDPFSRGLRQSYNDLETEKQAALATVTDLDAVDEAEPTKPSEEDVNLIDALPQLRIDLAMAPEKLLRKLFDTTQLTIRLHPDSNYVTLTIKLPADRLTAIAGAAERIDEMSQDPQKPVTSMVTGSCVDVVRAP

SEQ ID NO: 58677 - DNA, 50 bp, Lentzea guizhouensis
  source 1..50: mol_type = genomic DNA
tgtgtggacgttgtacgtgcccccggcgcgcctcgtacaacatctacaca

SEQ ID NO: 58678 - DNA, 40 bp, Lentzea guizhouensis
  source 1..40: mol_type = genomic DNA
acccgaagatcgtgcccccggtgcgactcgaacgcacact

SEQ ID NO: 58679 - DNA, 40 bp, Lentzea guizhouensis
  source 1..40: mol_type = genomic DNA
acccgaagatcgtgcccccactgcgactcgaacgcacact

SEQ ID NO: 58680 - DNA, 50 bp, Lentzea guizhouensis
  source 1..50: mol_type = genomic DNA
cgtgtggcccaagcaggtgcccccactgggcctcagcctgcctgtccaca

SEQ ID NO: 58681 - protein, 685 aa, Actinomyces naeslundii
MPDALAPDPFTAMAAQLTPKRAVSYIRVSTREQAQRGGSEEGFSLPAQREANKRKAQSMGALVVKEFADRGESARSANRPELQKMLAYLKEDGGIDYVIVHKLDRLARNRADDVEINRAFEEAGVRLVSTSENIDQTPGGMLLHGIMSSIAEFYSRNLANEVIKGMGEKARNGGTLGKAPLGYVNVRGKDEHGREIRTVELDEERAPLIRLAFTEYATGNWTVSQLAKHLAGLGLDVPATPSKPARPITKGRLHTLLRHPYYKGVVQFQGVEYAGAHEALVDSQTWQTVQAILASHRYGERQRIHNHFLKSTVVCGQCGARLSVQNAKNSKGTIYPYFVCARRCRLHDCTFTAVLIDVVEDRMIDLYQTIQLSAADRTQIEHYLHDELSQIEGDKAKAVRSLTTRRTNIEDRRRRLLHAHYEGAIPLDLLKEEQAKLTSELGQIERQLAAYKADAAEVRQHLTQALDLLEDCHRLYQAAPDHLKKLLNQVFFERVLANPLVDEEGRVILPGEGTSDAANAGESADKGVAGEETGGEDSAALSADPDHDQAGRRNTSAHDEPHSAEEEEGGMSDDSGGGGADADAPTLRPRPVHLADTGSGTRLSVLLVPPFDQLTSPSLHAAAHVHHLQHAAQPDNPATPPTAGDEPTSATTRTTPTLVGERCSSSGTASRPVSTGVGSGKSLLV

SEQ ID NO: 58682 - DNA, 50 bp, Actinomyces naeslundii
  source 1..50: mol_type = genomic DNA
gggttcgggtaagagcttgttggtacagctccgcaccattgaccctaaca

SEQ ID NO: 58683 - DNA, 40 bp, Actinomyces naeslundii
  source 1..40: mol_type = genomic DNA
aagtattgggcacaccagtacccccactgggattcgaacc

SEQ ID NO: 58684 - DNA, 40 bp, Actinomyces naeslundii
  source 1..40: mol_type = genomic DNA
aagtattgggcacaccagtgaccccactgggattcgaacc

SEQ ID NO: 58685 - DNA, 50 bp, Actinomyces naeslundii
  source 1..50: mol_type = genomic DNA
tggtttgggcagcagcgtggtggtgaaagtcagcacagaagacaggaaca

SEQ ID NO: 58686 - protein, 641 aa, Actinomyces naeslundii
MPDALAPDPFTAMAAQLTPKRAVSYIRVSTREQAQRGGSEEGFSLPAQREANKRKAQSMGALVVKEFADRGESARSANRPELQKMLAYLKEDGGIDYVIVHKLDRLARNRADDVEINRAFEEAGVRLVSTSENIDQTPGGMLLHGIMSSIAEFYSRNLANEVIKGMGEKARNGGTLGKAPLGYVNVRGRDEHGREVRTVALDEERAPLVRLAFSEYATGNWTVSQLAKHLAGLGLDVPATPTRPARPITTTRLHKILRHPYYKGTISFQGVEYPGAHEPLVDEETWSQVQAVLDSHRFGERERQHNHHLKTTVYCGLCGARLLVQNTRNSKGDLYPYFICARRQRTHDCSFRAVLIDVVEERMSDLYRTIQLGSQDRQLVEQYVREELRHLERDKDRTIRSLTTRRTNIEDKRRRLMHAHYEGAVPLELLKEEQTQLTAELNQIERQLAAYQADIAEVRQRLAQALDLLEDCHRLYTAAPAHLKKLLNQVFFERVLVNPAVDEDGRVVLPEDGTNDGSGRNAADTAAGDCPIGKGDDGPLQHAAAPRLLADASSDASLAADLRLPFNWLTSRLMHNVARQHSATLLQDNTQENRDNQVDCPITNTVCNDEALTSGGERFASSSTNPDRVTHDLGLGKAIVV

SEQ ID NO: 58687 - DNA, 50 bp, Actinomyces naeslundii; identical to SEQ ID NO: 43947
  source 1..50: mol_type = genomic DNA

SEQ ID NO: 58688 - DNA, 40 bp, Actinomyces naeslundii
  source 1..40: mol_type = genomic DNA
aagtattgggcacgccagtacccccactgggattcgaacc

SEQ ID NO: 58689 - DNA, 40 bp, Actinomyces naeslundii
  source 1..40: mol_type = genomic DNA
aagtattgggcacgccagtgaccccactgggattcgaacc

SEQ ID NO: 58690 - DNA, 50 bp, Actinomyces naeslundii; identical to SEQ ID NO: 58685
  source 1..50: mol_type = genomic DNA

SEQ ID NO: 58691 - protein, 509 aa, Vibrio splendidus
MAQRKQAISYQRFSSDRQRNNSSLDRQSDSIKSWLKQNPNVDLIDQYVDEAMSGWNGKHIEQGSLGKLLQAIEEGIVQAETLILVEHFSRLSRQNIDKTEELLRKIWQHGITIVTIRDNGFYPPTTINDMPLRIRLIVEIEQAFKESEWRSAKVKGSYIKREKDAKNGVTPRMRRAFWLNKDGTLNDNHTVIKDIFNWYMEGLGQQRIIVKLKDKYQSVPSVQQMNPSTVMRWLTSDVVRGLWRGYKVYEAAIDDTLYFNVQTVHNSRLYHNVKPDRNWPLSGLLQCGVCGRGMSIQKSKDSLPVVRCSSKQRDKSCQRKTTFPYALVHLYMFNTVRKRASRLYTQKTVTKENALRVGQIDNELVKLRTRVKEEKQLYSEATSEGKNGRLILEIMLETDEKIQDLEKERNSIQGSIEASNNLFISNEANELVLTPRNFNLEMHKLGFKIVVGEYSLNTEGLGDKAPEWKYIGYSRKKRAYEWQVLSKKYFMPTSSFSEEILMLEDKEEL

SEQ ID NO: 58692 - DNA, 50 bp, Vibrio splendidus
  source 1..50: mol_type = genomic DNA
atgcacacccaattattcagtgaactaatggcgtaggtgtgcatgtgatg

SEQ ID NO: 58693 - DNA, 40 bp, Vibrio splendidus
  source 1..40: mol_type = genomic DNA
cgatcacatgctttgtgagcttaaggcggcacagagtgct

SEQ ID NO: 58694 - DNA, 40 bp, Vibrio splendidus
  source 1..40: mol_type = genomic DNA
cgatcacatgctttgtgagtgtaaggcggcacagagtgct

SEQ ID NO: 58695 - DNA, 50 bp, Vibrio splendidus
  source 1..50: mol_type = genomic DNA
aagcagacacggacaatgtgtgaatgaatggctgaggtcattttgtgatg

SEQ ID NO: 58696 - protein, 464 aa, Ruminococcus gnavus
MNSTYFRPQPELFGLRVVKYIRCSHDGQVLHGDTLEAQDALLDEFIKVNRMVLVDTFVDEALTARKKFTRRKEFVRLLDGVRSRSFDMILFTKLDRWFRNIGDYHKIQEILEENGVQWKAITESYDTTTTNGRLHINIRLSVAQDECDRDSDRIKDVFAYKLKNKTYLSGSLPRGLKLDDEKHVIIDPEWKQFALDMFDHFEQTNSKRGTLLYLKEKYGIYLCYDTISRNLRNSLYKGMYRDDPDFCEPLIEPERFDRIQVLGKRNVRQRYSNRTYIFTGLLICSSCNHYLVGQTTHRTLSDGTEKHYPSYRCNQRYQSHSCDRNRSYREDYVEEYLLQHIRPALSEYVAEYEVTGTTPARKNPAAEAAKIRTKMQKLYELYMDDLIDRDTYKRDYSAFQEKLKELDSIVVAPSRDLADLKKLLEQDYEEIYRTFSPQEKNAFWKSFVQSITVHEDGEMDIVFL

SEQ ID NO: 58697 - DNA, 50 bp, Ruminococcus gnavus
  source 1..50: mol_type = genomic DNA
gtttctactaactacgcaccgcccgtcggtactgcgtagttagtaaaaac

SEQ ID NO: 58698 - DNA, 40 bp, Ruminococcus gnavus; identical to SEQ ID NO: 29898
  source 1..40: mol_type = genomic DNA

SEQ ID NO: 58699 - DNA, 40 bp, Ruminococcus gnavus
  source 1..40: mol_type = genomic DNA
ccgcgaatccaacgctcctcccggctcatctgcaaggatc

SEQ ID NO: 58700 - DNA, 50 bp, Ruminococcus gnavus
  source 1..50: mol_type = genomic DNA
gtttctgatgagtgtccacctccccccgggactgtgcattctgtgagaac

SEQ ID NO: 58701 - protein, 611 aa, Enterobacter sichuanensis
MRTVKAYINSRVSSLQQVDAFGLDRQISTVLDFLENAKLPAELGYQLDPSNHEVLESDKGLSGYAGHNFTKGSLGRFKERVRSGEITEGCLLIESVDRFSRKQGYDAIDEFTFLIKRNIDIVEVETGQIYSYKLDHKLSALSTSIERAHQESKRKARISMKSWKHRKEASLANGVALNNNTPDWLSLSQDKKSYELDVQKVQTITKIFELYRDGYGVTQIVNLLNKEGERYNGKGWNTVTVYNKLRDRRLNGYLVGKYTTIPKKDNESTNDAEKRILENIKIKKEANDNAKRIYPVVIEDDLFSRVQSMMDRNVSSKKQKSTTTKQRNLFNGLTKCNECGSPMIVQSMSNGGQYLRCYRQRTKDEKCNSKMLRYFETEKVLLKHIKNLNLDEIYGDEKSNQSLDTLKRLLSDVNGKIALLNEKVQSANDESELFAIMEFKRKQILEKDELIAKINSLENQCEAVTLNYTYDIEQLTNQDNTVIRRKANEHIAKVISSIKCRRIDSSYIGAYYLYDITYHRDILKHILITDNSGKLISEITISEKDNERIYLVREEDQTVFKVESNGNAWVMYASRTKTIDDLLYYINTMMVGREPDDFAYQLNEDHIEWID

SEQ ID NO: 58702 - DNA, 50 bp, Enterobacter sichuanensis
  source 1..50: mol_type = genomic DNA
atgatgtattttactttacgctgtttccagcgtactatagaatacatatt

SEQ ID NO: 58703 - DNA, 40 bp, Enterobacter sichuanensis; identical to SEQ ID NO: 32693
  source 1..40: mol_type = genomic DNA

SEQ ID NO: 58704 - DNA, 40 bp, Enterobacter sichuanensis
  source 1..40: mol_type = genomic DNA
gagcggcatcaatagcttcggccagcgtggcgtacatggt

SEQ ID NO: 58705 - DNA, 50 bp, Enterobacter sichuanensis
  source 1..50: mol_type = genomic DNA
aagatattaaaacctgtgcactgtggccagcgtgctgtgccttgcatatt

SEQ ID NO: 58706 - protein, 535 aa, Notoacmeibacter marinus
MTASTVPLRAALYLRVSTARQAEHDVSIPDQKRQGEAYCEARGLRLVETFIEPGASATNDRRPEFQRMIEAGTSKPVPFDVVVVHSFSRFFRDHFELEFYVRKLAKNGVKLVSITQEMGDDPMHVMMRQIMALFDEYQSKENAKHVMRALKENARQGFWNGSLPPIGYRTVAAEQRGAKTKKKLEIDPLHVDTVRLIYRLALEGDGTTGQMGVKNIVSYLNKRRIFTRDGGRWGIGQVHRILTRRTYMGEHEFNKRSKTKELKPVSEIVTVPVPPIIDKEIFEAVQKLLKARNPKVMPARVISGPTMLTGLIHCAKCGGAMTIRTGKGGRYRYYACSMKARQGPTACTGMAVPMEKLDDLVVNHLEKQLLQPERLETVLAAALDRREEHAERRREHIAELNKRAAESELRLKRLYDAIEAGVADLDDPALKDRIDGLKAIRDQAKADAERAQGMLQNTGQKAVTPQMLRKFAATARDRIRLEGGGYRRDHLRALAQRVEVAEGEVRIMGSKSRLLQTLVAESGVNSVPTQGLKWR

SEQ ID NO: 58707 - DNA, 50 bp, Notoacmeibacter marinus
  source 1..50: mol_type = genomic DNA
tcagtgcccactcagggactgaagtggcgggctacgaacgatgaaaatga

SEQ ID NO: 58708 - DNA, 40 bp, Notoacmeibacter marinus
  source 1..40: mol_type = genomic DNA
atacagccggctgtcggtgtggcggatggggtgggattcg

SEQ ID NO: 58709 - DNA, 40 bp, Notoacmeibacter marinus
  source 1..40: mol_type = genomic DNA
atacagccggctgtcggtgaagcggatggggtgggattcg

SEQ ID NO: 58710 - DNA, 50 bp, Notoacmeibacter marinus
  source 1..50: mol_type = genomic DNA
tcagtgcccaggacggggctggagaaggtgtctgcagcggctgaagaagg

SEQ ID NO: 58711 - protein, 535 aa, Pseudomonas putida
MPYAVGYARFSSIKQGKGTSLERQQALIAKWISNNNQYTLYPKKFQDLGRSASKGEHLKHGLGQLLEAIKQGEIKEGDVILVEAIDRIGRLPEMQMFSLINDIITAKVKIVTLQDDITYGPDIRSDQIWALLGKVQQAFNYSESLSQRIKASYKNRETIAKHGGIPKRRTPIWLNSDGTLKDAIAEAMKGAFEDALAGLGERRILKNLIKQHNAFEKINPSTIRRWLINRTAIGYWKDNKIYPPIVSEELFYQVQQRFEDEYKPATAPRSYFLSGLIRCGECGANMQIKVNKHSPFTMRCSTRCKFGDMRCQNEKSFPIPVLMHICQDTATLALEKAMQNIQLTSQKKQIIIIDGQLREVHKRISNLVESLARYGAIPEVDQQISAAIEERKKLEHRKLFLDTEPEANNCKYDEAWDYQYDLIENNPMRLNALLQSAEYSITCYRDGKMNTSTHGNEFSRSQYIGHNRKKQAYAVLINEETKYITSNDEMAAIKRIAAFRKFLEDRRQHVKNAKHVTTPLKAEDEVYEFYKTIEA

SEQ ID NO: 58712 - DNA, 50 bp, Pseudomonas putida
  source 1..50: mol_type = genomic DNA
cgtggttgcattgccgcctttttctcgctattctatgcaatatacctatc

SEQ ID NO: 58713 - DNA, 40 bp, Pseudomonas putida
  source 1..40: mol_type = genomic DNA
ggtgctggcggccttgaactcgcagttcttgtggtcgatc

SEQ ID NO: 58714 - DNA, 40 bp, Pseudomonas putida
  source 1..40: mol_type = genomic DNA
ggtgctggcggccttgaaccagcagttcttgtggtcgatc

SEQ ID NO: 58715 - DNA, 50 bp, Pseudomonas putida
  source 1..50: mol_type = genomic DNA
cttggtggcactttcgtcctcttccaactcttccatggcctctacccatc

SEQ ID NO: 58716 - protein, 506 aa, Salmonella enterica; identical to SEQ ID NO: 40386

SEQ ID NO: 58717 - DNA, 50 bp, Salmonella enterica; identical to SEQ ID NO: 36192
  source 1..50: mol_type = genomic DNA

SEQ ID NO: 58718 - DNA, 40 bp, Salmonella enterica; identical to SEQ ID NO: 5263
  source 1..40: mol_type = genomic DNA

SEQ ID NO: 58719 - DNA, 40 bp, Salmonella enterica
  source 1..40: mol_type = genomic DNA
gcgacgaggtaaatcaaggcacattgaagtcataatcgtt

SEQ ID NO: 58720 - DNA, 50 bp, Salmonella enterica; identical to SEQ ID NO: 29885
  source 1..50: mol_type = genomic DNA

SEQ ID NO: 58721 - protein, 530 aa, Azospira oryzae
MKDIRVFSYRRFSSGRQARGTSLERQTKLAQAWCLERGYELDESLSLSDLGVSAFKGDNATRGALGGFIAAIEAGKVPKGSILLVESLDRLSRATLPEAVSLLMQIVKTGVRVVSMVDGKEWNSETINDTMSFMLSVLLFSRAHEESSTKAKRVSAAFQTKRNAGLPVVSKMHGSGWMQPKTDKSGWELIPDKAESVRRVFELAASGKGGVSIARIATEEGWAMPWRQRKNTNGWEHTGISRLLRDRRTIGEWQPMRMFGGTLTPDGEPVQGYFPAAVSEELWHRVQVALKGRTGPKRLRGINADVFAGLLYCKCGERMERKAASERGYARYYCLGAKAGRSECPSVSERGIVHAVLSNLGQFEEKAFRDDTISEAIRERIQIAEERASDARSRADRIILAIEEGGNSTLLLQRLSAIEAEAAKAKSDLESAREELATVPKIGGNFGTNLVDDAMSWIGDKAKTEERFRLSDALRRVVSKIVFNGYAVMIFQVKGVGLWQVIPQEFLGRAKRRDAGMSREEVAAKANRQS

SEQ ID NO: 58722 - DNA, 50 bp, Azospira oryzae
  source 1..50: mol_type = genomic DNA
ttgcgggtatttcgtgtgactgactagtcactcgcacaaataacctgcat

SEQ ID NO: 58723 - DNA, 40 bp, Azospira oryzae
  source 1..40: mol_type = genomic DNA
cgtgggctggcgcatcgattaccacattgccacccccggc

SEQ ID NO: 58724 - DNA, 40 bp, Azospira oryzae
  source 1..40: mol_type = genomic DNA
cgtgggctggcgcatcgatagccacattgccacccccggc

SEQ ID NO: 58725 - DNA, 50 bp, Azospira oryzae
  source 1..50: mol_type = genomic DNA
ttgagggtgccaactgtttctgccagggccctagctgacacaacgtgcat

SEQ ID NO: 58726 - protein, 580 aa, Streptococcus pyogenes
MNKSDIIYLIYKSKLFWKYKDIEKYIEVNAMSKDKIKVYLYTRVSTSIQIDGYSLEAQKTRMKAFALYNDYEIVGEYEDAGKSGKSIEGRAQFTRMMEDIKSGKDGVSFVLVFKLSRFARNAADVLSTLQTMQDFGVNLICVEDGIDSSKDAGKLMISVLSAVAEIERENIRVQTMEGRIQKAREGKWNGGFAPYGYQLVDGKLFINEEEAVAIRTIFEQYVNTAIGANGLSKYLENHGIRKIPRQNGKNPLFDAGLIRKILKNPVYKGKIAFGRRTLEKVHGTRNEYKQVEQDEYLIAEGIHEAIISDELWQAAQVKLKSQAKKYEHVNKGKDVRTHLLSGIVKCPICGVGMFGNKCIKKKKDGTKYKDFYYYGCKHRQMIRGHKCTFSKQIREELLDDAVAELIIKIVSNPKFASIMQEKINMKVDTSEIEKEIDNYQKELRKSHSIKFKLIEEIDNLNVDDKHYKRRKQDLDDRLYRMYDKIEELESLLIDAKAKKQTIEAEKLTGDNIYKVLIYFDKLYNVMNDVERRQLITALISEIQIYEEKQPNGQWLKSITFKLPIIDEDLNISLDNDKQVE

SEQ ID NO: 58727 - DNA, 50 bp, Streptococcus pyogenes; identical to SEQ ID NO: 43052
  source 1..50: mol_type = genomic DNA

SEQ ID NO: 58728 - DNA, 40 bp, Streptococcus pyogenes; identical to SEQ ID NO: 32898
  source 1..40: mol_type = genomic DNA

SEQ ID NO: 58729 - DNA, 40 bp, Streptococcus pyogenes
  source 1..40: mol_type = genomic DNA
tccgcaaacgcatcacgtcaggtgcgtagtgttgctaatc

SEQ ID NO: 58730 - DNA, 50 bp, Streptococcus pyogenes
  source 1..50: mol_type = genomic DNA
agtttggtcaatattaagcagaatagctatgtaacaattcagtccaaaat

SEQ ID NO: 58731 - protein, 541 aa, Blautia massiliensis
MQTTEIRETWTALYARLSLDDGNVGESMSIQSQKAILTRKAEELGIYNYQFYVDDGYSGTNFNRPSFQQMIADIEAGKVTCVITKDLSRLGRNYLESGAYIEVFFPKHQVRYIAVNDGVDSANSGEMDITPFKNILNEFYSRDVSKKVKSGKYIRASQGKFMGTHAPFGYQKDPEDKNHLIADEETAPTVRYIFQLALQGMGNNKIGKILYEQKIPKPAYYKPEYFGKFLVKEDDAYNWKQETIIRILRNPLYKGYFWVQKYDKKHFKQETRGYIPMSERTIIPSDHDALVDEHTWDTVQEILDRHTKVKPCTSGYENKFRGILKCADCGSTLMVHTDGRNKEKPVIERTFYQCRIYRVRGTGFCSQHRINADDLEELVLADIQTHAKRVIKNREKFMWKVLGQMDTTAANNRENIQKKLEKLEKKLLESDRQFIKLYEDFTKQLVSEQQFRMLSTHFEQEKKETTEEIEKLKTTADNLKDSTCKAEQLANEMVECAEIKELTTAIVNRLIEKIEVSEPQTIDGEKVQNIRIFYKFVGEIN

SEQ ID NO: 58732 - DNA, 50 bp, Blautia massiliensis
  source 1..50: mol_type = genomic DNA
tgtacctataattcaagagccattgagttcgctcaagtattataggcata

SEQ ID NO: 58733 - DNA, 40 bp, Blautia massiliensis; identical to SEQ ID NO: 52858
  source 1..40: mol_type = genomic DNA

SEQ ID NO: 58734 - DNA, 40 bp, Blautia massiliensis
  source 1..40: mol_type = genomic DNA
ggagacagtaaccgcaatcctattatcaccggaaggaacg

SEQ ID NO: 58735 - DNA, 50 bp, Blautia massiliensis
  source 1..50: mol_type = genomic DNA
tgtaagtattgctaaagagacattctgttagctctggctttataagtgaa

SEQ ID NO: 58736 - protein, 558 aa, Enterocloster clostridioformis; identical to SEQ ID NO: 3086

SEQ ID NO: 58737 - DNA, 50 bp, Enterocloster clostridioformis; identical to SEQ ID NO: 3087
  source 1..50: mol_type = genomic DNA

SEQ ID NO: 58738 - DNA, 40 bp, Enterocloster clostridioformis
  source 1..40: mol_type = genomic DNA
gataaaatcaggccggtcgaaattgactccggtataccca

SEQ ID NO: 58739 - DNA, 40 bp, Enterocloster clostridioformis
  source 1..40: mol_type = genomic DNA
gataaaatcaggccggtcgtcattgactccggtataccca

SEQ ID NO: 58740 - DNA, 50 bp, Enterocloster clostridioformis
  source 1..50: mol_type = genomic DNA
atgtctctttggattaactcattatcagctgacgatttgggacattacat

SEQ ID NO: 58741 - protein, 558 aa, Clostridioides difficile; identical to SEQ ID NO: 3086

SEQ ID NO: 58742 - DNA, 50 bp, Clostridioides difficile; identical to SEQ ID NO: 3087
  source 1..50: mol_type = genomic DNA

SEQ ID NO: 58743 - DNA, 40 bp, Clostridioides difficile
  source 1..40: mol_type = genomic DNA
ctgaaaatccggccgttcaaagttcgtccccgaccagcca

SEQ ID NO: 58744 - DNA, 40 bp, Clostridioides difficile
  source 1..40: mol_type = genomic DNA
ctgaaaatccggccgttcatcgttcgtccccgaccagcca

SEQ ID NO: 58745 - DNA, 50 bp, Clostridioides difficile; identical to SEQ ID NO: 58740
  source 1..50: mol_type = genomic DNA

SEQ ID NO: 58746 - protein, 558 aa, Coprococcus eutactus; identical to SEQ ID NO: 3086

SEQ ID NO: 58747 - DNA, 50 bp, Coprococcus eutactus; identical to SEQ ID NO: 3087
  source 1..50: mol_type = genomic DNA

SEQ ID NO: 58748 - DNA, 40 bp, Coprococcus eutactus
  source 1..40: mol_type = genomic DNA
cttaaaggatggtctgtcaaaggttgtgccggatatacca

SEQ ID NO: 58749 - DNA, 40 bp, Coprococcus eutactus
  source 1..40: mol_type = genomic DNA
cttaaaggatggtctgtcatcggttgtgccggatatacca

SEQ ID NO: 58750 - DNA, 50 bp, Coprococcus eutactus; identical to SEQ ID NO: 58740
  source 1..50: mol_type = genomic DNA

SEQ ID NO: 58751 - protein, 558 aa, Eubacterium maltosivorans; identical to SEQ ID NO: 3086

SEQ ID NO: 58752 - DNA, 50 bp, Eubacterium maltosivorans; identical to SEQ ID NO: 3087
  source 1..50: mol_type = genomic DNA

SEQ ID NO: 58753 - DNA, 40 bp, Eubacterium maltosivorans
  source 1..40: mol_type = genomic DNA
tgatttgcgcggtggtcacaatgctgttcctgaaaagcct

SEQ ID NO: 58754 - DNA, 40 bp, Eubacterium maltosivorans
  source 1..40: mol_type = genomic DNA
tgatttgcgcggtggtcactctgctgttcctgaaaagcct

SEQ ID NO: 58755 - DNA, 50 bp, Eubacterium maltosivorans; identical to SEQ ID NO: 58740
  source 1..50: mol_type = genomic DNA

SEQ ID NO: 58756 - protein, 442 aa, Eggerthella lenta
MCFSEVFEFTPLRNWFNEFYARDTSKKIRAVKQAKAQKGERVNGEAPYGYLIDPDNRNHLIPDPETAHVVKQIFAMYVRGDRMCEIQNWLRDNEILTVGELRYRRTGSKRHPRPQLNAWYNWPDKTLYDILTRKEYLGHTITGKTYKVSYKSKKTKKNPEEKRYFFPNTHEPLIDEETFELAQKRIATRQRPTKVDEIDLFSGLLFCGDCGYKMYAVRGAGTLERKHAYTCGNYRNRARNDMLCTTHYIRKSVLKELVLADLQRVTSYVKEHEQEFIETANECSAKAIQKTLTQQRKELDKAQNRINELNILFRKLYEDNALGKLSDEQFAFLTSGYDEEKKTLTRRVAELSQEIDNATERSADVKRFVALVRRYTAITELTYENVHEFIDRILIHELDKETNTRKIEIFYSFVGRVDTGDKPTESISYFRQIGADVKSYAI

SEQ ID NO: 58757 - DNA, 50 bp, Eggerthella lenta; identical to SEQ ID NO: 3087
  source 1..50: mol_type = genomic DNA

SEQ ID NO: 58758 - DNA, 40 bp, Eggerthella lenta
  source 1..40: mol_type = genomic DNA
gacgaaatacggcatggccaagtcgaagcctgccaagtcg

SEQ ID NO: 58759 - DNA, 40 bp, Eggerthella lenta
  source 1..40: mol_type = genomic DNA
gacgaaatacggcatggcctcgtcgaagcctgccaagtcg

SEQ ID NO: 58760 - DNA, 50 bp, Eggerthella lenta; identical to SEQ ID NO: 58740
  source 1..50: mol_type = genomic DNA

SEQ ID NO: 58761 - protein, 405 aa, Mycobacteroides chelonae
MDRIVRRLLDLADLIRWCQENSVSLVSATETFLDLDSAFGDIVALLVAKVAEMELTAISERNRSAAQHNMREGKYRGGPPPWGYRAEKIDGDWRFVQDDQQVSVINEVVRRVLDGEPLRQVAADLTDREVLTPRDRAYQLKGKEIRGYSWHSAKLREMLTSKSLLGHAVTANGSIRNDDGSPIIRATPILEREVFERLQVELTGRENRTEPTKRSSSLLLRVIYCGVCGKPAYKLKGGKGRQDRYRCASAQYKSTCGNKTVMIADAEEILTDAVMSVLGGKYRRNKVWDPGSDHAAELAELEETLSDLTDQLGVGSFRKGTRQRERLDARIAELARRQAELAAQASKPAGWTWVPTDELFGDWWTSQTVEQLNLWLRSMDIRMCWNHQGIQTDMLHLEKMSEQWS

SEQ ID NO: 58762 - DNA, 50 bp, Mycobacteroides chelonae
  source 1..50: mol_type = genomic DNA
cgctagtaataattgacaatggaatattccacagtatacatttacaaccg

SEQ ID NO: 58763 - DNA, 40 bp, Mycobacteroides chelonae; identical to SEQ ID NO: 6913
  source 1..40: mol_type = genomic DNA

SEQ ID NO: 58764 - DNA, 40 bp, Mycobacteroides chelonae; identical to SEQ ID NO: 6913
  source 1..40: mol_type = genomic DNA

SEQ ID NO: 58765 - DNA, 50 bp, Mycobacteroides chelonae
  source 1..50: mol_type = genomic DNA
tgctaataaaattagtcattggaatattacaatttgcaagtttacaactg

SEQ ID NO: 58766 - protein, 569 aa, Clostridium beijerinckii
MKVAIYSRKSKYTGKGDSIGNQIQMCKDYIENLYKNKKIEYSIYEDEGFSGKNTNRPEFQKLLNDIKKEKFNVLICYRLDRISRNVADFSSTLDELQVYGVDFVSIREQFDTTSPMGRAMIYIASVFAQLERETIAERVRDNMIELAKNGQWLGGSPPLGYSRKRETCYDENGNEKAISFLVQEPDEVKLVKLLYDTYLRLGSIHQTERYLMNNGICAPSGKLFATSTMHKILKNPLYAKSSDEILKYLEDDGINVFGSPDGIHGILEYNKTSVIARDGKKTTPFKDKSEWIAAVSKRCEGFIDPDTWLKTQKQLKTNSALSPNLGKTNNALLTSKLKCKCCGSSMGITLGRRLNETGLCKVYYRCNLKRRSSGHLCNSKNLIGDKVDECVLDSLVEMAKNKQAFLDRILKSKKENKKLKEDKLKKSTLEKQLANKTKQLNGLLDKLSVADDLLDIFMNKIRSLKTEISQLEENLKSIGENIENNSSELYDIEFINAVLDKCVNIKNESIESKRRIINFLIEEIIYDAETELLEIYPIGSGGSKKKRYNTFIKEITNDPLLLHFYSRTS

SEQ ID NO: 58767 - DNA, 50 bp, Clostridium beijerinckii
  source 1..50: mol_type = genomic DNA
tgttgcacttttattcacgaaccagttgcaacctgtataaaagtgcaata

SEQ ID NO: 58768 - DNA, 40 bp, Clostridium beijerinckii
  source 1..40: mol_type = genomic DNA
agtagttttaccagaaccggttgggccgctaattaatata

SEQ ID NO: 58769 - DNA, 40 bp, Clostridium beijerinckii
  source 1..40: mol_type = genomic DNA
agtagttttaccagaaccggatgggccgctaattaatata

SEQ ID NO: 58770 - DNA, 50 bp, Clostridium beijerinckii
  source 1..50: mol_type = genomic DNA
tgctgcagcagttttcaagggacagatacaacctcttgtttagtggaata

SEQ ID NO: 58771 - protein, 533 aa, Burkholderia pseudomallei
MAQPVAYSYIRFSTKRQAAGDSLRRQTEKARAYARKHGLHLDERLSYQDLGVSAYDRSNAERGELAAFLQAIDEGVVKPGSYLLVEQLDRLSRAKPLVALRQLEGIISAGVVVVTLDDERVYDSETSEDMGTLFLSLATMFRAHNESQTKSIRIHAAWQAKRDRREPVITAECPRWLRPKPDRSGYELILDKAESVRRVFELTIGGYGNVALARRANTEGWAHPGDAEEWNQTIITKLIANRAVIGEYQPHIRKEGRRVPQGEPWQDYYPRVVSDEVFALANAAKAQRARVPGRRDRHYKNIFQGILVCGTCGGSFVRKNKHSNKQPNYSLYMCARRVSGATKCSSVNGKQLEINLLTNIYVEGYSHIRTDEEADALRARITLLNTEQVAMQQRIQRIADAIETTDSPTMYERLTDAEGKLATITEDLRKTEHAMGELRLAERNIGIMMQTTFAEDYNRIQDESEVEFRAQLREKVLSVVNRIVIYPDSYAAVLFYRHTGEPAVQPLTTDFDLSAEPALLSSARAVLSRLESS

SEQ ID NO: 58772 - DNA, 50 bp, Burkholderia pseudomallei
  source 1..50: mol_type = genomic DNA
tagtgcaattacggttgcacgatatctatcgtcgggctataatggaacca

SEQ ID NO: 58773 - DNA, 40 bp, Burkholderia pseudomallei; identical to SEQ ID NO: 58073
  source 1..40: mol_type = genomic DNA

SEQ ID NO: 58774 - DNA, 40 bp, Burkholderia pseudomallei
  source 1..40: mol_type = genomic DNA
caacgggctgccgtcgttcgagatcgtcgggctgcccgat

SEQ ID NO: 58775 - DNA, 50 bp, Burkholderia pseudomallei
  source 1..50: mol_type = genomic DNA
ttgtgaaatgtctatttcacagtagatagtgtcagaattgaatggaatca

SEQ ID NO: 58776 - protein, 487 aa, Ruthenibacterium lactatiformans
MRLIESGMVRTLIVKDLSRLGREYLEVGKLTELVFPSYGVRFIAINDNVDSFYGENDFVPFKNLFNEFYAKDTSRKIRAVKKAQAQRGERLATRPRYGYRKADGDPKKIVRDPQAADVVQKIFLLCASGKGPSQIARLLKREQILNPSNYYFKKYGVALTGLDTTRPFEWSETTVAKILEDEIYLGHTISLRYTTQSYKNKRRIERPETEWLRFEDTHEPLITKELWELVREVRRHKRKAPKKFEEPNLFSGLLYCADCGAPLRLHRTRTQTAHFYNNFKCSTYSNRGKDACSGHYIRESQLKAIVLDDLRRVTQFARQKENLLLRHVARQNSAQAKKEISLLQGELDKLRRREQELTALFKRLYEDNVLGRIPDEQYRILSAEYTQERTLLQEKIPQMAEQQEKLRDSIANAARFVERARQYSTITELTPELLRLFIDKIVIGERSAKYSRCAAQEVSIYYRDVGLLDTAEELDMENLLSDTAASA

SEQ ID NO: 58777 - DNA, 50 bp, Ruthenibacterium lactatiformans
  source 1..50: mol_type = genomic DNA
ttgtgtccttatcgcacggcgcctaaaggcagagttggataaggctatat

SEQ ID NO: 58778 - DNA, 40 bp, Ruthenibacterium lactatiformans
  source 1..40: mol_type = genomic DNA
gaaaaagccgcccgccgggaattcgacggacggcttttct

SEQ ID NO: 58779 - DNA, 40 bp, Ruthenibacterium lactatiformans
  source 1..40: mol_type = genomic DNA
gaaaaagccgcccgccgggacttcgacggacggcttttct

SEQ ID NO: 58780 - DNA, 50 bp, Ruthenibacterium lactatiformans
  source 1..50: mol_type = genomic DNA
ttgtgtcgtcgtacctctgcccctactggctgtgttgccctgggcaagat

SEQ ID NO: 58781 - protein, 548 aa, Intestinimonas butyriciproducens
MLRQSDNKITALYCRLSRDDELAGDSNSIVNQRAILSKYAHDNHFLNPLFFVDDGYSGTNFDRPSWCELLERIENGEVSTLIVKDMSRLGRDYLKVGFYTEVLFVEKGVRFIAINNGIDSANQQDSDFTPFLNIINEWYAKDTSKKIRAVMKSKGEAGEHLCTNPPYGYRKDPADKKHWVVDEEAAEVVKRIFALCLDGYGPSQIARILKADKVITPTVYYQRMGKATRSPLPDNPYSWDQKSVAGILERPEYQGHTVNFKTYKQSYKSKKTCYNPEENWLVFENTHEAIVDADTWARVQELRKNKRRPTRTGKTNMFSGIVRCADCGEKLYYCTSRNFEARQDHFVCSTSRLKGKEVCSTHFIRAVVLEQGVLSHMRFVINCVANHEERFRQAMGAKQKAEAKKELATKRRQLTQAERRVEELDRLFKRIYEDNANGKLSDSRFQMLSDDYEQEQEELREKLLQLNEDITQQEDQAENIDRFIGKVRKYLDLDELTPAILNDMVKAVYVHTPDKSSGHREQRVDISYDLVGILPAGLLNNLQNGETA

SEQ ID NO: 58782 - DNA, 50 bp, Intestinimonas butyriciproducens
  source 1..50: mol_type = genomic DNA
atgctgttttattggtgctgccctttaggtagctacctataagacagtat

SEQ ID NO: 58783 - DNA, 40 bp, Intestinimonas butyriciproducens
  source 1..40: mol_type = genomic DNA
aaacaaaaagatctggggatttccgggcgcgctttgcgtc

SEQ ID NO: 58784 - DNA, 40 bp, Intestinimonas butyriciproducens
  source 1..40: mol_type = genomic DNA
aaacaaaaagatctggggatctccgggcgcgctttgcgtc

SEQ ID NO: 58785 - DNA, 50 bp, Intestinimonas butyriciproducens
  source 1..50: mol_type = genomic DNA
ctgctgcttctgttgtcctgcccatcatggagggaggaagtagatagtat

SEQ ID NO: 58786 - protein, 476 aa, Rhodococcus ruber
MALPRSGPEPVRAAIYARISEDPNGLEHGVARQREDCKALAASRGWKVVACYSDNDISALKGRSRPGYEELMAAAERGEFDQIVAYGLSRLWRSRRERADAIGALSAARIGVALVKGSDLDLTSAAGRMYAGILGEFDTAESEIKAERVARAAQQRAEEGRANGACAYGWARVYERDDKGRVIGWKDVVDEPAADVVRGIVRDLLAGSTLRAVTGRLNGEGIVAPLGGQWIPSSVRKLAVRDLNVGIRRHGRNTYQGAWEPIVDEASHTRVKALLADPKRRTQKAAARTHLLTFGIGRCGVCGGVLAVSRKGAKGRKTSLYVCRDLGCVGRREEWVDELVVSTVCYRLSKPDALAVFDAEDAVSERVRMRAAELRARLDGAADAYAAGSIDLDQLTRITMRTRSEMEAAERVLRPAAAVPTPVRQMAEAADARAVWDRLDLAQQRATLEALGIEVVVRRARGGPGFKPESVDVLWP

SEQ ID NO: 58787 - DNA, 50 bp, Rhodococcus ruber
  source 1..50: mol_type = genomic DNA
cggtgcagcaggtggccgcagccacttggtgtcgacgtcgtcgtacagcg

SEQ ID NO: 58788 - DNA, 40 bp, Rhodococcus ruber
  source 1..40: mol_type = genomic DNA
caccgaagcggccgaacaacctatcgggagatcgtggaac

SEQ ID NO: 58789 - DNA, 40 bp, Rhodococcus ruber
  source 1..40: mol_type = genomic DNA
caccgaagcggccgaacaacatatcgggagatcgtggaac

SEQ ID NO: 58790 - DNA, 50 bp, Rhodococcus ruber
  source 1..50: mol_type = genomic DNA
cggggcgccatgcagccgcagccacactgtgtcgccgtagtcgagctgca

SEQ ID NO: 58791 - protein, 597 aa, Enterobacter hormaechei
MKRKLYSYQRWSSAVQSDGTTKARQTFAAEEYAKCNDLEVVEIVDAGISGFKSVNSKSGALAKFLEAVDEGLIPNNAYLFVESLDRITRDEIDVALELFMGILRRGITIVTGMDNKVYTRAGIKGNPIDLLTSILLFTRAHEESKTKQNRTNGNALAMIRRFQSGLPTTIKAVGSHPWWIDCSTDKFEAVRRHPTLWQPAQDAINMFMEGVSVFKVVQYLNEKYPHAYKGKAWKTANIRKLRFNKAVYGLREITVDGTDYALPNYFPSLITEGQFLRLEKIRETTKYIGKVGEGKTVTDEEGNSKVIAERNNINLLAGMKLFRCGHCGGTMMAMRHGDTIRYLCEKGRGHQNDCKTWSLPGILVEHTLMLVTTIAYINMQRKGGVDKEDYTAQISSTEKLIEDISKKISNGTSLVLGGLGDVEEVIAQLQELKDSRSNLVLELEVLQRKQLLAEDHTFEGLMMDFFTYAQYGVLQDPVHEYRSKLRDIVYSSISDVRAWKVDRRLMISFQIKGDDEYYTFSAGDEPYNYIFYYGSPMQLGEDLSPQGNYELPEEVKRRIREHNDVYEASMKLLETANDLLSMVHYPNLDGRLFWPRK

SEQ ID NO: 58792 - DNA, 50 bp, Enterobacter hormaechei
  source 1..50: mol_type = genomic DNA
agatgtgtagaagttcatgcagggaatcctaaacgaatttctacacatta

SEQ ID NO: 58793 - DNA, 40 bp, Enterobacter hormaechei
  source 1..40: mol_type = genomic DNA
cattatcagccacccgggaaatccgaaatacccgatcgat

SEQ ID NO: 58794 - DNA, 40 bp, Enterobacter hormaechei
  source 1..40: mol_type = genomic DNA
cattatcagccacccgggatttccgaaatacccgatcgat

SEQ ID NO: 58795 - DNA, 50 bp, Enterobacter hormaechei
  source 1..50: mol_type = genomic DNA
agaaatgtaaaaattaattaaggttttcctgaaaaagtatatacagatta

SEQ ID NO: 58796 - protein, 546 aa, Enterococcus faecalis; identical to SEQ ID NO: 37781

SEQ ID NO: 58797 - DNA, 50 bp, Enterococcus faecalis; identical to SEQ ID NO: 37782
  source 1..50: mol_type = genomic DNA

SEQ ID NO: 58798 - DNA, 40 bp, Enterococcus faecalis
  source 1..40: mol_type = genomic DNA
tacaacgccagccatgtcgcacttaattgtcggagctgat

SEQ ID NO: 58799 - DNA, 40 bp, Enterococcus faecalis
  source 1..40: mol_type = genomic DNA
tacaacgccagccatgtcgggcttaattgtcggagctgat

SEQ ID NO: 58800 - DNA, 50 bp, Enterococcus faecalis
  source 1..50: mol_type = genomic DNA
taccgccccaggccagggtggcagggcatgatggccagggaaggaaggca

SEQ ID NO: 58801 - protein, 587 aa, Eggerthella lenta
MARKNPKNPDATRPLSCVLYIRVSTKLQVEKGESIDAQRFELTRYAEAHGMRVLGEYVDAGFSGKNVRGRPQFRQMLDDIIKEQPGRRPTYVLVFKLSRFGRNAADTWNSLQMLQDYGVELCCVKDGIDSATTMGKAMLSIAAVFAEMERDNIRTQTMSGREEKARKGYWNGGQAPYGYRLVDRGGKFKELVVDEDEAKVVRRIFKMYAYENKGPMAIASWLNRHGVTKAARGNATMETFGNTTIARMVVNPVYIGKIAYGRRRTEVIEGTRGETHVVKSDGYEVYDGRHEAIIDEATWAAAQAIVGTRKPNAKRHDDGHVNLLNGLLVCPECGRKMSSHPNRGKVKKDGTRGKTTYAYYCPHTSKARGATCTFRRQYPQEYVDAEVVEMVKLASRSDAFVEALRRRINDETDVEQLREDAERIGREQAANDKRMRMLMNQIDALDPADRSYERKFSDLQRRLDDLYDRDAGFQEALEETRAKIAAADKRRVGERRLLDELDRIPELLEEADEQTRFDIVHEAVSEVRILAGRNPRKERVVQSVTFKCPVRFFWEEVPGEADGYTAVTPDSFDADGNFRDDETHVET

SEQ ID NO: 58802 - DNA, 50 bp, Eggerthella lenta
  source 1..50: mol_type = genomic DNA
ttccgagatgacgagacacacgtcgagacggttgcggttctatctcggaa

SEQ ID NO: 58803 - DNA, 40 bp, Eggerthella lenta; identical to SEQ ID NO: 30003
  source 1..40: mol_type = genomic DNA

SEQ ID NO: 58804 - DNA, 40 bp, Eggerthella lenta; identical to SEQ ID NO: 30004
  source 1..40: mol_type = genomic DNA

SEQ ID NO: 58805 - DNA, 50 bp, Eggerthella lenta; identical to SEQ ID NO: 30005
  source 1..50: mol_type = genomic DNA

SEQ ID NO: 58806 - protein, 642 aa, Streptomyces alkaliphilus
MNNEITATPRAAIYERVSTEEQVSGYGLDVQDNACRAYVEAKGWTLVGVYPDEGVSGSLTSRPAFDRLMEEVKAGRVDVVVVHKFDRVGRTGRAFWRWVWQLEDMETGLVSVTQEIDTTTNGKLMLQQFAAFAEFEYNLIRERTQAGLQIKATQGGWTGGQPPYGWRIEGKGMRGSRLVVDPDERRVLRQIWTMLVQDRLTLRQTAARLNATGTYTRMGRPWSHQNLRNKLKSDAVMNARVVFRNPDRAHTGHGARLKRDGTPLYGAPVTIPLEPIFTPEEVSALRHALGLRYQIQTRDRSRSYPLSKRVFGLCGAYYTGLNKHGRDGRWYRCTGRNERYVGADVCSCDVVDADTLEAAVWAEVIQLLGDPDRLKAMAAEWVGLSMDGHVNYAARVADLDRQIAERQQAMTTTITEYAKAGLPVVAVEAATRALVEEVEQLQAMRAEAEAWQAESETAAARARDLEELAGVARARLHDMAPAEKAEVLALLDVRVTITGPVPRPRLGKPCTLAQWFRSAERPVPGVLTDEQWSAIEPIVKEWEPPNHRLVPGRAVVDAILTKARTGCRWQDLKTVGSGKTAHRRFSLWLEDGRWERIMALLPREGTPLPGTSRLPSLRIEGRVDPRMMSSDEAGSGERVSAR

SEQ ID NO: 58807 - DNA, 50 bp, Streptomyces alkaliphilus
  source 1..50: mol_type = genomic DNA
agcagggtccggggaacgggtctcggcacgcccgttcccagggggaacca

SEQ ID NO: 58808 - DNA, 40 bp, Streptomyces alkaliphilus
  source 1..40: mol_type = genomic DNA
cgcggagagaaccgacccgggcacgcccatcacggcgcgt

SEQ ID NO: 58809 - DNA, 40 bp, Streptomyces alkaliphilus
  source 1..40: mol_type = genomic DNA
cgcggagagaaccgacccgttcacgcccatcacggcgcgt

SEQ ID NO: 58810 - DNA, 50 bp, Streptomyces alkaliphilus
  source 1..50: mol_type = genomic DNA
agcagggtgtagaacacaggcctcttggagcccgtttagtgtggaaagca

SEQ ID NO: 58811 - protein, 686 aa, Bacteroidaceae bacterium
MFNGANIIIMKEIVAIYCRVSTQMQSTDRQREELLALSKEKGWDVPDDRIYVDVISGFKSGEVRPEFSRMLSEITPKGISCILFSEFSRLARNATELLEQVNYFREKKINLYFEKQDIWVTDKKTDLGSTILLHVLAVMSSYEIELFAERSLSGRINKLQAGGGAGLEQAYGYKLNEAKKLVIDDEEAPIIFRVFNEYANGRSSIQICETLNAEGVLSPYKKRLTEKRDIRRKQGLKDKEYKKFDIDEMTWRPSTLNRLFHNEIYIGRKHVIFHKPDPTNPEPIEKRKDREVIFEYDEYDETIRIIPDDIWYAVQDKLLKAAYNKNNAVKRENLLKHLMKCGECGSNFSVTGNSVNSQYVKTINKYERKYTCYGTVKTSSHKRICNEGGQIAMTKLDGLVLQFSLKMFTQTNINQTNEELIEKFSEEIEQNDIVKKSKEQELLQVEADYKRIIKRALLLKDDSMAEELIKEEENKYLQISSKLKKDISKLGQTNAALRININNIRKLNENTNLYSKMYDIRKDRGLIKTMVDEYIEKIILYRMHKLWFLVVIKYKNGVELWGKLKNARYKNDELFYDEFLCQYGVEFQTWIIDNTAHSFTYDNERKVIIYNGGNEDLYKGLDKGEYDYEMMNQYMLESGWMGSFPLFLYEDKWLDKNYTQNSENHIDETIIDKLQKRRSKTIEIVK

SEQ ID NO: 58812 - DNA, 50 bp, Bacteroidaceae bacterium
  source 1..50: mol_type = genomic DNA
tgtagtgtgttaaactcgcaagtgtgcatcggtgcgattaacacgctact

SEQ ID NO: 58813 - DNA, 40 bp, Bacteroidaceae bacterium
  source 1..40: mol_type = genomic DNA
cactacatgctcacaggtatgcatgggagggtattcggtc

SEQ ID NO: 58814 - DNA, 40 bp, Bacteroidaceae bacterium
  source 1..40: mol_type = genomic DNA
cactacatgctcacaggtactcatgggagggtattcggtc

SEQ ID NO: 58815 - DNA, 50 bp, Bacteroidaceae bacterium
  source 1..50: mol_type = genomic DNA
tgtggggtgctgacctcccatgtactcatctgtgcaaatgtcacactttt

SEQ ID NO: 58816 - protein, 554 aa, Pseudomonas lactis
MPKAYAYIRYSRAIQATGDSENRQLTALELFETSTATKIVEVVYDKGKSAFRGDNARSGNFKEMLDRMGSGAIRAGDYLVVESIDRITRQRVLDGVELLQGILKKGINIYTTVDQKTYSYNDPSRDFENLLMISLIAKRANEESETKSGRLLSAWKARKAKAENGEVIIKKGKSIPYGLRVEHGKFVIHKEEQEEIQKLFELLLKFGLNTAITKINETSLKKWNNGTVNKILKNKTVIGCMATHRIEYTADGKARKILTGFIENYYPNLIEPGLFYKVVDTMSNRKQKNWSGRRTEQDFNIFKHCIYCEQCGGKMYYDHRGSRYKGKIYPFFKCDNARVQKHICTADNIRFEYVFGSLLECVYLVNRVATGITKDFKGISTQARYLNPRINNLLKIDDSQQNIELEEKRKKLVASRTKLDGMNLRMIEADYNVPTEYMRQMSSLETEIDSLKKSIAVLDGAGSDGINIEDTQTIIDLFQTDDGRAKLNSFFKSNDIVFYASHIKTTRSTVFRMHRKNSNVDERISGTTKVFPLKNILQEFGLGDLQTMFDLKIN

SEQ ID NO: 58817 - DNA, 50 bp, Pseudomonas lactis
  source 1..50: mol_type = genomic DNA
ctcggaaaaaacgtttaccgaatcatgatcaggtgatatagtttaccgag

SEQ ID NO: 58818 - DNA, 40 bp, Pseudomonas lactis
  source 1..40: mol_type = genomic DNA
gcctaacgacaacccgctgatgatccggttgcgccgtggg

SEQ ID NO: 58819 - DNA, 40 bp, Pseudomonas lactis
  source 1..40: mol_type = genomic DNA
gcctaacgacaacccgctgaagatccggttgcgccgtggg

SEQ ID NO: 58820 - DNA, 50 bp, Pseudomonas lactis; identical to SEQ ID NO: 30070
  source 1..50: mol_type = genomic DNA

SEQ ID NO: 58821 - protein, 503 aa, Mycobacterium sp VKM Ac-1817D
MGTASKRERAVLYARISYDRSLEEIGVNRQLHDMRELAKARDFEVVSELQDNDISATKGLHRPGYEQVWDLVRAGAVDHLVVWQTSRFVRSRTERAQVIETFGRHAVDIIAVKGPSLDLRTAYGRGMADLMTAFDSLESEVKAERVSAAITDLTRRGKAWGFCPYGWDRTGKGVNAVQVENPHEADIVRELVDRLLAGESLNELYRDMNLRGEPSPGYAAWMKLPDAVREHRLSKGRKEPAKSWGKSTIRTIVARDANIGVRSRGSGTEVEGDWPAIIDPEKHAAVIALLKSPERRAHTGPRPGARKHLLTNGIGECGVCGEVLRVARRNGQRDPTIIYTCAGKRGCVGRTKDLVDDWVARVVVKRLALPDALDWLLGDDQEARQAAARVDELQRQLDDAADMFSDGTIVRRQLERITAKLTPELEAAVRARDTAVKTLDLEALRPLAGPEAATRWKSMPVSAQRRLLEAMGARVVILPRVKHGPGFEPETVAVQFGREDAVH

SEQ ID NO: 58822 - DNA, 50 bp, Mycobacterium sp VKM Ac-1817D
  source 1..50: mol_type = genomic DNA
agcaccctttagtaactaccgaggcagctagtgtattcttaaagggtggg

SEQ ID NO: 58823 - DNA, 40 bp, Mycobacterium sp VKM Ac-1817D
  source 1..40: mol_type = genomic DNA
cagatcggcgcactgtaggcaactggtcagcccggggatc

SEQ ID NO: 58824 - DNA, 40 bp, Mycobacterium sp VKM Ac-1817D
  source 1..40: mol_type = genomic DNA
cagatcggcgcactgtaggtaactggtcagcccggggatc

SEQ ID NO: 58825 - DNA, 50 bp, Mycobacterium sp VKM Ac-1817D
  source 1..50: mol_type = genomic DNA
ggctccctttaaccagcacagaagtagctagtgaatgttcaaagtgttag

SEQ ID NO: 58826 - protein, 500 aa, Ruminococcus bicirculans
MNVVIYARFSSHSQTEQSIEGQLKVCYEYAESNHYTVVGEYIDRAISGTTDNRAEFQRMISDSDKHTFEGVLVYQLDRFARNRYDSAINKAKLKKNGVRVLSAKENIANDASGILVEGVLESMAEYYSVELSQKIHRGMAINAEKCLSNGSNPGLGFKVDAERRFYVDDEEAAVVREIYERYASGETKAEIIRDLKRRRVKTSLGKEFSPNSLSHLLSNKRYIGVYLYKGKETPGGMPRILDDDLFYRVQSMMNKNKNAPARTHGESEYLLTTKLFCGHCKEMMVGYGGTSKTGRQYHYYMCKKARKKKCDKKIIGKQYIEDRVVSECLKMLTDDKIRYIAKRVAEECNKSPDNISVREIKKAIKEVDAAIENLWKGIEQGQSVDMLTERLHKRQAEKEELETQLAIENNKKICLSEAQILAFLDYVCEMPADDVNKRRAIINIFVQSIYLYDDHFTLIINASKKPLSIDNIPLDDIEEAFEGENTETEGCSSLMTPAPP

SEQ ID NO: 58827 - DNA, 50 bp, Ruminococcus bicirculans
  source 1..50: mol_type = genomic DNA
gttcatccttgatgacacccgctccaccaaacaggtattggacgaacacc

SEQ ID NO: 58828 - DNA, 40 bp, Ruminococcus bicirculans
  source 1..40: mol_type = genomic DNA
gttcgattctcctcggctccaccattttttccacgctcat

SEQ ID NO: 58829 - DNA, 40 bp, Ruminococcus bicirculans
  source 1..40: mol_type = genomic DNA
gttcgattctcctcggctcccccattttttccacgctcat

SEQ ID NO: 58830 - DNA, 50 bp, Ruminococcus bicirculans
  source 1..50: mol_type = genomic DNA
gagcttactcgagtacatccggtcccccaaaaagttcaaatacaaacaca

SEQ ID NO: 58831 - protein, 613 aa, Burkholderia pseudomallei
MPPAPTPKAYSYIRFSTPEQQFGDSSRRQTELSQKYAEAHGLTLDENLTYRDLGVSAFDKSNIRNGELGAFLRAIDSGAVEPGSYLLVESLDRLSRAKVTDALEIFMSIINRGIRLVTLVDGREYSKERINEQFTDLIISIVVMSRAHEESQTKSKRLKEAWKAKRGRIGDAKLTEMAPAWLKLNDERTAYSLIPDRVELVQRMFQWSKDGIGSETIARRMNEHGLPTWGTRKADQWHASYIKKVLDNRAVLGEFQPHVLVNGKRVPEGDPAPEYFPRIISDEDFVLAKTARQSRRTNSAGRKGQTFSNVFSGILRCGYCNGSMVYVNKGHNGPRARLLACARAKAGKGCHYVPWEYSQFERSVLTYCKGLDFDAFLQTRDAVKSELAALSARIAVLESSITDNEQKQANILEAIESGAKFQQFETRMLQLEQERIRINAELDETRQKYDLRANATVDVAAVRASIDGLLQRIDELEGDELYDMRARLSQHIKRLITRIAMYPGGYIGKPHFVEKLRAHLVRTGADAKAADEHIASSLKLTPNTSERFFTMISRSDAVRMIRPDLDNPEILHLQSVEGGQGLTAHAEIIGAMLEKLNAYAVASDGDGKGQTRF

SEQ ID NO: 58832 - DNA, 50 bp, Burkholderia pseudomallei
  source 1..50: mol_type = genomic DNA
ctgggtttaattggctacaaggtaaggacatagggccaaataaacccaat

SEQ ID NO: 58833 - DNA, 40 bp, Burkholderia pseudomallei; identical to SEQ ID NO: 6073
  source 1..40: mol_type = genomic DNA

SEQ ID NO: 58834 - DNA, 40 bp, Burkholderia pseudomallei
  source 1..40: mol_type = genomic DNA
gcccggcggcccgatcatctacatgtggtggccgcccgcg

SEQ ID NO: 58835 - DNA, 50 bp, Burkholderia pseudomallei
  source 1..50: mol_type = genomic DNA
ctttgtttatggtggtacatggagtagaaataggtaagcctaaaaccaat

SEQ ID NO: 58836 - protein, 562 aa, Paenarthrobacter ureafaciens
MTLLGLPAGLDLDSLRKLATQAAKAKPQPAPGDGTPLAVSYLRVSTKDQATRNGLEEGLSIPAQREAAEKKAASLGAVIVKEFIEPGESAKTANRKALQEMLEYVAVNPVQFCIINKVDRMARNRLDDAVIHATLRGRSIQLVSVTENIDESPSGMLMHGILATIAEFYSLNLAQEVVKGLRQKAVMGGTPGRAPLGYLNVRTTENGAEIREVTTDPDRFDLVKFAFESYANGDWTLSMLTEEVNRRGLTTRPTPKHPEKPLTTTMLHKVLTNPYYKGLVTFQGAVYEGSHDVMVTPEVWSKVQQILDRNNQRGQRPQKHDHYLKGALYCSCGAKLMLERPQGNTGERYDYFSCSGRRRKTTSCTRSAILVERIELKVEQAYATKSLTEDQAAGVGKILHEVFDRLEGGASDERAALTEQKARLESERLKLVQAHYADAIPVDLLKSEQDRIQNALGAIQTRLDSLHSRYADAREGLEDMLAVLTDLQGLYLRCEPAERRFLNQALFTRIIVDENENVELQPQAGVDTVTSQRINTYSAGPVATTKMPRIQAGQVSTFELLV

SEQ ID NO: 58837 - DNA, 50 bp, Paenarthrobacter ureafaciens
  source 1..50: mol_type = genomic DNA
ggcaagtttcgactttcgaacttttggtggaagtaaggggaatactgtcg

SEQ ID NO: 58838 - DNA, 40 bp, Paenarthrobacter ureafaciens
  source 1..40: mol_type = genomic DNA
ctgaccgggactttccttatggtggaggcaaggggactcg

SEQ ID NO: 58839 - DNA, 40 bp, Paenarthrobacter ureafaciens
  source 1..40: mol_type = genomic DNA
ctgaccgggactttccttagagtggaggcaaggggactcg

SEQ ID NO: 58840 - DNA, 50 bp, Paenarthrobacter ureafaciens
  source 1..50: mol_type = genomic DNA
ggcaagactcaagatttgaagtttgagaggaaataagcctcaaactttga

SEQ ID NO: 58841 - protein, 641 aa, Streptomyces rochei
MNQQSMRAAILERVSTEEQTRGYGLDVQDDACRAYVENKGWRLHDVYRDEGVSGSLTKRPGFDRLMADVKAGLVDVVVVHKFDRVGRTGRAFWRWIWQLEDLDTAIVSVTQDIDTTTTHGKFMLQQYAAIAEMEYNLIRERTQGGLQKKAEAGGWPGGAPPYGYRIEGKGKRGSFLVIDEHEAAILQAARKMAVEEGMNTREMAQRLNALEMFTRSGKPWSHSNLRGKLISESTLRGVVTFRNPKRAHAGHGAALNKDGTAKHGATVTIQLDPIFTPEEAADLSAAMGRLGNGKPKPRPHGYPLSKRLVGHCGAHYVGMKRSGRPGRWYRCTGRAAKYPGDPVCSCDMVDADAVEAAVWADVVKLLGDPDRLRAMAAEWVGMAAGEQTNHADRIADLDRRITERTGALTKLVTDYAKAGLPAVALQAATRALTEEVEQLQAMRDEAAAWMEETEATEQRARDLAALAAVARERLADMDPAEQSEVLALLDVRVTITGEIPKPRLGLACSMRDWFTAAQRLVPDELTDEAWARVEPIVKAWEPPSHKCRPGRVMLDAMFYKARTGCLWEELPERFGLWKGIHSRYKTWRNCGVWDEVMAALPDEGQPVWTPPLVPPLRVEGRVDPRVFTGVEEEAVSAGTGV

SEQ ID NO: 58842 - DNA, 50 bp, Streptomyces rochei
  source 1..50: mol_type = genomic DNA
gcggtgtccgcaggaacaggtgtcccgacgcctctgcccgggggtgccgc

SEQ ID NO: 58843 - DNA, 40 bp, Streptomyces rochei
  source 1..40: mol_type = genomic DNA
ccggcacacgatgggcgtccccggaccggccaccagcgcg

SEQ ID NO: 58844 - DNA, 40 bp, Streptomyces rochei
  source 1..40: mol_type = genomic DNA
ccggcacacgatgggcgtcagcggaccggccaccagcgcg

SEQ ID NO: 58845 - DNA, 50 bp, Streptomyces rochei
  source 1..50: mol_type = genomic DNA
gcggcggcggcggcgacaggagacaggacacctccgggacgggttgcggc

SEQ ID NO: 58846 - protein, 655 aa, Vibrio parahaemolyticus; identical to SEQ ID NO: 12176

SEQ ID NO: 58847 - DNA, 50 bp, Vibrio parahaemolyticus; identical to SEQ ID NO: 12177
  source 1..50: mol_type = genomic DNA

SEQ ID NO: 58848 - DNA, 40 bp, Vibrio parahaemolyticus
  source 1..40: mol_type = genomic DNA
aacggcaccaagcccaatggaaatcgtgctaatggccgct

SEQ ID NO: 58849 - DNA, 40 bp, Vibrio parahaemolyticus
  source 1..40: mol_type = genomic DNA
aacggcaccaagcccaatgataatcgtgctaatggccgct

SEQ ID NO: 58850 - DNA, 50 bp, Vibrio parahaemolyticus
  source 1..50: mol_type = genomic DNA
aacggagctggcctctctccaataatcatggtggatttccttctgcagca

SEQ ID NO: 58851 - protein, 533 aa, Zoogloea sp
MQVCLYARVSTSRQADNDLSIPDQLQQMRDWCKAHGHLVVAEYVEPGASATDDKRPVFQRMIADAGNKPPSFEAIIIHSLSRFFRDVVEFGVYERKLKKSGVRVVSITQQTSDDPMGEMARKLFSLFDEYQSKENSKHTSRAMRENARQGFFNGARAPFGYRAEATEISGSRGRKKKRLVIDVGEAAIVRRIYDLYLNGHRGCVLGIKEIVKHLTERNQLPRGRAWTVHKVHDILSSLTYVGEYYFNMHDTKAKCYRPPSEWVKCEIPAIIDRATFERVRQLRESRSPAKTPPRRVGNQTLLTGLIRCGECGSHMTLVTGKSGRYRYYKCTKRQAEGNHACKSPNLPMEKFDELILTHLTDRILTPGRLQVLMAELRKRNQAAKETESQTIKALEAQLKGAEDRLRRLYEAIEEGVVELDETLRGRVQTLKASKESALIELAGARRQQSMPTARILPSTIDAFSQAIRKRLTDPRKDFAKRYLQVLVDEVVVNGSEATIRGSYDKLAMAMQQKKEDYLDQVPSLMCCWRARDD

SEQ ID NO: 58852 - DNA, 50 bp, Zoogloea sp
  source 1..50: mol_type = genomic DNA
gtgccctctttaatgtgctgttggcgcgcccgagacgatgaaagtgggct

SEQ ID NO: 58853 - DNA, 40 bp, Zoogloea sp
  source 1..40: mol_type = genomic DNA
taacccattgaatttgtggcgcgcccgagacgattcgaac

SEQ ID NO: 58854 - DNA, 40 bp, Zoogloea sp; identical to SEQ ID NO: 58853
  source 1..40: mol_type = genomic DNA

SEQ ID NO: 58855 - DNA, 50 bp, Zoogloea sp
  source 1..50: mol_type = genomic DNA
gttctcacacgtggctgctgttggcgagccatagacctgctgactgggct

SEQ ID NO: 58856 - protein, 515 aa, Streptomyces albus
MKPVRVLIALRISNETDASTSLERQLQDCTSYVNERQHLGWQVVGVARDAHISATKSHPFERPELGEWLNNRAPEFDLLLFWKMDRFVRKVVDMQDMIKWATAHGGKALVSVKEPVLDMIGPFRHVIIDLFAAIAETEAQNISMRVKSFQSYAKSKNVWAKGNPPYGYESFRDTDGAMRLQVRENQRQVIREMHKRVVEDGEPYSTICDDFNTRGIPSPAGERMSDRRKKNGTSMPVWRSRTITNILRSEAILGWKCEEVRAPGKKYGVSQAILTSEGKIRMAEPILTEDEWTKLQDEMNGRPGAARRSTKNTTTYRGVVLCGGCGKNLYLFKPERQQGKPVYRCNKSANRDSCGKGYAFRAERVEELVETMILGTIGDFPMHERHYVKGSNNSQRLQEIEEYVTELQRSLRPGGKNSSGFAKKATEEEIAALYEEHDSLTAEGDKPDRYEYRDTGETFRHMWERNKGNESERARHLLKAGITIRLNPLTKGVSNTTDFGAEVDLGNRSEPFTIH

SEQ ID NO: 58857 - DNA, 50 bp, Streptomyces albus
  source 1..50: mol_type = genomic DNA
acccagcaaaacatgtacggcaggtcacttgcgtactgctgttatagggt

SEQ ID NO: 58858 - DNA, 40 bp, Streptomyces albus
  source 1..40: mol_type = genomic DNA
ggccatcatgtacggcaggtcgttgccgtagtagtacggg

SEQ ID NO: 58859 - DNA, 40 bp, Streptomyces albus
  source 1..40: mol_type = genomic DNA
ggccatcatgtacggcaggtagttgccgtagtagtacggg

SEQ ID NO: 58860 - DNA, 50 bp, Streptomyces albus
  source 1..50: mol_type = genomic DNA
accaagcaaaggttgaacgtcaggtaactggagtagggggtgtattagtt

SEQ ID NO: 58861 - protein, 541 aa, Microbacterium lacticum
MRRAILYLRLSVTDSNDGVSDSIQRQESDLRAFAESEGLDVAQVLSDDGLSGRKARANADEALRMLDAGEADALLVWKLDRWTRQGLGAIGRLVEVLDRHPKAEFIALRDGIRSTQPSWRLTAAVLSEVARSEADNTAMRVSAAIRDNQQKGRFKGGTVPYGYSPAPHPSGRGRTLILNPAEVATIKRMADWALDGRPINGLIDILTNEGVPTTRSPYRLATLRGEDAHGLARGVWSWPAVAAILTGDAVLGRVSVGSPIDGTRRKAWSLVLDEAGLPLQAFPAALDVETSARLRDRIKSSKIPSGKPRRVPRKARLLSGLLWCGVCGKKLWVTVRSGRSTYTCSRKAGGTCPAPNMTAELAERAITDTFLAERGHWPEAVLEESVHRPEHVDELARVQAAIDQTAAQMTHDDADVARLATELQTLKGRRTELQAAPVTIERRWIPTGRTIAEAWADGDDHTKRGLLERFGLDRIDLLPTETRGSNVFQPERLVPHWIDVDDPDAPDSLGRGLLIPRLSAPVKPPRDYYSRPPGDASHTAG

SEQ ID NO: 58862 - DNA, 50 bp, Microbacterium lacticum
  source 1..50: mol_type = genomic DNA
acagattactgccgtaagtccgcacctcccgacttcacgcagtaatctct

SEQ ID NO: 58863 - DNA, 40 bp, Microbacterium lacticum
  source 1..40: mol_type = genomic DNA
ccagatcgcgacgaccaagcctgcggtcatcagcgtcacg

SEQ ID NO: 58864 - DNA, 40 bp, Microbacterium lacticum
  source 1..40: mol_type = genomic DNA
ccagatcgcgacgaccaagtctgcggtcatcagcgtcacg

SEQ ID NO: 58865 - DNA, 50 bp, Microbacterium lacticum
  source 1..50: mol_type = genomic DNA
caagattataaaattaaacccagatctcctgacttcagggccaaatctct

SEQ ID NO: 58866 - protein, 547 aa, Flavonifractor plautii
MKKKRTKCYLYTRVSTSMQVDGYSLDAQRDKLRKYAEYEDMAVVGEYSDEGFSGKNIQGRLEFQRMLNDIQEGKDGVDYVLVFKLSRFGRNAADVLNSLQLMQDFGVNLICVEDGIDSSKDSGKLMISVLSAVAEIERENIRTQTMAGREQKAREGKWNGGFAPYGYRLENGQLLIAEDEAEVIRVIYDRYIHTNDGVAGVAKYLNSHGYVKKLRQNNTIPGFSRDFVKDVLDNPVYIGKIAYGRRRTEKKLGTRNEMHVVEQSEFPVYEGQHEAIISEEDWNLAQEKRRANSYRREKVNDPDHAHILSGILKCPCCGKSLYGNIAKAHSKDKKTRYYYYCKNTVTPTGHECTFRINIEQTEMNQMVANIISAMVKDPRFSEAIKEKIGTAVDTADMEKQLEALQTQLRQALGTKSRLERQMDTLDVTDPYYDRKILDLQRRYDEQYGKIEDIEIQIEEVQSQIRSIRQEKISGDNIYQLLLAFDEVYHSATEVEQKEFMKAFIERIELFPEKRKDGCWIKNIVFNFPVPVNGEEVKELPLENETML

SEQ ID NO: 58867 - DNA, 50 bp, Flavonifractor plautii; identical to SEQ ID NO: 19357
  source 1..50: mol_type = genomic DNA

SEQ ID NO: 58868 - DNA, 40 bp, Flavonifractor plautii; identical to SEQ ID NO: 33938
  source 1..40: mol_type = genomic DNA

SEQ ID NO: 58869 - DNA, 40 bp, Flavonifractor plautii
  source 1..40: mol_type = genomic DNA
cccccgcaccgcgcatgtgcaaaccgtggcgcggctggaa

SEQ ID NO: 58870 - DNA, 50 bp, Flavonifractor plautii
  source 1..50: mol_type = genomic DNA
cccttggaagagttcagaaagatccagaatgttgtcactgctttcaaata

SEQ ID NO: 58871 - protein, 553 aa, Flavonifractor plautii
MREVEILKKKQLKCYLYTRVSTSMQVDGYSLDAQRDKLRKYAAYEDMIVAGEYSDEGFSGKNIQGRQDFQRMLNDIQDGKDDVSYVLVFKLSRFGRNAADVLNSLQLMQDFGVNLICVEDGIDSSKDAGKLMISVLSAVAEIERENIRTQTMAGREQKAREGKWNGGFAPYGYKLDNGELVIAEDEAEVIRVIYDRYIHTNEGVAGVAKYLNRNGYTKKLRQNNTIPGFSRDFVKNVLYNPVYMGKIAYGRRRTEKKQGTRNEMHVVEQSEFPVYEGQHEAIISEEDWYLAQEKRKINSFKREKVNNPDHAHILSGILKCPCCGKSMYGNIAKAHSKDKKTRYYYYCKNTVTPTGHECSFRLNIEQTEINKFVAKVISAMVNNPRFVEAIQAKIGTAVDTEDMEKQIAVLQGRLKQAFGTKSRLERQMDTLDINDVHYDRKILDLQRRYDEQYDTIEEIEAQIGELQSQIRSIQQEKISGDNIYRLLLAFDEVYHSATEAEQKEFMKAFIERIEMFPEKRKDGSWIKKIVFNFPVPVDGEEVKELPLETETTV

SEQ ID NO: 58872 - DNA, 50 bp, Flavonifractor plautii
  source 1..50: mol_type = genomic DNA
cctttggaaactgaaacaacagtcgagacggttgtcttgctttccaaggg

SEQ ID NO: 58873 - DNA, 40 bp, Flavonifractor plautii; identical to SEQ ID NO: 33938
  source 1..40: mol_type = genomic DNA

SEQ ID NO: 58874 - DNA, 40 bp, Flavonifractor plautii
  source 1..40: mol_type = genomic DNA
cccccgcaccgcgcatgtgtgaaccgtggcgcggctggaa

SEQ ID NO: 58875 - DNA, 50 bp, Flavonifractor plautii
  source 1..50: mol_type = genomic DNA
tatttgaaagcagtgacaacattctggatctttctgaactcttccaaggg

SEQ ID NO: 58876 - protein, 467 aa, Bacillus thuringiensis
MKCVIYRRVSTDMQVEEGISLDMQRLRLKQYAKSQGWVVVNDYCDEGYSAKNTERPAFQQMIKDMKKKQFDIILVYRLDRFTRSVSDLHSILKTMDEYNVKFKSSTEIFDTTTATGRMFITLVATLAQWERETTAERVRDSMQKKAELGLRNGAKAPMGYDLKKGNLYINHTEAEIVKYIFEMFKTKGVISIVKSLNSRGVKTKQGKIFNYDAVRYIINNPIYIGKIRWGEDILTDIAQKDFERFIDKDTWYTVQQIQDSRKIGKVRLHNFFVFSNVLRCSRCGKHFLGNKQVRNHNRIAMSYRCSSRHHKGTCDMPQVPEDVIEKEFLNLLEEAIVDLDDTEEKPIELSNLQEQYNRIQDKKARLKYLFIEGDIPKNEYKKDMLTLTQEENIIQKQLANITDTASSFEIKELLNQLKDEWFNLNNESKKAAVNAIISSITVDVIKPARVGKNPIAPVIKVTDFKIK

SEQ ID NO: 58877 - DNA, 50 bp, Bacillus thuringiensis
  source 1..50: mol_type = genomic DNA
tgatgtagttaggttgtgtttaattgaccgaacaccatataactacaaca

SEQ ID NO: 58878 - DNA, 40 bp, Bacillus thuringiensis
  source 1..40: mol_type = genomic DNA
ttgcggcccagtcattaattgaccgaaccaaggtgtttgg

SEQ ID NO: 58879 - DNA, 40 bp, Bacillus thuringiensis
  source 1..40: mol_type = genomic DNA
ttgcggcccagtcattaatgcaccgaaccaaggtgtttgg

SEQ ID NO: 58880 - DNA, 50 bp, Bacillus thuringiensis
  source 1..50: mol_type = genomic DNA
ttatgtagtgatgatgtgttttgtgcacataaatcctattcactgacaca

SEQ ID NO: 58881 - protein, 539 aa, Salmonella enterica; identical to SEQ ID NO: 35306

SEQ ID NO: 58882 - DNA, 50 bp, Salmonella enterica
  source 1..50: mol_type = genomic DNA
gtacttactataccaattggagcagttagtgtataatgtacgccacgata

SEQ ID NO: 58883 - DNA, 40 bp, Salmonella enterica; identical to SEQ ID NO: 20888
  source 1..40: mol_type = genomic DNA

SEQ ID NO: 58884 - DNA, 40 bp, Salmonella enterica
  source 1..40: mol_type = genomic DNA
ccatcagcagcatggaacagacggtggtgccgccgccaat

SEQ ID NO: 58885 - DNA, 50 bp, Salmonella enterica
  source 1..50: mol_type = genomic DNA
gtactgagttattgaaataaagcagatggtgtataatatttagcatgtta

SEQ ID NO: 58886 - protein, 401 aa, Serratia marcescens
MLDPDLGKSAYHGYNFTKGALGELKRKVLSREIKEGALVIENVDRFSRLPEHEAIREFNDLILGGIDIHEVETGVVYSKKIPNTLSKLSHSIERAWGESERKSTIAKKVWKARRETVLATGKPLPARTPKWLKIVNSEYVIDKKYSDAVNAIFKLYTEGYGTAYIVKYLNNNDMKIDGLSWNTAVLTKMYSDERLIGWKSGMKIYPAIVGEDVFKKARVIKSSKVMLNKQKVNSSQKSIFNSVARCGKCGAAMCVSVNGHNKLYYWCWKKRGTKECDLSGFVYAYAELAILQHIKNIDWNKVYRDSDRSNERSEAINMELAELINYKLEIDEIINTTERLPTAVLRALITTEEKISKLEEEISSIKASEYPLDFDFNVDDITNQNSIELRQKCNIQIKKKH

SEQ ID NO: 58887 - DNA, 50 bp, Serratia marcescens
  source 1..50: mol_type = genomic DNA
cgggaggaaaaagttgtaattgataggtcaatcatattataatactcctt

SEQ ID NO: 58888 - DNA, 40 bp, Serratia marcescens; identical to SEQ ID NO: 52018
  source 1..40: mol_type = genomic DNA

SEQ ID NO: 58889 - DNA, 40 bp, Serratia marcescens
  source 1..40: mol_type = genomic DNA
gggagtaggcgcgtaatactagtcaatcatgttgcctcct

SEQ ID NO: 58890 - DNA, 50 bp, Serratia marcescens
  source 1..50: mol_type = genomic DNA
tgggagaaattaacagtagctgagtagttaaacatagggctagactgctt

SEQ ID NO: 58891 - protein, 574 aa, Serratia marcescens
MNHESFSVEGNMRAFLYCRVSSTHQTKKQGGTGITRQEATVIEYINDYQPDPKLGYQLSLDDHEMLDPDLGKSAYHGYNFTKGALGEFKRKVLSREIKEGALVIENVDRFSRLPEHEAIREFNDLILGGIDIHEVETGVVYSKKIPNTLSKLSHSIERAWGESERKSTIAKKVWKARRETVLATGKPLPARTPKWLKIVNSEYVIDKKYSDAVNTIFKLYTEGYGTAYIVKYLNNNDMKIDGLSWSTAALTKMYSDERLIGWKSGMKIYPEIVGEDVFKKAREIKNSKVMLNKQKVNSSQRSIFNSVARCGKCGAAMCVSVNGHNKLYYWCWKKRGTKECDLSGFVYAYAELAILQHIKNIDWNKVYRDSDRSNERSEDLNMELAELLNYKLEIDEIIKTTERPPTAVLRALITTEEKISKLEEEISSIKASEYPLDFDFNVDDITNQNNIELRQKCNIQIKKSIKSICFNKDDKVIIIDIKYFTDVLKHVLILDNKTGGVVSSISIIKEDDAINYSSGSFKIIEHEDGCTFEGIDDVSVTDYFMLANYIGSIREKQWIVDVMYLQHNMDAVLK

SEQ ID NO: 58892 - DNA, 50 bp, Serratia marcescens; identical to SEQ ID NO: 58887
  source 1..50: mol_type = genomic DNA

SEQ ID NO: 58893 - DNA, 40 bp, Serratia marcescens; identical to SEQ ID NO: 52018
  source 1..40: mol_type = genomic DNA

SEQ ID NO: 58894 - DNA, 40 bp, Serratia marcescens; identical to SEQ ID NO: 58889
  source 1..40: mol_type = genomic DNA

SEQ ID NO: 58895 - DNA, 50 bp, Serratia marcescens; identical to SEQ ID NO: 58890
  source 1..50: mol_type = genomic DNA

SEQ ID NO: 58896 - protein, 401 aa, Serratia marcescens
MLDPDLGKSAYHGYNFTKGALGELKRKVLSREIKEGALVIENVDRFSRLPEHEAIREFNDLILGGIDIHEVETGVVYSKKIPNTLSKLSHSIERAWGESERKSTIAKKVWKARRETVLATGKPLPARTPKWLKIVNSEYVIDKKYSDAVNAIFKLYTEGYGTAYIVKYLNNNDMKIDGLSWNTAVLTKMYSDERLIGWKSGMKIYPAIVGEDVFKKARVIKSSKVMLNKQKVNSSQKSIFNSVARCGKCGAAMCVSVNGHNKLYYWCWKKRGTKECDLSGFVYAYAELAILQHIKNIDWNKVYRDSDRSNERSEAINMELAELINYKLEIDEIINTSERLPTAVLRALITTEEKISKLEEEISSIKASEYPLDFDFNVDDITNQNSIELRQKCNIQIKKKH

SEQ ID NO: 58897 - DNA, 50 bp, Serratia marcescens; identical to SEQ ID NO: 58887
  source 1..50: mol_type = genomic DNA

SEQ ID NO: 58898 - DNA, 40 bp, Serratia marcescens; identical to SEQ ID NO: 52018
  source 1..40: mol_type = genomic DNA

SEQ ID NO: 58899 - DNA, 40 bp, Serratia marcescens; identical to SEQ ID NO: 58889
  source 1..40: mol_type = genomic DNA

SEQ ID NO: 58900 - DNA, 50 bp, Serratia marcescens; identical to SEQ ID NO: 58890
  source 1..50: mol_type = genomic DNA

SEQ ID NO: 58901 - protein, 550 aa, Clostridium leptum; identical to SEQ ID NO: 55226

SEQ ID NO: 58902 - DNA, 50 bp, Clostridium leptum
  source 1..50: mol_type = genomic DNA
cttgtaaccgaaaacacttgcttttacagtgataaggaagtattcacaac

SEQ ID NO: 58903 - DNA, 40 bp, Clostridium leptum
  source 1..40: mol_type = genomic DNA
tagcttaaacccttgattttacgccgcttttgagaaggta

SEQ ID NO: 58904 - DNA, 40 bp, Clostridium leptum
  source 1..40: mol_type = genomic DNA
tagcttaaacccttgattttccgccgcttttgagaaggta

SEQ ID NO: 58905 - DNA, 50 bp, Clostridium leptum
  source 1..50: mol_type = genomic DNA
cctgtctcctctctcacttgctcttccagagatggggagagatttacctc

SEQ ID NO: 58906 - protein, 455 aa, Enterococcus faecalis
MANEIKQVALYIRVSTDQQAKHGDSLDEQQHTLNEYVRQQGNMRVFKTYIDDGISGQKLYRDEFQKLLDDVKKGRIDTILFTKLDRWFRNLRHYLNIQEILDKNNVTWLAVTQPFFNTETAMGRSFVNQSMGFAELEAQMTSERIRAVFDNKIRKGEVVSGKVPLGYEIKDKHLVPNEKAEIVKEIFQYYLETGSMRATVRHLENHFSMTRDYQSVRQMLTNRKYIGELRDNKNFCKPIIDRDVFERVQLQLSKNIRMNKKRDYMFTGLLVCSECGCNYSATAVISRYVRKDGTTNPNERHLYRCTKNRNNVKKCSNKKGIYETTLENFLLENIEKQAEELSVKMQQEPEVKKTKNTNDKIKKKIDRLKKAYLNEVITLEEYKKDREELEALLIPERDNKIAKIDLNSLHNYSTAEFRDGYKQLTISEKSSLWRQVIKNIVVYPDGNLKINFLGY

SEQ ID NO: 58907 - DNA, 50 bp, Enterococcus faecalis
  source 1..50: mol_type = genomic DNA
atttgcactaataaatactaaccagatggatgatatattttagtgcaaac

SEQ ID NO: 58908 - DNA, 40 bp, Enterococcus faecalis; identical to SEQ ID NO: 33858
  source 1..40: mol_type = genomic DNA

SEQ ID NO: 58909 - DNA, 40 bp, Enterococcus faecalis
  source 1..40: mol_type = genomic DNA
agacggtgtcggattgccagctggatgattatgagctaat

SEQ ID NO: 58910 - DNA, 50 bp, Enterococcus faecalis
  source 1..50: mol_type = genomic DNA
cttgtcacttatacatagaaaccagctggaggggatcccacaggccaaac

SEQ ID NO: 58911 - protein, 455 aa, Enterococcus faecalis
MANEIKQVALYIRVSTDQQAKHGDSLDEQQHTLNEYVRQQGNMRVFKTYIDDGISGQKLYRDEFQKLLDDVKKGRIDTILFTKLDRWFRNLRHYLNIQEILDKNNVTWLAVTQPFFNTETAMGRSFVNQSMGFAELEAQMTSERIRAVFDNKIRKGEVVSGKVPLGYEIKDKHLVPNEKAEIVKEIFQYYLETGSMRATVRHLENHFSMTRDYQSVRQMLTNRKYIGELRDNKNFCEPIIDRDVFERVQLQLSKNIRMNKKRDYMFTGLLVCSECGCNYSATAVISRYVRKDGTTNPNERHLYRCTKNRNNVKKCSNKKGIYETTLENFLLENIEKQAEELSVKMQQEPEVKKTKNTNDKIKKKIDRLKKAYLNEVITLEEYKKDREELEALLIPERDNKIAKIDLNSLHNYSTAEFRDGYKQLTISEKSSLWRQVIKNIVVYPDGNLKINFLGY

SEQ ID NO: 58912 - DNA, 50 bp, Enterococcus faecalis; identical to SEQ ID NO: 58907
  source 1..50: mol_type = genomic DNA

SEQ ID NO: 58913 - DNA, 40 bp, Enterococcus faecalis; identical to SEQ ID NO: 33858
  source 1..40: mol_type = genomic DNA

SEQ ID NO: 58914 - DNA, 40 bp, Enterococcus faecalis; identical to SEQ ID NO: 58909
  source 1..40: mol_type = genomic DNA

SEQ ID NO: 58915 - DNA, 50 bp, Enterococcus faecalis; identical to SEQ ID NO: 58910
  source 1..50: mol_type = genomic DNA

SEQ ID NO: 58916 - protein, 455 aa, Enterococcus faecalis
MANEIKQVALYIRVSTDQQAKHGDSLDEQQHTLNEYVRQQGNMRVFKTYIDDGISGQKLYRDEFQKLLDDVKKGRIDTILFTKLDRWFRNLRHYLNIQEILDKNNVTWLAVTQPFFNTETAMGRSFVNQSMGFAELEAQMTSERIRAVFDNKIRKGEVVSGKVPLGYEIKDKHLVPNEKAEIVKEIFQYYLETGSMRATVRHLENHFSMTRDYQSVRQMLTNRKYIGELRDNKNFCKPIIDRDVFERVQLQLSKNIRMNKKRDYMFTGLLVCSECGCNYSATAVISRYVRKDGTTNPNERHLYRCTKNRNNAKKCSNKKGIYETTLENFLLENIEKQAAELSVKMQQEPEVKKTKNTNDKIKKKIDRLKKAYLNEVITLEEYKKDREELEALLIPERDNKIAKIDLNSLHNYSTAEFRDGYKQLTISEKSSLWRQVIKNIVVYPDGNLKINFLGY

SEQ ID NO: 58917 - DNA, 50 bp, Enterococcus faecalis; identical to SEQ ID NO: 58907
  source 1..50: mol_type = genomic DNA

SEQ ID NO: 58918 - DNA, 40 bp, Enterococcus faecalis; identical to SEQ ID NO: 33858
  source 1..40: mol_type = genomic DNA

SEQ ID NO: 58919 - DNA, 40 bp, Enterococcus faecalis; identical to SEQ ID NO: 58909
  source 1..40: mol_type = genomic DNA

SEQ ID NO: 58920 - DNA, 50 bp, Enterococcus faecalis; identical to SEQ ID NO: 58910
  source 1..50: mol_type = genomic DNA

SEQ ID NO: 58921 - protein, 455 aa, Enterococcus faecalis
MANEIKQVALYIRVSTDQQAKHGDSLDEQQHTLNEYVRQQGNMRVFKTYIDDGISGQKLYRDEFQKLLDDVKKGRIDTILFTKLDRWFRNLRHYLNIQEILDKNNVTWLAVTQPFFNTETAMGRSFVNQSMGFAELEAQMTSERIRAVFDNKIRKGEVVSGKVPLGYEIKDKHLVPNEKAEIVKEIFQYYLETGSMRATVRHLENHFSMTRDYQSVRQMLTNRKYIGELRDNKNFCKPIIDRDVFERVQLQLSKNIRMNKKRDYMFTGLLVCSECGCNYSATAVISRYVRKDGTTNPNERHLYRCTKNRNNAKKCSNKKGIYETTLENFLLENIEKQAEELSVKMQQEPEVKKTKNTNDKIKKKIDRLKKAYLNEVITLEEYKKDREELEALLIPERDNKIAKIDLNSLHNYSTAEFRDGYKQLTISEKSSLWRQVIKNIVVYPDGNLKINFLGY

SEQ ID NO: 58922 - DNA, 50 bp, Enterococcus faecalis; identical to SEQ ID NO: 58907
  source 1..50: mol_type = genomic DNA

SEQ ID NO: 58923 - DNA, 40 bp, Enterococcus faecalis; identical to SEQ ID NO: 33858
  source 1..40: mol_type = genomic DNA

SEQ ID NO: 58924 - DNA, 40 bp, Enterococcus faecalis; identical to SEQ ID NO: 58909
  source 1..40: mol_type = genomic DNA

SEQ ID NO: 58925 - DNA, 50 bp, Enterococcus faecalis; identical to SEQ ID NO: 58910
  source 1..50: mol_type = genomic DNA

SEQ ID NO: 58926 - protein, 507 aa, Escherichia coli; identical to SEQ ID NO: 5406

SEQ ID NO: 58927 - DNA, 50 bp, Escherichia coli
  source 1..50: mol_type = genomic DNA
tagtgtatttagaccttgatgattttcatcagacacgtttaaatacacca

SEQ ID NO: 58928 - DNA, 40 bp, Escherichia coli; identical to SEQ ID NO: 5188
  source 1..40: mol_type = genomic DNA

SEQ ID NO: 58929 - DNA, 40 bp, Escherichia coli; identical to SEQ ID NO: 55319
  source 1..40: mol_type = genomic DNA

SEQ ID NO: 58930 - DNA, 50 bp, Escherichia coli
  source 1..50: mol_type = genomic DNA
ttgtcttttcttcccatgattatttccatcagaaatgcctaaatacttcc

SEQ ID NO: 58931 - protein, 507 aa, Escherichia coli
MKRVISYIRFSSERQAKGDSLRRQSKMVTDWLKAHPEYYLDQDLSFRDLGVSGFTGKHLKGGLGDFLTAIEKGLVKAGDTLLIESLDRLSRQDIDIASELLRRILRAGVDVVTLSDGEHYTKESLKDPLALIKSILIMQRAHEESLRKAERIQAAWDAKKEAAKAGIKVSKRCPAWLKLNDDRKSFSVIPEKVETVKRCFQLRLEGKSIWEIVRTLNAEGHRSMNQYKPGKFGQTSVQDLLKNRSVIGYFTPKGCEEISGYYPAIIDETTFYKVQQLSHSRYGKRSVSDKPLSVNLFKGVIRCSECGHALIITGFSDTRSGIYRCPLRNENRCSAKGLSRKQTDGTLLTLLSRLDRFDSDMTNVIDTLKLHREHISSNIEKLVQLSLEIEDLSAITIKLKQLKGELSQVDADIEKETQRLKSIDVGCLSDCDLTTKAGRIEAQLIIRSAVKEVVLNTAKRRCKVTFHNGRLIDLPITENPSEDVTEAIQSLSEVTERGLIDVDEVII

SEQ ID NO: 58932 - DNA, 50 bp, Escherichia coli; identical to SEQ ID NO: 58927
  source 1..50: mol_type = genomic DNA

SEQ ID NO: 58933 - DNA, 40 bp, Escherichia coli; identical to SEQ ID NO: 5188
  source 1..40: mol_type = genomic DNA

SEQ ID NO: 58934 - DNA, 40 bp, Escherichia coli; identical to SEQ ID NO: 55319
  source 1..40: mol_type = genomic DNA

SEQ ID NO: 58935 - DNA, 50 bp, Escherichia coli; identical to SEQ ID NO: 58930
  source 1..50: mol_type = genomic DNA

SEQ ID NO: 58936 - protein, 507 aa, Escherichia coli; identical to SEQ ID NO: 5406

SEQ ID NO: 58937 - DNA, 50 bp, Escherichia coli; identical to SEQ ID NO: 58927
  source 1..50: mol_type = genomic DNA

SEQ ID NO: 58938 - DNA, 40 bp, Escherichia coli
  source 1..40: mol_type = genomic DNA
cggcgttaatcgggttattttagacagccgcccggttcat

SEQ ID NO: 58939 - DNA, 40 bp, Escherichia coli
  source 1..40: mol_type = genomic DNA
cggcgttaatcgggttatttcagacagccgcccggttcat

SEQ ID NO: 58940 - DNA, 50 bp, Escherichia coli; identical to SEQ ID NO: 58930
  source 1..50: mol_type = genomic DNA

SEQ ID NO: 58941 - protein, 507 aa, Escherichia coli; identical to SEQ ID NO: 5406

SEQ ID NO: 58942 - DNA, 50 bp, Escherichia coli; identical to SEQ ID NO: 58927
  source 1..50: mol_type = genomic DNA

SEQ ID NO: 58943 - DNA, 40 bp, Escherichia coli; identical to SEQ ID NO: 22783
  source 1..40: mol_type = genomic DNA

SEQ ID NO: 58944 - DNA, 40 bp, Escherichia coli
  source 1..40: mol_type = genomic DNA
cggcgttaatcgggtgatttcagacagccgaccggttcat

SEQ ID NO: 58945 - DNA, 50 bp, Escherichia coli; identical to SEQ ID NO: 58930
  source 1..50: mol_type = genomic DNA

SEQ ID NO: 58946 - protein, 507 aa, Escherichia coli
MKRVISYIRFSSERQAKGDSLRRQSKMVTDWLKAHPEYYLDQDLSFRDLGVSGFTGKHLKGGLGDFLTAIEKGLVKAGDTLLIESLDRLSRQDIDIASELLRRILRAGVDVVTLSDGEHYTKESLKDPLALIKSILIMQRAHEESLRKAERIQAAWDAKKEAAKAGIKVSKRCPAWLKLNDDRKSFSVIPEKVETVKRCFQLRLEGKSIWEIVRTLNAEGHRSMNQYKPGKFGQTSVQDLLKNRSVIGYFTPKGCEEISGYYPAIIDETTFYKVQQLSHSRYGRKPVSDKPLSVNLFKGVIRCSECGHALIITGFSDTRNGIYRCPLRNENRCSAKGLSRKQTDGTLLTLLSRLDRFDSDTTNTVDTLKLHREHISSNIEKLVQLSLEIEDLNAITNKLKQLKNELSQVDADIEKETQRLKSIDVGCLSDCDLTTKAGRIEAQLIIKSAVKEVVLNTAKRRCKVTFHNGKVIDLPITENPSEDVTEAIQSLSEVTERGLIDVDEVII

SEQ ID NO: 58947 - DNA, 50 bp, Escherichia coli; identical to SEQ ID NO: 58927
  source 1..50: mol_type = genomic DNA

SEQ ID NO: 58948 - DNA, 40 bp, Escherichia coli; identical to SEQ ID NO: 5188
  source 1..40: mol_type = genomic DNA

SEQ ID NO: 58949 - DNA, 40 bp, Escherichia coli; identical to SEQ ID NO: 55319
  source 1..40: mol_type = genomic DNA

SEQ ID NO: 58950 - DNA, 50 bp, Escherichia coli; identical to SEQ ID NO: 58930
  source 1..50: mol_type = genomic DNA

SEQ ID NO: 58951 - protein, 507 aa, Escherichia coli; identical to SEQ ID NO: 22721

SEQ ID NO: 58952 - DNA, 50 bp, Escherichia coli; identical to SEQ ID NO: 58927
  source 1..50: mol_type = genomic DNA

SEQ ID NO: 58953 - DNA, 40 bp, Escherichia coli; identical to SEQ ID NO: 5188
  source 1..40: mol_type = genomic DNA

SEQ ID NO: 58954 - DNA, 40 bp, Escherichia coli; identical to SEQ ID NO: 55319
  source 1..40: mol_type = genomic DNA

SEQ ID NO: 58955 - DNA, 50 bp, Escherichia coli; identical to SEQ ID NO: 58930
  source 1..50: mol_type = genomic DNA

SEQ ID NO: 58956 - protein, 507 aa, Escherichia coli
MKRVISYIRFSSERQAKGDSLRRQSKMVTDWLKAHPEYYLDQDLSFRDLGVSGFTGKHLKGGLGDFLTAIEKGLVKAGDTLLIESLDRLSRQDIDIASELLRRILRAGVDVVTLSDGEHYTKESLRDPLSLIKSILIMQRAHEESLRKAERIQAAWDAKKEAAKAGIKVSKRCPAWLKLNDDRKTFSVIPEKVETVKRCFQLRLEGKSIWAIVKALNDEDRQSMNQYKPGKFGQTSVQDLLKNRSVIGYFTPKGCEGISGYYPAIIDETTFYKVQQLSHSRYGRKPASAKPLSVNLFKGVIRCSECGHALIITGFSDTRNGIYRCPLRNENRCSAKGLSRKQTDGTLLALLSRLDRFDSDTTNIIDTLKLHREHISSNIEKLVQLSLEIEDLSAITSKLKQLKGELSQVDADIEKETQRLKSIDVGCLSDCDLTTKAGRIEAQLIIKSAVKEVVLNTAKRRCKVTFHNGKAITLPITENPSEDVTEAIQSLSEVTERGLIDVDEVIV

SEQ ID NO: 58957 - DNA, 50 bp, Escherichia coli; identical to SEQ ID NO: 58927
  source 1..50: mol_type = genomic DNA

SEQ ID NO: 58958 - DNA, 40 bp, Escherichia coli; identical to SEQ ID NO: 5188
  source 1..40: mol_type = genomic DNA

SEQ ID NO: 58959 - DNA, 40 bp, Escherichia coli; identical to SEQ ID NO: 55319
  source 1..40: mol_type = genomic DNA

SEQ ID NO: 58960 - DNA, 50 bp, Escherichia coli; identical to SEQ ID NO: 58930
  source 1..50: mol_type = genomic DNA

SEQ ID NO: 58961 - protein, 507 aa, Escherichia coli
MKRVISYIRFSSERQAKGDSLRRQSKMVTDWLKAHPEYYLDQDLSFRDLGVSGFTGKHLKGGLGDFLTAIEKGLVKAGDTLLIESLDRLSRQDIDIASELLRRILRAGVDVVTLSDGEHYTKESLRDPLSLIKSILIMQRAHEESLRKAERIQAAWDAKKEAAKAGIKVSKRCPAWLKLNDDRKSFSVIPEKVETVKRCFQLRLEGKSIWEIVRTLNDEGHQSMSQYKPGKFGQTSVQDLLKNRSVIGYFTPKGCEEIAGYYPAIIDETTFYKVQQLSHSRYGRKPASAKPLSVNLFKGVIRCSECGHALIITGFSDTRNGIYRCPLRNENRCSAKGLSRKQTDGTLLALLSRLDRFDSDTTNNINMLRLHREHISSNIEKLVQLSLEIEDLSAITSKLKQLKGELSQVDADIEKETQRLKSIDVGCLSDCDLTTKAGRIEAQLIIKSAVKEVVLNTAKRRCKVTFHNGKSITLPITENPSEDVTEAIQSLSEVTERGLIDVDVVEI

SEQ ID NO: 58962 - DNA, 50 bp, Escherichia coli; identical to SEQ ID NO: 58927
  source 1..50: mol_type = genomic DNA

SEQ ID NO: 58963 - DNA, 40 bp, Escherichia coli; identical to SEQ ID NO: 5188
  source 1..40: mol_type = genomic DNA

SEQ ID NO: 58964 - DNA, 40 bp, Escherichia coli; identical to SEQ ID NO: 55319
  source 1..40: mol_type = genomic DNA

SEQ ID NO: 58965 - DNA, 50 bp, Escherichia coli; identical to SEQ ID NO: 58930
  source 1..50: mol_type = genomic DNA

SEQ ID NO: 58966 - protein, 507 aa, Escherichia coli
MKRVISYIRFSSERQAKGDSLRRQSKMVTDWLKAHPEYYLDQDLSFRDLGVSGFTGKHLKGGLGDFLTAIEKGLVKAGDTLLIESLDRLSRQDIDIASELLRRILRAGVDVVTLSDGEHYTKESLKDPLALIKSILIMQRAHEESLRKAERIQAAWDAKKEAAKAGIKVSKRCPAWLKLNDDRKSFSVIPEKVETVKRCFQLRLEGKSIWEIVRTLNAEGHRSMNQYKPGKFGQTSVQDLLKNRSVIGYFTPKGCEEISGYYPAIIDETTFYKVQQLSHSRYGKRSVSDKPLSVNLFKGVIRCSECGHALIITGFSDTRNGIYRCPLRNENRCNAKGLSRKQTDGTLLALLSRLDRFDSDMTNVIDTLKLHREHISSNIEKLVQLSLEIEDLNAITNKLKQLKNELSQVDADIEKETQRLKSIDVGCLSDCDLTTKAGRIEAQLIIKSAVKEVVLNTAKRRCKVTFHNGKVIDLPITENPSEDVTEAIQSLSEVTERGLIDVDEVII

SEQ ID NO: 58967 - DNA, 50 bp, Escherichia coli; identical to SEQ ID NO: 58927
  source 1..50: mol_type = genomic DNA

SEQ ID NO: 58968 - DNA, 40 bp, Escherichia coli; identical to SEQ ID NO: 5188
  source 1..40: mol_type = genomic DNA

SEQ ID NO: 58969 - DNA, 40 bp, Escherichia coli; identical to SEQ ID NO: 55319
  source 1..40: mol_type = genomic DNA

SEQ ID NO: 58970 - DNA, 50 bp, Escherichia coli; identical to SEQ ID NO: 58930
  source 1..50: mol_type = genomic DNA

SEQ ID NO: 58971 - protein, 507 aa, Escherichia coli
MKRVISYIRFSSERQAKGDSLRRQSKMVTDWLKAHPEYYLDQDLSFRDLGVSGFTGKHLKGGLGDFLTAIEKGLVKAGDTLLIESLDRLSRQDIDIASELLRRILRAGVDVVTLSDGEHYTKESLKDPLALIKSILIMQRAHEESLRKAERIQAAWDAKKEAAKAGIKVSKRCPAWLKLNDDRKSFSVIPEKVETVKRCFQLRLEGKSIWEIVRTLNDEGRQTLNQHKAGSFGQSSVQDLLKNRSVIGYFTPKGCEEIAGYYPAIIDETTFYKVQQLSHSRYGRKPVSAKPLSVNLFKGVIRCSECGHALIITGFSDTRSGIYRCPLRNENRCSAKGLSRKQTDGTLLALLSRLDRFDSDTTNIIDTLKLHREHISSNIEKLVQLSLEIEDLNAITNKLKQLKNELSQVDADIEKETQRLKSIDVGCLSDCDLTTKAGRIEAQLIIKSAVKEVVLNTAKRRCKVTFHNGKVIDLPITENPSEDVTEAIQSLSEVTERGLIDVDEVII

SEQ ID NO: 58972 - DNA, 50 bp, Escherichia coli; identical to SEQ ID NO: 58927
  source 1..50: mol_type = genomic DNA

SEQ ID NO: 58973 - DNA, 40 bp, Escherichia coli; identical to SEQ ID NO: 5188
  source 1..40: mol_type = genomic DNA

SEQ ID NO: 58974 - DNA, 40 bp, Escherichia coli; identical to SEQ ID NO: 55319
  source 1..40: mol_type = genomic DNA

SEQ ID NO: 58975 - DNA, 50 bp, Escherichia coli; identical to SEQ ID NO: 58930
  source 1..50: mol_type = genomic DNA

SEQ ID NO: 58976 - protein, 419 aa, Escherichia coli
MSRQDIDIASELLRRILRAGVDVVTLSDGEHYTKESLKDPLALIKSILIMQRAHEESLRKAERIQAAWDAKKEAAKAGIKVSKRCPAWLKLNDDRKSFSVIPEKVETVKRCFQLRLEGKSIWEIVRTLNDEGRQTLNQHKAGSFGQSSVQDLLKNRSVIGYFTPKGCEEIAGYYPAIIDETTFYKVQQLSYARYGRKPASDKPLSVNLFKGVIRCSECGHALIITGFSDTRSGIYRCPLRNENRCSAKGLSRKQTDGTLLALLSRLDRFDSDTTNIIDTLKLHREHISSNIEKLVQLSLEIEDLNAITNKLKQLKNELSQVDADIEKETQRLKSIDVGCLSDCDLTTKAGRIEAQLIIKSAVKEVVLNTAKRRCKVTFHNGKVIDLPITENPSEDVTEAIQSLSEVTERGLIDVDEVII

SEQ ID NO: 58977 - DNA, 50 bp, Escherichia coli; identical to SEQ ID NO: 58927
  source 1..50: mol_type = genomic DNA

SEQ ID NO: 58978 - DNA, 40 bp, Escherichia coli; identical to SEQ ID NO: 5188
  source 1..40: mol_type = genomic DNA

SEQ ID NO: 58979 - DNA, 40 bp, Escherichia coli; identical to SEQ ID NO: 55319
  source 1..40: mol_type = genomic DNA

SEQ ID NO: 58980 - DNA, 50 bp, Escherichia coli; identical to SEQ ID NO: 58930
  source 1..50: mol_type = genomic DNA

SEQ ID NO: 58981 - protein, 507 aa, Escherichia coli
MKRVISYIRFSSERQAKGDSLRRQSKMVTDWLKAHPEYYLDQDLSFRDLGVSGFTGKHLKGGLGDFLTAIEKGLVKAGDTLLIESLDRLSRQDIDIASELLRRILRAGVDVVTLSDGEHYTKESLKDPLALIKSILIMQRAHEESLRKAERIQAAWDAKKEAAKAGIKVSKRCPAWLKLNDDRKSFSVIPEKVETVKRCFQLRLEGKSIWEIVRTLNDEGRQTLNQHKAGSFGQSSVQDLLKNRSVIGYFTPKGCEEIAGYYPAIIDETTFYKVQQLSYARYGRKPASDKPLSVNLFKGVIRCSECGHALIITGFSDTRSGIYRCPLRNENRCSAKGLSRKQTDGTLLALLSRLDRFDSDTTNIIDTLKLHREHISSNIEKLVQLSLEIEDLNAITNKLKQLKNELSQVDADIEKETQRLKSIDVGCLSDCDLTTKAGRIEAQLIIKSAVKEVVLNTAKRRCKVTFHNGKVIDLPITENPSEDVTEAIQSLSEVTERGLIDVDVVEI

SEQ ID NO: 58982 - DNA, 50 bp, Escherichia coli; identical to SEQ ID NO: 58927
  source 1..50: mol_type = genomic DNA

SEQ ID NO: 58983 - DNA, 40 bp, Escherichia coli; identical to SEQ ID NO: 5188
  source 1..40: mol_type = genomic DNA

SEQ ID NO: 58984 - DNA, 40 bp, Escherichia coli; identical to SEQ ID NO: 55319
  source 1..40: mol_type = genomic DNA

SEQ ID NO: 58985 - DNA, 50 bp, Escherichia coli; identical to SEQ ID NO: 58930
  source 1..50: mol_type = genomic DNA

SEQ ID NO: 58986 - protein, 507 aa, Escherichia coli
MKRVISYIRFSSERQAKGDSLRRQSKMVNDWLKAHPEYYLDQDLSFRDLGVSGFTGKHLKGGLGDFLTAIEKGLVKAGDTLLIESLDRLSRQDIDIASELLRRILRAGVDVVTLSDGEHYTKESLRDPLSLIKSILIMQRAHEESLRKAERIQAAWDAKKEAAKAGIKVSKRCPAWLKLNDDRKSFSIIPEKVETVKRCFQLRLEGKSIWEIVRTLNDEGHQTLNQYKAGKFGQTSVQDLLKNRSVIGYFTPKGCEEIAGYFPPIIPETDFYKVQQLSYSRYGRKPASDKPLSVNLFKGVIRCSECGHALIITGFSDTRSGIYRCPSRNENRCNAKGLSRKQTDGTLLALLSRIDRFDSDMTNTIDTLKLHREHISSNIEKLVQLSLEIEDLSAITSKLKQLKGELSQVDADIEKETQRLKSIDVGCLSDCDLTTKAGRIEAQLIIKSAVKEVVLNTAKRRCKVTFHNGKVIDLPITETPSEDVTEAIQSLSEVTERGLIDVDEVII

SEQ ID NO: 58987 - DNA, 50 bp, Escherichia coli; identical to SEQ ID NO: 58927
  source 1..50: mol_type = genomic DNA

SEQ ID NO: 58988 - DNA, 40 bp, Escherichia coli; identical to SEQ ID NO: 5188
  source 1..40: mol_type = genomic DNA

SEQ ID NO: 58989 - DNA, 40 bp, Escherichia coli; identical to SEQ ID NO: 55319
  source 1..40: mol_type = genomic DNA

SEQ ID NO: 58990 - DNA, 50 bp, Escherichia coli; identical to SEQ ID NO: 58930
  source 1..50: mol_type = genomic DNA

SEQ ID NO: 58991 - protein, 498 aa, Escherichia coli
MKRVISYIRFSSERQAKGDSLRRQSKMVTDWLKAHPEYYLDQDLSFRDLGVSGFTGKHLKGGLGDFLTAIEKGLVKAGDTLLIESLDRLSRQDIDIASELLRRILRAGVDVVTLSDGEHYTKESLKDPLALIKSILIMQRAHEESLRKAERIQAAWDAKKEAAKAGIKVSKRCPAWLKLNDDRKSFSVIPEKVETVKRCFQLRLEGKSIWEIVRTLNDEGRQTLNQHKAGSFGQSSVQDLLKNRSVIGYFTPKGCEEIAGYYPAIIDETTFYKVQQLSYARYGRKPASDKPLSVNLFKGVIRCSECGHALIITGFSDTRSGIYRCPLRNENRCSAKGLSRKQTDGTLLALLSRLDRFDSDTTNIIDTLKLHREHISSNIEKLVQLSLEIEDLNAITNKLKQLKNELSQVDADIEKETQRLKSIDVGCLSDCDLTTKAGRIEAQLIIKSAVKEVVLNTAKRRCKVTFHNGKVIDLPITENPQKMLQRLYSRFLKSLRGV

SEQ ID NO: 58992 - DNA, 50 bp, Escherichia coli; identical to SEQ ID NO: 58927
  source 1..50: mol_type = genomic DNA

SEQ ID NO: 58993 - DNA, 40 bp, Escherichia coli; identical to SEQ ID NO: 5188
  source 1..40: mol_type = genomic DNA

SEQ ID NO: 58994 - DNA, 40 bp, Escherichia coli; identical to SEQ ID NO: 55319
  source 1..40: mol_type = genomic DNA

SEQ ID NO: 58995 - DNA, 50 bp, Escherichia coli; identical to SEQ ID NO: 58930
  source 1..50: mol_type = genomic DNA

SEQ ID NO: 58996 - protein, 507 aa, Escherichia coli
MKRVISYIRFSSERQAKGDSLRRQSKMVNDWLKAHPEYYLDQDLSFRDLGVSGFTGKHLKGGLGDFLTAIEKGLVKAGDTLLIESLDRLSRQAVDRASELLRNILRSGVDVVTLSDGEHYTSESLKDPLALIKSILIMQRAHEESLRKSERIQAAWNRKKELISEGIKISKRCPAWLRLNDDRKSFSVIPEKVETVKRCFQLRLEGKSIWEIVRTLNDEGHQTLNQHKAGSFGQSSVQDLLKNRSVIGYFTPKGCEEISGYFPPIIPETDFYKVQQLSYSRYGRKPASDKPLSVNLFKGVIRCSECGHALIITGFSDTRNGIYRCPLRNENRCSAKGLSRKQTDGTLLTLLSRLDRFDSDTTNTIDTLKLHREHISSNIEKLVQLSLEIEDLSAITIKLKQLKGELSQVDADIEKETQRLKSIDVGCLSDCDLTTKAGRIEAQLIIKSAVKEVVLNTAKRRCKVTFHNGKAITLPITENPSEDVTEAIQSLSEVTERGLIDVDEVII

SEQ ID NO: 58997 - DNA, 50 bp, Escherichia coli; identical to SEQ ID NO: 58927
  source 1..50: mol_type = genomic DNA

SEQ ID NO: 58998 - DNA, 40 bp, Escherichia coli; identical to SEQ ID NO: 5188
  source 1..40: mol_type = genomic DNA

SEQ ID NO: 58999 - DNA, 40 bp, Escherichia coli; identical to SEQ ID NO: 55319
  source 1..40: mol_type = genomic DNA

SEQ ID NO: 59000 - DNA, 50 bp, Escherichia coli; identical to SEQ ID NO: 58930
  source 1..50: mol_type = genomic DNA

SEQ ID NO: 59001 - protein, 587 aa, Streptococcus pneumoniae; identical to SEQ ID NO: 10016

SEQ ID NO: 59002 - DNA, 50 bp, Streptococcus pneumoniae; identical to SEQ ID NO: 9807
  source 1..50: mol_type = genomic DNA

SEQ ID NO: 59003 - DNA, 40 bp, Streptococcus pneumoniae; identical to SEQ ID NO: 32783
  source 1..40: mol_type = genomic DNA

SEQ ID NO: 59004 - DNA, 40 bp, Streptococcus pneumoniae; identical to SEQ ID NO: 52059
  source 1..40: mol_type = genomic DNA

SEQ ID NO: 59005 - DNA, 50 bp, Streptococcus pneumoniae
  source 1..50: mol_type = genomic DNA
ttttttcctggacactggacaagagcttgggagccacaagtgtggataca

SEQ ID NO: 59006 - protein, 587 aa, Streptococcus pneumoniae; identical to SEQ ID NO: 37096

SEQ ID NO: 59007 - DNA, 50 bp, Streptococcus pneumoniae; identical to SEQ ID NO: 9807
  source 1..50: mol_type = genomic DNA

SEQ ID NO: 59008 - DNA, 40 bp, Streptococcus pneumoniae; identical to SEQ ID NO: 32783
  source 1..40: mol_type = genomic DNA

SEQ ID NO: 59009 - DNA, 40 bp, Streptococcus pneumoniae; identical to SEQ ID NO: 52059
  source 1..40: mol_type = genomic DNA

SEQ ID NO: 59010 - DNA, 50 bp, Streptococcus pneumoniae; identical to SEQ ID NO: 59005
  source 1..50: mol_type = genomic DNA

SEQ ID NO: 59011 - protein, 587 aa, Streptococcus pneumoniae; identical to SEQ ID NO: 9821

SEQ ID NO: 59012 - DNA, 50 bp, Streptococcus pneumoniae; identical to SEQ ID NO: 9807
  source 1..50: mol_type = genomic DNA

SEQ ID NO: 59013 - DNA, 40 bp, Streptococcus pneumoniae; identical to SEQ ID NO: 32783
  source 1..40: mol_type = genomic DNA

SEQ ID NO: 59014 - DNA, 40 bp, Streptococcus pneumoniae; identical to SEQ ID NO: 52059
  source 1..40: mol_type = genomic DNA

SEQ ID NO: 59015 - DNA, 50 bp, Streptococcus pneumoniae; identical to SEQ ID NO: 59005
  source 1..50: mol_type = genomic DNA

SEQ ID NO: 59016 - protein, 587 aa, Streptococcus pneumoniae
MKKEVKVIKGDTTLKRTASGCVERSIKRVAAYCRVSTDTEDQINSYNSQVEHYTEFIQKNNEWTLAGIYADEAITGTQVDRRIDFQRLINDCMNGDIDMIITKSISRFARNTLDTLKYVRKLKEFNVAVFFEEENINTLTMDGELLLTILSSVAQQEVENISANVKKGLRMKMERGEMVGFQGCLGYDYDPETKSISINEKEAEIVRYIFRRYIEGVGGMVISRELEEQGYLSPRGNKRWTETTVLGIIKNEKYKGDLMMGKTYTVDPISKRRLDNYGEQDKFYIENHHEPIISEEVFEKAQGIRLRRSKNRNTVANNGGKREKYSRKYAFSSMLECGFCGHNLSRRNWHSSSEYTKVIWQCVNATKNGKKYCPHSKGIEEEAIEKAFMESYRQVCHNNVEITNEFLKTVEEELKDNSLAKDLKKITNQLDKVLKKEKDLVELRLNESISMDIYQDKYNEIAISKEKLLAEKRTLEVTLTDEKALKKRLEGFKKILESNKYLEKFDRAVFESIVDKIIIGGTNDEGEIDPAMITIIYKTGKKDSQDGRLFKSRRKNAKEVNEETDNKLYPQSSDEVNNLCSYPMDNT

SEQ ID NO: 59017 - DNA, 50 bp, Streptococcus pneumoniae; identical to SEQ ID NO: 9807
  source 1..50: mol_type = genomic DNA

SEQ ID NO: 59018 - DNA, 40 bp, Streptococcus pneumoniae; identical to SEQ ID NO: 32783
  source 1..40: mol_type = genomic DNA

SEQ ID NO: 59019 - DNA, 40 bp, Streptococcus pneumoniae; identical to SEQ ID NO: 52059
  source 1..40: mol_type = genomic DNA

SEQ ID NO: 59020 - DNA, 50 bp, Streptococcus pneumoniae; identical to SEQ ID NO: 59005
  source 1..50: mol_type = genomic DNA

SEQ ID NO: 59021 - protein, 443 aa, Streptococcus pneumoniae; identical to SEQ ID NO: 37101

SEQ ID NO: 59022 - DNA, 50 bp, Streptococcus pneumoniae; identical to SEQ ID NO: 9807
  source 1..50: mol_type = genomic DNA

SEQ ID NO: 59023 - DNA, 40 bp, Streptococcus pneumoniae; identical to SEQ ID NO: 32783
  source 1..40: mol_type = genomic DNA

SEQ ID NO: 59024 - DNA, 40 bp, Streptococcus pneumoniae; identical to SEQ ID NO: 52059
  source 1..40: mol_type = genomic DNA

SEQ ID NO: 59025 - DNA, 50 bp, Streptococcus pneumoniae; identical to SEQ ID NO: 59005
  source 1..50: mol_type = genomic DNA

SEQ ID NO: 59026 - protein, 454 aa, Streptomyces lunaelactis
MNDDDQTGVERQERICRDVAERLGLIVDEDQVFVDNNRSAWQRKRPGWDALLAEASQGRIRHVLTYHPDRLMRQPRDLEELLQIADDHDITLHGQANRRDLADPDDRFFLRIEVAHACRSSDDTSRRLIDSMIDRAQDGRPHTGRRRYGYDKTGTQIIPEEAAIVREIFNRYLGGESPVQLAKELFARGVKTAEGRDWNAPRVGDLLDNRHVAGIRVFRGEEIGEGEWPAIIDRGGWMEVRERRAYRAAATATSERSSRFSLLRGVVTCTGCGKVMGGSGGSGSKYVCNHTHRLDVPRCNREVSAPILEELVAEAAINLLERLDPTDAPTPSALTEEDRAGIEADHQELKDLKDMWENQELKTREYRDMRRTVEARIAEIERKMIVRPTAEVLDGLVGPHARERWDELEDAENYQRMNAVIRFLFAAVKIKEATKKGRQFDYGRIDIEQNPIRV

SEQ ID NO: 59027 - DNA, 50 bp, Streptomyces lunaelactis
  source 1..50: mol_type = genomic DNA
aagttctgtgagcgaggcttgacctggatcaagccgcgttcgtagtcttt

SEQ ID NO: 59028 - DNA, 40 bp, Streptomyces lunaelactis
  source 1..40: mol_type = genomic DNA
gaagcgggaccggatgacgtggatcaaaccgtcattcctg

SEQ ID NO: 59029 - DNA, 40 bp, Streptomyces lunaelactis
  source 1..40: mol_type = genomic DNA
gaagcgggaccggatgacgttgatcaaaccgtcattcctg

SEQ ID NO: 59030 - DNA, 50 bp, Streptomyces lunaelactis
  source 1..50: mol_type = genomic DNA
aagttctctctaatagacttgtctttgaccaatctgagattgttatctta

SEQ ID NO: 59031 - protein, 509 aa, Streptomyces scabiei
MPIAPEFLSLAYPGQEFPAYLYGRASRDPKRKGRSVQSQLDEGRATCLDAGWPIAGEFKDVDRSASAYARRTRDEFEEMIAGIQAGECRILVAFEASRYYRDLEAYVRLRRVCREAGVLLCYNGQVYDLSKSADRKATAQDAVNAEGEADDIRERNLRTTRLNAKRGGAHGPVPDGYKRRYDPDSGDLVDQIPHPDRAGLITEIFRRAAAAEPLAAICRDLNERGETTHRGKAWQRHHLHAILRNPAYIGHRRHLGVDTGKGMWAPICDDEDFAETFQAVQEILSLPGRQLSPGPEAQHLQTGIALCGEHPDEPPLRSVTVRGRTNYNCSTRYDVAMREDRMDAFVEESVITWLASDEAVAAFEDNTDDERTRKARIRLKVLEEQLEAAQKQARTLRPDGMGMLLSIDSLAGLEAELTPQIDKARQESRSLHVPALLRDLLGKPRADVDRAWNEALTLPQRRMILRMVVTIRLFKAGSRGVRAIEPGRITLSYVGEPGFKPVGGNRAKQ

SEQ ID NO: 59032 - DNA, 50 bp, Streptomyces scabiei
  source 1..50: mol_type = genomic DNA
gtatgtgtctacgcgagattctcgcccgagaacttctgcaaggcactgct

SEQ ID NO: 59033 - DNA, 40 bp, Streptomyces scabiei
  source 1..40: mol_type = genomic DNA
gaaggggagtagctcttcgccggaccgtcgacatactgct

SEQ ID NO: 59034 - DNA, 40 bp, Streptomyces scabiei
  source 1..40: mol_type = genomic DNA
gaaggggagtagctcttcgggggaccgtcgacatactgct

SEQ ID NO: 59035 - DNA, 50 bp, Streptomyces scabiei
  source 1..50: mol_type = genomic DNA
aaataagccgaatatagattctctggtgagaatttgatcagggcactgct

SEQ ID NO: 59036 - protein, 694 aa, Sinorhizobium meliloti; identical to SEQ ID NO: 1211

SEQ ID NO: 59037 - DNA, 50 bp, Sinorhizobium meliloti; identical to SEQ ID NO: 18597
  source 1..50: mol_type = genomic DNA

SEQ ID NO: 59038 - DNA, 40 bp, Sinorhizobium meliloti
  source 1..40: mol_type = genomic DNA
gaaggcctcggccatgccgttcgattgcgggctgcgcacc

SEQ ID NO: 59039 - DNA, 40 bp, Sinorhizobium meliloti
  source 1..40: mol_type = genomic DNA
gaaggcctcggccatgccgtacgattgcgggctgcgcacc

SEQ ID NO: 59040 - DNA, 50 bp, Sinorhizobium meliloti
  source 1..50: mol_type = genomic DNA
acggagcataggtgtgtctcctcctacattccctacagctgctggagatc

SEQ ID NO: 59041 - protein, 465 aa, Mycobacteroides abscessus
MLVFVYARISKDRTGAGLGIERQVDECGLLAESLGWTVVRTFSDNDISAYSGKTRPAYEAMLAALEAGEAHGVIVWHTDRLHRRPIELEGFIDLCERKKIEVRAVKAGTIDLSTPSGRMIARMLGAAARHEVEHMIERAKSQKKQAALDGKYRGGRRPFGYEPDGLHLREAEADAIRTGVERVLSGVSLRQIARDWNAAGLRTSSGNNEFSSLEVRKILLRPRNAGIVLHEDQRIGQGQWEAIVDTDTFAALESVLRDPGRAKHISYIRKYQGSGVYLCGRAECGAVMRISSQTIVKGTQERQKTYVCSRSKHLGRLVEYVDEYVDEHVIRRLLEPDARQVFVSAEADLTALHAQREGLRSRLDELSMLFAAGDIDGPQLKRGSAELKNKLAVIDAELTSARSSSALAELLEADDVEAAWKVTPPDIRGKIIDTLMTVTILPIGRGRQRDGSYFDPSKIQITWKS

SEQ ID NO: 59042 - DNA, 50 bp, Mycobacteroides abscessus
  source 1..50: mol_type = genomic DNA
aaacggcttagttagagatttgacaggtcattattcgagttgataccctt

SEQ ID NO: 59043 - DNA, 40 bp, Mycobacteroides abscessus
  source 1..40: mol_type = genomic DNA
cacagcggcggcaagcgccaggtcgtataccgaccccatc

SEQ ID NO: 59044 - DNA, 40 bp, Mycobacteroides abscessus
  source 1..40: mol_type = genomic DNA
cacagcggcggcaagcgcccagtcgtataccgaccccatc

SEQ ID NO: 59045 - DNA, 50 bp, Mycobacteroides abscessus
  source 1..50: mol_type = genomic DNA
acaggccctcggatgggatctgtccagtcatttctcatgaagatgccctt

SEQ ID NO: 59046 - protein, 465 aa, Mycobacteroides abscessus
MLVFVYARISKDRTGAGLGIERQVDECGLLAESLGWTVVRTFSDNDISAYSGKTRPAYEAMLAALEAGEAQGVIVWHTDRLHRRPIELEGFIDLCERKKIEVRAVKAGTIDLSTPSGRMIARMLGAAARHEVEHMIERAKSQKKQAALDGKYRGGRRPFGYEPDGLHLREAEADAIRTGVEGVLSGVSLRQIARDWNAAGLRTSSGNNEFSSLEVRKILLRPRNAGIVLHEDQRIGQGQWEAIVDTDTFAALESVLRDPGRAKHISYIRKYQGSGVYLCGRAECGAVMRISSQTIAKGTQERQKTYVCSSSKHLGRLVEYVDEYVDEHVIRRLLEPDARQVFVSAEADLTALHAQREGLRSRLDELSMLFAAGDIDGPQLKRGSAELKNKLAVIDAELTSARSSSALAELLEADDVEAAWKVTPPDIRGKIIDTLMTVTILPIGRGRQRDGSYFDPSKIQITWKS

SEQ ID NO: 59047 - DNA, 50 bp, Mycobacteroides abscessus; identical to SEQ ID NO: 59042
  source 1..50: mol_type = genomic DNA

SEQ ID NO: 59048 - DNA, 40 bp, Mycobacteroides abscessus; identical to SEQ ID NO: 34388
  source 1..40: mol_type = genomic DNA

SEQ ID NO: 59049 - DNA, 40 bp, Mycobacteroides abscessus
  source 1..40: mol_type = genomic DNA
gaaggcgttgccgtgcgagcaatccagcaccagccagtcc

SEQ ID NO: 59050 - DNA, 50 bp, Mycobacteroides abscessus; identical to SEQ ID NO: 59045
  source 1..50: mol_type = genomic DNA

SEQ ID NO: 59051 - protein, 577 aa, Mediterraneibacter faecis
MISNSAATHAKVAIYIRVSTLHQIDRDSLPMQRQDLIAYAKLILNTDDVTVFEDAGYSGKNTIRPEFQKMMSQLRTGTYTHLLVWKIDRISRNLLDFAEMYQELKDLGVTFVSKNEQFDTSTAMGEAMLKIILVFAELERNMTSERVAATMISRASNGQWNGGRIPYGYDYDPEEQTFSFNSDEYNIAHLIHDKYEELRSLVYLARYLNEHGYRTRAGNDWSPVSLDIILRSVFYCGDYQYNRLKEGDRQRPKDKSEWITVKDHHPAIVSRGQKERILALLESNRRLKSFRKSGKSKYTHIFSGLLICGNCGQPMTSSISTVKKTTGRRYSLYFCPTHRKSKLWCTGKSTSDPIIGEFVFNYILNMLNAQKAFSPETSIQELEQQLLSGDTFSPVAAIAPDGLQDLFHTLRTGTVKGEVFGKDVKIKTDSEPPLQLSKLKKEKIRLERAIDRLNKLFLYSEKAMSESEYLTQKIQLSDFLEEVEDKLAFLASEDSLQQSITDDEFISKASNFILSQKLTDRNYVSFQSLSATVSPEVLDSFLSSIIDNIVFKDGAVHSITFRNGLSHTFIYKEKPEV

SEQ ID NO: 59052 - DNA, 50 bp, Mediterraneibacter faecis; identical to SEQ ID NO: 3232
  source 1..50: mol_type = genomic DNA

SEQ ID NO: 59053 - DNA, 40 bp, Mediterraneibacter faecis
  source 1..40: mol_type = genomic DNA
ctatcgtatgaacatcgcatccccaaaactgaagaaacga

SEQ ID NO: 59054 - DNA, 40 bp, Mediterraneibacter faecis
  source 1..40: mol_type = genomic DNA
ctatcgtatgaacatcgcacacccaaaactgaagaaacga

SEQ ID NO: 59055 - DNA, 50 bp, Mediterraneibacter faecis
  source 1..50: mol_type = genomic DNA
actttctacaaggacatcagcacccaccccagtctgcccctgtggcttca

SEQ ID NO: 59056 - protein, 553 aa, Ruminococcus bicirculans
MDIYAAADLMKRERKTIFDLEINVTFYARVSTTRDEQENSIENQINFFTEMIKSNPNWNYIEGYVDRVRGEHAENRAEFMRMIEDGKAGRFDLVLTKEVSRFARNTIDSLTYTRDLIRAGVGVFFQNDNICTIDSDSEMRLTIMSSIAADEVRKLSERVRWGHKRSIESGNVMGNNRIFGYDKDDCKLVINEPEAEMVRMIFDLYSTGDMSVRKIERILYDKGYRGRNGTRIHHNTVSGIIQNPKYKGFYCGNKVRIVDYRTKEQRFLPKEEWVMYKDETGEVVPAIVSEETWNKCNRIFETRSAAIKSREHSFKDTSVFTGKIWCAAHDKPYWRTSYSNSVSKGQPIYQWICSEKKKEGAKSCASFAIMESELYSILSGFFKDVAENLEDYVETFLRIYKESDRSAEAMRQVSGLKATLEKENKKRDKLLELYMEELITKSEFTKRNTESSELIKGIEHQIRFIEKKSENDNSYAKAIKRIEKYFREMYDPSLPMNKEQVDEMAKAVIDRISVVPINKNTMKLEIKLLTGESEPMTYIRNGERYARRSGLTS

SEQ ID NO: 59057 - DNA, 50 bp, Ruminococcus bicirculans
  source 1..50: mol_type = genomic DNA
gctcggcgttctggactcaccagcaaaataattagtcctgaacaacaatg

SEQ ID NO: 59058 - DNA, 40 bp, Ruminococcus bicirculans
  source 1..40: mol_type = genomic DNA
tgtaggcggtcagatggtcaagaagatgatcgacgcttac

SEQ ID NO: 59059 - DNA, 40 bp, Ruminococcus bicirculans
  source 1..40: mol_type = genomic DNA
tgtaggcggtcagatggtcgtgaagatgatcgacgcttac

SEQ ID NO: 59060 - DNA, 50 bp, Ruminococcus bicirculans
  source 1..50: mol_type = genomic DNA
gctcggggtctgacactacccatagtcattaatagtgtaatacaaccaag

SEQ ID NO: 59061 - protein, 553 aa, Ruminococcus bicirculans
MDIYAAADLMKRERKTIFDLEINVTFYARVSTTRDEQENSIENQINFFTEMIKSNPNWNYIEGYVDRVRGEHAENRAEFMRMIEDGKAGRFDLVLTKEVSRFARNTIDSLTYTRDLLRAGVGVFFQNDNICTIDSDSEMRLTIMSSIAADEVRKLSERVRWGHKRSIESGNVMGNNRIFGYDKDDCKLVINEPEAEMVRMIFDLYSTGDMSVRKIERILYDKGYRGRNGTRIHHNTVSGIIQNPKYKGFYCGNKVRIVDYRTKEQRFLPKEEWVMYKDETGEVVPAIVSEEIWNKCNRIFETRSAAIKSREHSFKDTSVFTGKIWCAAHDKPYWRTSYSNSVSKGQPIYQWICSEKKKEGAKSCASFAIMESELYSILSGFFKDVAENLEDYVETFLRIYKESDRSAEAMRQVSGLKATLEKENKKRDKLLELYMEELITKSEFTKRNTESSELIKGIEHQIRFIEKKSENDNSYAKAIKRIEKYFREMYDPSLPMNKEQVDEMAKAVIDRISVVPINKNTMKLEIKLLTGESEPMTYIRNGERYARRSGLTS

SEQ ID NO: 59062 - DNA, 50 bp, Ruminococcus bicirculans; identical to SEQ ID NO: 59057
  source 1..50: mol_type = genomic DNA

SEQ ID NO: 59063 - DNA, 40 bp, Ruminococcus bicirculans; identical to SEQ ID NO: 59058
  source 1..40: mol_type = genomic DNA

SEQ ID NO: 59064 - DNA, 40 bp, Ruminococcus bicirculans; identical to SEQ ID NO: 59059
  source 1..40: mol_type = genomic DNA

SEQ ID NO: 59065 - DNA, 50 bp, Ruminococcus bicirculans; identical to SEQ ID NO: 59060
  source 1..50: mol_type = genomic DNA

SEQ ID NO: 59066 - protein, 557 aa, Paenibacillus ihbetae
MINFAENQIKDVVVYARVSSDDQQERETIQSQIEYANGYIKLNRMNIIDWYKDDGISGTIPLDERPDGHRLIEDAKAGKLKNKTALIYNMKRLGRKARVTLDAIYQLEEYGVKIKSMTEPFDTGDPMGRFVITVLAGQAEFDRDTLLETLWHGANRVARLGQWLGGIVPYGYVVVDKFLQVNEDPLPGKEDLSEAGVIRLMYHLIGNEKWSTIQVADYFNSLKIPPSYVKDGRKLKKGKRKENTAGVWTPGRIRNMVVNTTYKGLHVYGKRSKKERELIEREVPSIVSKDVWDKAQEALRDNQIEAFRNQTRDNLLRSLIKCGSCGLTYHGAAFAGAGRKPQAYYICGGKNAYRGPAQGKCRSKNIPAEWIEDHVWNECVRFIENPGEALEQLNTGMEIRKSKIGEYLSEKEIVQKSIADKQNERQGILTLYRQKMITALDVEKQLQEIMSETATLENRIYELDLLINAENDLSKDFKTAEELLYDLRMKIIAGNNAPTFSTRREIVKTLVHEIIVETIPSPTGGRPKASVNVKYAFNKTVPADLAFAKGKNHTGVR

SEQ ID NO: 59067 - DNA, 50 bp, Paenibacillus ihbetae
  source 1..50: mol_type = genomic DNA
tgccaaaggtaaaaatcacacgggtgtccgtgcagagaacacctcaggca

SEQ ID NO: 59068 - DNA, 40 bp, Paenibacillus ihbetae; identical to SEQ ID NO: 58243
  source 1..40: mol_type = genomic DNA

SEQ ID NO: 59069 - DNA, 40 bp, Paenibacillus ihbetae
  source 1..40: mol_type = genomic DNA
cgcttgctcgatgaatccgcttccgtgcggctattacggc

SEQ ID NO: 59070 - DNA, 50 bp, Paenibacillus ihbetae
  source 1..50: mol_type = genomic DNA
tgccagagatcccaatcagccaggcttctatgcagagcagggtacaggca

SEQ ID NO: 59071 - protein, 502 aa, Denitrobacterium detoxificans
MGDGYYITYLRKSRADVEKERLGKFETLAIHAERLERYARDNGLRVEHVYRELVSGESIQARTEFQKVMERISDPDCIGVIVHAIDRLGRGDPMEYGWILSTFRYTRTLIVTPTRTYDPTVAEDIQSLKLQMFVSNIELEHIRERMNEGSRRAVERGGYHGPFAPYGYDRGKIGMQASIVPNETEAPIVRRMFSMACDGMNKGAIARKLNEDGIPTRHGKMWTASAVGRTLSNDVYKGVVTYGKYSVSITSRDGLTFEKKRVYRKRGEYVEAQGIHEPLVDAETWATANRRAFEGVPVQRDRSVKNPLAGLIVCGKCGYALVRQVVTPQCGRPYARLHHKYGTECHCVSVRLDYVVGKVAEALEQITEDLDMGLVRPGAAPGELESVDAQLARESGKLDKLLELFYADALSVEEFKDRRDAAQKRVDGLRARRAELERMETSAQTISMRTKEAVALLRDDSISAEAKNDALKAVIERIEYYELDTARENRAIHLDIRLRGFK

SEQ ID NO: 59072 - DNA, 50 bp, Denitrobacterium detoxificans
  source 1..50: mol_type = genomic DNA
attcaaatagccatcatttgacaacgagaacgctagtgggtgggtgatag

SEQ ID NO: 59073 - DNA, 40 bp, Denitrobacterium detoxificans
  source 1..40: mol_type = genomic DNA
gcgataatcgcaatcacgacaagcaccccaacgaggatgg

SEQ ID NO: 59074 - DNA, 40 bp, Denitrobacterium detoxificans
  source 1..40: mol_type = genomic DNA
gcgataatcgcaatcacgagaagcaccccaacgaggatgg

SEQ ID NO: 59075 - DNA, 50 bp, Denitrobacterium detoxificans
  source 1..50: mol_type = genomic DNA
ataaaaatatgtaaattttgacaagaagaagtcaaaacgttggggggtag

SEQ ID NO: 59076 - protein, 550 aa, Streptomyces sviceus
MYDTLEGQLAFAYLRISDDKEGQELGVQRQEEDIRKLAAQLGVTLVRIYCDNDRSASTNTNDHRPDYEDMMGQLAVGPVRIVLAYTKARLTRKPEENERQIKLARTCGAQYIYVRGQALDLSVSANRKMDRIQNALDAGVAEDIQELALRKKLQNAREGKWDGGVRTFGYGEAIGYDPVKQKEIIDPYAVRAHEIAALHEGKRRTLAGDNQFVCVQSWNAQGILTTRAGQKTTYKGKVSICDGRWDVGKFKRTLLKESYVQFDPTGHPTDCPCLKNPETGGTRVHKDERHRAKWPYVFTRAEHDAMKAMFDGREKFWVNKGSVRGRTYLLSGFTECGGTWRDTEKQGQYCGGPMYGQGKTYPLADGTTKYQRRYACKKWAKDGSRAGCCSVFRIADAVEAFVTQQVLYRFDSPDILGALVPADNELRMAEVVQELSELQTRRELLATEYAQGEHEKADYQVMRKTVTDKMAALDTEKKQLMSAKAKSLAVPTDGGLREVWDSASIEWRSSVVRLVVEKVVIHPGKPGGQRWPDKDGWVFDPDLIEIVWLH

SEQ ID NO: 59077 - DNA, 50 bp, Streptomyces sviceus
  source 1..50: mol_type = genomic DNA
gggtgcatagccagacatttgactactcgtcaaattcctgtgcatccatt

SEQ ID NO: 59078 - DNA, 40 bp, Streptomyces sviceus
  source 1..40: mol_type = genomic DNA
gcgacgatccccatcgcgtactcggacgtgaccatccccg

SEQ ID NO: 59079 - DNA, 40 bp, Streptomyces sviceus
  source 1..40: mol_type = genomic DNA
gcgacgatccccatcgcgtgctcggacgtgaccatccccg

SEQ ID NO: 59080 - DNA, 50 bp, Streptomyces sviceus
  source 1..50: mol_type = genomic DNA
ggagacagcatgccacatttgactgcaagtcacattgccttgcatccaca

SEQ ID NO: 59081 - protein, 503 aa, Corynebacterium atypicum
MTTRAAIYLRISLDAAMDGLAIDRQRQDCEALAEQRGWDVVHTYVDQSISASKKDVDRPDYDAMVASFERGEIDAIICWDLDRLTRQPWQLEEWIDRAEEQGLKLVTANGDADLATDGGRMYARIKAAVARGEIERKSMRQSRAQQQRAEQGRWYSGGVRPIGYTPTGEIIPSEAAAVLGMFRAVERGNSMRDIARALSGVDQPGLPDIPTTPRHMHTVVTERNACRRAAGQEEKPVPDAQPWAYTSLHSILRNPVYAGYSTYKKAKRKGVKDKYRRVTHIVRDPDTGEPVKGQWEPIVTPDLWWRVQNVLDDPDRLTNKERRNTRRHLGSGLYVCDECGNPVRTHADRYRCAACGLVRTHSVDDFVLAVIRARLGRDDLADLLPTADDDEVNAIDDELAELRAKLARVQADYDEELIEARDLKRARNRYEPQIEKLETRRARLAGASALLDTTGYASPVDAFDNAELAVQRRVINTLCQVRLRRGVRGSKTFNPESVQIVWN

SEQ ID NO: 59082 - DNA, 50 bp, Corynebacterium atypicum
  source 1..50: mol_type = genomic DNA
atggttatttatcgacgacactccgtggagtttcgtttcaatgtaaccta

SEQ ID NO: 59083 - DNA, 40 bp, Corynebacterium atypicum
  source 1..40: mol_type = genomic DNA
aatgcaagacggcgacatcgtcgatttcaagttcaacgta

SEQ ID NO: 59084 - DNA, 40 bp, Corynebacterium atypicum
  source 1..40: mol_type = genomic DNA
aatgcaagacggcgacatctacgatttcaagttcaacgta

SEQ ID NO: 59085 - DNA, 50 bp, Corynebacterium atypicum
  source 1..50: mol_type = genomic DNA
atggttacttgataacaacactcttaggagtgaaatatttgggcaacata

SEQ ID NO: 59086 - protein, 503 aa, Corynebacterium atypicum
MTTRAAIYLRISLDAAMDGLAIDRQRQDCEALAEQRGWDVVHTYVDQSISASKKDVDRPDYDAMVASFERGEIDAIICWDLDRLTRQPWQLEEWIDRAEEQGLKLVTANGDADLATDGGRMYARIKAAVARGEIERKSMRQSRAQQQRAEQGRWYSGGVRPIGYTPTGEIIPSEAAAVLGMFRAVERGNSMRDIARALSGVDQPGLPDIPTTPRHMHTVVTERNACRRAAGQEEKPVPDAQPWAYTSLHSILRNPVYAGYSTYKKAKRKGVKDKYRRVTHIVRDPDTGEPVKGQWEPIVTPDLWWRVQNVLDDPDRLTNKERRNTRRHLGSGLYVCDECGNPVRTHADRYRCAACGLVRTHSVDDFVLAVIRARLGRDDLADLLPTADDDEVNAIDDELAELRAKLARVQADYDEELIEARDLKRARNRYEPQIEKLETRRARLAGASALLDTTGYASPVDAIDNAELAVQRRVINTLCQVRLRRGVRGSKTFNPESVQIVWN

SEQ ID NO: 59087 - DNA, 50 bp, Corynebacterium atypicum; identical to SEQ ID NO: 59082
  source 1..50: mol_type = genomic DNA

SEQ ID NO: 59088 - DNA, 40 bp, Corynebacterium atypicum; identical to SEQ ID NO: 59083
  source 1..40: mol_type = genomic DNA

SEQ ID NO: 59089 - DNA, 40 bp, Corynebacterium atypicum; identical to SEQ ID NO: 59084
  source 1..40: mol_type = genomic DNA

SEQ ID NO: 59090 - DNA, 50 bp, Corynebacterium atypicum; identical to SEQ ID NO: 59085
  source 1..50: mol_type = genomic DNA

SEQ ID NO: 59091 - protein, 503 aa, Corynebacterium atypicum
MTTRAAIYLRISLDAAMDGLAIDRQRQDCEALAEQRGWDVVHTYVDQSISASKKDVDRPDYDAMVASFERGEIDAIICWDLDRLTRQPWQLEEWIDRAEEQGLKLVTANGDADLATDGGRMYARIKAAVARGEIERKSMRQSRAQQQRAEQGRWYSGGVRPIGYTPTGEIIPSEAAAVLGMFRAVERGNSMRDIARALSGVDQPGLPDIPTTPRHMHTVVTERNACRRAAGQEEKPVPDAQPWAYTSLRSILRNPVYAGYSTYKKAKRKGVKDKYRRVTHIVRDPDTGEPVKGQWEPIVTPDLWWRVQNVLDDPDRLTNKERRNTRRHLGSGLYVCDECGNPVRTHADRYRCAACGLVRTHSVDDFVLAVIRARLGRDDLADLLPTADDDEVNAIDDELAELRAKLARVQADYDEELIEARDLKRARNRYEPQIEKLETRRARLAGASALLDTTGYASPVDAFDNAELAVQRRVINTLCQVRLRRGVRGSKTFNPESVQIVWN

SEQ ID NO: 59092 - DNA, 50 bp, Corynebacterium atypicum; identical to SEQ ID NO: 59082
  source 1..50: mol_type = genomic DNA

SEQ ID NO: 59093 - DNA, 40 bp, Corynebacterium atypicum; identical to SEQ ID NO: 59083
  source 1..40: mol_type = genomic DNA

SEQ ID NO: 59094 - DNA, 40 bp, Corynebacterium atypicum; identical to SEQ ID NO: 59084
  source 1..40: mol_type = genomic DNA

SEQ ID NO: 59095 - DNA, 50 bp, Corynebacterium atypicum; identical to SEQ ID NO: 59085
  source 1..50: mol_type = genomic DNA

SEQ ID NO: 59096 - protein, 511 aa, Mycobacteroides chelonae
MIFHITRYPSIMRVLGRLRLSRSTDESTSIERQKEIVEQWAQAHDHTIVGWAEDLDVSRSVDPFDTPELGKWLNDRAPEWDIVATWKLDRLATGSIYLNRMMHWCFEHEKVIISVTENFDLSTWVGRMIANVIAGVAEGELEAIRERQLASRQKLRESARWAGGKPPYGYVKVPHPSGTGWALSVDKQASKVIDRIVNDMIDGRPMGHIVRELNDEGYRPPAAYHETVKSGEPKLRWSTGEAPTGKWKQTAMRNMLRNNALRGYVHHNNTTVRDDDGSPLRYSESLIDSDRWELLQASLDGIQNARRNNRRPEASPLAGLVKCFECGETLFHTRYNARGNEYRYYRCDVNKCTVHIPAGDMEEMTAQTFLEHAGNWEVQERVWVSGDSRETELREAVTAFDELTSAAGRAVSATAKQRLQKQLSTLDARIAELESSPSRESHWEYRSTGGTYREAWEAADVVGKRELLSKSGITFAMSITGVEGKRSRTNAGITRSKINIPPELEANMARK

SEQ ID NO: 59097 - DNA, 50 bp, Mycobacteroides chelonae
  source 1..50: mol_type = genomic DNA
gttatgcggaaaacgatattcggttcatggaacatgatcttccacataac

SEQ ID NO: 59098 - DNA, 40 bp, Mycobacteroides chelonae
  source 1..40: mol_type = genomic DNA
attcggggcgatccggggttcgtggaacatgatgcgaaac

SEQ ID NO: 59099 - DNA, 40 bp, Mycobacteroides chelonae
  source 1..40: mol_type = genomic DNA
attcggggcgatccggggtccgtggaacatgatgcgaaac

SEQ ID NO: 59100 - DNA, 50 bp, Mycobacteroides chelonae
  source 1..50: mol_type = genomic DNA
gaaatggagcctactatattccatccatggaaaatcacaacccacaaaac

SEQ ID NO: 59101 - protein, 485 aa, Ruminococcus bicirculans
MKIAAAYVRVSTEEQTELSPDSQVKLIREYAKKNGYIVPKEFIFHDDGISGRSTAKRQGFNQMIGTAKLKPKPFDAILLWKFSRFARNREDSIVYKSMLRKLGIDVISISENVGDDKMSVLIEAMIEAMDEYYSINLAEEVKRGMTEKFGRGLKVSGPPLGYDMKNGEFVVNEQGAEIVRRIFDMYVNQDMGYLNIARELNAEGIRTLHGNDFETRTIAYIIKNPVYIGMQRWTPGGGGSKGHYRSAVADKVVITQAHHPAIIDKELFEKAQQKAAKTHRPYERSGSTKHEYMLRGLLKCSSCGSNLTMGSVKSGTLQCYQYAHGRCKESHAITISKIDKAVTEDIQGLVDGTATDYKLVDQSPVKPKKDTSKFETQLERERMKLERVKAAYADGIDTLEEYKRNKSEVLASIAELESKLRQAQPPKPQPTADRLPDLKVRAQEVLKVITSPNATPVEKNNALRTIVDKVVFDRKTSSIEMYYLC

SEQ ID NO: 59102 - DNA, 50 bp, Ruminococcus bicirculans
  source 1..50: mol_type = genomic DNA
gggtataactttttgaagtctggtggggcggactttaaaaagttgtataa

SEQ ID NO: 59103 - DNA, 40 bp, Ruminococcus bicirculans
  source 1..40: mol_type = genomic DNA
cattatctcgcagcttggtggccctgacggcgaacttggc

SEQ ID NO: 59104 - DNA, 40 bp, Ruminococcus bicirculans
  source 1..40: mol_type = genomic DNA
cattatctcgcagcttggtctccctgacggcgaacttggc

SEQ ID NO: 59105 - DNA, 50 bp, Ruminococcus bicirculans
  source 1..50: mol_type = genomic DNA
cagtgtaacatatagaattctgctcttgtgaactttagttcattttataa

SEQ ID NO: 59106 - protein, 539 aa, Mesorhizobium ciceri
MSMLWTKDPHNCKALAMTKHTPRATLPNRPKAYSYVRFSTPEQGSGDSLRRQIALAERYAALHGLELDNKLTFRDLGKSAYRGANQETGHLGEFIALVESKDIKPGSYLLVESLDRLSRQPPMRTLKLLSRICDAGITVVTLDDNRAYTEEALEKDNLSLLVALMVAVRANEESEKKGRRVGEAWANKRRNAATKPLSALCPGWLRLSGDKKGFDLIPERAEIVRRVFDMTLAGKGQHAIAEAFNSECVPMFGRGSHWHRSYIKKMLADASTIGAFTPHRIETVGGKKRRIPTETVAGYFPAVIDRETFDKVNALSTGRGVKESNGGGPANILAGLAKCPACGSTMTRVNKGGKKGGRPYLVCTKAKAKAGCDSRHKVPIDRIEGAIIQNAGWLNATLPATDEALQTKYERATAADDAVNDEIERLVGAVAKLGARSSRALLDRLHQNEAAREDIRRTIADLEGRIAETLTNRVQVTAAQFVDAAEAEEPRDVALINAILRQLFTKVEVDWPSGRLWFHWKHAAGQTTDFMYAWPKEDG

SEQ ID NO: 59107 - DNA, 50 bp, Mesorhizobium ciceri
  source 1..50: mol_type = genomic DNA
acgtggggtctttcgtacacatcatgagcatgttatggacaaaagaccct

SEQ ID NO: 59108 - DNA, 40 bp, Mesorhizobium ciceri
  source 1..40: mol_type = genomic DNA
gagcccggcgggccgatcatgagaagattatgcccgccgg

SEQ ID NO: 59109 - DNA, 40 bp, Mesorhizobium ciceri
  source 1..40: mol_type = genomic DNA
gagcccggcgggccgatcattagaagattatgcccgccgg

SEQ ID NO: 59110 - DNA, 50 bp, Mesorhizobium ciceri
  source 1..50: mol_type = genomic DNA
gcctggatttcattgtccatatcattagcagcatattggtcaaagacact

SEQ ID NO: 59111 - protein, 524 aa, Pseudomonas fluorescens
MPKAISYIRFSSEKQAKGSSLERQQTMLAQWLDSNPEYVLSDLRFQDLGVSGFTGAHLENGFGQLLAAVENGSIEPGDVVLIEAIDRVGRLEPMEMLPLLARIVRTGVYIVTLDDGIKYDRESANSNHLFLLVAKVQQAHQYSETLSRRLKASYAARRKNAVEGVVPKRHTPVWLTSEGELISEIAPLVKQAFEDYASGIGERRIFERIFKGNSNPLLARMAPSTVKRWMNNRTAIGEWDSIPNVYPAVVEPELFYRVQKRMEAKFSPRGTPNKHAYTGLVVCSECGKNFNTKYFKASDQTSMECSSRARRGAMGCSNNRSIPEPVIELAYLFTFTGHALKALEGQMLTASQKRAVELEGEIGEVNKKITRIVNAITVLEDDSEELTDKLRSLQAERKLLQAEMNGLTHTSISMRDKIISTTHFNKDMMKANALLQSVGYQLVCHPDGRITFEDETGKQTFYYLGWGRSEDVHKVVLSDGKLVKLGINRPQNKLMKKTVKATPVDGAALKGMKLSQVKVRLDRQ

SEQ ID NO: 59112 - DNA, 50 bp, Pseudomonas fluorescens
  source 1..50: mol_type = genomic DNA
cacgtatacattgacgatttcttcgtgcagaatgcggcattgtctatgag

SEQ ID NO: 59113 - DNA, 40 bp, Pseudomonas fluorescens
  source 1..40: mol_type = genomic DNA
ctcgtagtacaccggttgggtgaagatcatgtcgtaaatc

SEQ ID NO: 59114 - DNA, 40 bp, Pseudomonas fluorescens
  source 1..40: mol_type = genomic DNA
ctcgtagtacaccggttggaggaagatcatgtcgtaaatc

SEQ ID NO: 59115 - DNA, 50 bp, Pseudomonas fluorescens
  source 1..50: mol_type = genomic DNA
caagcctacttataagatgtgttcaggcagaatcagtatctgtttgtgag

SEQ ID NO: 59116 - protein, 524 aa, Pseudomonas tolaasii; identical to SEQ ID NO: 59111

SEQ ID NO: 59117 - DNA, 50 bp, Pseudomonas tolaasii; identical to SEQ ID NO: 59112
  source 1..50: mol_type = genomic DNA

SEQ ID NO: 59118 - DNA, 40 bp, Pseudomonas tolaasii; identical to SEQ ID NO: 54218
  source 1..40: mol_type = genomic DNA

SEQ ID NO: 59119 - DNA, 40 bp, Pseudomonas tolaasii
  source 1..40: mol_type = genomic DNA
ctcgtagtacaccggctggaggaagatcatgtcgtaaatc

SEQ ID NO: 59120 - DNA, 50 bp, Pseudomonas tolaasii; identical to SEQ ID NO: 59115
  source 1..50: mol_type = genomic DNA

SEQ ID NO: 59121 - protein, 514 aa, Vibrio parahaemolyticus
MKAYIYSRISSAIQKKGHGLDRQQDIALTYATQLGFDISEEVLQDVASGYHGKQMEGRLGVFLEGIKRGKIESPAALIVESLDRLGREHTMDALPRFIDIVNHGVEIHEVSTGIVYNREETHKIHIAIAIMERAHNESLMKSKRARAAANKRLQRAQQGENVVINVNLPCWIRSQDGKLELVPEYAVVIRRIFELYLEGKGSNKVAQILRKENHPYFTSNIHSKKIRSRVWTDQRVMDIIKKDSTCGVFRSTANPDTVIDGYYPAAIDKATFERAQVLRMSRVRTAKKSKKGLNILSGLLRCGHCGSSLQYTRSYSNKKKTRMYENLRCRDRAARMNCDSRSIPLRPLEKLILGWVGTIPLFDIKAASNDELEQKKAELTQLEQQAENLVELLATGLTRVKDKYLQLEQQIDSVKKEISSLSVTNSSSVDKIDYFQAIDLENEEYREQVQQELALIIDRVSVKCDGEYAEIDIFLNSRIHNHQRFIGKKKQLDKARQTMRTLRPSAAHVDSFVD

SEQ ID NO: 59122 - DNA, 50 bp, Vibrio parahaemolyticus
  source 1..50: mol_type = genomic DNA
tacagttgtttacattagaacagcacgctgttagcatgtataccacagtt

SEQ ID NO: 59123 - DNA, 40 bp, Vibrio parahaemolyticus; identical to SEQ ID NO: 34653
  source 1..40: mol_type = genomic DNA

SEQ ID NO: 59124 - DNA, 40 bp, Vibrio parahaemolyticus
  source 1..40: mol_type = genomic DNA
gaaagtgcactaccacggcgtgcttatcgatggcactgtt

SEQ ID NO: 59125 - DNA, 50 bp, Vibrio parahaemolyticus
  source 1..50: mol_type = genomic DNA
tccaactttccatcttagaacttagtcctgttaacaataaatccacagtt

SEQ ID NO: 59126 - protein, 587 aa, Streptococcus pneumoniae; identical to SEQ ID NO: 9821

SEQ ID NO: 59127 - DNA, 50 bp, Streptococcus pneumoniae; identical to SEQ ID NO: 10742
  source 1..50: mol_type = genomic DNA

SEQ ID NO: 59128 - DNA, 40 bp, Streptococcus pneumoniae; identical to SEQ ID NO: 32783
  source 1..40: mol_type = genomic DNA

SEQ ID NO: 59129 - DNA, 40 bp, Streptococcus pneumoniae; identical to SEQ ID NO: 32784
  source 1..40: mol_type = genomic DNA

SEQ ID NO: 59130 - DNA, 50 bp, Streptococcus pneumoniae
  source 1..50: mol_type = genomic DNA
tggctcccttttcattggacaacaattatacattgctgtattttgataag

SEQ ID NO: 59131 - protein, 482 aa, Clostridium phoceensis
MERGWDIYHIYCDEDYSGADSQRPDFNRMIEAAKEKKFQILLCKSQSRFTRDMELVEKYIHGLFPIWGIRFIAVADNADTEVKGNKKARQINGLVNEWYLEDLSENIRMVFDMKRRQGQYIGGFPIYGYRKDPDNKGHLLVDPEAAEVVRQIFRWSLEGHGKQSIAHMLNDLGVVNPTRYKAERGWDSNHFCKQDFGLWNKNTVWRILRNEIYTGVMVQGRTKKVSYKSKAIIVMPRDRWFRVEGTHEAIIDRETFEIVQRNLDIRSREDGTGMVHPLAGLVKCMDCGSTMSKTSNGKKGKAQVYYLRCKLYADSGTQKLCTRHSIRLDRLIELVSQRIRDYIGAYYHLEELELPPPKDDHREALLLEQRTLSAQLEKRSTALKNLYLDKVSGVLSEGQFVELNQDFLEEKSRLERRLAQIDQELSGQEQPRNQEEVMAKARELLELKTLPRELAVMLIEKIEIGEQDQETGRQEVKIHWKF

SEQ ID NO: 59132 - DNA, 50 bp, Clostridium phoceensis
  source 1..50: mol_type = genomic DNA
aggtgtcctaaagggacaatacccatgacacagcaccattaggacaccct

SEQ ID NO: 59133 - DNA, 40 bp, Clostridium phoceensis
  source 1..40: mol_type = genomic DNA
gtggacggcaccgccccccatgtggtggagccgaaatatc

SEQ ID NO: 59134 - DNA, 40 bp, Clostridium phoceensis
  source 1..40: mol_type = genomic DNA
gtggacggcaccgcccccccagtggtggagccgaaatatc

SEQ ID NO: 59135 - DNA, 50 bp, Clostridium phoceensis
  source 1..50: mol_type = genomic DNA
tggtgtccttataagacaagaccacagacacagacatgcagggaaatgcc

SEQ ID NO: 59136 - protein, 558 aa, Intestinimonas massiliensis
MRNHIKLADIYCRLSDEEKKHKNESESITNQRAIIRDYCEKHDIIIVKEFVDDGYSGGNFERPGFQAMLDHLSTGKANMVITKDLSRLGRDMTESSYYAERFFPENGIHYLAPGNAFDSMGDNLMAPFQFAMNDVYLRDTSRKVKQTLDMKRKKGKYAACPPYGYKKAERTTDQLVPDENTAPIVRQIFEWASTGLSTRTIANKLNEQCIIPPLKYRVEYRDKFTPQGASRASDYWNYTTVKRILRNRVYLGHTVLGKTRKVNVKSKKKISIPQEDWCFTENTHEPLVTQEQFDRAEHFLGENTKSHAANPAFRHSIFGGIAYCAHCGTAMCSGGSVYKGERAKYWYLVCNNLTSRTRNRCEHGARIRYDDLMEIIRRDLNELLSFDDDDIEAITQAAIQQSNASLGVGEDKEKSLADIEIRLKRIVKMIERAYRDNAAGNLSDELLDQMMERFGKERQELEEQRDRLIEDTSEESNIRDAYDLFFDLARRYSHIETLDRDILHTFIERIEIGEKILPDGLTIAGPRTPYRQSIRIFYRFIGEIAKDPVRNVTRVANL

SEQ ID NO: 59137 - DNA, 50 bp, Intestinimonas massiliensis
  source 1..50: mol_type = genomic DNA
ttttgtggtgaatacacaccaagggaggttgatgtgtaaaggccacaaaa

SEQ ID NO: 59138 - DNA, 40 bp, Intestinimonas massiliensis; identical to SEQ ID NO: 22333
  source 1..40: mol_type = genomic DNA

SEQ ID NO: 59139 - DNA, 40 bp, Intestinimonas massiliensis
  source 1..40: mol_type = genomic DNA
taagatggaggccgctcagttagtcggcgtgaacctgaag

SEQ ID NO: 59140 - DNA, 50 bp, Intestinimonas massiliensis
  source 1..50: mol_type = genomic DNA
tttttttgtggcatcccacaaaggttgatttctttgtggcatccacaaat

SEQ ID NO: 59141 - protein, 473 aa, Mycobacteroides chelonae
MRVLGRIRLSRLTEESTSVDRQRELIEKWSEMHDHTIVGWAEDVDVSGSIDPFEAPQLGPWFREENRDKWDILVAWKLDRIGRRAIPLNKVFGWMLEYEKTLVCVSDNIDLSTWVGRLVANVIAGVAEGELEAIRERTKASRKKLLESGRWTGGPVPYWLTPEKVPEGGWVLSLNTETAPILRRAIDEVLDGSAVHTAAERLNEHGVPSPGGKKWTSQTLWRILQHKYLKGHSTDRGKTVRDSSGVPISNCEALLTPAEWDRLQAVLAEWKLPETSNRTKSTSPLLGVVVCYLCDKPLYYRSYTRNYGKGLYRSYYCRTHRTPGIDADELEKFVEEAYLQQLEHVHVRDRQFVPAENHQIELDEAVRAVEELTALLGTITSTTMRSSVMKQLTALDSRITGLEKLPTSESRWEIRELEQTYGDVWKSNVDPQFRRRWLIKSEIVIAATKLGGQHMEIRLPDDLIEILARKGIT

SEQ ID NO: 59142 - DNA, 50 bp, Mycobacteroides chelonae
  source 1..50: mol_type = genomic DNA
catctataatatgtgggctacgacctatcgtacgcaaaccattgtagact

SEQ ID NO: 59143 - DNA, 40 bp, Mycobacteroides chelonae
  source 1..40: mol_type = genomic DNA
tggcgtcatcacctacgacctggcatgtgccgtgcagatg

SEQ ID NO: 59144 - DNA, 40 bp, Mycobacteroides chelonae
  source 1..40: mol_type = genomic DNA
tggcgtcatcacctacgaccaggcatgtgccgtgcagatg

SEQ ID NO: 59145 - DNA, 50 bp, Mycobacteroides chelonae
  source 1..50: mol_type = genomic DNA
catgtttaataaatgggctccagccaactgtgtgcagttatttgtagcct

SEQ ID NO: 59146 - protein, 518 aa, Klebsiella quasipneumoniae
MPKAISYIRFSTKIQSVGDSTKRQSKYINDWLKRNPDYYLDESLRFQDLGISGFSGANTKSGAFGEFLAAVESGYIEAGSVLLVESLDRVSRQDIDTAGEQLRKILRSGVEVVTLVDNEWYTKESLKDSLSMIKAMLVMERAHEESAMKSTRLRSVWAAKRERAAKGEIMSKRCAAWLKVSDDRSHFEFIPENVKAVQRVFQLRLEGLSHVKIAKQMNDEGFSTLNQFKSVTGGWSQSSVTELLSNRSVIGFKVPSKSMAVKGVSEIPNYYPSIITDEQFYAVQQLKQGSGRKPSSDLPLLTNLFKGVLRCSECGFIVVVAGVSAKRSGIYKCSMKSEGRCNSVGFSRLQTDRALVQGLLYNTNRLSLNRDNGSAIGALQSELEQLQKQRERLIKLSMLTDDTESMAKDLKALNSQIKDVERAVSEVHQREQSSQLETISHLDLTVKKDRIEAQIIIKRIVKEIRLNTAAKKCDVFLHNGLKLYNFPLDRVVDGEIFLEVLPVLEADEFDFDTYRMIE

SEQ ID NO: 59147 - DNA, 50 bp, Klebsiella quasipneumoniae
  source 1..50: mol_type = genomic DNA
gtgtatcaatagaagggtctcttcaggattacacctttcttatgatacac

SEQ ID NO: 59148 - DNA, 40 bp, Klebsiella quasipneumoniae; identical to SEQ ID NO: 32993
  source 1..40: mol_type = genomic DNA

SEQ ID NO: 59149 - DNA, 40 bp, Klebsiella quasipneumoniae
  source 1..40: mol_type = genomic DNA
gtggaccgggcggctgtcgtcgatcacgcggttgacgttg

SEQ ID NO: 59150 - DNA, 50 bp, Klebsiella quasipneumoniae
  source 1..50: mol_type = genomic DNA
gtcaataaagccaagtgtcttttctcgatttcaccttttctttcttaaac

SEQ ID NO: 59151 - protein, 541 aa, Klebsiella quasipneumoniae
MPKAISYIRFSTKIQSVGDSTKRQSKYINDWLKRNPDYYLDESLRFQDLGISGFSGANAKSGAFGEFLAAVESGYIEAGSVLLVESLDRVSRQDIDTAGEQLRKILRSGVEVVTLVDNEWYTKESLKDSLSMIKAMLVMERAHEESAMKSTRLRSVWAAKRERAAKGEIMSKRCAAWLKVSEDRSHFEFIPENVKAVQRVFQLRLEGLSHVKIAKQMNDEGFSTLNQFKSVTGGWSQSSVTELLSNRSVIGFKVPSKSMAVKGVSEIPNYYPSIITDEQFYAVQQLKQGSGRKPSSDLPLLTNLFKGVLRCSECGFIVVVAGVSAKRSGIYKCSMKSEGRCNSVGFSRLQTDRALVQGLLYNTNRLALNRDNGSAIGSLQSELEQLQKQRERLIKLAMLADDTESMAKDLKALNSQIKDAEKAVSEVHQREKSSQLETISHLDLTVKKDRVEAQIIIKRIVKEIRINTAGKKCDVLLHNGLKLLNFPLDKVVDGAQWLEILPLIDGDEFDFEGFTTKPRHIALEEAPEWVKEMEEQPSQPL

SEQ ID NO: 59152 - DNA, 50 bp, Klebsiella quasipneumoniae; identical to SEQ ID NO: 59147
  source 1..50: mol_type = genomic DNA

SEQ ID NO: 59153 - DNA, 40 bp, Klebsiella quasipneumoniae; identical to SEQ ID NO: 33003
  source 1..40: mol_type = genomic DNA

SEQ ID NO: 59154 - DNA, 40 bp, Klebsiella quasipneumoniae
  source 1..40: mol_type = genomic DNA
atggaccgggcggctgtcgtcgatcacgcggttgacgctg

SEQ ID NO: 59155 - DNA, 50 bp, Klebsiella quasipneumoniae; identical to SEQ ID NO: 59150
  source 1..50: mol_type = genomic DNA

SEQ ID NO: 59156 - protein, 532 aa, Pseudomonas kitaguniensis
MTITTPLPRSFSDVFQSDETINVYSYIRFSSKAQKLGFGEIRQLEQLNRFFDQYPQARQVERYEDLGVSAFKGKNLKTGQLAKFVERIKSKEILPNALLLVESFDRISRMGGYDALELIISIIQADCAIYTLFDNRLYSKRKKDSSVDISLIQNILERANDESRAKSERISDAKARNLEKGQNGGIITKRCPFWITFVDGKFVLNENATAVKKATELCFDVGFQLIAQELNKENHPKKYSASSIGKFLHSHALYGSFLALKLDENGDRTVFNQEIKNYYPALISEAEFHRISAKLKERLDPRLAGRKSDDFKNILRGLVFCKCGSTFRYHAQKSQYVDLVCSASMIGKCEFAKTGKGVRHRYALVEQLFLIFHAQIPFHKIIIKSDDVKALEKEHKEILGLIILKEKALANNFSILEKSSESAQKYIMGRIDEVSLELDKLKSDEHKLSVKINSLHLASKSDLKVIEIYRLLVSEKGRIRINNFLHSQKVKLIITPVKKKYFSIEIVHGENHIDTIDVTPTGYTARINAHLK

SEQ ID NO: 59157 - DNA, 50 bp, Pseudomonas kitaguniensis
  source 1..50: mol_type = genomic DNA
attctacgaatcgcgccactcattgcaatgaagcaggttattcgtagaaa

SEQ ID NO: 59158 - DNA, 40 bp, Pseudomonas kitaguniensis
  source 1..40: mol_type = genomic DNA
ttccagcatgccgatcaccgcgttcatcggcgtacggatc

SEQ ID NO: 59159 - DNA, 40 bp, Pseudomonas kitaguniensis
  source 1..40: mol_type = genomic DNA
ttccagcatgccgatcaccaggttcatcggcgtacggatc

SEQ ID NO: 59160 - DNA, 50 bp, Pseudomonas kitaguniensis
  source 1..50: mol_type = genomic DNA
attccaccagtgggggcattctttagagttaaggagggtatttctagaaa

SEQ ID NO: 59161 - protein, 524 aa, Pseudomonas fluorescens
MPKAISYIRFSSEKQAKGSSLERQQTMLAQWLESNPEYVLSDLRFQDLGVSGFTGAHLENGFGQLLAAVENGSIEPGDVVLIEAIDRVGRLEPMEMLPLLARIVRTGVYIVTLDDGIKYDRESANTNHLFLLVAKVQQAHQYSETLSRRLKASYAARRKNAVEGVVPKRHTPVWLTSEGELIPEIAPLVKQAFEDYASGIGERRIFERVFKGNSNPLLARMAPSTVKRWMNNRTAIGEWDSIPNVYPAVVEPELFYRVQKRMEAKFSPRGTPNKHGYTGLVVCSECGKNFNTKYFKASDQTSMECSSRARRGAMGCSNNRSIPEPVIELAYLFTYTGHALKALEGQMLTASQKRAMELEGEIGEVNKKITRIVNAITVLEDDSEELTDKLRSLQAERKLLQAEMNGLTHTSISMRDKIVSTTDFNKDMMKANALLQSVGYQLVCHPDGRITFEDETGKHAFHYLGWGRSEDVHKVVLSDGKLVKLGINRPENKLMKKTVKATLVDRAALERIKLSQIKVRWDKQ

SEQ ID NO: 59162 - DNA, 50 bp, Pseudomonas fluorescens
  source 1..50: mol_type = genomic DNA
ctttcccactacaccgcatcttgggtgaagaaaacggcaatgtgtacaag

SEQ ID NO: 59163 - DNA, 40 bp, Pseudomonas fluorescens; identical to SEQ ID NO: 54218
  source 1..40: mol_type = genomic DNA

SEQ ID NO: 59164 - DNA, 40 bp, Pseudomonas fluorescens
  source 1..40: mol_type = genomic DNA
ctcgtagtacaccggctggaagaagatcatgtcgtaaatc

SEQ ID NO: 59165 - DNA, 50 bp, Pseudomonas fluorescens
  source 1..50: mol_type = genomic DNA
catttcaattaaaaagcattttggaagaaggagacgggcatgtatacacg

SEQ ID NO: 59166 - protein, 510 aa, Microbispora rosea
MAKLVVAEATDLIPVVSYARISADVRGDEHGVQDQHRVNRETAARYGWTVVHEFTDNDKSAAKADVYRDEFELMLKALRAGKLANGTAVRGVVVVANDRLARRPGDYERFVEAFTYNDGFVFADSKQQSNLYSEDVESMGLFGAVISKMEVRKMQRRMRASHQARALQGRKVGGPRPFGWKEDRIALDEHEAALLRQAARDFVTGSSLYAIVMEWKRRGIKTPRGNDWQMRTLRLTFLNARLCGYRELRGELVRDANGDPVIGEWQPILTPDEWLAVREIIHARRGHSVKRGGAVGTPYPHDFREHRYLLTGILRCGRPIEGGGLCNAILRTKRTKDGKRHMYFCPGKAAGGCGGIGRRGDLVDFAISELVLEQMELVQYVDAEDAPEWTREQELKDLEGQLTELTSRWRAREISNNLYFGLVSELEGDIARLRAEKSRILGRAERKRASMEIDMSEIRRRWYLPEEEGGLPLSRKRAHVREMLHAVIVHPAGRGRAPFNPDLLEPVWVE

SEQ ID NO: 59167 - DNA, 50 bp, Microbispora rosea
  source 1..50: mol_type = genomic DNA
tagttgactttgtgcatctactagtagtagaacattcgcaagggtggctt

SEQ ID NO: 59168 - DNA, 40 bp, Microbispora rosea
  source 1..40: mol_type = genomic DNA
attccggggcatggcgaagtacaaatacacccccgagttg

SEQ ID NO: 59169 - DNA, 40 bp, Microbispora rosea
  source 1..40: mol_type = genomic DNA
attccggggcatggcgaagttcaaatacacccccgagttg

SEQ ID NO: 59170 - DNA, 50 bp, Microbispora rosea
  source 1..50: mol_type = genomic DNA
aactttgctgaattcatttactagttgtaggagctttctgggggagtctt

SEQ ID NO: 59171 - protein, 551 aa, Blautia obeum; identical to SEQ ID NO: 9941

SEQ ID NO: 59172 - DNA, 50 bp, Blautia obeum; identical to SEQ ID NO: 9937
  source 1..50: mol_type = genomic DNA

SEQ ID NO: 59173 - DNA, 40 bp, Blautia obeum
  source 1..40: mol_type = genomic DNA
gatcagtaagagtacggtacataaagatgtgacagaccgg

SEQ ID NO: 59174 - DNA, 40 bp, Blautia obeum
  source 1..40: mol_type = genomic DNA
gatcagtaagagtacggtaaataaagatgtgacagaccgg

SEQ ID NO: 59175 - DNA, 50 bp, Blautia obeum
  source 1..50: mol_type = genomic DNA
cctttctaaaattggaaaacctgaaaaagggaactaaaaaattagaaggt

SEQ ID NO: 59176 - protein, 554 aa, Blautia faecis; identical to SEQ ID NO: 36896

SEQ ID NO: 59177 - DNA, 50 bp, Blautia faecis; identical to SEQ ID NO: 9937
  source 1..50: mol_type = genomic DNA

SEQ ID NO: 59178 - DNA, 40 bp, Blautia faecis
  source 1..40: mol_type = genomic DNA
gatatcaaagtccacagtacataaggacgtgacgaccaga

SEQ ID NO: 59179 - DNA, 40 bp, Blautia faecis
  source 1..40: mol_type = genomic DNA
gatatcaaagtccacagtaaataaggacgtgacgaccaga

SEQ ID NO: 59180 - DNA, 50 bp, Blautia faecis; identical to SEQ ID NO: 59175
  source 1..50: mol_type = genomic DNA

SEQ ID NO: 59181 - protein, 523 aa, Klebsiella variicola
MRQVITYLRFSSKPQERGDSIRRQKGLFERWLKDNPDAKVVDEFSDEGASAYHGHHLKGDFGRMLQNIQDGKYLSGQTVLLVESETRLNRQKARNTESLVDLITGKGVDVICLESGKIYTSTNIDDLDTSIQLKIAAHIAHQQSKEKSIKVSAAWEHRAQLALEGKQQLTKNVPGWIDPDTRKLNEHSSTVVTIFDLLLSGESLHNIARYLQANNIKSFSRREKANGFSVHSVRTILRSESTVGTLAASKRNDRPAIPNYYEPAIDIATFNKAQEILSKNRVGRAPASDNPITINLFKGIIRCQCGASVHPTGVKATYQGVYRCNNVPDGRCNVPTIKRKPFDKWMLDNIVGFLERSDGNNTDKRKAEIEYQISLVTSKLKKATSLLLELDDVTELKEQVKELNIQRINMQSELDELNQRETLSDKPLHHLSEIDLTTKAGRVEAQLILSKFVQSIELQREMIIITLRNGTVIGKSRDLSPVLSQDLMKQVVSSSSPRDIDMFSVITSDEEFRKSGKPVTKRS

SEQ ID NO: 59182 - DNA, 50 bp, Klebsiella variicola
  source 1..50: mol_type = genomic DNA
aacccgaatagactacattcaatggtcattgtatttgagctattcggcga

SEQ ID NO: 59183 - DNA, 40 bp, Klebsiella variicola; identical to SEQ ID NO: 54543
  source 1..40: mol_type = genomic DNA

SEQ ID NO: 59184 - DNA, 40 bp, Klebsiella variicola
  source 1..40: mol_type = genomic DNA
gcggcgaggtaaatcaaggagcattgcgctcatagtcgtt

SEQ ID NO: 59185 - DNA, 50 bp, Klebsiella variicola
  source 1..50: mol_type = genomic DNA
agccataatagtgaacatttaatgagcactgtgttcccagaattgtgcta

SEQ ID NO: 59186 - protein, 493 aa, Intestinimonas butyriciproducens
MKAVIYARYSSDSQREESIEGQLRECAAFAEKNGITVLRHYIDRAYSAKTDNRPEFQSMIKDSGKQLFDIVIVWKLDRFARNRYDSARYKATLKKNGVKVVSATEIISEGAEGIILESVLEGYAEYYSADLSEKVVRGMTDNALKCKFNGGMMPIGYVIDAEQHFQIDPLTAPFVLEAFKRYDGGETISSVVNWLNEQGLTNTRGRKMTFNSVGHILHNRRYIGEFRYRDVIVPDGIPAIVPQDLFDRVQEKLAKNKKAPARHKAEDDYLLTTKLFCGYCGAYLCGESGTSRTGKVHHYYKCVSVKKKRTECHKRPVRKEWIEDLVVGETMKMVMDDKAIEAIVSMLMDLQDRDNVNVPLYEQQLREADTAISNLLGAIQQGILTRSTKARLEELENRRDELENRLACEKLAKPKVSAEFMTFWLHRFRKLDVRQQSHRKMLIDTFINAIFLYDDKMVIAFNYKEGTKTITFAELQEAISNKNGSDLDCLAAP

SEQ ID NO: 59187 - DNA, 50 bp, Intestinimonas butyriciproducens; identical to SEQ ID NO: 41452
  source 1..50: mol_type = genomic DNA

SEQ ID NO: 59188 - DNA, 40 bp, Intestinimonas butyriciproducens
  source 1..40: mol_type = genomic DNA
ggttcgagtcccttcaggcgcaccaagtcggagcaagcga

SEQ ID NO: 59189 - DNA, 40 bp, Intestinimonas butyriciproducens
  source 1..40: mol_type = genomic DNA
ggttcgagtcccttcaggcgtaccaagtcggagcaagcga

SEQ ID NO: 59190 - DNA, 50 bp, Intestinimonas butyriciproducens
  source 1..50: mol_type = genomic DNA
ggttgttatttcgttttcttttctgtaccacaccaaccatttctgcagca

SEQ ID NO: 59191 - protein, 584 aa, Pseudomonas weihenstephanensis
MPTAYAYIRYSSKAQGEAGRDSVDRQMASIQAITKQQGIELPPENIYSDTGISAHDGSNKRKGKLKELIDMISDMHIKEGDYIFVESIDRLSRQRLLQAKELVNGILEKGVILITTIDGQRYEKPNETNRIDDLQQDILLSVIAKRAYEESKTKSVRRKSAWNRAKKLAEEEKVIFNAHNPPYGIRYNTELNCFEIEEEEAQEIRDFFESLKYIGVSLSIKKLNAYSKRKWSSRNIKHLIDTKYVLGAYMAQRRDENKKKVFERYIENYYPQIVSYELFNEAIAAMKNRAQRKNYGNQSVGSLNIFRHCIKCDCCDASMLFEKQTNPKGVVYPYFQCYTRKELKNGCDQPRFRFDLAFGLFLELIYQSTTHEDFDVHPWQNEIEDTGIQYEWITRESGMKYRLPTQEDIDEEERTENFKELLIKLLSNRETQTKDNKKIVELNNLLLEQKSYRDNLMKSFAGFTSGVIPKEFLEVVSKTEANINDIEQNLAELQTQINIKKTTINIYSENDIIDLYKTENGRLKINQFFVANDITFKFNFDKTTRTLFAKIFQNGFEIDRIAKQFSLHNPLKEFGINNLNEYFN

SEQ ID NO: 59192 - DNA, 50 bp, Pseudomonas weihenstephanensis
  source 1..50: mol_type = genomic DNA
gtgtgagatttacccctaccattcgagagtggtaggtggtattctcatac

SEQ ID NO: 59193 - DNA, 40 bp, Pseudomonas weihenstephanensis
  source 1..40: mol_type = genomic DNA
agtgttaagagaaccgatggagtcgggttttatcgtgata

SEQ ID NO: 59194 - DNA, 40 bp, Pseudomonas weihenstephanensis
  source 1..40: mol_type = genomic DNA
agtgttaagagaaccgatgctgtcgggttttatcgtgata

SEQ ID NO: 59195 - DNA, 50 bp, Pseudomonas weihenstephanensis
  source 1..50: mol_type = genomic DNA
gtgtgagttggtttcctgcctttcctcagtggttggtttctctttcctgt

SEQ ID NO: 59196 - protein, 535 aa, Fusicatenibacter saccharivorans
MQVDGYSLDAQRDKLRKYAAYEDMVVAGEYSDEGFSGKNIQGRQEFQRMLNDIQDCKDGVSYVLVFKLSRFGRNAADVLNSLQLMQDFGVNLICVEDGIDSSKDAGKLMISVLSAVAEIERENIRTQTMAGREQKAREGKWNGGFAPYGYKLENGNLVIAEDEVEVIRVIYDRYIHTNEGVAGVAKYLNRNGYVKKLRQNNTIPGFSRDFVKNVLYNPVYMGKIAYGRRRTEKKQGTRNEIHVVEQSEFPVYEGQHEAIISEEDWYLAQEKRKINSFKREKVNNPDHAHILSGILKCPCCGKSMYGNIAKAHSKDKKTRYYYYCKNTVTPTGHECSFRLNIEQTEINKFVAKIISAMVNNPRFVEAIQAKIGTAVDTEDMEKQIAVLQGQLKQAFGTKSRLERQMDTLDINDAHYDRKILDLQRRYDEQYDTIEEIEVQIGELQSQIRSIQQEKISGDNIYRLLLAFDEVYHSATEAEQKEFMKAFIERIEMFPEKRKDGSWIKKIVFNFPVPVDGEEVKELPLETETTVETVVL

SEQ ID NO: 59197 - DNA, 50 bp, Fusicatenibacter saccharivorans; identical to SEQ ID NO: 11137
  source 1..50: mol_type = genomic DNA

SEQ ID NO: 59198 - DNA, 40 bp, Fusicatenibacter saccharivorans
  source 1..40: mol_type = genomic DNA
gaacaacgaaagtaccgttgagacggtagtcttgatgtca

SEQ ID NO: 59199 - DNA, 40 bp, Fusicatenibacter saccharivorans
  source 1..40: mol_type = genomic DNA
gaacaacgaaagtaccgttctgacggtagtcttgatgtca

SEQ ID NO: 59200 - DNA, 50 bp, Fusicatenibacter saccharivorans
  source 1..50: mol_type = genomic DNA
caaatggaaataataataattgccctgactgatgtacagagttgcaaggg

SEQ ID NO: 59201 - protein, 530 aa, Flavonifractor plautii
MQVDGYSLDAQRDKLRKYAAYEDMVVAGEYSDEGFSGKNIQGRQEFQRMLNDIQDCKDGVSYVLVFKLSRFGRNAADVLNSLQLMQDFGVNLICVEDGIDSSKDAGKLMISVLSAVAEIERENIRTQTMAGREQKAREGKWNGGFAPYGYKLESGNLVIAEDEVEVIRVIYDRYIHTNEGVAGVAKYLNRNGFVKKLRQNNTIPGFSRNFVQDVLDNPVYMGKIAYGRRRTEKRQGTRNEMHVVEQSEFPVYDGQHEAIISEEDWYLAQEKRKINSFKREKVNNPDHAHILSGILKCPCCGKSMYGNIAKAHSKDKKTRYYYYCKNTVTPTGHECSFRLNIEQMEINKFVAKVISAMVNNPRFVEAIQAKIGTAVDTEDMEKQIAVLQGRLKQAFGTKSRLERQMDTLDINDVHYDRKILDLQRRYDEQYDTIEEIEAQIGELQSQIRSIQQEKISGDNIYRLLLAFDEVYHSATEAEQKEFMKAFIERIEMFPEKRKDGSWIKKIVFNFPVPVDGEEVKELPLETETTV

SEQ ID NO: 59202 - DNA, 50 bp, Flavonifractor plautii; identical to SEQ ID NO: 11137
  source 1..50: mol_type = genomic DNA

SEQ ID NO: 59203 - DNA, 40 bp, Flavonifractor plautii; identical to SEQ ID NO: 33938
  source 1..40: mol_type = genomic DNA

SEQ ID NO: 59204 - DNA, 40 bp, Flavonifractor plautii
  source 1..40: mol_type = genomic DNA
cccccgcaccgcgcatgtgctaaccgtggcgcggctggaa

SEQ ID NO: 59205 - DNA, 50 bp, Flavonifractor plautii; identical to SEQ ID NO: 59200
  source 1..50: mol_type = genomic DNA

SEQ ID NO: 59206 - protein, 530 aa, Flavonifractor plautii
MQVDGYSLDAQRDKLRKYAAYEDMIIAGEYSDEGFSGKNIQGRQDFQRMLNDIQDGKDDISYVLVFKLSRFGRNAADVLNSLQLMQDFGVNLICVEDGIDSSKDAGKLMISVLSAVAEIERENIRTQTMAGREQKAREGKWNGGFAPYGYKLDNGELVIAEDEVEVIRVIYDRYIHTNEGVAGVAKYLNRNGYTKKLRQNNTIPGFSRDFVKNVLYNPVYMGKIAYGRRRTEKKQGTRNEMHVVEQSEFPVYEGQHEAIISEEDWYLAQEKRKINSFKREKVNNPDHAHILSGILKCPCCGKSMYGNIAKAHSKDKKTRYYYYCKNTVTPTGHECSFRLNIEQTEINKFVAKVISAMVNNPRFVEAIQAKIGTAVDTEDMEKQIAVLQGRLKQAFGTKSRLERQMDTLDINDAHYDRKILDLQRRYDEQYDTIEEIEVQIGELQSRIRSIQQEKISGDNIYRLLLAFDEVYHSATEAEQKEFMKAFIERIEMFPEKRKDGSWIKKIVFNFPVPVDGEEVKELPLETETTV

SEQ ID NO: 59207 - DNA, 50 bp, Flavonifractor plautii; identical to SEQ ID NO: 11137
  source 1..50: mol_type = genomic DNA

SEQ ID NO: 59208 - DNA, 40 bp, Flavonifractor plautii; identical to SEQ ID NO: 33938
  source 1..40: mol_type = genomic DNA

SEQ ID NO: 59209 - DNA, 40 bp, Flavonifractor plautii; identical to SEQ ID NO: 59204
  source 1..40: mol_type = genomic DNA

SEQ ID NO: 59210 - DNA, 50 bp, Flavonifractor plautii; identical to SEQ ID NO: 59200
  source 1..50: mol_type = genomic DNA

SEQ ID NO: 59211 - protein, 555 aa, Faecalibacterium prausnitzii
MREVEILKKKQLKCYLYTRVSTSMQVDGYSLDAQRDKLRKYAAYEDMIVAGEYSDEGFSGKNIQGRQEFQRMLNDIQDGKDDVSYVLVFKLSRFGRNAADVLNSLQLMQDFGVNLICVEDGIDSSKDAGKLMISVLSAVAEIERENIRTQTMAGREQKAREGKWNGGFAPYGYKLENGNLVIAEDEVEVIRVIYDRYIHTNEGVAGVAKYLNRNGYTKKLRQNNTIPGFSRDFVKNVLYNPVYMGKIAYGRRRTEKKQGTRNEMHVVEQSEFPVYEGQHEAIISEEDWYLAQEKRKINSFKREKVNNPDHAHILSGILKCPCCGKSMYGNIAKAHSKDKKTRYYYYCKNTVTPTGHECSFRLNIEQTEINKFVAKVISAMVNNPRFVEAIQAKIGTAVDTEDMERQIAVLQGRLKQAFGTKSRLERQMDTLDINDAHYDRKILDLQRRYDEQYDTIEEIEVQIGELQSQIRSIQQEKISGDNIYRLLLAFDEVYHSATEAEQKEFMKAFIERIEMFPEKRKDGSWIKKIVFNFPVPVDGEEVKELPLETETTVET

SEQ ID NO: 59212 - DNA, 50 bp, Faecalibacterium prausnitzii; identical to SEQ ID NO: 11137
  source 1..50: mol_type = genomic DNA

SEQ ID NO: 59213 - DNA, 40 bp, Faecalibacterium prausnitzii; identical to SEQ ID NO: 55133
  source 1..40: mol_type = genomic DNA

SEQ ID NO: 59214 - DNA, 40 bp, Faecalibacterium prausnitzii
  source 1..40: mol_type = genomic DNA
cccgcatacggagcatatcctgacggtatgtgcattgtcc

SEQ ID NO: 59215 - DNA, 50 bp, Faecalibacterium prausnitzii; identical to SEQ ID NO: 59200
  source 1..50: mol_type = genomic DNA

SEQ ID NO: 59216 - protein, 541 aa, Klebsiella variicola
MPKAISYIRFSTKIQSVGDSTKRQSKYINDWLKRNPDYYLDESLRFQDLGISGFSGANAKSGAFGEFLAAVESGYIEAGSVLLVESLDRVSRQDIDTAGEQLRKILRSGVEVVTLVDNEWYTKESLKDSLSMIKAMLVMERAHEESAMKSTRLRSVWAAKRERAAKGEIMSKRCAAWLKVSDDRSHFEFIPENVKAVQRVFQLRLEGLSHVKIAKQMNDEGFSTLNQFKSVTGGWSQSSVTELLSNRSVIGFKVPSKSMAVKGVSEIPNYYPSIITDEQFYAVQQLKQSSGRRPSSDLPLLTNLFKGVLRCSECGFIVVVAGVSAKRSGIYKCSMKSEGRCNSVGFSRLQTDRALVQGLLYNTNRLSLNRDNGSAIGSLQTELEQLQKQRERLIKLAMLADDTESMAKDLKALNSQIKDAEKAVSEVHQREQSSQLETISHLDLTVKKDRIEAQIIIKRIVKEIRLNTAGKKCDVFLHNGLKLLNFPLDRVVDGAQWLEVLPLIDGDEFDFEGFTTKPRHLVLEEAPEWVKEIEAQPNQPL

SEQ ID NO: 59217 - DNA, 50 bp, Klebsiella variicola
  source 1..50: mol_type = genomic DNA
gtgtatcaatagaaaggtctcttcaggattgcacctttcttatgatacac

SEQ ID NO: 59218 - DNA, 40 bp, Klebsiella variicola; identical to SEQ ID NO: 33063
  source 1..40: mol_type = genomic DNA

SEQ ID NO: 59219 - DNA, 40 bp, Klebsiella variicola; identical to SEQ ID NO: 33064
  source 1..40: mol_type = genomic DNA

SEQ ID NO: 59220 - DNA, 50 bp, Klebsiella variicola; identical to SEQ ID NO: 1340
  source 1..50: mol_type = genomic DNA

SEQ ID NO: 59221 - protein, 541 aa, Cronobacter sakazakii
MPKAISYIRFSTKIQSVGDSTKRQSKYINDWLKRNPDYWLDESLRFQDLGISGFSGANAKSGAFGEFLAAVESGYIEAGSVLLVESLDRVSRQDIDTAGEQLRKILRSGVEVVTLVDNEWYTKESLKDSLSMIKAMLVMERAHEESAMKSTRLRSVWAAKRERAAKGEIMSKRCAAWLKVSEDRSHFEFIPENVKAVQRVFQLRLEGLSHVKIAKQMNDGGFSTLNQFKSVTGGWSQSSVTELLSNRSVIGFKVPSKSMAVKGVAEIPNYYPSIISEQQFYAVQQLKQGSGRKPSSDLPLLTNLFKGVLRCSECGFIVVVAGVSAKRSGIYKCSMKSEGRCNSVGFSRLQTDKALVQGLLYNSNRLSLNRDSGSAIGTLQSELEQLHKQRERLIKLAMLADDTESMAKDLKALNSQIKDAEKAVSEVHQREQSSQLETISHLDLTVKKDRIEAQIIIKRIVKEIRLNTAGKKCDVFLHNGLKLLNFPLDRVVDGAQWLEVLPLIDGDEFDFEGFTTKPRHLVLEEAPEWVKEIEAQPNQPL

SEQ ID NO: 59222 - DNA, 50 bp, Cronobacter sakazakii
  source 1..50: mol_type = genomic DNA
gtgtatcaatagaaaggtctcttcagggttacacctttcttatgatacac

SEQ ID NO: 59223 - DNA, 40 bp, Cronobacter sakazakii; identical to SEQ ID NO: 33108
  source 1..40: mol_type = genomic DNA

SEQ ID NO: 59224 - DNA, 40 bp, Cronobacter sakazakii; identical to SEQ ID NO: 33109
  source 1..40: mol_type = genomic DNA

SEQ ID NO: 59225 - DNA, 50 bp, Cronobacter sakazakii; identical to SEQ ID NO: 1340
  source 1..50: mol_type = genomic DNA

SEQ ID NO: 59226 - protein, 540 aa, Klebsiella pneumoniae; identical to SEQ ID NO: 33021

SEQ ID NO: 59227 - DNA, 50 bp, Klebsiella pneumoniae; identical to SEQ ID NO: 59222
  source 1..50: mol_type = genomic DNA

SEQ ID NO: 59228 - DNA, 40 bp, Klebsiella pneumoniae; identical to SEQ ID NO: 8148
  source 1..40: mol_type = genomic DNA

SEQ ID NO: 59229 - DNA, 40 bp, Klebsiella pneumoniae; identical to SEQ ID NO: 8149
  source 1..40: mol_type = genomic DNA

SEQ ID NO: 59230 - DNA, 50 bp, Klebsiella pneumoniae; identical to SEQ ID NO: 1340
  source 1..50: mol_type = genomic DNA

SEQ ID NO: 59231 - protein, 541 aa, Klebsiella pneumoniae
MPKAISYIRFSTKIQSVGDSTKRQSKYINDWLKRNPDYYLDESLRFQDLGISGFSGANAKSGAFGEFLAAVESGYIEAGSVLLVESLDRVSRQDIDTAGEQLRKILRSGVEVVTLVDNEWYTKESLKDSLSMIKAMLVMERAHEESAMKSTRLRSVWAAKRERAAKGEIMSKRCAAWLKVSEDRSRFEFIPENVKAVQRVFQLRLEGLSHVKIAKQMNDEGFSTLNQFKSVTGGWSQSSVTELLSNRSVIGFKVPSKSMAVKGVSEIPNYYPSIITDEQFYAVQQLKQGSGRKPSSDLPLLTNLFKGVLRCSECGFIVVVAGVSAKRSGIYKCSMKSEGRCNSVGFSRLQTDRALVQGLLYNTNRLALNRDNGSAIGSLQSELEQLQKQPERLIKLAMLADDTESMAKDLKALNSQIKDAEKAVSEVHQREQSSQLETISHLDLTVKKDRIEAQIIIKRIVKEIRLNTARKKCDVFLHNGLKLLNFPLDRVVDGAQWLEVLPLIDGDEFDFEGFTTKPQHIALEETPEWVKEMEEQPNQPL

SEQ ID NO: 59232 - DNA, 50 bp, Klebsiella pneumoniae; identical to SEQ ID NO: 59222
  source 1..50: mol_type = genomic DNA

SEQ ID NO: 59233 - DNA, 40 bp, Klebsiella pneumoniae; identical to SEQ ID NO: 8148
  source 1..40: mol_type = genomic DNA

SEQ ID NO: 59234 - DNA, 40 bp, Klebsiella pneumoniae; identical to SEQ ID NO: 8149
  source 1..40: mol_type = genomic DNA

SEQ ID NO: 59235 - DNA, 50 bp, Klebsiella pneumoniae; identical to SEQ ID NO: 1340
  source 1..50: mol_type = genomic DNA

SEQ ID NO: 59236 - protein, 518 aa, Klebsiella pneumoniae
MPKAISYIRFSTKIQSVGDSTKRQSKYINDWLKRNPDYYLDESLRFQDLGISGFSGANTKSGAFGEFLAAVESGYIEAGSVLLVESLDRVSRQDIDTAGEQLRKILRAGVEVVTLVDNEWYTKESLKDSLSMIKAMLVMERAHEESAMKSTRLRSMWAGKRERAANGEIMSKRCAAWLKVSEDRSHFEFIPENVKAVQRVFQLRLEGLSHVKIAKQMNDEGFSTLNQFKPVKGGWSQSSVTELLSNRSVIGFKVPSKSMAVKGVSEIPNYYPSIITDEQFYAVQQLKQGSGRKPSSDLPLLTNLFKGVLRCSECGFIVVVAGVSAKRSGIYKCSMKSEGRCNSVGFSRLQTDRALVQGLLYNTNRLSLNRDNGSAIGAIQSELEHLQKQRERLIKLAMLADDTESMAKDLKALNSQIKDAEKAVSEVHQREQSSQLETISHLDLTVKKDRIEAQIIIKRIVKEIRLNTAGKKCDVFLHNGLKLLNFPLDRVVDGEIFLEVLPVLEADEFDFDTYRMIE

SEQ ID NO: 59237 - DNA, 50 bp, Klebsiella pneumoniae; identical to SEQ ID NO: 59222
  source 1..50: mol_type = genomic DNA

SEQ ID NO: 59238 - DNA, 40 bp, Klebsiella pneumoniae; identical to SEQ ID NO: 8148
  source 1..40: mol_type = genomic DNA

SEQ ID NO: 59239 - DNA, 40 bp, Klebsiella pneumoniae; identical to SEQ ID NO: 8149
  source 1..40: mol_type = genomic DNA

SEQ ID NO: 59240 - DNA, 50 bp, Klebsiella pneumoniae; identical to SEQ ID NO: 1340
  source 1..50: mol_type = genomic DNA

SEQ ID NO: 59241 - protein, 519 aa, Klebsiella pneumoniae
MPKAISYIRFSTKIQSVGDSTKRQSKYINDWLKRNPDYYLDESLRFQDLGISGFSGANTKSGAFGEFLAAVESGYIEAGSVLLVESLDRVSRQDIDTAGEQLRKILRAGVEVVTLVDNEWYTKESLKDSLSMIKAMLVMERAHEESAMKSTRLRSMWAGKRERAANGEIMSKRCAAWLKVSEDRSHFEFIPENVKAVQRVFQLRLEGLSHVKIAKQMNDEGFSTLNQFKPVKGGWSQSSVTELLSNRSVIGFKVPSKSMAVKGVSEIPNYYPSIITDEQFYAVQQLKQGSGRKPSSDLPLLTNLFKGVLRCSECGFIVVVAGVSAKRSGIYKCSMKSEGRCNSVGFSRLQTDRALVQGLLYNTNRLSLNRDNGSAIGSLQSELEELHKQRERLIKLAMLADDTESMAKDLKALNSRIKDAEKAVSEVHQREQSSQLETISHLDLTVKKDRIEAQIIIKRIVKEIRLNTTGKKCDVFLHNGLKLLNFPLDRVVEGEIFLEVLPLLEADEFDFDTYRLINP

SEQ ID NO: 59242 - DNA, 50 bp, Klebsiella pneumoniae; identical to SEQ ID NO: 59222
  source 1..50: mol_type = genomic DNA

SEQ ID NO: 59243 - DNA, 40 bp, Klebsiella pneumoniae; identical to SEQ ID NO: 8148
  source 1..40: mol_type = genomic DNA

SEQ ID NO: 59244 - DNA, 40 bp, Klebsiella pneumoniae; identical to SEQ ID NO: 8149
  source 1..40: mol_type = genomic DNA

SEQ ID NO: 59245 - DNA, 50 bp, Klebsiella pneumoniae; identical to SEQ ID NO: 1340
  source 1..50: mol_type = genomic DNA

SEQ ID NO: 59246 - protein, 462 aa, Klebsiella michiganensis
MPKAISYIRFSTKIQSVGDSTKRQSKYINDWLKRNPDYWLDESLRFQDLGISGFSGANAKSGAFGEFLAAVESGYIEAGSVLLVESLDRVSRQDIDTAGEQLRKILRSGVEVVTLVDNEWYTKESLKDSLSMIKAMLVMERAHEESAMKSTRLRSVWAAKRERAAKGEIMSKRCAAWLKVSEDRSHFEFIPENVKAVQRVFQLRLEGLSHVKIAKQMNDGGFSTLNQFKSVTGGWSQSSVTELLSNRSVIGFKVPSKSMAVKGVAEIPNYYPSIISEQQFYAVQQLKQGSGRKPSSDLPLLTNLFKGVLRCSECGFIVVVAGVSAKRSGIYKCSMKSEGRCNSVGFSRLQTDKALVQGLLYNSNRLSLNRDSGSAIGTLQSELEQLHKQRERLIKLAMLADDTESMAKDLKALNSQIKDAEKAVSEVHQREQSSQLETISHLDLKWSTKTGHRVRVFPVSVF

SEQ ID NO: 59247 - DNA, 50 bp, Klebsiella michiganensis; identical to SEQ ID NO: 59222
  source 1..50: mol_type = genomic DNA

SEQ ID NO: 59248 - DNA, 40 bp, Klebsiella michiganensis; identical to SEQ ID NO: 33243
  source 1..40: mol_type = genomic DNA

SEQ ID NO: 59249 - DNA, 40 bp, Klebsiella michiganensis; identical to SEQ ID NO: 33244
  source 1..40: mol_type = genomic DNA

SEQ ID NO: 59250 - DNA, 50 bp, Klebsiella michiganensis; identical to SEQ ID NO: 1340
  source 1..50: mol_type = genomic DNA

SEQ ID NO: 59251 - protein, 519 aa, Klebsiella michiganensis
MPKAISYIRFSTKIQSVGDSTKRQSKYINDWLKRNPDYYLDESLRFQDLGISGFSGANAKSGAFGEFLAAVESGYIEAGSVLLVESLDRVSRQDIDTAGEQLRKILRAGVEVVTLVDNEWYTKESLKDSLSMIKAMLVMERAHEESAMKSTRLRSMWAGKRERAANGEIMSKRCAAWLKVSEDRSHFEFIPENVKAVQRVFQLRLEGLSHVKIAKQMNDEGFYTLNQFKPVKGGWSQSSVTELLSNRSVIGFKVPSKSMAVKGVSEIPNYYPSIITDEQFYAVQQLKQGSGRKPSSDLPLLTNLFKGVLRCSECGFIVVVAGVSAKRSGIYKCSMKSEGRCNSVGFSRLQTDRALVQGLLYNTNRLSLNRDNGSTIGSLQSELEELHKQRERLIKLAMLADDTESMAKDLKALNSRIKDAEKAVSEVHQREQSSQLETISHLDLAVKKDRIEAQIIIKRIVKEIRLNTAGKKCDVFLHNGLKLLNFPLDRVVDGEIFLEVLPLLEADEFDFDTYRLINP

SEQ ID NO: 59252 - DNA, 50 bp, Klebsiella michiganensis; identical to SEQ ID NO: 59222
  source 1..50: mol_type = genomic DNA

SEQ ID NO: 59253 - DNA, 40 bp, Klebsiella michiganensis; identical to SEQ ID NO: 8143
  source 1..40: mol_type = genomic DNA

SEQ ID NO: 59254 - DNA, 40 bp, Klebsiella michiganensis; identical to SEQ ID NO: 8144
  source 1..40: mol_type = genomic DNA

SEQ ID NO: 59255 - DNA, 50 bp, Klebsiella michiganensis; identical to SEQ ID NO: 1340
  source 1..50: mol_type = genomic DNA

SEQ ID NO: 59256 - protein, 541 aa, Enterobacter hormaechei; identical to SEQ ID NO: 59221

SEQ ID NO: 59257 - DNA, 50 bp, Enterobacter hormaechei; identical to SEQ ID NO: 59222
  source 1..50: mol_type = genomic DNA

SEQ ID NO: 59258 - DNA, 40 bp, Enterobacter hormaechei; identical to SEQ ID NO: 33033
  source 1..40: mol_type = genomic DNA

SEQ ID NO: 59259 - DNA, 40 bp, Enterobacter hormaechei; identical to SEQ ID NO: 33034
  source 1..40: mol_type = genomic DNA

SEQ ID NO: 59260 - DNA, 50 bp, Enterobacter hormaechei; identical to SEQ ID NO: 1340
  source 1..50: mol_type = genomic DNA

SEQ ID NO: 59261 - protein, 541 aa, Enterobacter roggenkampii; identical to SEQ ID NO: 59221

SEQ ID NO: 59262 - DNA, 50 bp, Enterobacter roggenkampii; identical to SEQ ID NO: 59222
  source 1..50: mol_type = genomic DNA

SEQ ID NO: 59263 - DNA, 40 bp, Enterobacter roggenkampii
  source 1..40: mol_type = genomic DNA
gtgcaccggacggctatcgaggatcacacggttaacggaa

SEQ ID NO: 59264 - DNA, 40 bp, Enterobacter roggenkampii
  source 1..40: mol_type = genomic DNA
gtgcaccggacggctatcgcagatcacacggttaacggaa

SEQ ID NO: 59265 - DNA, 50 bp, Enterobacter roggenkampii; identical to SEQ ID NO: 1340
  source 1..50: mol_type = genomic DNA

SEQ ID NO: 59266 - protein, 541 aa, Cronobacter sakazakii
MPKAISYIRFSTKIQSVGDSTKRQSKYINDWLKRNPDYYLDESLRFQDLGISGFSGANAKSGAFGEFLAAVESGYIEAGSVLLVESLDRVSRQDIDTAGEQLRKILRSGVEVVTLVDNEWYTKESLKDSLSMIKAMLVMERAHEESAMKSTRLRSVWAAKRERAAKGEIMSKRCAAWLKVSEDRSRFEFIPENVKAVQRVFQLRLEGLSHVKIAKQMNDEGFSTLNQFKSVTGGWSQSSVTELLSNRSVIGFKVPSKSMAVKGVSEIPNYYPSIITDEQFYAVQQLKQGSGRKPSSDLPLLTNLFKGVLRCSECGFIVVVAGVSAKRSGIYKCSMKSEGRCNSVGFSRLQTDRALVQGLLYNTNRLALNRDNGSAIGSLQSELEQLQKQRERLIKLAMLADDTESMAKDLKALNSQIKDAEKAVSEVHQREQSSQLETISHLDLTVKKDRIEAQIIIKRIVKEIRLNTARKKCDVFLHNGLKLLNFPLDRVVDGAQWLEVLPLIDGDEFDFEGFTTKPQHIALEESPEWVKEMEEQPNQPL

SEQ ID NO: 59267 - DNA, 50 bp, Cronobacter sakazakii; identical to SEQ ID NO: 59222
  source 1..50: mol_type = genomic DNA

SEQ ID NO: 59268 - DNA, 40 bp, Cronobacter sakazakii
  source 1..40: mol_type = genomic DNA
atgcaccgggcggctgtcgagcatcacgcggttaacgccg

SEQ ID NO: 59269 - DNA, 40 bp, Cronobacter sakazakii
  source 1..40: mol_type = genomic DNA
atgcaccgggcggctgtcgcacatcacgcggttaacgccg

SEQ ID NO: 59270 - DNA, 50 bp, Cronobacter sakazakii; identical to SEQ ID NO: 1340
  source 1..50: mol_type = genomic DNA

SEQ ID NO: 59271 - protein, 541 aa, Enterobacter ludwigii; identical to SEQ ID NO: 59221

SEQ ID NO: 59272 - DNA, 50 bp, Enterobacter ludwigii; identical to SEQ ID NO: 59222
  source 1..50: mol_type = genomic DNA

SEQ ID NO: 59273 - DNA, 40 bp, Enterobacter ludwigii
  source 1..40: mol_type = genomic DNA
gtgcacgggacggctgtcgagaatcacccggttcaccccg

SEQ ID NO: 59274 - DNA, 40 bp, Enterobacter ludwigii
  source 1..40: mol_type = genomic DNA
gtgcacgggacggctgtcgcaaatcacccggttcaccccg

SEQ ID NO: 59275 - DNA, 50 bp, Enterobacter ludwigii; identical to SEQ ID NO: 1340
  source 1..50: mol_type = genomic DNA

SEQ ID NO: 59276 - protein, 518 aa, Klebsiella variicola
MPKAISYIRFSTKIQSVGDSTKRQSKYINDWLKRNPDYYLDESLRFQDLGISGFSGANAKSGAFGEFLAAVESGYIEAGSVLLVESLDRVSRQDIDTAGEQLRKILRAGVEVVTLVDNEWYTKESLKDSLSMIKAMLVMERAHEESAMKSTRLRSMWAGKRERAANGEIMSKRCAAWLKVSEDRSHFEFIPENVKAVQRVFQLRLEGLSHVKIAKQMNDEGFSTLNQFKPVKGGWSQSSVTELLSNRSVIGFKVPSKSMAVKGVSEIPNYYPSIITDEQFYAVQQLKQGSGRKPSSDLPLLTNLFKGVLRCSECGFIVVVAGVSAKRSGIYKCSMKSEGRCNSVGFSRLQTDRALVQGLLYNTNRLSLNRDNGSAIGAFQSELEHLQKQRERLIKLAMLADDTESMAKDLKALNSQIKDAEKAVSEVHQREQSSQLETISHLDLTVKKDRIEAQIIIKRIVKEIRLNTAGKKCDVFLHNGLKLLNFPLDRVVDGEIFLEVLPVLEADEFDFDTYRMIE

SEQ ID NO: 59277 - DNA, 50 bp, Klebsiella variicola; identical to SEQ ID NO: 59222
  source 1..50: mol_type = genomic DNA

SEQ ID NO: 59278 - DNA, 40 bp, Klebsiella variicola; identical to SEQ ID NO: 33073
  source 1..40: mol_type = genomic DNA

SEQ ID NO: 59279 - DNA, 40 bp, Klebsiella variicola; identical to SEQ ID NO: 33074
  source 1..40: mol_type = genomic DNA

SEQ ID NO: 59280 - DNA, 50 bp, Klebsiella variicola; identical to SEQ ID NO: 1340
  source 1..50: mol_type = genomic DNA

SEQ ID NO: 59281 - protein, 518 aa, Klebsiella oxytoca; identical to SEQ ID NO: 33301

SEQ ID NO: 59282 - DNA, 50 bp, Klebsiella oxytoca; identical to SEQ ID NO: 59217
  source 1..50: mol_type = genomic DNA

SEQ ID NO: 59283 - DNA, 40 bp, Klebsiella oxytoca; identical to SEQ ID NO: 33238
  source 1..40: mol_type = genomic DNA

SEQ ID NO: 59284 - DNA, 40 bp, Klebsiella oxytoca; identical to SEQ ID NO: 33239
  source 1..40: mol_type = genomic DNA

SEQ ID NO: 59285 - DNA, 50 bp, Klebsiella oxytoca; identical to SEQ ID NO: 1340
  source 1..50: mol_type = genomic DNA

SEQ ID NO: 59286 - protein, 519 aa, Klebsiella pneumoniae
MPKAISYIRFSTKIQSVGDSTKRQSKYINDWLKRNPDYYLDESLRFQDLGISGFSGANAKSGAFGEFLAAVESGYIEAGSVLLVESLDRVSRQDIDTAGEQLRKILRAGVEVVTLVDNEWYTKESLKDSLSMIKAMLVMERAHEESAMKSTRLRSMWAGKRERAANGEIMSKRCAAWLKVSEDRSHFEFIPENVKAVQRVFQLRLEGLSHVKIAKQMNDEGFSTLNQFKPVKGGWSQSSVTELLSNRSVIGFKVPSKSMAVKGVSEIPNYYPSIITDEQFYAVQQLKQGSGRKPSSDLPLLTNLFKGVLRCSECGFIVVVAGVSAKRSGIYKCSMKSEGRCNSVGFSRLQTDRALVQGLLYNTNRLSLNRDNGSAIGAIQSELEHLQKQRERLIKLAMLADDTESMAKDLKALNSQIKDAEKAVSEVHQREQSSQLETISHLDLTVKKDRIEAQIIIKRIVKEIRLNTAGKKCDVFLHNGLKLLNFPLDRVVDGEIFLEVLPVLEADEFDFDTYRLINP

SEQ ID NO: 59287 - DNA, 50 bp, Klebsiella pneumoniae; identical to SEQ ID NO: 59222
  source 1..50: mol_type = genomic DNA

SEQ ID NO: 59288 - DNA, 40 bp, Klebsiella pneumoniae; identical to SEQ ID NO: 8148
  source 1..40: mol_type = genomic DNA

SEQ ID NO: 59289 - DNA, 40 bp, Klebsiella pneumoniae; identical to SEQ ID NO: 8149
  source 1..40: mol_type = genomic DNA

SEQ ID NO: 59290 - DNA, 50 bp, Klebsiella pneumoniae; identical to SEQ ID NO: 1340
  source 1..50: mol_type = genomic DNA

SEQ ID NO: 59291 - protein, 519 aa, Klebsiella pneumoniae; identical to SEQ ID NO: 59251

SEQ ID NO: 59292 - DNA, 50 bp, Klebsiella pneumoniae; identical to SEQ ID NO: 59222
  source 1..50: mol_type = genomic DNA

SEQ ID NO: 59293 - DNA, 40 bp, Klebsiella pneumoniae; identical to SEQ ID NO: 8148
  source 1..40: mol_type = genomic DNA

SEQ ID NO: 59294 - DNA, 40 bp, Klebsiella pneumoniae; identical to SEQ ID NO: 8149
  source 1..40: mol_type = genomic DNA

SEQ ID NO: 59295 - DNA, 50 bp, Klebsiella pneumoniae; identical to SEQ ID NO: 1340
  source 1..50: mol_type = genomic DNA

SEQ ID NO: 59296 - protein, 541 aa, Klebsiella pneumoniae; identical to SEQ ID NO: 33436

SEQ ID NO: 59297 - DNA, 50 bp, Klebsiella pneumoniae
  source 1..50: mol_type = genomic DNA
gtgtatcaatagaaaggtctcttcaggattacacatttcttatgatacac

SEQ ID NO: 59298 - DNA, 40 bp, Klebsiella pneumoniae; identical to SEQ ID NO: 8148
  source 1..40: mol_type = genomic DNA

SEQ ID NO: 59299 - DNA, 40 bp, Klebsiella pneumoniae; identical to SEQ ID NO: 8149
  source 1..40: mol_type = genomic DNA

SEQ ID NO: 59300 - DNA, 50 bp, Klebsiella pneumoniae; identical to SEQ ID NO: 1340
  source 1..50: mol_type = genomic DNA

SEQ ID NO: 59301 - protein, 541 aa, Klebsiella pneumoniae; identical to SEQ ID NO: 59221

SEQ ID NO: 59302 - DNA, 50 bp, Klebsiella pneumoniae; identical to SEQ ID NO: 59222
  source 1..50: mol_type = genomic DNA

SEQ ID NO: 59303 - DNA, 40 bp, Klebsiella pneumoniae; identical to SEQ ID NO: 8148
  source 1..40: mol_type = genomic DNA

SEQ ID NO: 59304 - DNA, 40 bp, Klebsiella pneumoniae; identical to SEQ ID NO: 8149
  source 1..40: mol_type = genomic DNA

SEQ ID NO: 59305 - DNA, 50 bp, Klebsiella pneumoniae; identical to SEQ ID NO: 1340
  source 1..50: mol_type = genomic DNA

SEQ ID NO: 59306 - protein, 541 aa, Klebsiella aerogenes
MPKAISYIRFSTKIQSVGDSTKRQSKYINDWLKRNPDYWLDESLRFQDLGISGFSGANAKSGAFGEFLAAVESGYIEAGSVLLVESLDRVSRQDIDTAGEQLRKILRSGVEVVTLVDNEWYTKESLKDSLSMIKAMLVMERAHEESAMKSTRLRSVWAAKRERAAKGEIMSKRCAAWLKVSEDRSHFEFIPENVKAVQRVFQLRLEGLSHVKIAKQMNDEGFSTLNQFKSVTGGWSQSSVTELLSNRSVIGFKVPSKSMAVKGVSEIPNYYPSIITDEQFYAVQQLKQGSGRKPSSDLPLLTNLFKGVLRCSECGFIIVVAGVSAKRSGIYKCSMKSEGRCNSVGFSRLQTDKALVQGLLYNTNRLSLNRDSGSAIGTLQSELEQLQKQRERLIKLAMLADDTESMAKDLKALNSQIKDAEKAVSEVHQREQSSQLETISHLDLTVKKDRVEAQVIIKRIVKEIRLNTAGKKCDVFLHNGLKLYNFPLDRVVDGAQWLEILPLIDGDEFDFEGFTTKPRHIALEEAPDWVKEMEEQPNQPL

SEQ ID NO: 59307 - DNA, 50 bp, Klebsiella aerogenes; identical to SEQ ID NO: 59222
  source 1..50: mol_type = genomic DNA

SEQ ID NO: 59308 - DNA, 40 bp, Klebsiella aerogenes; identical to SEQ ID NO: 33123
  source 1..40: mol_type = genomic DNA

SEQ ID NO: 59309 - DNA, 40 bp, Klebsiella aerogenes; identical to SEQ ID NO: 33124
  source 1..40: mol_type = genomic DNA

SEQ ID NO: 59310 - DNA, 50 bp, Klebsiella aerogenes; identical to SEQ ID NO: 1340
  source 1..50: mol_type = genomic DNA

SEQ ID NO: 59311 - protein, 673 aa, Bacteroidaceae bacterium
MEHNVAIYCRVSTQMQSTDRQREELLALASNKGWEISDDKIYVDVISGFKAGEVRPEFSRMLSELAPKGITCVLFSEFSRLARNATELLEQVNFFRERKIDLYFEKQNIWVTHDKTDLGCTILLHVLAVMSSYEIELFAERSLSGKINKLQAGGGGGIEFAYGYKLNEAKKLVKIDDEAQVVERIFTEYANGKSSIRICDILNAEGVPSPYKKRLGEKREERRRLGLDEKEYKRFDLDELMWRPSSLNRLMHNKIYIGKKNVIFHKPDPTNPVPVDKRKDREVVFEYNEYDENLRIISDELWYAVQDRLLKASYNKNNAVKRENLLKALMVCGECGSNFSVSGSTVNSQYVKTINKYDRKYACYGAKGASCKKQTCSEGGQIAMTKLDGLVLQFSLKMFAETNIAETNENLIKKISEEIESLTAIKVAKEQELLQVEADYKKLLKRLILLDDDLMLEELIKEEQSKYQQNSGKLKSDIAKLVQRISSLRVNINNIRKLNVNANLYAKMHDVRADRGLIKTMVDEYIENVIIYRMHKLWFLVVIKYKNGVELWGKIKNARYKNDELFYDECCCRYGVEFQTWVVDNTNHSFIYDKERKIIIYQGGNDLYPDLEQGEYDYERMNQYMIESQNMGSFSLYLYEDLSSNKKAETDGLNDAESDLPKIVPNNDRIELL

SEQ ID NO: 59312 - DNA, 50 bp, Bacteroidaceae bacterium
  source 1..50: mol_type = genomic DNA
tgtgatatgtcaaactcgccgttatgcataggtgcgattgacatatcact

SEQ ID NO: 59313 - DNA, 40 bp, Bacteroidaceae bacterium
  source 1..40: mol_type = genomic DNA
aagtatgtgctcgacggtgtgcataggcgggtactcttgt

SEQ ID NO: 59314 - DNA, 40 bp, Bacteroidaceae bacterium
  source 1..40: mol_type = genomic DNA
aagtatgtgctcgacggtgaacataggcgggtactcttgt

SEQ ID NO: 59315 - DNA, 50 bp, Bacteroidaceae bacterium
  source 1..50: mol_type = genomic DNA
tttgatatgcctaactggtttttaaatattgttgtgaacctcatatctct

SEQ ID NO: 59316 - protein, 524 aa, Pseudomonas monteilii
MTNKCFPYVRFSSTRQEDGSTRERQNALIDAFVSKHGLEVDRALEDAGTSAFRGLNASADGVLGGFLNQVRKGEVEKGSYLLIENFDRLSRDKIVRSNKIFTDILSAGIRIVILDRDKIFDIEHLDIGDWITALIEFERANKESERKSDFSSKAWNINRNKMRSGQIVTKKVPKWLKVEDNQFIVDLEQVNRIEQLFKLSLKYGLLEATKQYNQLYDDKLAPHQVQYILGNRKLIGEHQPKKLYWEDGGKRRLKDEGVAIPNYYPQVIEPTLFYKVQEIINDRKPFTGNYNKQQYNIFRGLIYCRWCGGTIRYMNKGERDYFICTNSMGHKCVLEGQQSIRGKKLFSLFFQFTYKLNIQSLIEENKDYSKIKTDLLSVDNQRKKLKSSIDGFKDRLTNMIVENQSIPKSMNEVLTELESNLTALDIKHKALEEQYEMATKSYNALLEVEHIDIQSIIYDRTEEAIEKRVAYNLTLKSIFNGIAIDYLNDRLELEFKDGTVRYLQDGQKRPVDIPTDFDEVLDIE

SEQ ID NO: 59317 - DNA, 50 bp, Pseudomonas monteilii
  source 1..50: mol_type = genomic DNA
gtggaacctatcgcagagcacgttcagacgtgctatgttaaaggttccat

SEQ ID NO: 59318 - DNA, 40 bp, Pseudomonas monteilii; identical to SEQ ID NO: 58578
  source 1..40: mol_type = genomic DNA

SEQ ID NO: 59319 - DNA, 40 bp, Pseudomonas monteilii
  source 1..40: mol_type = genomic DNA
gcgggcatagcagtagatgggaccatgctcgcagccacgg

SEQ ID NO: 59320 - DNA, 50 bp, Pseudomonas monteilii
  source 1..50: mol_type = genomic DNA
gttgtccctcaggtagagcccattggcccgagctagttaccaggtcccat

SEQ ID NO: 59321 - protein, 431 aa, Pseudomonas monteilii
MTNKCFPYVRFSSTRQEDGSTRERQNALIDAFVSKHGLEVDRALEDAGTSAFRGLNASADGVLGGFLNQVRKGEVEKGSYLLIENFDRLSRDKIVRSNKIFTDILSAGIRIVILDRDKIFDIEHLDIGDWITALIEFERANKESERKSDFSSKAWNINRNKMRSGQIVTKKVPKWLKVEDNQFIVDLEQVNRIEQLFKLSLKYGLLEATKQYNQLYDDKLAPHQVQYILGNRKLIGEHQPKKLYWEDGGKRRLKDEGVAIPNYYPQVIEPTLFYKVQEIINDRKPFTGNYNKQQYNIFRGLIYCRWCGGTIRYMNKGERDYFICTNSMGHKCVLEGQQSIRGKKLFSLFFQFTYKLNIQSLIEENKDYSKIKTDLLSVDNQRKKLKSSIDGFKDRLTNMIVENQSIPKSMNEVLTELESNLTALDIKHKAL

SEQ ID NO: 59322 - DNA, 50 bp, Pseudomonas monteilii; identical to SEQ ID NO: 59317
  source 1..50: mol_type = genomic DNA

SEQ ID NO: 59323 - DNA, 40 bp, Pseudomonas monteilii; identical to SEQ ID NO: 58578
  source 1..40: mol_type = genomic DNA

SEQ ID NO: 59324 - DNA, 40 bp, Pseudomonas monteilii; identical to SEQ ID NO: 59319
  source 1..40: mol_type = genomic DNA

SEQ ID NO: 59325 - DNA, 50 bp, Pseudomonas monteilii; identical to SEQ ID NO: 59320
  source 1..50: mol_type = genomic DNA

SEQ ID NO: 59326 - protein, 467 aa, Staphylococcus pseudoxylosus
MKKVAIYTRVSTLEQANEGYSIEGQEKRLKAYCEVNDWDNYELFVDAGRSASSTERAGLQELLSRLNEFDLVLVYKLDRLTRSVRDLMTLLDTFEAQGVSFRSATEVFDTTSAIGKLFITLVGAMAEWERSTITERTTQGRRVATEKGIYTTTPPFYYDKIDGKLVPNEKREIVEYMVKRAKEGVSIRGITQELNNSVYNSPENKRWDKSVIHHALTDAVSRGHTHIGEVYVENTHEPIISETDYQIIMRSISERTRSQGVKHTAIFRGKLTCHNCNRRLSLNTTKRVRNNGVVDFDERYVCDRCKSDKNSKSISIKAHKVEEAFIQHMKHYDLTTYKEKEVLNEQEEQNIIDIEKVRRQRKKYQKAWSMDLMSDEEFEGLIKETDELIAQYDKQHQKSQSYKVNQEKIEKETRSLLDGWGILSNEDKELLIRRLISDIDFKYYEGKGWGRNRTPNQIEITGVYFNF

SEQ ID NO: 59327 - DNA, 50 bp, Staphylococcus pseudoxylosus
  source 1..50: mol_type = genomic DNA
atatggggttatgggtagagtctcccaaacaccaacccataaccactgct

SEQ ID NO: 59328 - DNA, 40 bp, Staphylococcus pseudoxylosus
  source 1..40: mol_type = genomic DNA
cgcagtaggtgtccaatttccgaaagtccccccacccata

SEQ ID NO: 59329 - DNA, 40 bp, Staphylococcus pseudoxylosus
  source 1..40: mol_type = genomic DNA
cgcagtaggtgtccaatttaggaaagtccccccacccata

SEQ ID NO: 59330 - DNA, 50 bp, Staphylococcus pseudoxylosus
  source 1..50: mol_type = genomic DNA
agatggggaagtagatggaaggtcagaaacaccaacactgcaaaattgct

SEQ ID NO: 59331 - protein, 546 aa, Mycobacterium kansasii
MSLRFAFYGRVSTEDAQDPEASRSWQKRRAIDLIAPHGGVLAADYFDVGQSRSLPWKRRPEASRLLADVACPDHNFDAVVIGEPARAFYGPQFALTFPILTHYGVGLWVPEVGGAVDPGSEAHDLVMTLFGGMSKGERARIQVRVRTAMSALAQDTSRYLGGRPPYGYRLVDAGPHPNPAKANLGQRLHRLEPDPATSPVIERIYRMYADGAGLRYIAQQLTDDGVPSPSQYDPARNRHRDPRGWSHSAIRAILDNPAYRGIRVWGKQEKYEVLVSPDDVAAGYETRMRWRDQADWIAPDRRTHEALIPDELVEAVRRRTQARRGPGLVCSRESTVPYALRGLLFCAACGRRMQGAARVGKRTTRILYRCELGKSRSIPVDLSDHPRTVYLREDEVTARLDEWIATLADPEDLARGQDVDPVAGTGYAALQRQLREVNAKIAALVTAVESGVAVEDLTAALRRRTAERDELKARLEQAERPRVMSAAQMSELVEELGGLSAVLGAATGAERAEVYASLGLRLDYDPQLREVKATADLSRVAGRVRG

SEQ ID NO: 59332 - DNA, 50 bp, Mycobacterium kansasii
  source 1..50: mol_type = genomic DNA
gtcgtgtcgccggacgtgtccgagggggacttggccacctgcgacacggg

SEQ ID NO: 59333 - DNA, 40 bp, Mycobacterium kansasii
  source 1..40: mol_type = genomic DNA
ctaagaaaatgtgtccgagggggacttgaaccccacgccc

SEQ ID NO: 59334 - DNA, 40 bp, Mycobacterium kansasii
  source 1..40: mol_type = genomic DNA
ctaagaaaatgtgtccgagagggacttgaaccccacgccc

SEQ ID NO: 59335 - DNA, 50 bp, Mycobacterium kansasii
  source 1..50: mol_type = genomic DNA
gtccgctctgaggaagggtccgagagggaactggcttagggcgacacggc

SEQ ID NO: 59336 - protein, 559 aa, Brevibacterium epidermidis
MTTVDDDSSALNSLVVPNAPGSATAVSYLRVSTKEQAEKDGSDEGYSIPAQREANQRKAEQMGATIVAEFVDAGESARKADRPDLMKMIKYVATHQINYCIVHKVDRLARNRADDVTIHLALRDAGVMLVSATENIDETPSGMLLHGIMSTIAEFYSRNLATETLKGLSQKAARGGTIGKAPLGYRNVGVRAENGREVRTVEVDPERAKLVTWAFMVYASGEWTTNQLHAELTARGLRTPAPPRRPSRPVGKSSIHRMLTNPYYKGDVRYQGVTYKGTHQPLVPPEVWYQVQTVLQSHRTAADASQVHDHYLKGTVFCGQCGSRLLVCNTKNRHGSVYPYFVCAEKHAGRGSCTRQAMLIEEVERLVERHYESVQISFETRQAVSEHLHSEFDRHMASESDALADLTKERSRLEDEQGKLLQAHYAGAIPLDLLKKEQNRISAGLETIKNRIDAHHDEYASARNNLDDSLNLLEHAADIYARCDDANRRLCNQAFFTKIYIEDEGEVRAEYARPFDALTDREVQADALTWAESARKENEVRTPTKDGSLVEGSHLAHLG

SEQ ID NO: 59337 - DNA, 50 bp, Brevibacterium epidermidis
  source 1..50: mol_type = genomic DNA
gggttcacacctcgcacatttggggtcacttcgtagcacgtttagcaaca

SEQ ID NO: 59338 - DNA, 40 bp, Brevibacterium epidermidis
  source 1..40: mol_type = genomic DNA
tgaacctctcccatttggggtgagtaacgggacttgaacc

SEQ ID NO: 59339 - DNA, 40 bp, Brevibacterium epidermidis
  source 1..40: mol_type = genomic DNA
tgaacctctcccatttggggcgagtaacgggacttgaacc

SEQ ID NO: 59340 - DNA, 50 bp, Brevibacterium epidermidis
  source 1..50: mol_type = genomic DNA
ggtttccaagtacccacattttgggccccatcagaacgctattagctaca

SEQ ID NO: 59341 - protein, 502 aa, Bacillus velezensis
MELQNRIQRVAIYLRKSRNKEGEETEETLRKHRKRLIDIANKNKWDYELFQEVGNSMNENRPEYQKLLSKLSEGIFDAVLSVNLARVTRDDAETPKFMSLLRQEDILFITDSERIYDLEVQEDWQALKFTGFVNNWEYENIKAQLRKGKKDSAKMGRWSNGVPNYGLVYNRFDRSLEIDQQKADAVKLAFQLVIDGLGVDNVAKELNRLGYKTNRGRYFSGNAITRMIRAEIYKSVIISNRLKGRNLYEGKLRPKNQWIIAENAAPPIIDEETWNMANEALDQRKLLSPRGKQKKHPLSNLIKCGLCGRTQTVSRRRDRNDALAIQPCNKTDPLGKNKCNNRGIKHDTMISLVIEAIHEKHHEISSELIKFEEDTEANDIKAIKINKLQEQINKSKKALDILQIQLEEELINISSFKERRKIRQVELNKLEKELTELLEETKEDALKSKKSFANKLDFFLENWHTIDGSDLNHELMSFINKIIWYAPRDSELPPELKFEWRV

SEQ ID NO: 59342 - DNA, 50 bp, Bacillus velezensis
  source 1..50: mol_type = genomic DNA
cgggtagcttagcgaacttgtcactggtgtcatgtccactaaactaacca

SEQ ID NO: 59343 - DNA, 40 bp, Bacillus velezensis
  source 1..40: mol_type = genomic DNA
cggctattcgacttgtcactggtgccacgtaatggcccac

SEQ ID NO: 59344 - DNA, 40 bp, Bacillus velezensis
  source 1..40: mol_type = genomic DNA
cggctattcgacttgtcacaagtgccacgtaatggcccac

SEQ ID NO: 59345 - DNA, 50 bp, Bacillus velezensis
  source 1..50: mol_type = genomic DNA
cgggtagttcttataattttttaaaagtgacatgtgatgggaacaaataa

SEQ ID NO: 59346 - protein, 605 aa, Nocardia otitidiscaviarum
MPESPPRALIVIRLSKVTDATTSPERQLAECRAICEKRGYEVVGVAEDLDVSGAVDPFDRKKRPHLARWLHGEHLDDNGEPVPFEVIVVYRVDRLTRSVRHLQKLVAWADDHKKLVVSATEAHFDTSLPFSAVLIALIGTVAEMELAGISERNASAARHNIQAGRYRGSTPPWGYVPSNDTGEWRLVRDKEQADVINEVARRVIEGEPLQKIAHDLTRRGILTPKDNFAKQRGREIKGREWSVTQLKRSLLSEAMLGHAVSGGAAVRNDDGSPVVRSEPILSREIYDRVAAELSSRAKRGEPNKRTSSLLLGVISCGNPCLHKQQGHECPEGCSGTCDEPVYKFNGGSHSQFPRYRCRTMTRAYKCGNRTIRADQADAQVERTILALLGSSERLERVWDAGEDHSAELADINDELVDLTSQLGVGAFRAGTPQRAKLDARIASLAERQAQLSSEAVVPAGWKLLPTGELFGDWWSRQDLTARNVWLRSMGVRARFKRDDKTLYIDLGNLNDLISGLKPGGTAQRVRGGLQAMERNGIQGMVFSDADSEVMPAPAAGYMWIQPVEGVWVYTSEALLAAAAERQALRREKIEDEFAYGPGDFDEDWD

SEQ ID NO: 59347 - DNA, 50 bp, Nocardia otitidiscaviarum
  source 1..50: mol_type = genomic DNA
tggcttacacgctcgacaacagcgctctcggtggtgttggatataagcca

SEQ ID NO: 59348 - DNA, 40 bp, Nocardia otitidiscaviarum
  source 1..40: mol_type = genomic DNA
cggcttgtcgaccacggcgctctcggtggtgagcaccatg

SEQ ID NO: 59349 - DNA, 40 bp, Nocardia otitidiscaviarum
  source 1..40: mol_type = genomic DNA
cggcttgtcgaccacggcgcactcggtggtgagcaccatg

SEQ ID NO: 59350 - DNA, 50 bp, Nocardia otitidiscaviarum
  source 1..50: mol_type = genomic DNA
tgttttacaatcctagctacagcgcactcattggtgcatattacaatcct

SEQ ID NO: 59351 - protein, 480 aa, Paenibacillus odorifer
MVVKADGTPLSKTKVAIYTRVSTEKQSSEGYSLEAQHDQLIDYVNSNNMQLIKLYSDPGVSAKNLKRPGVQELIRDLESGMFDTVIIHKLDRLTRNISDLYDLVELVNAKNVKLISLSEQIDTSNPMGRMFVYLLGIFAQMFRENLGEEVTKGMRKRAEKGLHNITVDLYGYRRQDDGRLLIKEDEAEWVRFIFERYAAGDGSTMIAKYLNEHGIRRNKGSRWDHSKVLLTLENKHYCGKVHNKFKKDDDAIVRDGQHDPIVSEELFEQAQTVLNRRREGTISQNTHDYVFGGILKCGKCGFSYTGVTDNRTENKNRHYVCGNKSRFGMCDQGGLSEKKLTALVFKSTYIISDEYNRKHVPKKTKSEEEEIRKAIRSSEDRRERWQLAYGDGNMPYADFSKRMQEEMLRITELEAKLSTIPKEVVSHLTPERAIKTINEIKDNWELYSQRTRKDIMQALFKKISIIKEGSNWRISEIILA

SEQ ID NO: 59352 - DNA, 50 bp, Paenibacillus odorifer
  source 1..50: mol_type = genomic DNA
aacagtagttacgagttgacgggcacacccgtccatacaaaactattaca

SEQ ID NO: 59353 - DNA, 40 bp, Paenibacillus odorifer
  source 1..40: mol_type = genomic DNA
taccagtcggctaaccggaacgccggtccagcgggagaca

SEQ ID NO: 59354 - DNA, 40 bp, Paenibacillus odorifer
  source 1..40: mol_type = genomic DNA
taccagtcggctaaccggaaagccggtccagcgggagaca

SEQ ID NO: 59355 - DNA, 50 bp, Paenibacillus odorifer
  source 1..50: mol_type = genomic DNA
aacagtccttttaggaagacgagcaaacacctacataccagactataaaa

SEQ ID NO: 59356 - protein, 528 aa, Streptomyces alfalfae
MNQLRALSAIRLSVRTDETTSPGRQRAANSNEAARRGAVIVGEAEDLDVSATKTTPFNRPELGAWLARPDDFDMIIWWRMDRAVRSMADMAELGRWAKDHGKLLVFAEGPGGAPLELDMRTVSPVSELIMMMLAFSAQMEALAIKERVTGAMAALRTQGRYSGGLVPYGYGKVKNPDGEGFKLAPDPEAVKVLSGIIRDVLDGQSLTAVAMALNEAGTLVPRDYQAVKAGREPGGMRAGRRHDRFKWTAGTLSKVLRSPALMGHRIHNGKPVRDRDGKEVLIGEPVLTREEFNILQDHMGTLTPQKNRTRKDTQAMLLGVAKCRGCGGNLYLSKRAGGSDYNCRATARGERCQAPAGIRADWLEKYVEEEFLVRLGHFQMTKVITHKGYDPTPELRELQEEMRALLAVKGSLGGSRAAEAIWTEEVAALGRRLDALESTPRTEARTEVVETGETYASYWARHDAAGRRQLLLDAGARATVAKGRSGGGAERLKGPDPERLAFTIGAHQDPEAAALEAVEEEERQAHLD

SEQ ID NO: 59357 - DNA, 50 bp, Streptomyces alfalfae
  source 1..50: mol_type = genomic DNA
gttgtgcaaactaggtcgatccgccatccggtcgcaacagagccaactac

SEQ ID NO: 59358 - DNA, 40 bp, Streptomyces alfalfae
  source 1..40: mol_type = genomic DNA
gatgtggtagtcgatccgccagcccgtgtcgttgtcgaag

SEQ ID NO: 59359 - DNA, 40 bp, Streptomyces alfalfae
  source 1..40: mol_type = genomic DNA
gatgtggtagtcgatccgcttgcccgtgtcgttgtcgaag

SEQ ID NO: 59360 - DNA, 50 bp, Streptomyces alfalfae
  source 1..50: mol_type = genomic DNA
gttgtgaaaattgtgtcgataggctttcttgtcatagggttgccacaaac

SEQ ID NO: 59361 - protein, 410 aa, Mycobacteroides chelonae
MDRIVRRLLDLADLIRWCQENSVSLVSATETFLDLDSAFGDIVALLVAKVAEMELTAISERNRSAAQHNMREGKYRGGPPPWGYRAEKIDGDWRFVQDDQQVGVINEVVRRVLDGEPLRQVAADLTNRAVLTPRDRAYQLKGKEIQGYSWHSAKLREMLASKSLLGHAVTANGSIRNDDGSPIIRATPILERDVFERVQVELAGRENRKEPTKRSTSLLLRVIYCGVCGKPAYKLKGGKGRQDRYRCASAQYKTTCGNRTVIVGDAEEILTDAVMSVLGGKYRRDKVWDTGNDHAAELAEIDETLSDLTDQLGTGSFRKGTRQRARLDARIAELAHRQAELAAQASKPAGWVWVPTDELFGDWWKSQTVEQLNLWLRSMDIQMSWDHQGIQTDMLHLEKMAEQWDKRPPA

SEQ ID NO: 59362 - DNA, 50 bp, Mycobacteroides chelonae
  source 1..50: mol_type = genomic DNA
cgctagtaataattgacaaacgaatattccacagtatatatttacaaccg

SEQ ID NO: 59363 - DNA, 40 bp, Mycobacteroides chelonae; identical to SEQ ID NO: 6913
  source 1..40: mol_type = genomic DNA

SEQ ID NO: 59364 - DNA, 40 bp, Mycobacteroides chelonae
  source 1..40: mol_type = genomic DNA
cggcatgtccaccgtcgaaagcgcgatcggaacgatcgcg

SEQ ID NO: 59365 - DNA, 50 bp, Mycobacteroides chelonae
  source 1..50: mol_type = genomic DNA
ggcaagcaaacaatcaaaaacgaaagttccacattttggcagtaaaacct

SEQ ID NO: 59366 - protein, 410 aa, Mycobacteroides chelonae; identical to SEQ ID NO: 59361

SEQ ID NO: 59367 - DNA, 50 bp, Mycobacteroides chelonae; identical to SEQ ID NO: 59362
  source 1..50: mol_type = genomic DNA

SEQ ID NO: 59368 - DNA, 40 bp, Mycobacteroides chelonae; identical to SEQ ID NO: 53048
  source 1..40: mol_type = genomic DNA

SEQ ID NO: 59369 - DNA, 40 bp, Mycobacteroides chelonae
  source 1..40: mol_type = genomic DNA
cgcgatcgttccgatcgcgagttcgacggtggacatgccg

SEQ ID NO: 59370 - DNA, 50 bp, Mycobacteroides chelonae; identical to SEQ ID NO: 59365
  source 1..50: mol_type = genomic DNA

SEQ ID NO: 59371 - protein, 521 aa, Mesorhizobium ciceri
MNPRTTPATPPNRPKAYSYVRFSTPEQGKGDSFRRQTEAAALYAARNGLDMDTKFTFHDLGKSAFRGRNSTEGMLGEFLKYVKSGDVPKGSYLLVENLDRVSRETAWDALDRLRDIAKEGVTVVTLSDGKQYSFDSLRQNPMDMMFAIMLFMRANDESETKGRRVGAAWANKRRTAAEKPLTALCPGWLRLRPDRSTYDLIPDRVVIVQRVFDLTLAGRGQHAIAETFNREGVPVFGRGKMWHKTYIAKMLSDPSTIGRHTPHRVEVVEGKKVRTPTEPVEGYFPPAIDPETFSRVAALSNGRPAQRAAQGSIANILAGLAKCPRCDDTMTRVNKGGKKGGKPYLVCTAAKAGKGCDYHQVRLQQVEDTIIRRAGELYGSLPSPDVALQEQWGRATAAEEAVSEEISNVVEAIEQVGHSPALLSRLLENEAAKKDLRRTISDLEARLADTLTNRVQETLGRLVDAAQVEEGSHDVPMINATLRQLFDRVVVDYISGYLRFYWKHASGEVSDFMYAWPKEVA

SEQ ID NO: 59372 - DNA, 50 bp, Mesorhizobium ciceri
  source 1..50: mol_type = genomic DNA
cgggggtctttcgttcacatcatgagcatggtatggacagaagacccaca

SEQ ID NO: 59373 - DNA, 40 bp, Mesorhizobium ciceri
  source 1..40: mol_type = genomic DNA
ccccggcggtccgatcatcagcagattatggccgccggcg

SEQ ID NO: 59374 - DNA, 40 bp, Mesorhizobium ciceri
  source 1..40: mol_type = genomic DNA
ccccggcggtccgatcatcctcagattatggccgccggcg

SEQ ID NO: 59375 - DNA, 50 bp, Mesorhizobium ciceri
  source 1..50: mol_type = genomic DNA
ctggggtctctcagtcagatccagctgaagggctgggaggaagacacaaa

SEQ ID NO: 59376 - protein, 507 aa, Escherichia coli
MKRAISYIRFSSEKQSRGDSLRRQAKMVTDWLKAHPEYYLDESLTFRDLGVSGFTGKHLKGGLGDFLTAIEKGLVKAGDTLLIESLDRLSRQDIDIASELLRRILRAGVDVVTLSDGEHYTKESLKDPLSLIKSILIMQRAHEESLRKAERIQAAWDAKKEAAKAGIKISRRCPAWLKLNDDRKSFSVIPEKVETVKRCFQLRLEGKSIWAIVKALNDEGHQTLNQYKAGKFGQTSVQDLLKNRSVIGYFTPKGCEEIAGYYPAIIDETTFYKVQQLSHSRYGKRSVSDKPLSVNLFKGVIRCSECGHALIITGFSDTRNGIYRCPLRNENRCSAKGLSRKQTDGTLLALLSRLDRFDSDTTNTIDTLKLHREHISNNIEKLVQLSLEIEDLSAITSKLKQLKGELSQVDADIEKETQRLKSIDVGCLSDCDLTTKAGRIEAQLIIKSAVKEVVLNTAKRRCKVTFHNGKVIDLPITENPSEDVTEAIQSLSEVTERGLIDVDEVII

SEQ ID NO: 59377 - DNA, 50 bp, Escherichia coli
  source 1..50: mol_type = genomic DNA
aggtgcatttagaccttgatgatttttattagacgcgtttaaatacacca

SEQ ID NO: 59378 - DNA, 40 bp, Escherichia coli; identical to SEQ ID NO: 5188
  source 1..40: mol_type = genomic DNA

SEQ ID NO: 59379 - DNA, 40 bp, Escherichia coli; identical to SEQ ID NO: 55319
  source 1..40: mol_type = genomic DNA

SEQ ID NO: 59380 - DNA, 50 bp, Escherichia coli
  source 1..50: mol_type = genomic DNA
ttgtgcagttagttcttgatgaattccattccacgctcccaaataagcct

SEQ ID NO: 59381 - protein, 507 aa, Escherichia coli
MKRAISYVRFSSEKQSRGDSLRRQAKMVTDWLKAHPEYYLDESLTFRDLGVSGFTGKHLKGGLGDFLTAIEKGLVKAGDTLLIESLDRLSRQDIDIASELLRRILRAGVDVVTLSDGEHYTKESLKDPLSLIKSILIMQRAHEESLRKAERIQAAWDAKKEAAKAGIKISRRCPAWLKLNDDRKSFSVIPEKVETVKRCFQLRLEGKSIWAIVKALNDEGHQTLNQYKAGKFGQTSVQDLLKNRSVIGYFTPKGCEEIAGYYPAIIDETTFYKVQQLSHSRYGKRSVSDKPLSVNLFKGVIRCSECGHALIITGFSDTRNGIYRCPLRNENRCSAKGLSRKQTDGTLLALLSRLDRFDSDTTNTIDTLKLHREHISNNIEKLVQLSLEIEDLSAITSKLKQLKGELSQVDADIEKETQRLKSIDVGCLSDCDLTTKAGRIEAQLIIKSAVKEVVLNTAKRRCKVTFHNGKVIDLPITENPSEDVTEAIQSLSEVTERGLIDVDEVII

SEQ ID NO: 59382 - DNA, 50 bp, Escherichia coli; identical to SEQ ID NO: 59377
  source 1..50: mol_type = genomic DNA

SEQ ID NO: 59383 - DNA, 40 bp, Escherichia coli; identical to SEQ ID NO: 5188
  source 1..40: mol_type = genomic DNA

SEQ ID NO: 59384 - DNA, 40 bp, Escherichia coli; identical to SEQ ID NO: 55319
  source 1..40: mol_type = genomic DNA

SEQ ID NO: 59385 - DNA, 50 bp, Escherichia coli; identical to SEQ ID NO: 59380
  source 1..50: mol_type = genomic DNA

SEQ ID NO: 59386 - protein, 562 aa, Enterobacter roggenkampii; identical to SEQ ID NO: 44326

SEQ ID NO: 59387 - DNA, 50 bp, Enterobacter roggenkampii; identical to SEQ ID NO: 44327
  source 1..50: mol_type = genomic DNA

SEQ ID NO: 59388 - DNA, 40 bp, Enterobacter roggenkampii
  source 1..40: mol_type = genomic DNA
tttctcgcgccctttggctaacactaaacgtacactcata

SEQ ID NO: 59389 - DNA, 40 bp, Enterobacter roggenkampii
  source 1..40: mol_type = genomic DNA
tttctcgcgccctttggctgtcactaaacgtacactcata

SEQ ID NO: 59390 - DNA, 50 bp, Enterobacter roggenkampii
  source 1..50: mol_type = genomic DNA
tttaaatggcactagtatttggctgtaacacaattaataccccttgtaaa

SEQ ID NO: 59391 - protein, 562 aa, Cronobacter sakazakii; identical to SEQ ID NO: 44326

SEQ ID NO: 59392 - DNA, 50 bp, Cronobacter sakazakii; identical to SEQ ID NO: 44327
  source 1..50: mol_type = genomic DNA

SEQ ID NO: 59393 - DNA, 40 bp, Cronobacter sakazakii
  source 1..40: mol_type = genomic DNA
cttctcgcgccctttggctaacactaaacgtacgctcata

SEQ ID NO: 59394 - DNA, 40 bp, Cronobacter sakazakii
  source 1..40: mol_type = genomic DNA
cttctcgcgccctttggctgtcactaaacgtacgctcata

SEQ ID NO: 59395 - DNA, 50 bp, Cronobacter sakazakii; identical to SEQ ID NO: 59390
  source 1..50: mol_type = genomic DNA

SEQ ID NO: 59396 - protein, 427 aa, Cronobacter sakazakii
MEKRKLYSYIRWSSDKQAKGSSLQRQLETARRVAHENDLELVEIIDAGLSAFRSKHLEKGSLGAFIEAVKVGQIASDSWLTVESLDRISRDAILKAQGLFMELLELGITIYTGMDNRIYTKSSVTDNPMELMLSIMTFSRANQESMVKSQRQKSATQLKINKFNASVRADNGYPHAIRNSGANVFWSDVSDGTVRPHEYYFPIAKLIVSLRLKGWGYMRIAKHLNENYTPPKGTAKRKHFKDLWSPKLICNFLQSRTLMGEKSIRVDGVEHILKGYYPQVISENEFYSLQNVINRKLANEPNNYIPLLTGIRRFKCGCGAAMVAFFQYDKIRYRCDGMKSLDKRMHCGAKSFNGASIENAIVQICADKIFKDVKTHTSNVGAIQAMLVEAKRKYNRGMDMLLEDTAPQGLNIKLIELEKQIEELQKN

SEQ ID NO: 59397 - DNA, 50 bp, Cronobacter sakazakii; identical to SEQ ID NO: 44327
  source 1..50: mol_type = genomic DNA

SEQ ID NO: 59398 - DNA, 40 bp, Cronobacter sakazakii; identical to SEQ ID NO: 59393
  source 1..40: mol_type = genomic DNA

SEQ ID NO: 59399 - DNA, 40 bp, Cronobacter sakazakii; identical to SEQ ID NO: 59394
  source 1..40: mol_type = genomic DNA

SEQ ID NO: 59400 - DNA, 50 bp, Cronobacter sakazakii; identical to SEQ ID NO: 59390
  source 1..50: mol_type = genomic DNA

SEQ ID NO: 59401 - protein, 562 aa, Enterobacter asburiae
MEKRKLYSYIRWSSDKQAKGSSLQRQLETARRVAHENGLELVEIIDAGLSAFKSKHLEKGSLGAFIEAVKEGEVANDSWLTVESLDRISRDTILKAQRLFMELLELGITIYTGMDNRIYTKESVTDNPMELMLSIMTFSRANQESMVKSLRQKSAAQLKIDKFKAGGLAENGYPYAIRSSGANVFWADVSDGTVKPHDYYFPIAKLIVNLRLKGWGYMRIAKYLNENYTPPRGTAKRKHFKDMWSPKLICNFLQSRTLMGEKSIRVDGVEHILLNYYPQVMNEKEFYNLQNVINRKLASEPNNYIPLLTGIRRFKCECGAAMVAFYQYNKIRYRCDGMKSLDKRMHCGAKSFNGASIENAIVQICADKIFKDVKSHISNVGAIQAMINDAQKKYKLGMDMLLEDNAPSGLNIRLIEIENQIERLQKQLNDELIIDAGIDTSVSWDAVPENYREISNTERLEIKQKIQASTLSIVCSTVKTKGHLFEIKFIDGDVIRFFSDKRRVHVDVQGINNAAILQSEGIILHDHFDYLLDSEAFVERIRLQHKQLKDKEERTLDDIFGI

SEQ ID NO: 59402 - DNA, 50 bp, Enterobacter asburiae; identical to SEQ ID NO: 44327
  source 1..50: mol_type = genomic DNA

SEQ ID NO: 59403 - DNA, 40 bp, Enterobacter asburiae; identical to SEQ ID NO: 59388
  source 1..40: mol_type = genomic DNA

SEQ ID NO: 59404 - DNA, 40 bp, Enterobacter asburiae; identical to SEQ ID NO: 59389
  source 1..40: mol_type = genomic DNA

SEQ ID NO: 59405 - DNA, 50 bp, Enterobacter asburiae; identical to SEQ ID NO: 59390
  source 1..50: mol_type = genomic DNA

SEQ ID NO: 59406 - protein, 653 aa, Streptomyces dengpaensis; identical to SEQ ID NO: 18546

SEQ ID NO: 59407 - DNA, 50 bp, Streptomyces dengpaensis
  source 1..50: mol_type = genomic DNA
acgcagaagaacgatcccgaaggggatcgtctcggaatgttcccgatcac

SEQ ID NO: 59408 - DNA, 40 bp, Streptomyces dengpaensis
  source 1..40: mol_type = genomic DNA
aggccgcgatgccaaacgggatgccgatgatcgtgatgca

SEQ ID NO: 59409 - DNA, 40 bp, Streptomyces dengpaensis
  source 1..40: mol_type = genomic DNA
aggccgcgatgccaaacggtctgccgatgatcgtgatgca

SEQ ID NO: 59410 - DNA, 50 bp, Streptomyces dengpaensis
  source 1..50: mol_type = genomic DNA
aggcagaggccatgcccagaggggtctccttccggatatttcccagtcac

SEQ ID NO: 59411 - protein, 530 aa, Anaeromyxobacter dehalogenans
MKTAALYARFSTDKQDARSIDDQIRRCRAFAEARALAVVAVHQDAALSGASTARPGLQAVLREAKRRAFDAVIVDDLSRLSRDLGHTWNIIFSDLASVGVRVIDATTGMASDAAGARLTFGALALVNDTFLQLVKTETHRGLEGRALGGFWTGGSCYGYRTVPEPTPQDPAHPRAVPVIEADEAEVVRGIFARYAKGDTLGSILAWLSGQTAPADGATKKKAPGWSKSLLFSMLRNERYAGQFVWNRRKWTKDPTTGKRRYVERPEAEWVRVERPELAIVDRETWAQVQARHARTAQDHGERKRSTSPHMLSGLLRCGVCGGALSIVSQRKKGGVVYSQFGCSVRHSRGPGACANATTTSELGLNAAVLSALRTHLASPDIERWVAEVLAERAAESHAPDLAAEVRAAEVRAEKVADALARIGFSDTLARRLQNEEAKLRELRAQLTRAAPAPKRPAVSVRQVLAALEGLDDLAKRHPAQARAGLQSVVESVTLTPEAESGRVRATLQLKSETATLVGGRLGAESTGCGG

SEQ ID NO: 59412 - DNA, 50 bp, Anaeromyxobacter dehalogenans
  source 1..50: mol_type = genomic DNA
ggtgctgaatcaactggttgcgggggcgcgcaacgccgagaatcagcgcg

SEQ ID NO: 59413 - DNA, 40 bp, Anaeromyxobacter dehalogenans
  source 1..40: mol_type = genomic DNA
gcgtcgaactggttgcgggggcaggatttgaacctgcgac

SEQ ID NO: 59414 - DNA, 40 bp, Anaeromyxobacter dehalogenans; identical to SEQ ID NO: 59413
  source 1..40: mol_type = genomic DNA

SEQ ID NO: 59415 - DNA, 50 bp, Anaeromyxobacter dehalogenans
  source 1..50: mol_type = genomic DNA
gcagctgagggcggtggtggggggggcgggcacagcgcgagaacagctcg

SEQ ID NO: 59416 - protein, 501 aa, Mycobacteroides abscessus
MRQQLRAVVGSRVSHLDDDKAATRKVSHKAQTEEGGRWAKSQGYEVVGAFEDLGVSAGKTTPFERPDLGKWLAPERLHEWDVLVFSKIDRAFRSTSDCVDFARWTKENRKILAFSGDGVVLDYLHPKGESLDQMMSEFFIYVGSFFAAIELNRFRTRATDRLSYLRMTDRVSHGVPPLGFRTVPHPSGQGKALERDPKGYALLHEIKDKLLHENYSLTGLVQWLNETGRQTAVAKARKGDAKWSVTSLKRTLTSERTQGLRMSGGKPVLDSQGTPIRMAEPTFTDDEWEQIQQALNQRSTSGRARYMTDNPFAGIVYCVCGYAVAQHRRKSSSGKEHTYVRCGQGCRGAWKLADVYEQLDLSFLAGYADQEMTKLVFVPGEDRSEELAGIERSITRLRWESDNDLVDDEDLYQSRMAALLSRKREIGQIVVPARWERRGTGKTYQELWADPETDRRQVMRDARIRLVLHFIPKGSDAPFVTHAHFEDMWNPAEEAKALSGN

SEQ ID NO: 59417 - DNA, 50 bp, Mycobacteroides abscessus
  source 1..50: mol_type = genomic DNA
gttgttgtgtgtgcagccttcacgttgtaccgtgctacacatgagacaac

SEQ ID NO: 59418 - DNA, 40 bp, Mycobacteroides abscessus; identical to SEQ ID NO: 56058
  source 1..40: mol_type = genomic DNA

SEQ ID NO: 59419 - DNA, 40 bp, Mycobacteroides abscessus
  source 1..40: mol_type = genomic DNA
gtggccggtggccttcacgtggtactgcgccacctcgatg

SEQ ID NO: 59420 - DNA, 50 bp, Mycobacteroides abscessus
  source 1..50: mol_type = genomic DNA
tatgctgtggataaagccatcatgtggtaccatgctcacaatgcaatgac

SEQ ID NO: 59421 - protein, 544 aa, Cryobacterium sp
MSIAAPATTEMDSGAGAPALLAVSYLRVSTREQAERGGTEEGFSIPAQREANRRKAQDLGARVVREFVDAGESARSADRDGLQEMLAFIAASRVNFCIVHKLDRLARNRADDIEIHQALLAAGVTLVSATESIDQTPSGMLVHGIMSSIAEFYSRNLATEVTKGLHQKLAQGGTPMRAPVGYLNVRKTDENGREIRTVEVDPERAPLIRWAFERYAGGETSVTALLRDLTARGLTTVPSPKRPSKPLGKNTLYKLLTNPYYAGVIRYKGALHPGAHEPLIEPALFDQVQSLLKARNARATRHVRHAHHLKGLLHCGACGSRMLLDFATNPRGTTYAYFVCSGRAAKKTNCTRRAVPVQVAEQLVEDSYASISISEDDYRSLAAQVDAAFDKRSAGRDQEFADLTANRARLEAESDKLLAAHFADAIDLATLKRHQDRIRAGLADIEQRLARHDEQHTGGRAFLHDSLRLLADAHHSYTRSGDADRRLANQAFYTRLEITEDEQLRPRLAEPFATMVREATGGEEAKREHPASSDVACSRKTLWV

SEQ ID NO: 59422 - DNA, 50 bp, Cryobacterium sp
  source 1..50: mol_type = genomic DNA
gtgttcccgtaagacactttgggtggaagcaatggagcgttgcgggaaca

SEQ ID NO: 59423 - DNA, 40 bp, Cryobacterium sp
  source 1..40: mol_type = genomic DNA
gcgcgatggcacttgtggtggagctaaggagattcgaact

SEQ ID NO: 59424 - DNA, 40 bp, Cryobacterium sp
  source 1..40: mol_type = genomic DNA
gcgcgatggcacttgtggtcaagctaaggagattcgaact

SEQ ID NO: 59425 - DNA, 50 bp, Cryobacterium sp
  source 1..50: mol_type = genomic DNA
ttgttcccttgtgtccctttagggcaaagaaatagacagggccgggcgca

SEQ ID NO: 59426 - protein, 544 aa, Tetrasphaera sp
MSTATLDTKTSEHAADAPVLLAVSYLRVSTREQAERGGTEEGFSIPAQREANARKAAELGARVVREFVDAGESARSADRDGLQDMLAFIAATRVTFCIVHKLDRLARNRADDVKIHEALINAGVTLVSATESIDQTPSGMLVHGIMSSIAEFYSRNLATEVTKGLSQKVAQGGTPMRAPVGYLNVRRTDEQGREVRTVKVDPERAPLIAWAFETYAKGETSVTALLRDLTARGLVSVPSPKRPSKPLGKNALYRVLTNPYYAGVIRYKGALHPGAHEPIVEPTLFDQVQSLLKARNAHATRHVQHAHHLKGLLHCGTCGSRMLLDFATNPRGTTYAYFVCSGRASKRTACTRRAVPVQVAERLVEDSYANITISEDDYLHLAAEVDAAFDQRGAGRDQEFTDLTANRARLQAESDKLLAAHFADAIDLPTLKRHQDRIRAGLADIEHRLSEHDQQHVGGRAFLHDSLRLLTDARHAYANSDDGSRRLANQAFYTRLEITEDEQLHPRLAEPFATIVRETTGGKEAKREHSTSSDVACSRKTLWV

SEQ ID NO: 59427 - DNA, 50 bp, Tetrasphaera sp
  source 1..50: mol_type = genomic DNA
gtgttcccgcaagacactttgggtggaagcaatggagcgttgcgggaaca

SEQ ID NO: 59428 - DNA, 40 bp, Tetrasphaera sp
  source 1..40: mol_type = genomic DNA
agcgagtcgcgcggatggtggagcctaggggactcgaacc

SEQ ID NO: 59429 - DNA, 40 bp, Tetrasphaera sp
  source 1..40: mol_type = genomic DNA
agcgagtcgcgcggatggtcaagcctaggggactcgaacc

SEQ ID NO: 59430 - DNA, 50 bp, Tetrasphaera sp; identical to SEQ ID NO: 59425
  source 1..50: mol_type = genomic DNA

SEQ ID NO: 59431 - protein, 509 aa, Pseudomonas fluorescens
MSKAISYIRFSTGKQAKGSSHERQQAMLASWLTANPGFPLWTESFKDLGISGSDGSHLKGGFGKLLEAIDKEAIQSGDVILVEAMDRIGRLEPMDMLPILSKIVKAGVDIVTLDDGIRYNRESVNNNLLFLLVAKVQQAHQFSDTLSRRLKASYTSRKKAAAEGVTPKRNTPVWLTSEGALIPEIAPLVKQAFEDYASGLGERRIFERIFEGNTNPLLARMAPSTVKRWMNNRTAIGEWNGIPSVYPAVIEPELFYRVQKRMEDKFSPRGLPTKHRFTGLVVCAECGKNFNTKHYQATGLTSMECSSRARRGSTGCSNNRSIPEPIIDLAFHFTNGGHIMKALEGQQLTASQKRGVELDGEIGEVNKKIGRIVSAIAVLEDDSEELTDKLRSLQAERRVLQAEKDGLVTDNSASIMDKVKNMSDFTKDPMKANALLQSVGYQLVCHVDGRVTFENETFMYEGWGRAEDVHNVVLPDGKRIKLPIQRKGKASKLKPVDVSQLGKLDLTKH

SEQ ID NO: 59432 - DNA, 50 bp, Pseudomonas fluorescens
  source 1..50: mol_type = genomic DNA
aatccccacattgcagcattctgcgtgaaggatgcggcaatgtgtagaag

SEQ ID NO: 59433 - DNA, 40 bp, Pseudomonas fluorescens; identical to SEQ ID NO: 58218
  source 1..40: mol_type = genomic DNA

SEQ ID NO: 59434 - DNA, 40 bp, Pseudomonas fluorescens
  source 1..40: mol_type = genomic DNA
ctcgtagtacaccggctggatgaagatcatgtcgtagatc

SEQ ID NO: 59435 - DNA, 50 bp, Pseudomonas fluorescens
  source 1..50: mol_type = genomic DNA
gattccctctggggagtattctgaatgaatgctgctctttggtttagagg

SEQ ID NO: 59436 - protein, 501 aa, Vibrio alginolyticus
MDFSTYSGIYAYIRHSKESQSEGDSVDRQDSLASYWEKTHNVPVNYLAIDAGKSAYSAENIATGSLGQFIADLESNNLPSSSLLLVEGFDRLTRQQLMTALALLQRIFATGAHVYTLEDNNLFTADSLNDLPTMFGILMKIGRANEESATKSRRIKESFARRDQQMIAKTPINYRHLPHWLEYKEGQDKYHINEHADTIRLLFSLYLEGHGVTHITNTLNDKGLLRQGKTEWTTANVSSQLGSRLVLGEWKGHEGVYPTIVSEHDFNAVQAMKRKGTGRRANRLTSVNLFIASIARCSCGKPLHVIRPRGVKRLVCSGTRQGKTGCPFGYKLYNVDAIEMALGLWATETIGTDPEDYTSKLSHLRNALAANEQEQQAHRDALVGLADAIAELGYTQALKDRYKSVEGDLATCIQRAETISLEVQQLERPQTDNADTLAHWHKHADDSDYRRRMLQLMETKGVEFIMDNGKVTLHYQDRSWFLQDGLFFTDATVAKFLNEGD

SEQ ID NO: 59437 - DNA, 50 bp, Vibrio alginolyticus
  source 1..50: mol_type = genomic DNA
cgctcctcatttgtgtgttcagcaaatggtgatagcataagtgcatagcc

SEQ ID NO: 59438 - DNA, 40 bp, Vibrio alginolyticus
  source 1..40: mol_type = genomic DNA
gcgttacttttggcctgcaaatggtggcgacgaagacccc

SEQ ID NO: 59439 - DNA, 40 bp, Vibrio alginolyticus
  source 1..40: mol_type = genomic DNA
gcgttacttttggcctgcatctggtggcgacgaagacccc

SEQ ID NO: 59440 - DNA, 50 bp, Vibrio alginolyticus
  source 1..50: mol_type = genomic DNA
ggctgttcactatccttttcatcatctggtaatagcatttctgtattccc

SEQ ID NO: 59441 - protein, 530 aa, Flavonifractor plautii
MQVDGYSLDAQRDKLRKYAAYEDMVVAGEYSDEGFSGKNIQGRQEFQRMLNDIQDCKDGVSYVLVFKLSRFGRNAADVLNSLQLMQDFGVNLICVEDGIDSSKDAGKLMISVLSAVAEIERENIRTQTMAGREQKAREGKWNGGFAPYGYKLESGNLVIAEDEVEVIRVIYDRYIHTNEGVAGVAKYLNRNGFVKKLRQNNTIPGFSRNFVQDVLDNPVYMGKIAYGRRRTEKRQGTRNEMHVVEQSEFPVYDGQHEAIISEEDWYLAQEKRKINSFKREKVNNPDHAHILSGILKCPCCGKSMYGNIAKAHSKDKKTRYYYYCKNTVTPTGHECSFRLNIEQTEINKFVAKVISAMVSNPRFIEAIQAKIGTAVDTEDMEKQIAVLQGQLKQAFGTKSRLERQMDTLDINDAHYDRKILDLQRRYDEQYDTIEEIEVQIGELQSQIRSIQQEKISGDNIYRLLLAFDEVYHSATEAEQKEFMKAFIERIEMFPEKRKDGSWIKKIVFNFPVPVDGEEVKELPLETETTV

SEQ ID NO: 59442 - DNA, 50 bp, Flavonifractor plautii
  source 1..50: mol_type = genomic DNA
cccttggaaactgaaacaacagtcgagacggttgtcttgctttccaaggg

SEQ ID NO: 59443 - DNA, 40 bp, Flavonifractor plautii; identical to SEQ ID NO: 33938
  source 1..40: mol_type = genomic DNA

SEQ ID NO: 59444 - DNA, 40 bp, Flavonifractor plautii; identical to SEQ ID NO: 33939
  source 1..40: mol_type = genomic DNA

SEQ ID NO: 59445 - DNA, 50 bp, Flavonifractor plautii; identical to SEQ ID NO: 33940
  source 1..50: mol_type = genomic DNA

SEQ ID NO: 59446 - protein, 530 aa, Flavonifractor plautii
MQVDGYSLDAQRDKLRKYAAYEDMVVAGEYSDEGFSGKNIQGRQEFQRMLNDIQDCKDGVSYVLVFKLSRFGRNAADVLNSLQLMQDFGVNLICVEDGIDSSKDAGKLMISVLSAVAEIERENIRTQTMAGREQKAREGKWNGGFAPYGYKLESGNLVIAEDEVEVIRVIYDRYIHTNEGVAGVAKYLNRNGFVKKLRQNNTIPGFSRNFVQDVLDNPVYMGKIAYGRRRTEKRQGTRNEMHVVEQSEFPVYDGQHEAIISEEDWYLAQEKRKINSFKREKVNNPDHAHILSGILKCPCCGKSMYGNIAKAHSKDKKTRYYYYCKNTVTPTGHECSFRLNIEQTEINKFVAKVISAMVSNPRFIEAIQAKIGTAVDTENMEKQIAVLQGQLKQAFGTKSRLERQMDTLDINDAHYDRKILDLQRRYDEQYDTIEEIEVQIGELQSQIRSIQQEKISGDNIYRLLLAFDEVYHSATEAEQKEFMKAFIERIEMFPEKRKDGSWIKKIVFNFPVPVDGEEVKELPLETETTV

SEQ ID NO: 59447 - DNA, 50 bp, Flavonifractor plautii; identical to SEQ ID NO: 59442
  source 1..50: mol_type = genomic DNA

SEQ ID NO: 59448 - DNA, 40 bp, Flavonifractor plautii; identical to SEQ ID NO: 33938
  source 1..40: mol_type = genomic DNA

SEQ ID NO: 59449 - DNA, 40 bp, Flavonifractor plautii; identical to SEQ ID NO: 33939
  source 1..40: mol_type = genomic DNA

SEQ ID NO: 59450 - DNA, 50 bp, Flavonifractor plautii; identical to SEQ ID NO: 33940
  source 1..50: mol_type = genomic DNA

SEQ ID NO: 59451 - protein, 572 aa, Gemmiger formicilis
MTNTESLGTIEATNPVLTVAPPKEDSEMNGATNKITALYCRLSQEDERAGESLSIEHQKDMLLRYAREHHFPNPTFFVDDGVSGVTYDRPGFQAMLAEIEAERVAVCITKDLSRLGRNSALTGLYTNFTFPQYGVRYIAINDNFDTIDPNSTDNDFAGIKNWCNEFYARDTSRKIRAVNKAKGERGVPLTTNVPYGYLKDPDNPRRWKIDPVAADVVRRIFSMCMDGRGPKQIANQLKADKVLTPTAYKTLQGIKSPNKKPEDPYGWGDSTVVRILERREYTGCTVNFKTYTNSIWDKKQRDNPIEKQAIFPNAHERIIDDDVFEKVQEIRQQRHRMTRTGRSSIFSGLVYCADCGSKMLYGSSNNGDLDQDFFDCSLHRKSKEKCNGHFIRVKVLERLVLKHIQAVMGYILRHEDYFRTIMEEQLRVESCEQIRIRRKRLESNERRIAELKRLFIKIYEDNASGRLTDERYDMLSQTYEVEQKQLEAEAITLQQEIEVHERQNENIEKFIQKAHKYVGIEELDGYALRELISAIYVDAPDKSSGKRVQHIHIRYDGLGFIPLNELMKKETA

SEQ ID NO: 59452 - DNA, 50 bp, Gemmiger formicilis
  source 1..50: mol_type = genomic DNA
ttactgttttacgaccacccggtatttgacaggtgttcgtaaaacaggtt

SEQ ID NO: 59453 - DNA, 40 bp, Gemmiger formicilis
  source 1..40: mol_type = genomic DNA
aaaacaaagagccgtgccctttgcggggcacggctcttgt

SEQ ID NO: 59454 - DNA, 40 bp, Gemmiger formicilis
  source 1..40: mol_type = genomic DNA
aaaacaaagagccgtgccccgtgcggggcacggctcttgt

SEQ ID NO: 59455 - DNA, 50 bp, Gemmiger formicilis
  source 1..50: mol_type = genomic DNA
ctaaaatttatcaagcacccgctacgtgacaggtgttggcagagcacatt

SEQ ID NO: 59456 - protein, 461 aa, Cellulomonas iranensis
MALYARISQDRSGDEAGVTRQLKDCRAEAVRRGWVVAEEYVDDDVSAYSGKRRPAYERMLRDIREGRRDAVVVWHLDRLHRRPIELEHFVSVCERAGVWDVVTLSGEVDLANGDGLLMARLLAAVAANESASKSRRLKRKALEIAETGRPTMGGRRPFGYAQDRVKADPTEAAVVRDAAARLLAGESLTSVTTWMQDSGVPTVSGAQWRTHSVRQVVTNPRMWGMRVHQGQVIGAGTWEPILTPEQGERLRRLLLDPARRTNRTARRYLLSGMLTCGKCGARMVSAPREGNRRYACRKGPDRGGCGGIYIAADPLERFVAEAVLQRLDSPQMHEALTGNEHDDAEVAALAAKVQDDERRLLDLADMFATGEIDRTGMKRARDQITPRLEANRRALAAANGRDQVVEYAGRGAELREAWDGLDLSRQVAVVRAVLAGATVLPATQRGRRGFDPTRVVPDWRA

SEQ ID NO: 59457 - DNA, 50 bp, Cellulomonas iranensis
  source 1..50: mol_type = genomic DNA
gttgggggtggttttggggctggtcggttgcccactagtcgctagtgtgc

SEQ ID NO: 59458 - DNA, 40 bp, Cellulomonas iranensis
  source 1..40: mol_type = genomic DNA
cttcggcaccaccggagtcggggttacccatggcggtgtg

SEQ ID NO: 59459 - DNA, 40 bp, Cellulomonas iranensis
  source 1..40: mol_type = genomic DNA
cttcggcaccaccggagtcatggttacccatggcggtgtg

SEQ ID NO: 59460 - DNA, 50 bp, Cellulomonas iranensis
  source 1..50: mol_type = genomic DNA
gtggggggtggggtaggggttgctatgttgcccaggctagtctggaattc

SEQ ID NO: 59461 - protein, 506 aa, Pseudomonas aeruginosa
MKDVTEKIAVIYCRVSSLKQAVQGDGLTSQETRCREYAKYKGYDVVNVFKDDMSGGLIDRPGMKSMLGYLHKNRSLPHVVIIDDISRLARGLEAHLQLRSAISSVGASLESPSIEFGEDSDSILVENLLASVSQHQRQKNGEQTKNRMRSRLINGYWVFQAPVGYRYARSTGNGKVLVRNEPCASIVQEALEGFASGRFQIQAEVKRFLESFPEFPRTNHGYVRNQQVTDILTNPVYAGYVEAPNWSVSLRQGHHEPLITFQTFKKIEERLNSKAKAPARKNINEDFPLRGSVLCGDCRSALTSCWSSGRHSRYPYYLCHKRGCESYGKSIKRDVLESEFEALLRAVQPTPGLFKIAQKMFEELWNHRLAMSEARVRNLKSEMAKIERQVGQFLDRITDTDMPSVIRTYEDRIRKLEEQRIVIGEQIARCGRPVRSFDQTLRTAFDFLGNPCKLWASERFEDKRTVLKLVFLDRLAYVRGSGFRTADLSLPFKTLSDFSKGNLKMA

SEQ ID NO: 59462 - DNA, 50 bp, Pseudomonas aeruginosa
  source 1..50: mol_type = genomic DNA
ggatttctccaagggcaatttgaaaatggcgaacctcgacgaagaaacgt

SEQ ID NO: 59463 - DNA, 40 bp, Pseudomonas aeruginosa
  source 1..40: mol_type = genomic DNA
cctcggcgtggtgaagatgtatggcgcagcggacgggact

SEQ ID NO: 59464 - DNA, 40 bp, Pseudomonas aeruginosa
  source 1..40: mol_type = genomic DNA
cctcggcgtggtgaagatgcctggcgcagcggacgggact

SEQ ID NO: 59465 - DNA, 50 bp, Pseudomonas aeruginosa
  source 1..50: mol_type = genomic DNA
ggagcaaacagcgggcactttgaaccttgcgaatcagtgataagaatcgt

SEQ ID NO: 59466 - protein, 575 aa, Corynebacterium falsenii
MTLAPLPSGLDMGELHKLAATAAQIQRTSTPDNADGLVPAISYLRVSTKDQATRNGLEEGLSIPAQREAAQRKADQLGAVIVKEFIEPGESAKTAQRRALQDMLDYVTENPVQYCIINKVDRLARNRLDDAIIHATLRDANISLVSVTENIDETPSGMLMHGILASMAEFYSLNLAQEVLKGMTQKASMGGTPAKAPLGYLNVRTTDAKGHEIRDVTVDPERAELITFAFTAYATGNWTLSSLATELEARGLTTRPTPSFPSKPVTTKALHKILTNPYYQGSVTFRGVTYDGAHDPLVDTETWLRVQTELAAKNQRGEKPRTHDHYLKGTLYCSCGAKMMIECPTGKSGITYEYFTCSGRRKKNGCTRSAILTDRIEDRIDSTYGANGLTPDEADRVREVLGAVFDQLEATTDHERALLTTQKEKLDAERLKLVQAHYADAIPLDLLKSEQERIRTTHDAIEHRLENLATSYEDTREGLDQLADILTDLGDVYTRCEPAERRILNRALFDKIILDDEETVRYQPDQAVQAALDCVIPGHAPIAEAEASDPEDTSNPARLSAGQGSKMSLLVELRG

SEQ ID NO: 59467 - DNA, 50 bp, Corynebacterium falsenii
  source 1..50: mol_type = genomic DNA
gggttcgaaaatgtcacttttggtggacctacggggactgttttcgaaac

SEQ ID NO: 59468 - DNA, 40 bp, Corynebacterium falsenii
  source 1..40: mol_type = genomic DNA
tcccccggaaagtgtttgtggagctacggggaatcgaacc

SEQ ID NO: 59469 - DNA, 40 bp, Corynebacterium falsenii
  source 1..40: mol_type = genomic DNA
tcccccggaaagtgtttgttgagctacggggaatcgaacc

SEQ ID NO: 59470 - DNA, 50 bp, Corynebacterium falsenii
  source 1..50: mol_type = genomic DNA
tctttttaaaaaggcatttttagttgacctaaggaggtaagtttagaaac

SEQ ID NO: 59471 - protein, 547 aa, Pseudomonas putida
MPIAVPYVRFSSERQSYGSSLERQETLIVKWLAHNPEYTRYERKFEDLGVSGSSGKHVEAGEMGKLLTAIDDGHFPAGTVVLVEAMDRFSRLPPMDTLNHLRSIVEAGIDLVTLDDGQRYDARSLKSNSLLYLAMKAQAAHEFAVRLSDFTVGSYEKRAARAKLKEQIKRRNPFWLTSEGELKEAEAAALAQVFTAFSNGVPLRALAIQYAQYFGNRQSLKHALRNPAAIGHWQRTTTTVIGGKKERVPDELIKGVFKPAVTEELFYQAQKLLDDLADQPVTVARKFPLAGLLQCGDCGANMVLLRQNSRQQTDTVRCYRRMQSNDKCTNQKTIPVPVVGWFYHETRKPHALRAYQRTKLPENTRQRIKLEGQIDQLKQRQKRLRQLVMLDDSDKDALEDYQKLVDEKQGLEQELASLPVVAETAVVGLGEFYGFLRSDPFAISNLLQQDGYRIICHRDGGLEVNFTTDDNPVSKAQYLGYARKYKMWEIKPNDAPPVFVDHHGQEQFPQHTVITTPQQWKEHIKGTDLSAYLDYNDLEDYHAASDS

SEQ ID NO: 59472 - DNA, 50 bp, Pseudomonas putida
  source 1..50: mol_type = genomic DNA
tcactgcataactttaaattcagcctacgggagtgtaagatatgcagtgg

SEQ ID NO: 59473 - DNA, 40 bp, Pseudomonas putida
  source 1..40: mol_type = genomic DNA
cccgatggacaagttccgcctgctgcgcgaccacttggtc

SEQ ID NO: 59474 - DNA, 40 bp, Pseudomonas putida
  source 1..40: mol_type = genomic DNA
cccgatggacaagttccgctcgctgcgcgaccacttggtc

SEQ ID NO: 59475 - DNA, 50 bp, Pseudomonas putida
  source 1..50: mol_type = genomic DNA
tcatagaatactcctaaatactgatcaagggaatgtagaagaggcagtgt

SEQ ID NO: 59476 - protein, 547 aa, Pseudomonas putida; identical to SEQ ID NO: 59471

SEQ ID NO: 59477 - DNA, 50 bp, Pseudomonas putida; identical to SEQ ID NO: 59472
  source 1..50: mol_type = genomic DNA

SEQ ID NO: 59478 - DNA, 40 bp, Pseudomonas putida; identical to SEQ ID NO: 54293
  source 1..40: mol_type = genomic DNA

SEQ ID NO: 59479 - DNA, 40 bp, Pseudomonas putida
  source 1..40: mol_type = genomic DNA
cccgatggacaagttccgctcgctgcacgaccacctggtc

SEQ ID NO: 59480 - DNA, 50 bp, Pseudomonas putida; identical to SEQ ID NO: 59475
  source 1..50: mol_type = genomic DNA

SEQ ID NO: 59481 - protein, 535 aa, Streptomyces anulatus
MQDSLKGQLGFGYLRISDDREGQKLGVQRQEEDLRAFADYLGVKLVRIYCDNDISASTNTTEYRPDYEDMMGQAEVGPVKIILSCTTNRLTRKPEETERQIKLARTQGVKYLYARSQSLDLQFAANRRMARYQAANDAGEAEELQERVLRKKLADAREGKTSGGRRTYAYGKVIGHNPITGKDICDPYQVREEEVAVLQEGKRRILAGDAQFSIMKDWKERGIVTATGQFWRVGPFKTALLKECYVEFDPTGHPTDCPCLKNPETGGTRVHHDERHRAKWPFIFTRPEHDALVAMFDSREKFWVSKKGGGVAARSYLLSSITECGGTWRDTDKVGQYCGGHMYGQGKTYNYADGNSKTQRRYACKKWERDGSRLGCCSVFRIAEPVEQFVAEQVLERFDSPAIATALAPADNELRMAELIQELAELQTRREVLAAEYAAGEHDKDDYRVMVQTIKDRFAVAETEKKQLLSTKAKSLAVPTDGGLREVWKTASIDWRASVIRLVVEKVVIHPGRSGQKMWNGWRFDPDLIEIVWLH

SEQ ID NO: 59482 - DNA, 50 bp, Streptomyces anulatus
  source 1..50: mol_type = genomic DNA
agggtgcatagccacacttttgactactcgtcaaaatcctgtgcatcctt

SEQ ID NO: 59483 - DNA, 40 bp, Streptomyces anulatus
  source 1..40: mol_type = genomic DNA
ggcgatggttcccaccgcgtactcggacgtggtcatccct

SEQ ID NO: 59484 - DNA, 40 bp, Streptomyces anulatus
  source 1..40: mol_type = genomic DNA
ggcgatggttcccaccgcgttctcggacgtggtcatccct

SEQ ID NO: 59485 - DNA, 50 bp, Streptomyces anulatus
  source 1..50: mol_type = genomic DNA
aggatggatacttctaatcttgccttattgtcagaaactgattcatcctt

SEQ ID NO: 59486 - protein, 498 aa, Geobacillus thermodenitrificans
MKVAGYIRVSTNKEGQKESPENQKQLILNFLAENQYDLYDFYMDVETGTTDKREGLKKLIRDAENKQFDIIVAKELSRLGRNVELLYQLKRIAETKGVRLITLDGRVDTQDISKQTMFGLYAWVYESESQRISDRIKSVFHMKCKSGKFMGSIPPYGYKLQDGKLIIRDDYTVEVVREIFNKYLEGWGHDKIARYLTKKQVPTPAQVAGKSNAGLYWQGTTIKKILSNPHYMGDLVQNRETSTNITNKKRKVNTQNEWIIVPNTHEPIISREVFEQAQKLLESKARRGKGRTKAPKHLFTNILYCADCGASMWYRHNRKGYICGNYAKHGNIACSHHAIKEQQLIETILTDLKSIYESFERLDTENQIKNKVHELQKKNAVRLQTIEKQIQKQMDLKRNALQKFINGDISKEDYHDFVSMVQDKLQQLEMEKSTIKKAMVDSQSTTDLSTIRKQLDEFLSFKTLTTEMVLRFIERIEVDNNQNVKIHYKFAPIECVKV

SEQ ID NO: 59487 - DNA, 50 bp, Geobacillus thermodenitrificans
  source 1..50: mol_type = genomic DNA
actatccgtgaaacacactccacatgtgttgaatactttttacagacaaa

SEQ ID NO: 59488 - DNA, 40 bp, Geobacillus thermodenitrificans
  source 1..40: mol_type = genomic DNA
caatgctaccaactcaacgtgtgctgtatgcgggaacatg

SEQ ID NO: 59489 - DNA, 40 bp, Geobacillus thermodenitrificans
  source 1..40: mol_type = genomic DNA
caatgctaccaactcaacgcatgctgtatgcgggaacatg

SEQ ID NO: 59490 - DNA, 50 bp, Geobacillus thermodenitrificans
  source 1..50: mol_type = genomic DNA
acttcctgtcctgaacactccattcatgctaagtaccctatacaggcata

SEQ ID NO: 59491 - protein, 590 aa, Streptococcus pyogenes
MNTKVKLIKASNTGARNRNALHLELKRVAAYCRVSTDSKDQLESYKSQVDYYTNLIKNNKNWTLAGIYADEATTGTTATKRADFMRLISDCQNGDIDMIITKSISRFARNTLDTLKYVRLLKENNVGVVFEEENIDTLTMDGELLLTILSSVAQQEVENTSAHVKKGLKMKMEKGELIGFQGCLGYDYDPTTKSISINEEEAKIVRYIFKRYLEGNGGSVIGRELEEQGYLTPRGKTKWSDTTVLGIIKNEKYIGDILMGKTFTVDSITKRRLANFGESDKYHIENHHEPIISREDFEKAQEIRLRRAQNRNTIANKDRKREKLSRQYAFSSMLECGFCGEILSRRTWHTSSIYKKINWQCVRSTKKGKKYCPHSKGIQEAAIEKAFVESYRQLCHADSTVIDNFLKIVEEEINDNTLVKDLKKLENQLNRIISQERKLVDLHLEDSIDEEVYAKKYKKLTKQKEELLDEKKTLELTIKDENSIKERLKQFKKVLENREIIEEFNRPVFESIVDKVVVGRIDKDGTVHPYDLTFYFKTGIKDSQDSNNFKDKRKNAKDNYIDKLCSYKNDEDKKLCSQSKDNARGVCKFT

SEQ ID NO: 59492 - DNA, 50 bp, Streptococcus pyogenes
  source 1..50: mol_type = genomic DNA
ctggaccttttgactcccgcagacccatcacgtggagactatagcgttga

SEQ ID NO: 59493 - DNA, 40 bp, Streptococcus pyogenes; identical to SEQ ID NO: 52428
  source 1..40: mol_type = genomic DNA

SEQ ID NO: 59494 - DNA, 40 bp, Streptococcus pyogenes
  source 1..40: mol_type = genomic DNA
tagatttgtttccccagacagatcacgtcgagtgcgtagt

SEQ ID NO: 59495 - DNA, 50 bp, Streptococcus pyogenes
  source 1..50: mol_type = genomic DNA
gccacccttgtgcttcccgcagccagatcacctggtggaggtaccgttgg

SEQ ID NO: 59496 - protein, 544 aa, Burkholderia pseudomallei
MVETIEFQEKKAVAYSYVRFSTARQELGDSLRRQVAMAEEFCAKYGLDLHPVSYRDLGVSAFKRKNVERGALAAFIDAVKTGKVEKGSYLVIEQFDRLSRAEVDVALKLLLDLVHSGIKLVTLVDEKIWDRESVKDIGNLILAIVFMSRANNESAAKADRLSQAWTQKKKAALESGKIMSRECPRWLTVNADKSAFVVLEDRAESVRRVFAMRINGHGVVSIVNRANREMWPVPGKGDTWHTSLVGRLLSNRALLGEYQPHKSGSEDDKRIPVGELVHDYYPAIIDEQTFLRAQAVRERKGAFPGRRDISYRNWLQGLLKCSCGHSFVRKNKTSSKQPGYARYYCTARNRGVTDCPSMNAREIETAIIHAVSGIAPHFWNGTARLEELNTLLDVQQVDLTAAISQRDRFAEAIGTSKAPIPVLLERLTTAEIEVEKAEKALATTRAEISELQGNSDSVFENIVKAVENVDSLDARAALREDLSRVLVKCVVDVKAGIVNVYIRGEELPLTVPLREDAVIPGATAGQMTEEEFRRTFGRGPDELE

SEQ ID NO: 59497 - DNA, 50 bp, Burkholderia pseudomallei
  source 1..50: mol_type = genomic DNA
cggcgcatatacttcttgacgatgtccatcgtcgagctataattgcacca

SEQ ID NO: 59498 - DNA, 40 bp, Burkholderia pseudomallei; identical to SEQ ID NO: 58073
  source 1..40: mol_type = genomic DNA

SEQ ID NO: 59499 - DNA, 40 bp, Burkholderia pseudomallei
  source 1..40: mol_type = genomic DNA
caacgggctgccgtcgttctggatcgtcgggctgcccgat

SEQ ID NO: 59500 - DNA, 50 bp, Burkholderia pseudomallei
  source 1..50: mol_type = genomic DNA
gggctcacactggtcttgtccaggtgcttagtagagcatccattacacca

SEQ ID NO: 59501 - protein, 544 aa, Burkholderia vietnamiensis
MAETIELQEKKAVAYSYVRFSTARQELGDSLRRQVAMAEEFCAKYGLDLHPVSYRDLGVSAFKRKNVERGALAAFIDAVKTGKVEKGSYLVIEQFDRLSRAEVDVALKLLLDLVHSGIKLVTLVDEKIWDRESVKDIGNLILAIVFMSRANNESAAKADRLSQAWTQKKKAALESGKIMSRECPRWLTVNADKSAFVVLEDRAESVRRVFAMRINGHGVVSIVNRANREMWPVPGKGDTWHTSLVGRLLSNRALLGEYQPHRSGSEDDKRIPVGELVRDYYPTIIDEQTFLRAQAVRERKGAFPGRRDISYRNWLQGLLKCSCGHSFVRKNKTSSKQPGYARYYCTARNRGVTDCPSMNAREIETAIIHAVSGIAPHFWNGTARLEELNTLLDVQQVDLTAAVSQRDRFAEAIGASKAPIPVLLERLTAAEIEVEKAEKALATTRAEISELQGDSDSVFENIVKAVENVDSLDARAALREDLSRVLVKCVVDVKAGIVNVYIRGEELPLTVPLREDAVIPGAAAGQMTEEEFRRTFGRGPDELE

SEQ ID NO: 59502 - DNA, 50 bp, Burkholderia vietnamiensis
  source 1..50: mol_type = genomic DNA
cggcgcacatacttcttgacgatatccatcgtcgagctataattgcacca

SEQ ID NO: 59503 - DNA, 40 bp, Burkholderia vietnamiensis
  source 1..40: mol_type = genomic DNA
caacgggttgccgtcgttctcgatcgtcggcctgcccgac

SEQ ID NO: 59504 - DNA, 40 bp, Burkholderia vietnamiensis
  source 1..40: mol_type = genomic DNA
caacgggttgccgtcgttctggatcgtcggcctgcccgac

SEQ ID NO: 59505 - DNA, 50 bp, Burkholderia vietnamiensis; identical to SEQ ID NO: 59500
  source 1..50: mol_type = genomic DNA

SEQ ID NO: 59506 - protein, 514 aa, Streptomyces albus
MHTLACQLASRRAAQTWEGYVEEIDLYLRRSQVTREGTKALTFKTQEERGRAWAEEHGYSVRKVYRDNLSAWTDTRRPDFEKALNALKRKEVPALWSYAVDRFSRKGAGAVIGLLDAGARLIFDYERLDSADPRDRERIITDAERAKAASDLLSHRVTDTKNGQRRRGIWLGAAPYGLEKDDSGKLRHGSNWKHVLRVLREVADGISARAVARGMNGDRIVSPTGGSWGASTVRRIVANPVYEGWQVVVISRDYTWPVAFRDDAGRRVRVLADGVEPAPAELVSRARRVQAGHQRGKLGSRIGKAYHLLTDLLLCGGCGSKMPTSGRSYVCNGHAMGKPCPAPASAMRARIEPYVYRVWLAHVAHAEMGDPLMVAVAERWAALTAPEETEEAHEALGAVKAAEAAIEQLANDRARGIYSGAMGRHFPRLVAEAEEALKEAREHAAQFGGGVVDLTMFDDSELLEEAWDAADLTMKRGLLRVAIDRIVVTQAVRRGAPFNGDERCTITWATPEAA

SEQ ID NO: 59507 - DNA, 50 bp, Streptomyces albus
  source 1..50: mol_type = genomic DNA
ccatgcaagggtgagcatgcaaagtacttcgtatgcacacccttgcatgt

SEQ ID NO: 59508 - DNA, 40 bp, Streptomyces albus
  source 1..40: mol_type = genomic DNA
ggtgaccatgttcttcacgtagtcggcgtggcccggcatg

SEQ ID NO: 59509 - DNA, 40 bp, Streptomyces albus
  source 1..40: mol_type = genomic DNA
ggtgaccatgttcttcacggggtcggcgtggcccggcatg

SEQ ID NO: 59510 - DNA, 50 bp, Streptomyces albus
  source 1..50: mol_type = genomic DNA
gcattcaagcatgtgcatgcataggggtacatgtgcctgtgtgtgcatga

SEQ ID NO: 59511 - protein, 573 aa, Demequina rhizosphaerae
MNATATPKRAVVYVRLSRHQGAADPSTSPESQRKRCEAFAEAKGWEVVEVVEDLDVSGSDKGDRLNRPGLKKIRKRWADIDVVIFAKIDRLARNVVDFNTFAEEAKGHGVALVSVAESLDLSTPGGRFTANILAAFAEMEAATIQARVKQGRVDLIEARRWAGTRPPYGYRSAPHPSGKGRGLVQVPNEVEILRGMVAEFLPHGAATDPAKRHGSANAIARRLTADGIPAPRSAYRRAQLAALDGRPVEDLAVLDRGKWNASTVRALMRGNALAGYMTRDPERIGKDRPDPASLDVVRDAHGAPEVVWSPVVDGSTLRALRKRFPASTRKAPAGPVKGRKPSGLLSGKDGLAKCGLCGGTMNGGTSGGSPSYRCDRPGGGALCSGVSIRRAALDAIVEEAFLGAYGRLLVTIVEEVADDTALAAEREEVDGLLSDLEARKRAASPADRRRLLSEEAALWERHDALGVAAPETRTVVRETGETFAEAWESADLVDRRAFLAARIDLVEVAPASKSTPRVDSSRVTIYWRLTGEDAREILSPAEAVAARSAFTPCRAPGRHDAAGGVCCVVGGRR

SEQ ID NO: 59512 - DNA, 50 bp, Demequina rhizosphaerae
  source 1..50: mol_type = genomic DNA
tcggatgacaagagtcatcacgcttgcgcttagtgacctttccgatctag

SEQ ID NO: 59513 - DNA, 40 bp, Demequina rhizosphaerae
  source 1..40: mol_type = genomic DNA
ccgcggctgcacgcatgcgtgcgtctactgcttcgcgcgg

SEQ ID NO: 59514 - DNA, 40 bp, Demequina rhizosphaerae
  source 1..40: mol_type = genomic DNA
ccgcggctgcacgcatgcggacgtctactgcttcgcgcgg

SEQ ID NO: 59515 - DNA, 50 bp, Demequina rhizosphaerae
  source 1..50: mol_type = genomic DNA
ccggaagacaggtgccaacactctgaccctctgtgccggtgccgatccag

SEQ ID NO: 59516 - protein, 563 aa, Burkholderia gladioli
MAAKARVYSYLRFSDPKQAAGGSVDRQMEYAARWAIDNEMELDASLSLRDEGLSAYHQRHVRQGALGVFLRAVEDGQVPAGSVLIVEGLDRLSRAEPIQAQAQLAQIVNAGITVVTASDGRQYNRERLKAQPMDLVYSLLVMIRAHEESDTKSKRVKAAIRRQCQGWVAGTWRTPIRVGKDPQWVREVGGKFELVQERAAAIRLVVDMYKKGHGAVHTLRHLHGRGLAITDAGLPGASQLYKLLANPMLIGEKTVKLDGEHFRLEGYYPAVLTPAEFGDLRDLAAQRGRRKGKGEIPGVVTGLGVTYCGYCGAAIVAQNIMGRRRMANGLPYPGHRRLHCVTYSSGAGCKVSGSCSVAPVERALMLYCSDQMNLTRLLEGDSGVTALNAKLAHTRTAAADLERQINRVTDALLTDEEQAPITLLKKLRDMEAELERKRHYCDSLEHQVHATAVADAPAAADAWSTLVRGVEILDYDARMQARQLVADTFSRIVVYQSGFYPETDDGLIGLMLVAKRGCTRLLHIDRRSGEWLSADDIILHNNLPLPRDHLNDSVALGPATYDN

SEQ ID NO: 59517 - DNA, 50 bp, Burkholderia gladioli
  source 1..50: mol_type = genomic DNA
ggtttactttgcgctgccctggggcagccgagggagaccatacctatacg

SEQ ID NO: 59518 - DNA, 40 bp, Burkholderia gladioli
  source 1..40: mol_type = genomic DNA
gtcgaccagggccttcgggcagccgagcgatacgaaccct

SEQ ID NO: 59519 - DNA, 40 bp, Burkholderia gladioli
  source 1..40: mol_type = genomic DNA
gtcgaccagggccttcgggaggccgagcgatacgaaccct

SEQ ID NO: 59520 - DNA, 50 bp, Burkholderia gladioli
  source 1..50: mol_type = genomic DNA
gttttgatttgtatttccctcaggaggctgaggcaggaggatcctataag

SEQ ID NO: 59521 - protein, 456 aa, Rhodococcus ruber
MKTAVYTRISFDRKNTGAGVDRQLEGCENLAKELGWTILHTFSDNDISAYSGKVRPGFEALIHAMKTGQIEALICWHPDRLYRHMKDLERIIDIADSQHVEIRSVQGGTIDLSTASGRMVARILGSVARQESEHAGERRRFANDQRAAQGVFYTSGPRTFGYTQKGEPMPGEAEAVAKAAEDILFGKSIRAVAREWNEQGFRTTRKQRAWTGTAVRGTIVNPRYAGIHVHRGKVIGRGDWVPLISEDTHYSLVALMEDNKPSSDRSFERQFQGSGVYLCGVCGTPLYQFSGGKREARSYKCPKYHVGRSVEKLDDYVSRLVVGYLSRPDAPNVVDVEEPTVDLAALRIKRDALQAKLKSLTEMFTDDHIDKDQFLSGTADVREKIAALDAQMVVINKASPVTYLLSQRDRVGEAWEELSPDIRGKAIQALMTVRVLRMARKSPRFNPDDVEVRWLL

SEQ ID NO: 59522 - DNA, 50 bp, Rhodococcus ruber
  source 1..50: mol_type = genomic DNA
acagagtccaagtcaggtcaccttgtgacgtaacccgacttgaacccgta

SEQ ID NO: 59523 - DNA, 40 bp, Rhodococcus ruber
  source 1..40: mol_type = genomic DNA
ctggagcgatcagtacgacgtgaagatccaggcgctcgga

SEQ ID NO: 59524 - DNA, 40 bp, Rhodococcus ruber
  source 1..40: mol_type = genomic DNA
ctggagcgatcagtacgacaagaagatccaggcgctcgga

SEQ ID NO: 59525 - DNA, 50 bp, Rhodococcus ruber
  source 1..50: mol_type = genomic DNA
acagaatcagttccagatgaagttaagacttaaacctaaaaaaacccata

SEQ ID NO: 59526 - protein, 515 aa, Bacillus mycoides
MKTAIYLRKSRADLEAEARGEGETLAKHRTTLLKIAKEMNLNVLSVREEIVSGESLVKRPEMLALLEEIEDNKYDAVLCMDMDRLGRGGMKEQGIILETFKRSDTKIMTPRKTYDLNDEWDEEYSEFEAFMARKELKIITRRMQRGRVASIEAGNYLGTRAPFGYEIHRLNKRERTLTINKEEASVVRMIFDWYANEDMGASAIRNKLNDLGYKSKLGNAWNPYSILDILKNHVYIGKVTWQKRKEEKRPDAVKRSRARQDKSDWIIADGKHEPIIPESLFEQVQDKLNSRYHVPYNTNGITNPLAGIIKCSKCGYSMVQRYPKNRKETMDCKHRGCENKSSYKELIEKRLLEALKEWYINYKADFEAHKQGDKLKETQVIQMNEAALRKLEKELVDVQKQKNNLHDLLERGVYTVDMFLERSQVISDRINEINTTMEKLKKEIKTEVKKEKVKKDTIPQVEHVLDLYFKTDDPQKKNSLLKSVLEKAVYKKEKWQRLDDFELVLYPKLPQDGDI

SEQ ID NO: 59527 - DNA, 50 bp, Bacillus mycoides; identical to SEQ ID NO: 36477
  source 1..50: mol_type = genomic DNA

SEQ ID NO: 59528 - DNA, 40 bp, Bacillus mycoides
  source 1..40: mol_type = genomic DNA
tgtagccattaggcgcatgagatttaccccattaagcccc

SEQ ID NO: 59529 - DNA, 40 bp, Bacillus mycoides
  source 1..40: mol_type = genomic DNA
tgtagccattaggcgcatgtgatttaccccattaagcccc

SEQ ID NO: 59530 - DNA, 50 bp, Bacillus mycoides
  source 1..50: mol_type = genomic DNA
tgtcagcacttcattggcctaatttgaattactgcaagtatgtgaaaaaa

SEQ ID NO: 59531 - protein, 515 aa, Bacillus mycoides
MKTAIYLRKSRADLEAEARGEGETLAKHRTTLLKIAKEMNLNVLAVREEIVSGESLVKRPEMLALLEDIEDNKYDVVLCMDMDRLGRGGMKEQGIILETFKRSNTKIMTPRKTYDLNDEWDEEYSEFEAFMARKELKIITRRMQRGRIASVEAGNYLGTHAPFGYDIHRLNKRERTLTINSEEASVVRLIFDWYANEDMGASAIRNKLNDLGYKSKLGNDWNPYSILDILKNNVYIGKVTWQKRKEVKHPDAVKRSCARQDKSDWIIADGKHEPIIPESLFEQVQEKLNSRYHVPYNTNGIKNPLAGIIKCGKCGYSMVQRYPKNRKEAMDCKHRGCENKSSYTELIEKRLLEALKEWYINYKADFEKHKQDDKLKETQVIQMNEVALRKLEKELVDVQKQKNNLHDLLERGVYTVDMFLERSNVISDRINEITSTMENLKKEIKTEIKKEKVKKDTIPQVEHVLDLYFKTDDPKKKNSLLNSVLEKAVYKKEKWQRLDDFELVLYPKLPQDGDI

SEQ ID NO: 59532 - DNA, 50 bp, Bacillus mycoides; identical to SEQ ID NO: 36457
  source 1..50: mol_type = genomic DNA

SEQ ID NO: 59533 - DNA, 40 bp, Bacillus mycoides; identical to SEQ ID NO: 59528
  source 1..40: mol_type = genomic DNA

SEQ ID NO: 59534 - DNA, 40 bp, Bacillus mycoides
  source 1..40: mol_type = genomic DNA
tgtagccattaggcgcatgcaatttaccccattaagcccc

SEQ ID NO: 59535 - DNA, 50 bp, Bacillus mycoides
  source 1..50: mol_type = genomic DNA
ttttttcacatacttgcagtaattcaaattaggccaatgaagtgctgaca

SEQ ID NO: 59536 - protein, 515 aa, Bacillus mycoides
MKTAIYLRKSRADLEAEARGEGETLAKHRTTLLKIAKEMNLNVLAVREEIVSGESLVKRPEMLALLEEIEDNKYDIVLCMDMDRLGRGGMKEQGIILETFKRSNTKIMTPRKTYDLNDEWDEEYSEFEAFMARKELKIITRRMQRGRIASVEAGNYLGTHAPFGYDIHRLNKRERTLMINSEEASVVRMIFDWYANEDMGASAIRNKLNDLGYKSKLGNDWNPYSILDILKNNIYIGKVTWQKRKEVKRPDAVKRSCARQDKSDWIIADGKHEPIIPESLFEQVQEKLNSRYHIPYNTNGIKNPLAGIIKCAKCGYSMVQRYPKNRKETMDCKHRGCENKSSYTELIEKRLLEALKEWYINYKADFEKHKQDDKLKETQVIQMNEAALRKLEKELVDVQKQKNNLHDLLERGVYTVDMFLERSNVVSVRITEITSTMENLKKEIKTEIKKEKVKKDTIPQVEHVLDLYFKTDDPKKKNSLLKSVLEKAVYKKEKWQRLDDFELVLYPKLPQDGDI

SEQ ID NO: 59537 - DNA, 50 bp, Bacillus mycoides
  source 1..50: mol_type = genomic DNA
tgtcgtcaccttgttggtgtaattaggttgacgccaacagggtgccgaca

SEQ ID NO: 59538 - DNA, 40 bp, Bacillus mycoides; identical to SEQ ID NO: 59528
  source 1..40: mol_type = genomic DNA

SEQ ID NO: 59539 - DNA, 40 bp, Bacillus mycoides; identical to SEQ ID NO: 59534
  source 1..40: mol_type = genomic DNA

SEQ ID NO: 59540 - DNA, 50 bp, Bacillus mycoides; identical to SEQ ID NO: 59535
  source 1..50: mol_type = genomic DNA

SEQ ID NO: 59541 - protein, 515 aa, Bacillus wiedmannii; identical to SEQ ID NO: 54181

SEQ ID NO: 59542 - DNA, 50 bp, Bacillus wiedmannii; identical to SEQ ID NO: 36457
  source 1..50: mol_type = genomic DNA

SEQ ID NO: 59543 - DNA, 40 bp, Bacillus wiedmannii; identical to SEQ ID NO: 52323
  source 1..40: mol_type = genomic DNA

SEQ ID NO: 59544 - DNA, 40 bp, Bacillus wiedmannii
  source 1..40: mol_type = genomic DNA
tgtagccattaggcgcatgcaatttactccattcagccct

SEQ ID NO: 59545 - DNA, 50 bp, Bacillus wiedmannii; identical to SEQ ID NO: 59535
  source 1..50: mol_type = genomic DNA

SEQ ID NO: 59546 - protein, 515 aa, Bacillus wiedmannii
MKTAIYLRKSRADLEAEARGEGETLAKHRTTLLKIAKEMNLNVLAVREEIVSGESLVKRPEMLALLEEIEDNKYDVVLCMDMDRLGRGGMKEQGIILETFKRSNTKIMTPRKTYDLNDEWDEEYSEFEAFMARKELKIITRRMQRGRVASVEAGNYLGTHAPFGYDIHRLNKRERTLTINPEEASVVRMIFDWYANEDMGANAIRSKLNDLGYKSKLGNEWNPYSILDILKNNVYIGKVTWQKRKEVKQPDAVKRSCARQDKSDWIIADGKHEPIIPESLFEQAQEKLNSRYHVPYNTNGIRNPLAGIIKCSKCGYSMVQRYPKNRKETMDCKHRGCENKSSYTELIEKRLIAALKEWYINYKADFEKHKQGNKLKETQVIQMNEAALRKLEKELVDVQKQKNNLHDLLERGVYTVDMFLERSNVVSDRITEITSTMENLKKEIKTEIKKEKVKKDTIPQVEHVLDLYFKTDDPKKKNSLLKSVLEKAVYKKEKWQRLDDFELVLYPKLPQDGDI

SEQ ID NO: 59547 - DNA, 50 bp, Bacillus wiedmannii; identical to SEQ ID NO: 36457
  source 1..50: mol_type = genomic DNA

SEQ ID NO: 59548 - DNA, 40 bp, Bacillus wiedmannii; identical to SEQ ID NO: 52323
  source 1..40: mol_type = genomic DNA

SEQ ID NO: 59549 - DNA, 40 bp, Bacillus wiedmannii; identical to SEQ ID NO: 59544
  source 1..40: mol_type = genomic DNA

SEQ ID NO: 59550 - DNA, 50 bp, Bacillus wiedmannii; identical to SEQ ID NO: 59535
  source 1..50: mol_type = genomic DNA

SEQ ID NO: 59551 - protein, 515 aa, Bacillus wiedmannii
MKTAIYLRKSRADLEAEARGEGETLAKHRSTLLRIAKEMNLNVLSVREEIVSGESLVKRPEMLALLEEIEDNKYDVVLCMDMDRLGRGGMKEQGIILETFKRSNTKIMTPRKTYDLNDEWDEEYSEFEAFMARKELKIITRRMQRGRIASVEAGNYLGTHAPYGYDIHRLNKRERTLTINSEEASVVRMIFDWYANEDMGASAIRNKLNDLGYKSKLGNEWNPYSILDILKNNVYIGKVTWQKRKEVKRPDAVKRSCARQDKSDWIIADGKHEPIIPESLFEQVQEKLNSRYHVPYNTNGIKNPLAGIIKCSKCGYSMVQRYPKNRKETMDCKHRGCENKSSYTELIEKRLLEALKEWYINYKADFEKHKQGDKLKETQVIQMNEAALRKLEKELVDVQKQKNNLHDLLERGVYTVDMFLERSNVVSDRFTEITSTMENLKKEIKTEIKKEKVKKDTIPQVEHVLDLYFKTDDPKKKNSLLKSVLEKAVYKKEKWQRLDDFELVLYPKLPQDGDI

SEQ ID NO: 59552 - DNA, 50 bp, Bacillus wiedmannii; identical to SEQ ID NO: 40992
  source 1..50: mol_type = genomic DNA

SEQ ID NO: 59553 - DNA, 40 bp, Bacillus wiedmannii; identical to SEQ ID NO: 52323
  source 1..40: mol_type = genomic DNA

SEQ ID NO: 59554 - DNA, 40 bp, Bacillus wiedmannii
  source 1..40: mol_type = genomic DNA
tgtagccattaggcgcatgtgatttactccattcagccct

SEQ ID NO: 59555 - DNA, 50 bp, Bacillus wiedmannii; identical to SEQ ID NO: 59530
  source 1..50: mol_type = genomic DNA

SEQ ID NO: 59556 - protein, 515 aa, Bacillus wiedmannii
MKTAIYLRKSRADLEAEARGEGETLAKHRSTLLRIAKEMNLNVLSVREEIVSGESLVKRPEMLALLEEIEDNKYDVVLCMDMDRLGRGGMKEQGIILETFKRSNTKIMTPRKTYDLNDEWDEEYSEFEAFMARKELKIITRRMQRGRIASVEAGNYLGTHAPYGYDIHRLNKRERTLTINSEEASVVRMIFDWYANEDMGASAIRNKLNDLGYKSKLGNEWNPYSILDILKNNVYIGKVTWQKRKEVKRPDAVKRSCARQDKSDWIIADGKHEPIIPESLFEQVQEKLNSRYHVPYNTNGIKNPLAGIIKCSKCGYSMVQRYPKNRKETMDCKHRGCENKSSYTELIEKRLLEALKEWYINYKADFEKHKQGDKLKETQVIQMNEAALRKLEKELVDVQKQKNNLHDLLERGVYTVDMFLERSNVVSDRITEITSTMENLKKEIKTEIKKEKVKKDTIPQVEHVLDLYFKTDDPKKKNSLLKSVLEKAVYKKEKWQRLDDFELVLYPKLPQDGDI

SEQ ID NO: 59557 - DNA, 50 bp, Bacillus wiedmannii; identical to SEQ ID NO: 40992
  source 1..50: mol_type = genomic DNA

SEQ ID NO: 59558 - DNA, 40 bp, Bacillus wiedmannii; identical to SEQ ID NO: 52323
  source 1..40: mol_type = genomic DNA

SEQ ID NO: 59559 - DNA, 40 bp, Bacillus wiedmannii; identical to SEQ ID NO: 59554
  source 1..40: mol_type = genomic DNA

SEQ ID NO: 59560 - DNA, 50 bp, Bacillus wiedmannii; identical to SEQ ID NO: 59530
  source 1..50: mol_type = genomic DNA

SEQ ID NO: 59561 - protein, 416 aa, Agrobacterium tumefaciens; identical to SEQ ID NO: 35941

SEQ ID NO: 59562 - DNA, 50 bp, Agrobacterium tumefaciens
  source 1..50: mol_type = genomic DNA
cttttatgccattcgttgaagcgagcccccgcaaccaattcaaacataag

SEQ ID NO: 59563 - DNA, 40 bp, Agrobacterium tumefaciens
  source 1..40: mol_type = genomic DNA
caggaatcgtgtgttgcgagcccccgcaaccaatattcca

SEQ ID NO: 59564 - DNA, 40 bp, Agrobacterium tumefaciens
  source 1..40: mol_type = genomic DNA
caggaatcgtgtgttgcgaaaccccgcaaccaatattcca

SEQ ID NO: 59565 - DNA, 50 bp, Agrobacterium tumefaciens
  source 1..50: mol_type = genomic DNA
tttttattgagattattaaagcaaaatccctcaaagtagcaaaacataag

SEQ ID NO: 59566 - protein, 588 aa, Ralstonia syzygii
MPVAYSYIRFSTPEQIRGDSLRRQLEASAKYAADHALALDQSLNVRDLGVSAFTGSNIERGALGQFVAAIDEGRVQPDSYLLVESLDRLSRLPVTEALAVFQSIINRGITIVTLVDGAVYSKDRLRNDWTPLLIALVSMSRAHEESAVKSRRIKAAYDARKKRVIANKEVKIGRCPWWLKLSDDKTKYEVIEENAATIRLMFDLAKDGMGNALIAKELNARGIPTAQHSKYWQNSTVGFNLTNIALVGVLQMDQDNNGRTTTNTFVEDYYPPIIDKTLFYEVQAMRKARDRNKGTMNAGRKGQCYNIFQGTAKCGYCGSPMHIRRKPGINTGFLYCSKSLQGGGCISVSYNIRNLESEFITFTRELDLHRVLGETSADNGVTAKRASLAACNAMVEETETKQKNLVAAIEAGGEMPILVQRLQDVQAQLNDLKKQRLALQSEVQILSNSTRDEEASLEVLGQLMVQLESQETDLDEKLRLRFRMLSEVQKVVRRLDLFPGGPMLASDEVEALRSQLKDDGFDEGRINDYFSQLPVKPDRTARYFVAHLRNGISRTVRQGQVLEMDPMRSQKIAAAIASATEEEAADDA

SEQ ID NO: 59567 - DNA, 50 bp, Ralstonia syzygii
  source 1..50: mol_type = genomic DNA
cggtgtcaaattgaccaaaatcccaaagtcctttggtcaatttgacacct

SEQ ID NO: 59568 - DNA, 40 bp, Ralstonia syzygii
  source 1..40: mol_type = genomic DNA
gtactacgcccatccgcgcaaccagttctggccgctgatg

SEQ ID NO: 59569 - DNA, 40 bp, Ralstonia syzygii; identical to SEQ ID NO: 59568
  source 1..40: mol_type = genomic DNA

SEQ ID NO: 59570 - DNA, 50 bp, Ralstonia syzygii
  source 1..50: mol_type = genomic DNA
gcatgtcaaaatatctactatcccaaagaactttggagaacttgccagct

SEQ ID NO: 59571 - protein, 583 aa, Burkholderia pseudomallei
MEAQLPLAYSYVRFSTARQAMGDSVRRQVELTEKYCAKMGLRLVRESEYRDLGVSAFRKKNLETGKLAEFIDAVKAGRVLPGSFLIIEQFDRLSRANVNVALRLLMDLIESGIVVVTLVDEKQWTKESLSDLADLFTAIIYMARANDESARKSDRLAAVWEQKKKRAADGTATRIVTSEAPRWLRAKADKTGFEPIPALVESVRRVFEMRINGAGAAAICGRANRERWPVPGKAPVRKVGETEEDFIQRKETSGHWHLSLVSRILKNRAVLGEYQPRRIDREDSRNKIAVGEPIRGYYPVIIDESTFLRAQATSLRRGIRPGRRDAEARNWLYGLVKCGECGNSLVRKNKASAKQPGYARYYCVARVRGLSDCASVNSSQLEGCVIHVASTWLPNHWKTDASIDALRASADVLETKISEHQASMDGLLDLAGSVTTASARAALLERLDAVGGALNKSKEELARVRTELADYAHIGDDAEVIAAFARKFREIDEIATGRDGVDGALRLREELARIVQKIVVYQSTGHVEFSIKGREKPVWLPLHFVDSEPPSEPSAEQLEAAERDLDALVRAMEDAAPGTVADH

SEQ ID NO: 59572 - DNA, 50 bp, Burkholderia pseudomallei
  source 1..50: mol_type = genomic DNA
cggtgcaattaattcccaacgatggacaaggtcgggatataattgcacct

SEQ ID NO: 59573 - DNA, 40 bp, Burkholderia pseudomallei; identical to SEQ ID NO: 58103
  source 1..40: mol_type = genomic DNA

SEQ ID NO: 59574 - DNA, 40 bp, Burkholderia pseudomallei
  source 1..40: mol_type = genomic DNA
atcgggcagcccgacgatctggaacgacggcagaccgttg

SEQ ID NO: 59575 - DNA, 50 bp, Burkholderia pseudomallei
  source 1..50: mol_type = genomic DNA
cagtgcaccctctccccaagccagtgcagggtccggggctcatggcacct

SEQ ID NO: 59576 - protein, 466 aa, Mycolicibacterium rutilum
MKAAIYLRQSLDREDNQLAIDRQREDCERLCATKGWEPVPYVDNDTSASSGKRRDAYEEMLTDIRTGAIGAVVAWDLDRLHRRPVELEAFIALADERHLALATVSGDCDLSTEQGRLVARLKGAVARHEIEQKSKRQRRAGRQKAERGRPKWKRAFGYLPYTGTKEDDVGKRSLDPVTAPLVEQAYASILCGGSISEIARAWNAAGHYGLTGSPWMASTMSLFLRSPRNANLRSYGGEIVGKGTWPPLVDETTWRAAQSVLNSPGRAPGRKSVRRHLLTGVLGCGKCGGHLSGVQVYRSKAIVYQCKSCRGVSVRAEHVEPLLFGIVAGRLADDDAVDLLRAEEHDEATAERLRLEKIALTTRLDDIATDYAEGLLTGQQAKLATDVVMGKLETIEAAQTDQAKLRVLDGIPLGEAEVADAVAALSPDRYRGVLDLLVRVTVMPVGKGHRVGGARFDPDRVDVAWR

SEQ ID NO: 59577 - DNA, 50 bp, Mycolicibacterium rutilum
  source 1..50: mol_type = genomic DNA
gagcgtcctttggacaatcgttgccagtactggcaacctagagtacgttc

SEQ ID NO: 59578 - DNA, 40 bp, Mycolicibacterium rutilum
  source 1..40: mol_type = genomic DNA
caagtgcctgtgtcggattcaccatttgctcaagacgttc

SEQ ID NO: 59579 - DNA, 40 bp, Mycolicibacterium rutilum
  source 1..40: mol_type = genomic DNA
caagtgcctgtgtcggattagccatttgctcaagacgttc

SEQ ID NO: 59580 - DNA, 50 bp, Mycolicibacterium rutilum
  source 1..50: mol_type = genomic DNA
gagagtccttagataaagagctgcaggttctggcagctggaagttcatcc

SEQ ID NO: 59581 - protein, 493 aa, Faecalibacterium prausnitzii
MRVICYVRVSTREQAEKGYSVGEQQERLRAYCIAKDWIVEDVITDPGFSGAKLERPGIQRVIRLVQEKKCEAVLVWKLDRLSRSQKDTLYLIEDVFLKNGCAFVSMNENFDTSTAFGRAMIGILSVFAQLEREQIRERMAVGRVGRAKAGLFHGGGYAPIGYDYKTIAEGGEGLVVNEYEAMQVREVFSLYLQGWPVNRIRKYMTARYTTKSGDWGNDTTIRDVLKNPLYIGKINWAKKIYDGKHEPIIDEETFNAAAARLASSQWKRDCSDGLERNSPFHSTHLLGGILWCGRCGARYFASGNYSGKGENRKYWPYYVCYSRAKSAKRMIRDPNCKNDRWPVAKLDKIILDQVRQLIFDPEALERAAGGNQEAPPSERRALLNARRAEAKGQIDRLLDLCQMGTLPAAAVADRLKSLQDEVEGIDTALRELEEDDPAERLEAARATLVGAAEILDNGSLDEKRELVHSLIHRIDLDGENIDIHWSFAPGESE

SEQ ID NO: 59582 - DNA, 50 bp, Faecalibacterium prausnitzii
  source 1..50: mol_type = genomic DNA
gtataacaaacgcaagcctccacatggcttgagggttgcgtttgttatat

SEQ ID NO: 59583 - DNA, 40 bp, Faecalibacterium prausnitzii
  source 1..40: mol_type = genomic DNA
caagagcacgcattcgcaatgtttcgtcctcgggaacaga

SEQ ID NO: 59584 - DNA, 40 bp, Faecalibacterium prausnitzii
  source 1..40: mol_type = genomic DNA
caagagcacgcattcgcaatatttcgtcctcgggaacaga

SEQ ID NO: 59585 - DNA, 50 bp, Faecalibacterium prausnitzii
  source 1..50: mol_type = genomic DNA
ttataacaacacctagcacttacatagcttgaggtgtgcttttttttttt

SEQ ID NO: 59586 - protein, 613 aa, Candidatus Microthrix parvicella
MNAATTSNQPDDGARARALIYLRVSTKDQAEAGRDVEGYSIPAQREACRRRAETLDADVVEEFVDRGESARSSDRPELQRMLAYAADHSIAYLIVHKVDRLARNRSDDVTIHMALQAAGVRLVSCSENIDETPSGMLLHGIMSSIAEFYSRNLASEVIKGSVQKAKAGGTISKAPCGYLNVRKVVNGREVRAVDIDSQRGPLMRFAFEAYSGGDWTIRDLLEELTQRGLTTTPGPKTPSKPLVVSHFHRLLRHPYYKGWVRYKGVEYPNGQHEALVDDATWQKVQDQLDAKGRSGEKRRKHHHYLKGTVFCGDCGSRLIVSRATNRHGTTYPYFICVGRQQKRTACAQAAILISEVEELVAQHYKTIQPSQKTLSELRDLIVEELAVQRDESETERSAGQRRIRKLHDERQKLLEAHYADAIGLDLLKSEQTRISRELEQTETRLDAVDVAYDTVKTNLDHALAFVGDWTRAYRTAEGDIRRQLNQSIFEKIWIDDTGTITSQFTEPFRTLLSDDVTVPARLRAEEKAGAEPDEIDRLWEAFSARWEAERQQGREQGLTDPQHRDVATQKLLAPVGAGTKNEADNGTQNGNWGGNNKPRHGEPRRGLKYETLV

SEQ ID NO: 59587 - DNA, 50 bp, Candidatus Microthrix parvicella
  source 1..50: mol_type = genomic DNA
acggggtttgaaatacgagactctggtgggccttgtggcacggctctcaa

SEQ ID NO: 59588 - DNA, 40 bp, Candidatus Microthrix parvicella
  source 1..40: mol_type = genomic DNA
cgctgcgcatggtttttcgagtggagctgacgggactcga

SEQ ID NO: 59589 - DNA, 40 bp, Candidatus Microthrix parvicella
  source 1..40: mol_type = genomic DNA
cgctgcgcatggtttttcgtttggagctgacgggactcga

SEQ ID NO: 59590 - DNA, 50 bp, Candidatus Microthrix parvicella
  source 1..50: mol_type = genomic DNA
acaggcttttgttaaaaaagctctttttggcctggtgcggtggctcacac

SEQ ID NO: 59591 - protein, 513 aa, Microbacterium hominis
MTTLTSSNTAVLYLRLSSSDDASTSIDRQRQDLLDLAEREGLAVVAELADDGVSGRKTRANAQEALRMIRDGEASHLLVWKLDRWSRQGIAALGDLVDTLDARPDATFIALRDGLRSDMAAWRIIAAVLAEVARIEAENTSTRVKSSQAHLLKVGRFRGFVPPFGYRSAPNPDGPGRILVQDPVEAAIVRELTASLLSGASMTELTVRLQREGVPTTKSPARKARQHHLPTEGLDSGLWHLTVLRGILRSDTLLGRTTHEVNGRRVPVTDDDGVPITFWEPIIEPATLALLRERLPVDSGKLARRTRAARVLSGVAFCAVCDSKLYVVRSGAHVFYRCAAKKPDLVPPCPCPQLRADALEKFVEERLLRLIGAQPEVEEVRVVENPEAAADLADIDRALHDATAALMSDGVDASAVMGRIEALKARRAALREQPAAVHTTLVPTGRTLADAWHAADPATPEGVRARRTLLLREVDHLTLAPGSSRADPVAERVTVLLSREDEYAALSAFEVAG

SEQ ID NO: 59592 - DNA, 50 bp, Microbacterium hominis
  source 1..50: mol_type = genomic DNA
ctgttataaattaggtgatgacgggcagggctctggtcaactggtgacag

SEQ ID NO: 59593 - DNA, 40 bp, Microbacterium hominis
  source 1..40: mol_type = genomic DNA
agaggtcaccagctgaccggcagggccttgccctcctcgt

SEQ ID NO: 59594 - DNA, 40 bp, Microbacterium hominis
  source 1..40: mol_type = genomic DNA
agaggtcaccagctgaccgggagggccttgccctcctcgt

SEQ ID NO: 59595 - DNA, 50 bp, Microbacterium hominis
  source 1..50: mol_type = genomic DNA
ctgtgcgattcactgtgatgaccaggtgggccatggggacctggtgactg

SEQ ID NO: 59596 - protein, 532 aa, Escherichia fergusonii
MKVPVWCYARISTLKQVDGFGIQRQVNTINQFLQYVVLDHRLPFTLDTENITQMVAEGKSAFRGKNWNEKTLLGKYRKMVMDGVINDSVLIVENIDRLTRLDPFQAVEIISGLINRGTTILEIETGMTYSRYIPESITVLVMQCNRANGESKRKSIMMQKSHANRYGKVSKVRPRWFDVVELDGVKQYRTNDTAKAIQRMYNDYINGIGAAQIVRTYGNTDNGKPWTLVTVLRALSDKRVADDARYPPIIDKDLYDRVQALKASTNKKGNTHQKNMLNIFSGMSRCPVCNQSIIVKRNSHGNLFTVCLGKRTNKTCEARSMAYNALERPLLTAIRGLDFSEVYKHEDNNVLTLRDQWIQNERDIAAFRERLNKASRHEKFAILDELEIMNREQEELTIRLKSVDVPKDIQLTFDDDKLDLDTNYRIELNNRIKKLIQHINIVREDVSKSKYTIYCTIKYWSDALSHLVIIDVDIQRTGTGGTNTLTTTLRSVSSLSLDGTLSGDLDDDALEYWKNVVDGAMALATTMIDSRK

SEQ ID NO: 59597 - DNA, 50 bp, Escherichia fergusonii; identical to SEQ ID NO: 50257
  source 1..50: mol_type = genomic DNA

SEQ ID NO: 59598 - DNA, 40 bp, Escherichia fergusonii
  source 1..40: mol_type = genomic DNA
tggccccattagcagtaaagaacagtcagtcgtaccaccg

SEQ ID NO: 59599 - DNA, 40 bp, Escherichia fergusonii
  source 1..40: mol_type = genomic DNA
tggccccattagcagtaaattacagtcagtcgtaccaccg

SEQ ID NO: 59600 - DNA, 50 bp, Escherichia fergusonii; identical to SEQ ID NO: 34205
  source 1..50: mol_type = genomic DNA

SEQ ID NO: 59601 - protein, 532 aa, Escherichia marmotae
MKVPVWSYARISTLKQVDGFGIQRQVNTINQFLQYVVLDHRLPFTLDTENITQMVAEGKSAFRGKNWNEKTKLGQYRKMVMDGVINDSVLIVENIDRLTRLDPFQAVEIISGLINRGTTILEIETGMTYSRYIPESITVLTMQINRANGESKRKSIMMQKSHQNRYGNVSKVRPRWFDVVEIDGVKQYRTNETAKAIQRMYNDYINGIGAAQIVRTYGNTDNGKPWTLVTVLRALSDKRVADDARYPPIIDKDLYDRVQALKASTNKKGNTHQKNMLNIFSGMSRCPVCNQSIIVKRNSHGNLFTVCLGKRTNKTCEARSIAYNALERPLLTAIRGLDFSEVYKHEDNNVLTLRDQWIQNERDIAAFRERLNKASRHEKFAILDELEIMNREQEELTIRLKSVDVPKDIQLTFDDDKLDLDTNYRIELNNRIKKLIQHINIVREDVSKSSYTIYCTIKYWSDALSHLVIIDVDIQRTGTGGTNTLTTTLRSVSSLSLDGTLSGDLDDDALEYWKNVVDGAMSLATKMIDSRK

SEQ ID NO: 59602 - DNA, 50 bp, Escherichia marmotae; identical to SEQ ID NO: 50257
  source 1..50: mol_type = genomic DNA

SEQ ID NO: 59603 - DNA, 40 bp, Escherichia marmotae
  source 1..40: mol_type = genomic DNA
ggggcccataagcaacaatgaacagtcagtcgtaccgcca

SEQ ID NO: 59604 - DNA, 40 bp, Escherichia marmotae
  source 1..40: mol_type = genomic DNA
ggggcccataagcaacaatttacagtcagtcgtaccgcca

SEQ ID NO: 59605 - DNA, 50 bp, Escherichia marmotae; identical to SEQ ID NO: 34205
  source 1..50: mol_type = genomic DNA

SEQ ID NO: 59606 - protein, 464 aa, Deinococcus wulumuqiensis
MTVRAYIRVSGRHQVDGFSLGAQQAKCQAWATYQGLGDVVVYEDAGLSGRGDNRPGLQALLLDLVPGDVVVILSITRLARGGAVQLLTLVNSIREKGARLVFLSENIDTDNYTGRLMLTTFAGFAEMEVEQTRDRAMMGKTQAAQQGLYPHNPHNLRMGWATDEEGRIVEDEHAETVRRIIRQGRASYRQTADLLNREGVPTRNGLIGRWDVYQVQRIVTHAGYWTGEVIFRESSGGEQIVIPAPPLVSREEWEAAQRPRSANSVFRRPDLYPLTGHLSCACGHGLAGQRKDSQRGRKRFYEYYFCSPLRRGTATCPAWQKRSPCFPVAPLHQHARHVLAEAVANPTDPLKLALAWQGELPPDPHAKERADIAQRLDALLDLYLDNMVDRAIYAQRRQTFERRLEELAPPAPVAPVAMPARPDLAAAILASTNEEFAALLDLLEVRFVQCERDRVELQSYTPLG

SEQ ID NO: 59607 - DNA, 50 bp, Deinococcus wulumuqiensis
  source 1..50: mol_type = genomic DNA
gatggtgtacgtcgcgcagcatctcaagtggctgcaacttgtacgccaca

SEQ ID NO: 59608 - DNA, 40 bp, Deinococcus wulumuqiensis
  source 1..40: mol_type = genomic DNA
gtcgggcagcatgaccaatcaggtggcgattgccctgcac

SEQ ID NO: 59609 - DNA, 40 bp, Deinococcus wulumuqiensis
  source 1..40: mol_type = genomic DNA
gtcgggcagcatgaccaattgggtggcgattgccctgcac

SEQ ID NO: 59610 - DNA, 50 bp, Deinococcus wulumuqiensis
  source 1..50: mol_type = genomic DNA
ggtgatgtgagaaccccagcatcctggctggctgcaccccaggccccaca

SEQ ID NO: 59611 - protein, 539 aa, Pseudomonas aeruginosa
MTKKCFPYVRFSSTRQEDGSTRTRQNELIDAFVTKHGLEVDRHLEDAGTSAYHGKNAGSEGVLGKFLKEVRMGEIEKGSYLLIENFDRLSRDKIVRTNKIFTDLIFSGIKIVILDKNKIYEEDNLDFADWVNALLEFERANVESKRKSDFSSKAWKFNREKMRNGEIVTKKVPTWLKVENNAFVIDHAKVERINTLFKLSLSKGLQEATREYNDLYSEKLAIHQAQYLLSNRKLIGEHSPQTIHYDESGQLKRKDEGDSIPNYYPAVVDEKLFYQVQEVIKSRRPFAGRYSNQRYNVFRDLIYCKWCGGTIRYMNKGERDYFICTNSMTGKCDLNSHFGQQSIRGKKLFGMFFAFTDGLNVSALLEENTNAKEIKTEVLKLEAKRKQIANRLQDFKVEVKTMILDGKTIPSTYNEVIAELESNRNHIDNEIDTRTKELDQIYISEKSFMGLKDIDVSGIIYDRTNEAIEKRVQYNNELKKIIKHIRIDFLNTSIEIEFANKLCRLVNSDGDVIDYVIDHVPEDFTAIYNYDKDYINPDV

SEQ ID NO: 59612 - DNA, 50 bp, Pseudomonas aeruginosa
  source 1..50: mol_type = genomic DNA
cctatcattgaacatagccaaccatgctaggctatacgttccatcgaacc

SEQ ID NO: 59613 - DNA, 40 bp, Pseudomonas aeruginosa
  source 1..40: mol_type = genomic DNA
atagcagtagatgcagacatgctcgcaaccacggtaggga

SEQ ID NO: 59614 - DNA, 40 bp, Pseudomonas aeruginosa
  source 1..40: mol_type = genomic DNA
atagcagtagatgcagacaagctcgcaaccacggtaggga

SEQ ID NO: 59615 - DNA, 50 bp, Pseudomonas aeruginosa
  source 1..50: mol_type = genomic DNA
tctatgattagcacatgtcaaccaagctaggctacagtttgcataaaagt

SEQ ID NO: 59616 - protein, 531 aa, Sphingomonas sanguinis
MAKASRSQTKAFAYMRLSVDKEGGAPQSIDAQRSAILAYAAKHDIMIVEEFADAGFSGQTDKRPEFQRLVQKATASDHPVDLVLMFMFSRMARNMRLFFDVVGKLDDAGVEVRSITEDFGQGRGQRIGRTITAMMNEEQARDAAILTRKSRRENARQGFYNGGPVPFGYQTYVARQDGEKERRKLAIVEAEAAIVRQIFDWADVGRGGRWIVKQLNDAGRTLRGARFANSNVAGILAREVYTGVYHDRTADDDGITPDVEDAIAVTCPPIIARDQFDRVAAMRATRNPRRMAPHVAAGTTLLTGVARCGMPGCSSGMTIRTGKGGRYTYYVCNDRVNRSGTCACPSIRREKLDGMVLDAIEARLLARDRLRTLLAGVLDVSQSRQAEREAELTRSRSERTRLNTAISNLLILIEEGTMSARDPAFVERMATNRAALAAVSSRIDVLEAQLAKGKRRIDEQTIDRFGDMLRKKMRSDDSSLRSSYLKMFVSNVSVSDREIVISGPMSSLENGVSVGLPVKEGAVPIFDREWC

SEQ ID NO: 59617 - DNA, 50 bp, Sphingomonas sanguinis
  source 1..50: mol_type = genomic DNA
gcggtgcccatctttgaccgggagtggtgcccctcaaaggccgaagatgg

SEQ ID NO: 59618 - DNA, 40 bp, Sphingomonas sanguinis
  source 1..40: mol_type = genomic DNA
tcaacgctgtatgaagcggtggtgcccagaagaggactcg

SEQ ID NO: 59619 - DNA, 40 bp, Sphingomonas sanguinis
  source 1..40: mol_type = genomic DNA
tcaacgctgtatgaagcggcagtgcccagaagaggactcg

SEQ ID NO: 59620 - DNA, 50 bp, Sphingomonas sanguinis
  source 1..50: mol_type = genomic DNA
tcggtgcccagcagtgaccgggagcagggccagccatgaggaggcactgg

SEQ ID NO: 59621 - protein, 638 aa, Citrobacter freundii; identical to SEQ ID NO: 41686

SEQ ID NO: 59622 - DNA, 50 bp, Citrobacter freundii; identical to SEQ ID NO: 41687
  source 1..50: mol_type = genomic DNA

SEQ ID NO: 59623 - DNA, 40 bp, Citrobacter freundii; identical to SEQ ID NO: 20458
  source 1..40: mol_type = genomic DNA

SEQ ID NO: 59624 - DNA, 40 bp, Citrobacter freundii; identical to SEQ ID NO: 20459
  source 1..40: mol_type = genomic DNA

SEQ ID NO: 59625 - DNA, 50 bp, Citrobacter freundii
  source 1..50: mol_type = genomic DNA
actctgaattggtcactgctggaactggctagtgaactcatcatcattgt

SEQ ID NO: 59626 - protein, 551 aa, Streptococcus dysgalactiae; identical to SEQ ID NO: 38046

SEQ ID NO: 59627 - DNA, 50 bp, Streptococcus dysgalactiae
  source 1..50: mol_type = genomic DNA
ttggacaatgatgaacaagttgagtgcatagcgttgatacaaagagcgaa

SEQ ID NO: 59628 - DNA, 40 bp, Streptococcus dysgalactiae; identical to SEQ ID NO: 52928
  source 1..40: mol_type = genomic DNA

SEQ ID NO: 59629 - DNA, 40 bp, Streptococcus dysgalactiae
  source 1..40: mol_type = genomic DNA
acagacgcatcatgtggagatcgtagtgttgctacaacga

SEQ ID NO: 59630 - DNA, 50 bp, Streptococcus dysgalactiae
  source 1..50: mol_type = genomic DNA
atgtgcattcagagtcaagttaagatcatagggttgtatttaagaggaac

SEQ ID NO: 59631 - protein, 489 aa, Anaerostipes caccae
MRIAAAYIRVSTHMQEELSPDAQRRLLGEYAKRNGMILSNEFIFMDKGISGKKAEKRPDFMKMISMAKQKPAPFDVILVWKFSRFARNQEESIVYKNLLRNKCKVDVVSITEQTGDDMFGKLIERIIEWMDEFYSIRLGEDVTRGMVENAMRGNFQSSPALGYQVVRKGELPKKVPEESRPVEIAFKKFVYSSMGFLEIARHLNSLGYRTKKGKLFEARGVKYILMNPIYKGWLRWNYRNPDGTKKSKDDWIIVKVPKLEPTVSEELWDAANERIQLMSKIIVKKSKPSSVKRHWLSGLIKCSACDRSLSTSVHTDKRYGRTYINFQCYGYLKGKCSISHQVSEKKIVPIVLSMLKEDSLKKEVPFEILTNTKSSDEISIIKMQLDKIELKELRIKEAYRNGIDTLDEYRENKNILSMERSSLQDKLESLSVPEEEIKADMPNRIKSVYDIVSSESTTKDEKYAAINSIVKKIIYRKSDGEIDIYYYYS

SEQ ID NO: 59632 - DNA, 50 bp, Anaerostipes caccae
  source 1..50: mol_type = genomic DNA
cttcatacgctattactataaggatgaccttatagtaatagcgtatgaac

SEQ ID NO: 59633 - DNA, 40 bp, Anaerostipes caccae
  source 1..40: mol_type = genomic DNA
gtaagctgtccggagtggatgacacagtggggatctaaat

SEQ ID NO: 59634 - DNA, 40 bp, Anaerostipes caccae
  source 1..40: mol_type = genomic DNA
gtaagctgtccggagtggaaaacacagtggggatctaaat

SEQ ID NO: 59635 - DNA, 50 bp, Anaerostipes caccae
  source 1..50: mol_type = genomic DNA
ttacatacttcccaactgaactgaaaaccttatgttaagatcctatgaac

SEQ ID NO: 59636 - protein, 510 aa, Alkalihalobacillus halodurans
MRPTGLDVFIYLRKSRKDLEREQNGEYDTLERHRKQLLELVKKENHNLVAPPFEEVVSGEYINERPKIQELLKEVEDGAVDGVLVMDLDRLGRGDMFDMGLIYRAFAYSETLVITPTEVIDPTEEGAELLFGVKSILSREELKNINKRLQRGRRASASEGKFIGKKPPYGYLRNEKMKLVPDPETAWVVKLIFEKMAEGYGRHALARYLDEHKIPPPERANQWEHSTLTAIVKNEVYTGTIIWGKTKQYKRNGKRVRKKMPRENWIIKENAHEPIVSKELFDRANEAHSSRWRPPMIEPNTLTNPLAGLLRCSICGRVMKYQPNRDRPNHHIRCYTRTCAPFHKGAGLHLVMDKVIESLSDILESIEFEGELLERKKVSLIPEKERALKEQQTVLKKAQTQKDNLHDLLEQGIYTIDVFMERQQAITERIKNAQEKIAQLKKEIDIEQEKEKHYDQFLPKARNALKAFYETDNAFEQNKLLKSIIEKIQYTRKKDWVEPDHFEIKIYLKI

SEQ ID NO: 59637 - DNA, 50 bp, Alkalihalobacillus halodurans
  source 1..50: mol_type = genomic DNA
cgtttacctctttgggaactgtactgattgacttcactaaggtataaaca

SEQ ID NO: 59638 - DNA, 40 bp, Alkalihalobacillus halodurans
  source 1..40: mol_type = genomic DNA
ggtgctgtgacgggagtactgattgacttcaccgtagcca

SEQ ID NO: 59639 - DNA, 40 bp, Alkalihalobacillus halodurans
  source 1..40: mol_type = genomic DNA
ggtgctgtgacgggagtacttattgacttcaccgtagcca

SEQ ID NO: 59640 - DNA, 50 bp, Alkalihalobacillus halodurans
  source 1..50: mol_type = genomic DNA
cttatacctgtatagtatatgtatttattaacattatatatgtataaata

SEQ ID NO: 59641 - protein, 540 aa, Salmonella enterica; identical to SEQ ID NO: 32621

SEQ ID NO: 59642 - DNA, 50 bp, Salmonella enterica
  source 1..50: mol_type = genomic DNA
cggtgtacatactttactaactacgaacagttatgatattatgtacgcca

SEQ ID NO: 59643 - DNA, 40 bp, Salmonella enterica
  source 1..40: mol_type = genomic DNA
tggccccattagtagcatggagcagtcggtggtgccgccg

SEQ ID NO: 59644 - DNA, 40 bp, Salmonella enterica
  source 1..40: mol_type = genomic DNA
tggccccattagtagcatgacgcagtcggtggtgccgccg

SEQ ID NO: 59645 - DNA, 50 bp, Salmonella enterica
  source 1..50: mol_type = genomic DNA
tggtgttcagagtttacttactagacacagttatgtatatttctttgctt

SEQ ID NO: 59646 - protein, 522 aa, Streptomyces albus
MVKRALGVVRLSVANTGQTGDDTQKKLIAKRVEADSLDLVGWAEDIDVSASLSPWLRPSLGDWLNNKRDQFDVLYVKSMDRIVRSVRDLCDIIDWCTKHGKSLICVEQSFDLTSEMGQAVAKILAVVAEIELNIIKSRVRASREAMRKAGRWPGGLVPFGRVAAKDGDGYTLAICPEYGPVLVEMIRLFMACKSFSVVADWLNAGNVPTVQDIARMRAAKGESTTRLNEEKAKARGTKWSPTSVQAVLTSRSLLGEYVRADGTVVRNEDGTPVMRSEPVLTEAEWLALQEVVTLVKYTKGPSETSPVRGILFCDGSDYEHPLYWAKGGKKNNKRPRIRCQGSKPKGRKPCPGHSFMAEELYELIGATLKLQIGSLPVRERRTVQDDSRAVKVAVLDAQLEQLTKELQAGKLSAAEYGQHVAKVAAEREAITSKPAARPQEQWVETGQTYADWWDSSTREERREKLLTWGVRVFAGPSGVRFEYGEHFPAAPLQVAQVGFGNAPAEAVSISDFLSGAEVALAA

SEQ ID NO: 59647 - DNA, 50 bp, Streptomyces albus
  source 1..50: mol_type = genomic DNA
atggaggcaaaacccaaaaccgtcccgacagtcttggtaattccctccaa

SEQ ID NO: 59648 - DNA, 40 bp, Streptomyces albus
  source 1..40: mol_type = genomic DNA
cgacggcaatcagacggtgccgacggtgctgttcccggac

SEQ ID NO: 59649 - DNA, 40 bp, Streptomyces albus
  source 1..40: mol_type = genomic DNA
cgacggcaatcagacggtgtcgacggtgctgttcccggac

SEQ ID NO: 59650 - DNA, 50 bp, Streptomyces albus
  source 1..50: mol_type = genomic DNA
agggaggcagagaactaaactctctctagaggctggcatgttcaccccaa

SEQ ID NO: 59651 - protein, 465 aa, Mycobacteroides abscessus
MLAVVYTRISKDRVGAGLGVERQRDDCQQLADSLGWTVVQTFSDNDISAYSGKVRPAYEAMLAALEADKAQAVIAWHTDRLHRRPIELEGFIDLCERKKIEVRAVKAGTIDLSTPSGRMIARMLGAAARHEVEHMIERAKSQKKQAALDGKYRGGRRPFGYEPDGLRLREAEADAIRTGVEGVLSGVSLRQIARDWNAAGLRTSSGNNEFSSLEVRKILLRPRNAGIVLHEDQRIGQGQWEAIVDTDTFAALEAVLRDPGRAKHISYIRKYQGSGVYLCGRAECGAVMRISSQAIAKGTQERQKTYVCSSSKHLGRLVEYVDEYVDEHVIRRLLEPDARQVFVSAEADLTALHAQREGLRSRLDELSMLFAAGDIDGPQLKRGSAELKNKLAVIDAELTSARSSSALADLLEADDIEAAWKVTPPDIRGKIIDTLMTVTILPIGRGRQRDGSYFDPSKIRITWKS

SEQ ID NO: 59652 - DNA, 50 bp, Mycobacteroides abscessus
  source 1..50: mol_type = genomic DNA
aaacggcttagtcagaggtttgacaggtcattagttgggttgataccatt

SEQ ID NO: 59653 - DNA, 40 bp, Mycobacteroides abscessus; identical to SEQ ID NO: 34388
  source 1..40: mol_type = genomic DNA

SEQ ID NO: 59654 - DNA, 40 bp, Mycobacteroides abscessus; identical to SEQ ID NO: 34389
  source 1..40: mol_type = genomic DNA

SEQ ID NO: 59655 - DNA, 50 bp, Mycobacteroides abscessus; identical to SEQ ID NO: 34385
  source 1..50: mol_type = genomic DNA

SEQ ID NO: 59656 - protein, 542 aa, Streptomyces scabiei
MAVLTTVEGVLDQAVTRMAREYLRVSKGRGRAARSITDQHRDNLASAEDHGPWAWGEPYKDTGSASKFARKQRDDFEKLLGDLRTGAFGKPGDVLVLWEISRLARETGRGVELVDACEAGGYLIHITSHEHTYNPANYQDRHSLISGINDAEKEARLLSVRTLRGLNSAAREGRPQGQVPFGYRRDYEVVDGRPRPVSQYPDPVEGRLVEELFTRVAGDGEALPEPIYAIAKDWASRGVVSRDRVVDGETVPGRPFTPQSLRSMLLRPGYAGLRKHKGTLVPEQWEGWTPVVDRALFERVQAILADPARRTYTGEHIRHVLSMTLKCDVCGGYMAVMARRRNGRKATLGYQCHPKGHVWVRKDEVDRIIIGDLDPVDPESGELLPPEPGVILQYLANPDRHAALRHRPDLDAEEAALRAELAELSSELKELEEAPQPKTARARIRRTADIEELETDVEVLQAKLGRLTTPAPLAELLPDEPITDVVRWWKKAGVEKQRAVATLLLTPAMLGEVRITPSPVPRGYAPAAERMVWSRDALPLAE

SEQ ID NO: 59657 - DNA, 50 bp, Streptomyces scabiei
  source 1..50: mol_type = genomic DNA
gtgttaatagaccaaggccgaaccacgggttcgccttattcgttgtactc

SEQ ID NO: 59658 - DNA, 40 bp, Streptomyces scabiei
  source 1..40: mol_type = genomic DNA
gtgctgaaggtcgcccaccacgggtcggcctaccaggatc

SEQ ID NO: 59659 - DNA, 40 bp, Streptomyces scabiei
  source 1..40: mol_type = genomic DNA
gtgctgaaggtcgcccacctcgggtcggcctaccaggatc

SEQ ID NO: 59660 - DNA, 50 bp, Streptomyces scabiei
  source 1..50: mol_type = genomic DNA
gtgtttttcaaaggaagccaaacctcagatttgcctcagaacttgtactt

SEQ ID NO: 59661 - protein, 558 aa, Pseudomonas syringae group genomosp 3
MPTAYAYVRFSTAQQGHEGRDSETRQTAPLEAFQKAFDLQIEPKNIVYDRGRSAFDGSNVVKGNLKELIEKLQEGDFLVVESIDRLTRQRVLVGVDMIQKLLMRGIKLYTTIDTKLYEVSDPSRDLETLLLISVIAKRANEESQTKSIRRKSAYKKAKDAAADSGKVFNKLSPPFGIRYDESQEKFVEEPDEADDIRKIFELLKDFGVDETCRRINQISTRRKWTNKAVFILIKNKMPLGTLAVFSRLKKDGKEKRIFERFIENYYPQTVSDFDFYSALKSIQERKRDRVAGRYTLNNFNIFKKVVFCQVCGSSMICTKTNVRSKTGNGGYTYLTCKDRIETGNCPAKRIRFEYAFGGLLELNEMTKLMKSNISGQEKNAYGTASLFQTLANYKEVDHRDRLEISEKIKAHSIAENQLSNLTTSLNYDEKIPAVLVKKLSALEDEIETLKKEIAILNETHDERTTLNASTSAEIIDIFKSEKGRISLNRFFMENKIAFKFELKEGRVLYASIFRKTDNGLIGVLTVAIGFPLRKPLQKFGLEDLKDIINLPPNYTDEQ

SEQ ID NO: 59662 - DNA, 50 bp, Pseudomonas syringae group genomosp 3
  source 1..50: mol_type = genomic DNA
ttagtttaataggagctaccgttcgagaacggtaaggggtatagtatgaa

SEQ ID NO: 59663 - DNA, 40 bp, Pseudomonas syringae group genomosp 3; identical to SEQ ID NO: 58533
  source 1..40: mol_type = genomic DNA

SEQ ID NO: 59664 - DNA, 40 bp, Pseudomonas syringae group genomosp 3
  source 1..40: mol_type = genomic DNA
ggttctacgtgagccgctgaagtcggggcatatcgtgatt

SEQ ID NO: 59665 - DNA, 50 bp, Pseudomonas syringae group genomosp 3
  source 1..50: mol_type = genomic DNA
gtagttaattctagaataccgtgcaagaacggaaagaccaggagtttgag

SEQ ID NO: 59666 - protein, 509 aa, Myroides sp ZB35
MKTADLYIRVSTDEQADKGYSQRDQEERLRRYCSQYNFKVGNVIYEDHSAKTFNRPAWNSLLQNLKKNKGKTHLVLFTKWDRFSRNAGDAYQMINMLTKLGVNPQAIEQPLDLTIPENKMMLAIYLAAPEVENDRRALNTFYGMRRAKKEGRVMGNAPFGYANKSKEDGKKYIALIPEQSKAMKWAFTELAKGILSANQIRLEMNRMNAGKLSSTAFHVAIRNPIYCGKIFIPKYKDEEAYFVTGLHEALISEALFDKVQMILDGNVRKERPNTKILSDENLPLRGFLVCPNCNRNLTGSASTGRNNRYYYYHCLASCGFRQKADVANKIFENGLKQLQINKVVQNFTKKLLIDSYNQVFGNPVSQKKSILENIDKVNHKLSIARNKLLEGTLEDDDYLAIKKECKIEIEKFEKQLIEEEGNKKIDIKSMLDRALDKVVNLGVLYAEGGIQTKREIIGSIFPEKLEFDGKSYRTTRINTLVKCIFQINNELAENKNRIYENFLDISCVV

SEQ ID NO: 59667 - DNA, 50 bp, Myroides sp ZB35
  source 1..50: mol_type = genomic DNA
tttctcgatatatcctgtgtagtagccgatgtagaagatatatcgaaata

SEQ ID NO: 59668 - DNA, 40 bp, Myroides sp ZB35
  source 1..40: mol_type = genomic DNA
agatgtccttttacctgtagcgaagacgggagttgaaccc

SEQ ID NO: 59669 - DNA, 40 bp, Myroides sp ZB35
  source 1..40: mol_type = genomic DNA
agatgtccttttacctgtatggaagacgggagttgaaccc

SEQ ID NO: 59670 - DNA, 50 bp, Myroides sp ZB35
  source 1..50: mol_type = genomic DNA
tttctcagtgaattctgagaaatatgtaaagtagaatttatatttaaata

SEQ ID NO: 59671 - protein, 474 aa, Micromonospora aurantiaca
MRAVIYTRVSSDPNNIGRSVEEQETDCRAVCQREGWEVVRVFSDNDRSASRYAKKERPQYQALRTYLEAGGAQVLVMWEGSRAQRDLEAYLSLRKLCAERGIGYSYSGRLYDLSRTDDRFTTGLDALLAEREADVTRDRVLRAVRANAAAGKPHGRLLYGYRRLYGDGGQYVAQVIQDDHAAVIREAAKRVAGGEACRSIAQDFNRRGIPTPRGGEKGWTLSQIGRMLQNPGYIGKRVHNGKIVGQADWPAILDEETYATCKAILSDPRRKTQRDTTVRHLLSGAAVCDVCGSRMRVQKNRTHYAYLCAERFCVSVKTTVLEQFVVAVLMARLSRPDALDLLSPESDASSRQQAEQEAKRKRERLEEWYAAAARDEITPAGLATIERTLLAEIEDAERRAEHVDVPPLVRDLVGPDVESKWQRLTIGQQREVVSLLMDLRVDRTYRGARTLDPARLRKSRWRGDLLSWGDRGLV

SEQ ID NO: 59672 - DNA, 50 bp, Micromonospora aurantiaca
  source 1..50: mol_type = genomic DNA
gcacccctctaccgaacgttctccggtgcgaacgtgcatcaggggtggtg

SEQ ID NO: 59673 - DNA, 40 bp, Micromonospora aurantiaca
  source 1..40: mol_type = genomic DNA
acacctcaacgcggtgtccggctccaacgtggcgatcgtc

SEQ ID NO: 59674 - DNA, 40 bp, Micromonospora aurantiaca
  source 1..40: mol_type = genomic DNA
acacctcaacgcggtgtcctcctccaacgtggcgatcgtc

SEQ ID NO: 59675 - DNA, 50 bp, Micromonospora aurantiaca
  source 1..50: mol_type = genomic DNA
gcacccctcacagcctcgctctcctccccgtccgtccttgtagggaggtg

SEQ ID NO: 59676 - protein, 478 aa, Brevibacterium aurantiacum
MVQLVSLRKTNEVAAYVRASMDRKGDRWTVDTQLRKIRALAEAKDWNVVEVYEDNAVSATKKRRAGTRWAEMLEDARAGRFSMVVAVDMDRLLRSTKDLNTLIDLGLRVVTVDGEIDLSTADGEFRATMLAALARFEARRKAERQIRSNERRRAEGIPTSAWKAFGWTRDGELIPEEAEAIQRAFDAFLGEPSLSIRRIREDLNAAGHLTARGSEFSVDAVRYLLANPLYAGYIKHYASGELYPVQGDTFPPIVGEQTWRAAVAKLEDNVRRSARQGNQPKYLLSTIGLCGKCGATLVSGTNSRKQPTYRCGEHFHLTRQREPLDAMVTEAVLTRLSSVDVHDLVMPQEDAGPDREELLTERNALVERVKELSPLLRDIHQPVLEITAAINDVKARIDEIDAELLDRSVSVAAKLLEDIDESVGTAERREVVESKWKELDVDRRRMLVDELVTVTIEPIVPGHVKFDPDLIRIEPRRN

SEQ ID NO: 59677 - DNA, 50 bp, Brevibacterium aurantiacum
  source 1..50: mol_type = genomic DNA
cggcgtcatagccacgacatgtgctagcgcatgtcgcggttacaacaccc

SEQ ID NO: 59678 - DNA, 40 bp, Brevibacterium aurantiacum
  source 1..40: mol_type = genomic DNA
cggtgtcatcgacatgcgctacgagaaccctctctatctg

SEQ ID NO: 59679 - DNA, 40 bp, Brevibacterium aurantiacum
  source 1..40: mol_type = genomic DNA
cggtgtcatcgacatgcgcatcgagaaccctctctatctg

SEQ ID NO: 59680 - DNA, 50 bp, Brevibacterium aurantiacum
  source 1..50: mol_type = genomic DNA
tggcgtcattggaacgacatgagcatgcgcacttccccagcacaatcagg

SEQ ID NO: 59681 - protein, 478 aa, Brevibacterium aurantiacum
MVQLVSLRKTNEVAAYVRASMDRKGDRWTVDTQLRKIRALAEAKDWNVVEVYEDNAVSATKKRRAGTRWAEMLEDARAGRFSMVVAVDMDRLLRSTKDLNTLIDLGLRVVTVDGEIDLSTADGEFRATMLAALARFEARRKAERQIRSNERRRAEGIPTSAWKAFGWTRDGELIPEEAEAIQRAFDAFLGEPSLSIRRIREDLNAAGHLTARGSEFSVDAVRYLLANPLYAGYIKHYASGELYPVQGDTFPPIVGEQTWRAAVAKLEDNVRRSARQGNQPKYLLSTIGLCGKCGATLVSGTNSRKQPTYRCGERFHLTRQREPVDAMVTEAVLTRLSSVDVHDLVMPQEDDVPDREELLTERNALVERVKELSPLLRDIHQPVLEITAAINDVKVRIDEIDAELLDRSVSVAAKLLADVDEPVGTAERREVVEAKWKALDVDRRRMLVDELVTVTIEPIAPGHVKFDPDLIRIEPRRD

SEQ ID NO: 59682 - DNA, 50 bp, Brevibacterium aurantiacum; identical to SEQ ID NO: 59677
  source 1..50: mol_type = genomic DNA

SEQ ID NO: 59683 - DNA, 40 bp, Brevibacterium aurantiacum; identical to SEQ ID NO: 27918
  source 1..40: mol_type = genomic DNA

SEQ ID NO: 59684 - DNA, 40 bp, Brevibacterium aurantiacum; identical to SEQ ID NO: 56274
  source 1..40: mol_type = genomic DNA

SEQ ID NO: 59685 - DNA, 50 bp, Brevibacterium aurantiacum; identical to SEQ ID NO: 59680
  source 1..50: mol_type = genomic DNA

SEQ ID NO: 59686 - protein, 478 aa, Brevibacterium aurantiacum; identical to SEQ ID NO: 59681

SEQ ID NO: 59687 - DNA, 50 bp, Brevibacterium aurantiacum; identical to SEQ ID NO: 59677
  source 1..50: mol_type = genomic DNA

SEQ ID NO: 59688 - DNA, 40 bp, Brevibacterium aurantiacum; identical to SEQ ID NO: 59678
  source 1..40: mol_type = genomic DNA

SEQ ID NO: 59689 - DNA, 40 bp, Brevibacterium aurantiacum; identical to SEQ ID NO: 59679
  source 1..40: mol_type = genomic DNA

SEQ ID NO: 59690 - DNA, 50 bp, Brevibacterium aurantiacum; identical to SEQ ID NO: 59680
  source 1..50: mol_type = genomic DNA

SEQ ID NO: 59691 - protein, 506 aa, Flavobacterium johnsoniae
MKRAIRYLRFSQLGQSNGSIERQELYTDQYLQYNNIQLVDTFIDRGKSAKSFDRPDFIKLQAFIAKHYKSVDYLLVDQLDRFSRDAGEAMNMVKQFQKKYSIQIISVTEGIVFDYDTPGSFFRAGLQLLLAEEDNINRSIKVRGGLYTARAKEGRFLTREKPFGYIKVGEGKQRHLEVNEIEAKVVRLIYDMFLRNVPLYKIKEIAYQSGFDRKGNMAIDRVLANPVYAGLVKVEPFKDLPGGLFPAIHEPIVDKITWTMVQAKMKKEDKIKVTVDDEIPLRGVVKCHCGAPLTGAPSRGKSGKYFYYYKCKHSRHNNISAVKAHEQFLNACDLMSVSEKHIKDIRDGSYASIENEVKTNKKKAVEKRHELEEIQQRLNAVEEKWFRDEINKDTYDRWYSTYSDHILTLTASIERFSINQGKAFEILESNLDLLGDIRHIYDRSNTLQKREFVNMVFDGNLYYQEGIYRTPTMMDIFSHNASKMEEKGYLLYKKKRDNISVIPQSG

SEQ ID NO: 59692 - DNA, 50 bp, Flavobacterium johnsoniae
  source 1..50: mol_type = genomic DNA
aacatttctgttatccctcaaagtgggctgtcagggattacagtcgaaca

SEQ ID NO: 59693 - DNA, 40 bp, Flavobacterium johnsoniae
  source 1..40: mol_type = genomic DNA
tcttaaggagtttcttggtgggcgatgaggggttcgaacc

SEQ ID NO: 59694 - DNA, 40 bp, Flavobacterium johnsoniae
  source 1..40: mol_type = genomic DNA
tcttaaggagtttcttggtccgcgatgaggggttcgaacc

SEQ ID NO: 59695 - DNA, 50 bp, Flavobacterium johnsoniae
  source 1..50: mol_type = genomic DNA
aacgtttctgcctaccctcaatgtcccaaatcagaatctgcatttgaaca

SEQ ID NO: 59696 - protein, 552 aa, Flavonifractor plautii
MTTSNQKKTALYCRLSQDDNTENESNSIQNQKMILQRYAADHHFPNPCFYVDDGYSGASFQRPGFQQMMADMENGEIGIIITKDLSRLGRNQLHTGLYIEERFPMFGVRYIAINDNVDTDSSESNELMPFKNLFNEWYVRDSSRKVRAVLKAKAERGERLGTRAPYGYKKDEADSKKLVVDEEAAAVVRRIFAMCAAGRGPSQIARKLREEQILCPTTYAYQKFGINHTSLNMEEPFHWTSSTVANMLENELYLGNTINMRFSTKSYKDKRRVEHPKEECLVFEGTHPALVTQEVWDIVQRVRQNRRRPTKMNEQNKYSGLVVCADCGSTMVLHRAHTMKPTWNNFTCRTYKKEGAEVCTAHYIRECVLDEVILEDLRRVTAMAREHTMEFAEYIGSRQSAEIQREIRRQERELTAMRKRGAELDAIFKKLYEDRVLGHLSVEQFQTLSSGYTEEQERLAEEIPAKEGAIQKLRDTVSSTDGFIAKAKRYTDIMELTPELLRLFIQKIVVHEKSTKWSKKAMQTIEIHYSDIGFIGRDIPQDKESPRQEISA

SEQ ID NO: 59697 - DNA, 50 bp, Flavonifractor plautii
  source 1..50: mol_type = genomic DNA
agatacccctgtcagggggaggctcagggctaccccgcacaaggacaact

SEQ ID NO: 59698 - DNA, 40 bp, Flavonifractor plautii
  source 1..40: mol_type = genomic DNA
aagcaaacagcccgcggcacatgccgcgggctgtttgttt

SEQ ID NO: 59699 - DNA, 40 bp, Flavonifractor plautii
  source 1..40: mol_type = genomic DNA
aagcaaacagcccgcggcacttgccgcgggctgtttgttt

SEQ ID NO: 59700 - DNA, 50 bp, Flavonifractor plautii
  source 1..50: mol_type = genomic DNA
agagaccccagggaccaggagcctcttggctgccccagaccaggaccagg

SEQ ID NO: 59701 - protein, 480 aa, Curtobacterium flaccumfaciens
MASSQPRAALYARISQAVEDVDKTANQLARLREQAKLSGYVVTAEFEDDDISAYQGKRERPGWDALLSAVGAGQVDVVMATAPDRFTRGSAVELEAFKVLCARNSVKLHTLTMGVQDPDDPATAAVMQIMDALGGLEVAQKTARQHARISDDVRNGISPATRRVFGFEAVKGRAAGIRESEAALIREAVDSILDGGTVYAVAKAWRDAGVKTSLGTDWTTSSVKRTLLRPRLAGWLTHKGELISPTLPAIISQEDHEALVTLLNDPSRKVKPGPKETALLSGIMQCRCGGTMVRSSYRGKYFCTVDTSRTKGDRSGPHQSIRLEVADAAVEDAVMELLSDGTLEAPQSAEDIRAVQAELDANGRAQDAAQDVLMDPDIKDKRRAKARVVELEAARAVLEDKRDALIAKRAQGSAFDEFMEHFQAGWTEDTSADAAAYDRASASWNALSMERKRDIIRGAFDVTLGEGWGAARVIARRKSA

SEQ ID NO: 59702 - DNA, 50 bp, Curtobacterium flaccumfaciens
  source 1..50: mol_type = genomic DNA
agtaccagagtttgcgccccaggctaccgtggggcatcatctctggtatg

SEQ ID NO: 59703 - DNA, 40 bp, Curtobacterium flaccumfaciens
  source 1..40: mol_type = genomic DNA
tcgttcaccggtcccacgttacggtggaggccatgagcct

SEQ ID NO: 59704 - DNA, 40 bp, Curtobacterium flaccumfaciens
  source 1..40: mol_type = genomic DNA
tcgttcaccggtcccacgtctcggtggaggccatgagcct

SEQ ID NO: 59705 - DNA, 50 bp, Curtobacterium flaccumfaciens
  source 1..50: mol_type = genomic DNA
agctccagaagtagcttcccacgcctcccagagacagatgctctggtaag

SEQ ID NO: 59706 - protein, 524 aa, Ruminococcaceae bacterium UBA3812
MLQQNNNLSPLKAALYVRLSREDRDKIRKEDDSESIINQQNMLINYCKDNQIEIYNIYNDEDYSGSDRERPAFNRMIQDAESRKFNMVLCKTQSRFARDMELVEKYVNGLFPIWGIRFVGVVDNADSTNKYNRKQRQITSLVDQWYLEDLSENVKATLASKRKQGLWVGAFAPYGYIKDPDNKNHLIVDEEAAEVVKYIFDLYLQGYGITPIARKLNEQGIPNPATYKQQHGQPFQNAHKECSDIWHTYSIGRMLSNLVYRGCVVQGMSENISYKSTKKRQKPKEEWDIVEGTHEPIIDQCTWDKVQRLRASKPKACNMGEPNIFAGKVKCLNCGSSMRIYYTHHERYFRCSTHYFASDRCSGTFVSEKVLQREVLKQIRLLYQQYVDEAYISDNLNIENGYEEKIETLKSRIKTAEQSIEKLNKRFKNLYLDKLDELISKEDFLMLSEDCKTNKQALEQDIADYQKELAYITAQIENTSFQFDIIRQFKDIQELDSLTVNTLIDYIEVGGNKNRRIINIHWNL

SEQ ID NO: 59707 - DNA, 50 bp, Ruminococcaceae bacterium UBA3812
  source 1..50: mol_type = genomic DNA
tgtagtgcgttaatagccttatgggagcaggggctatgaaagcactacgt

SEQ ID NO: 59708 - DNA, 40 bp, Ruminococcaceae bacterium UBA3812
  source 1..40: mol_type = genomic DNA
tcatgaaaacttagcggcggaacaaaaagcgcgtacaacc

SEQ ID NO: 59709 - DNA, 40 bp, Ruminococcaceae bacterium UBA3812
  source 1..40: mol_type = genomic DNA
tcatgaaaacttagcggcgacacaaaaagcgcgtacaacc

SEQ ID NO: 59710 - DNA, 50 bp, Ruminococcaceae bacterium UBA3812
  source 1..50: mol_type = genomic DNA
tgtatggcaaacacagccttttgcacgcatgggcaagcctggcacacggt

SEQ ID NO: 59711 - protein, 590 aa, Pseudomonas aeruginosa
MKPVAYAYVRYSSVAQATGGSVERQVDALKAFTEQTGVEIKEIVQDNGVSSFKGRNVNRGQFKKILDRIDSGVIKKGDYIVVESIDRITRQRVLDGVALLQDILRSGIRIYTTSDRICYSRDNEADDLNTIIMIALIAKRANEESATKSWRRTISWDKAKKLAFEGVRKINIKNAPYGLMYDSSLGEFVLNESEAKEVRRIFELLKYMGVSKTVREMNKESKRRWAGRHVAHMIASQYPVGVLRSQKRDGEGRKEFVEYIEGYYPEIVSQTAFNEAVSAMKGRRDRKDYGSRSSDEINIFRGVVKCAKCGASLLFEKQKNQKGVPYFYLHCYSRKELKRGCDQRFRFDLAFGMFLMFVRLALSSNKPAEYVEKSSGDGGFFYKVSIGSPALINAKIGLLRNGVELSEEMDREKSNFDFALRETQGELVELFSSPTSGDIELENEFVKVKDELEKVQAKYGRLEKSIENSDGSVSKLMMKQIKEVEDRIDEKLTELEELGRKISDAKINIPIHGVQDVIDMFKVKAGRLDLNRFLVSKKIKFEFEYQGELRRLRMNVSRDGVTLLELPCQFPLHNPLKLFGLPNLAEFCDV

SEQ ID NO: 59712 - DNA, 50 bp, Pseudomonas aeruginosa
  source 1..50: mol_type = genomic DNA
tatgtgagttatagacttccgttctcgaacggtaggtgatattctcacat

SEQ ID NO: 59713 - DNA, 40 bp, Pseudomonas aeruginosa
  source 1..40: mol_type = genomic DNA
aatgacgatctcgccgctttccagcggctcgcgcaggacc

SEQ ID NO: 59714 - DNA, 40 bp, Pseudomonas aeruginosa; identical to SEQ ID NO: 59713
  source 1..40: mol_type = genomic DNA

SEQ ID NO: 59715 - DNA, 50 bp, Pseudomonas aeruginosa
  source 1..50: mol_type = genomic DNA
tttgtgtgtgtgataaatcctttctctaccagtaggattatctctcaaat

SEQ ID NO: 59716 - protein, 544 aa, Nocardia terpenica
MARPRKSKPRTACIQPARLDALDTVRVGIYVRRSTDDEHQPYSIEAQDARLESYVDSQPGWHIVMRFADDASGATTDRDELQRAMRAARAGLIDVLLVYRVDRFSRNLGDMVSLLDDLDQCGVVFRSATEPFDTSTPMGRMLVQMLGMFAQFERDTIIDRVINGMERKAAKGLWKGGRRPFGYLPDTTTQSLTPHPGESPIVGSIFQLYTRDRLGSRAIARVLNERGHRTTSGGTWSGYQVLRTLSNPVYLGELSFRDITVSDCHPPLVDTETYAEAQRLLTERGDDHAHRRANASDYTLTGRMRCPTCGTAMIGTRAHGKTKTYRYYTCHNRNRYDRTRCDGFRLNADAAETAVLDALATFYRDHHTRIADAVAAAQRQHHAGFDAQHAELHAVNAQITDTNTKIDRYLTAFENGTMDEQLIGDRLTQLRTTSRQLACRRDELTATLDTAPTGPDPATLTEVADNITALLTSGTDRTRKTLIETHIADIEITGPDTIIPWFYIPQTPTDPHTTTTPHTTEALTEGKPPVRASEKGVRAMTNLV

SEQ ID NO: 59717 - DNA, 50 bp, Nocardia terpenica
  source 1..50: mol_type = genomic DNA
tgttcgcgcaatgacaaacttggtgggcctaacgcctcacaacccgaacc

SEQ ID NO: 59718 - DNA, 40 bp, Nocardia terpenica
  source 1..40: mol_type = genomic DNA
cgccgacgaatcgcctggtggagccaaggggaatcgaacc

SEQ ID NO: 59719 - DNA, 40 bp, Nocardia terpenica
  source 1..40: mol_type = genomic DNA
cgccgacgaatcgcctggtttagccaaggggaatcgaacc

SEQ ID NO: 59720 - DNA, 50 bp, Nocardia terpenica
  source 1..50: mol_type = genomic DNA
tattagcgatctgccaaacatggtttggaaaatgctgacaaaccccaacc

SEQ ID NO: 59721 - protein, 541 aa, Nocardia terpenica
MRQASYNTSATVPLVTKARTTDHEDNPADEANPDLRLTARERRALVERLRQALVRTPCDALPLGRLRIAIYCRISSDRTGRGVGVERQLQDNRKEAAALAGVVVGIYIDNDVSAYSGKPRPEYQKLLADIEAGWIDVVITWHPDRLHRSPAELEHFLPIMEQTKCTVHTVTAGHWDLSTPSGRAVARTMGTWAYYESEHKAERIKRQKEQAASQGLFLGGPRRFGFEADGYTLRPDEAVVIREAVRALIGGIKLRPIVTDLNARRIPTARGGKLWCSRTLKHILLSPRIAGLTPFHGGALGKARWNPIVSEDEWRAVVAILSHPDRGQNNSGAPISWLGSGLYVCGGCQADTMRANNGPRNRKVYQCQTYFKPIAKPERSRHVTRTAHRVDEVVELTVVERLANSDLLEVIAQRNSGTDAKDLHLELSGANARLEELSNLFANGHVTAAQLAAGSQTLRNRVGEIERQLAEVAQLGPLAELGSVDNVHRYWFGSRPDRSDGLSLMKRRAIVDELATVTVQPTYRGARFNPELIEIDWKVAA

SEQ ID NO: 59722 - DNA, 50 bp, Nocardia terpenica
  source 1..50: mol_type = genomic DNA
gtagttgccagctagcgtgttgccaatgcgacaggcgagttacaacacta

SEQ ID NO: 59723 - DNA, 40 bp, Nocardia terpenica
  source 1..40: mol_type = genomic DNA
caagttcggcgtcaccgccaatgccatcgctcccggtttc

SEQ ID NO: 59724 - DNA, 40 bp, Nocardia terpenica; identical to SEQ ID NO: 59723
  source 1..40: mol_type = genomic DNA

SEQ ID NO: 59725 - DNA, 50 bp, Nocardia terpenica
  source 1..50: mol_type = genomic DNA
gtagttggagatgtgagtcttgccaaagctccaggctgaatacagccctg

SEQ ID NO: 59726 - protein, 582 aa, Rhodococcus pyridinivorans
MIRHMGGKPKTAKRALIVVRLSRVTEATTSPERQLQACRELCAQRGYEVIGVAEDLDVSAGATTPFDRPQLGKWLRERHHEVDVLVFYRMDRLVRRLLDLAEMIRWAQDHRIVLVSATESFLDLSQPFGDIIALLVAKVAEMELEAISARNHAAFKHNFAAGKWRGGVPPWGYKPERVDGWRLVQDPEQVEVIHEVVKRVLAGEPLRAIAHDLTRRGVLTPRDRFAQLRGREVRGYEWHSAPLKRALTSRTLLGQVVGREPVLDEDGNPVRNSRGHRVLGPERVLTHDSGRPLVRAEPILTRTMFDRVARELKSRENRKEPTVRAKGLLTGVLVCGVCGRGAYRLKGGQGRKPRYRCASAQYAATCENRSIPLELAEQTLEDRLLSVLGDMERMRRVWFEGSDHSDELAEVDEALADLTDLVGTGAYRRGTPQRARLDERIAALAARREELAAMPQEPAQWRYEGTGQNFGDWWATAPLEERNVWLRENVSMRWRAHSEGVRTVVDDIEIAMKAPDLDGGVLLEPLTELARRKAAGAWSAAGLGDLPEALAAVWMRQGPAQPSVVEEEPERPRRKGAAKRRR

SEQ ID NO: 59727 - DNA, 50 bp, Rhodococcus pyridinivorans
  source 1..50: mol_type = genomic DNA
cggtatcaaacttgaactatggagtactccatcgtgcggctttaacaccg

SEQ ID NO: 59728 - DNA, 40 bp, Rhodococcus pyridinivorans
  source 1..40: mol_type = genomic DNA
cgcaatggtcccgatcgcatattccgccgtcgacatgccg

SEQ ID NO: 59729 - DNA, 40 bp, Rhodococcus pyridinivorans
  source 1..40: mol_type = genomic DNA
cgcaatggtcccgatcgcactttccgccgtcgacatgccg

SEQ ID NO: 59730 - DNA, 50 bp, Rhodococcus pyridinivorans
  source 1..50: mol_type = genomic DNA
cagtatacaatccgagctatttggctctccatcctgtgctcttcacactg

SEQ ID NO: 59731 - protein, 571 aa, Clostridium scindens
MTGIDTGKDTRKYAIYSRKSKFTGKGESIDNQITRCKEYLKFHYDVENEDSIIVFEDEGYSGKNTNRPQFQIMLDACKRKEIKVIICYQLDRISRSVKDFSILSDQLTEWGISFVSVKESFDTSTPMGKAMMMITSVFAQMERENLAERLKDNFQTLARSGHWLGGTTPTGYKSTVTTGSIASNGKTRKAYMLEPIPEESRTIQKIFSTYLETNTLTMVEKLLQEKHIYTRNNIPFKCFAIKNILKNPVYASADETVWDYFHELNANLCFEKSECSSEYGIMAFNKSNQTSGIPHDMKEYEAWIIAIGKHTPLVSGKDWVKIQNMLALNASKTFRKPRSNQALLSGLIFCGHCGNKMRPKMGHSTKPDGSRSFNYLCETKEKSRQKNCAMKNAPGNLLDEMVCNEIKKLAEDDSVFLKQWRETKKALLAKGDTHFAELKSLKASLSEKEKQINNLLISLAESADSPAHAYIQERINSIHEEKIQLEKRIKELSEISENQSVMLEAELEFVPKMLASFSQSFDSMSVEEKRSALRLFIDKVVWNGETVDLYLMGSSDTSLSKVSEPLQWGSQ

SEQ ID NO: 59732 - DNA, 50 bp, Clostridium scindens
  source 1..50: mol_type = genomic DNA
cagagccgctacagtggggtagccaaagcaaccccattgcaacggctctt

SEQ ID NO: 59733 - DNA, 40 bp, Clostridium scindens
  source 1..40: mol_type = genomic DNA
gggggccgtatgtatttccaaaactgatattaatcgctac

SEQ ID NO: 59734 - DNA, 40 bp, Clostridium scindens; identical to SEQ ID NO: 59733
  source 1..40: mol_type = genomic DNA

SEQ ID NO: 59735 - DNA, 50 bp, Clostridium scindens
  source 1..50: mol_type = genomic DNA
cagagctgctcaaatgggatccacaaagcagcgccagtccaagagctgtt

SEQ ID NO: 59736 - protein, 487 aa, Bacillus mobilis; identical to SEQ ID NO: 39756

SEQ ID NO: 59737 - DNA, 50 bp, Bacillus mobilis; identical to SEQ ID NO: 39757
  source 1..50: mol_type = genomic DNA

SEQ ID NO: 59738 - DNA, 40 bp, Bacillus mobilis
  source 1..40: mol_type = genomic DNA
cttttctcgaatttcagcgtccgcatggcgcattacaaat

SEQ ID NO: 59739 - DNA, 40 bp, Bacillus mobilis
  source 1..40: mol_type = genomic DNA
cttttctcgaatttcagcgtacgcatggcgcattacaaat

SEQ ID NO: 59740 - DNA, 50 bp, Bacillus mobilis
  source 1..50: mol_type = genomic DNA
tattctctaattttattgtcagaatatcagatatgcattaatgcacaaaa

SEQ ID NO: 59741 - protein, 552 aa, Vibrio cholerae
MPKLYIFRRVSSKRQTNKTGLKIQVRPQTVERLLSEHGLSEVVDLGAEIASASKGKHIEEGTILKRFLTKCERGEIEQGSILAVYSLDRLSRLEKLGEAKSLIYLPITNNGVSIFGEIDNFLYKPHDVLSEILSSLVFERAAEESRAKKNRNIDALAANLAQYQRDGQYTTKLGKSPSWINHKTGKLNEEAVLWREVINCYTSGQYKNLSALHTAMQLPIPYNTLSKVINNAHKTLIGTKVIKGVELVEFYEPLLTEEEYNRLLIHVRQMGTGKGKAVATTKTENIWLLKGLAVCPECGSLCGSFKNGASVKDKVRYNYRCNAAINKHCNSPTYNLNPIEAIVTLLSADYLHEVSQRETNTELNAKIEATQVEVERLETQLERAGVLINEYLSEELVKAIPKYREQLENAQNSLQTLLALASNHTPIDERLLSAEIILDKANPERMKLVKLLQGCINRVIVTRKSVKKGDTRFSPKIYTGCDYSLLCVRVEFVDGNIRVFDSVLRDNLRLNLSVSNGTRSIGLDNFHRFSRRLREYDLIKYCVINNRKLKIT

SEQ ID NO: 59742 - DNA, 50 bp, Vibrio cholerae
  source 1..50: mol_type = genomic DNA
acgtggtaatagctttacttacccacagcaaaacgctactattaccacat

SEQ ID NO: 59743 - DNA, 40 bp, Vibrio cholerae
  source 1..40: mol_type = genomic DNA
cccgcctaaggggctggcaacgcattagcaccaaactcaa

SEQ ID NO: 59744 - DNA, 40 bp, Vibrio cholerae
  source 1..40: mol_type = genomic DNA
cccgcctaaggggctggcaaggcattagcaccaaactcaa

SEQ ID NO: 59745 - DNA, 50 bp, Vibrio cholerae
  source 1..50: mol_type = genomic DNA
ccttgataacagggttacttaccaagagtcaactgggtttattaccaaat

SEQ ID NO: 59746 - protein, 552 aa, Vibrio cholerae
MPKLYIFRRVSSKRQTNKTGLKIQVRPQTVERLLSEHGLSEVVDLGAEIASASKGKHIEEGTILKRFLTKCERGEIEQGSILAVYSLDRLSRLEKLGEAKSLIYLPITNNGVSIFGEIDNFLYKPHDVLSEILSSLVFERAAEESRAKKNRNIDALAANLAQYQRDGQYTTKLGKSPSWINHKTGKLNEEAVLWREVINCYTSGQYKNLSALHTAMQLPIPYNTLSKVINNAHKTLIGTKVIKGVELVEFYEPLLTEEEYNRLLTHVRQMGTGKGKAVATTKTENIWLLKGLAVCPECGSLCGSFKNGASVKDKVRYNYRCNAAINKHCNSPTYNLNPIEAIVTLLSADYLHEVSQRETNTELNAKIEATQVEVERLETQLERAGVLINEYLSEELVKAIPKYREQLENAQNSLQTLLALASNHTPIDERLLSAEIILDKANPERMKLVKLLQGCINRVIVTRKSVKKGDTRFSPKIYTGCDYSLLCVRVEFVDGNIRVFDSVLRDNLRLNLSVSNGTRSIGLDNFHRFSRRLREYDLIKYCVINNRKLKIT

SEQ ID NO: 59747 - DNA, 50 bp, Vibrio cholerae; identical to SEQ ID NO: 59742
  source 1..50: mol_type = genomic DNA

SEQ ID NO: 59748 - DNA, 40 bp, Vibrio cholerae; identical to SEQ ID NO: 59743
  source 1..40: mol_type = genomic DNA

SEQ ID NO: 59749 - DNA, 40 bp, Vibrio cholerae; identical to SEQ ID NO: 59744
  source 1..40: mol_type = genomic DNA

SEQ ID NO: 59750 - DNA, 50 bp, Vibrio cholerae; identical to SEQ ID NO: 59745
  source 1..50: mol_type = genomic DNA

SEQ ID NO: 59751 - protein, 542 aa, Tyzzerella nexilis
MIYQKGSNLFNVAIYIRLSREDGDKEESDSVGNQRKLLTEYVNKHDEFILYDVYIDDGFTGTNFNRPDFHRMIADIEDNKVNCVVVKDLSRFGRDYIDTGRYLERIFPELNVRFISVTDNIDSMKQAYDMLLPIKNIFNEQYARDISNKIQATVKSKQKAGEFIGAFTSYGYKKSPANKNKLVIDEYASEVVKRVFTMYAQGIGKQSIAKILNAEGILCPSEYKKLNGENYKNCNRLEKTSYWTYSTIKVMLQNELYIGNMVQGKKHQRMRSKQRPVEKENWIRVENTHEPIIDRQLWDKVQKLLTKKHRDIDLETNKNIFAGFIKCGDCGRAMMKNFWRRADGSKSYSFYCGTYKRSGKDYCTPHTLPFQVLNDIVLGDLKQIIRNVENLQELVKSQSFTATKIRKSTDIELTKLKAELERVKKLKKSIYEDYKDELISKEEFLSYREDYQQKETLYSKQIETLEEKKKESVTEDVFETPWLRRLLELKDIEELDRDIIVEMIDQITVYENRKLKISYNFGNELEHLFSSVYCEDLEKKAI

SEQ ID NO: 59752 - DNA, 50 bp, Tyzzerella nexilis; identical to SEQ ID NO: 13322
  source 1..50: mol_type = genomic DNA

SEQ ID NO: 59753 - DNA, 40 bp, Tyzzerella nexilis
  source 1..40: mol_type = genomic DNA
aattatgctcgatgccggacacggcggacgtgatcccggt

SEQ ID NO: 59754 - DNA, 40 bp, Tyzzerella nexilis
  source 1..40: mol_type = genomic DNA
aattatgctcgatgccggattcggcggacgtgatcccggt

SEQ ID NO: 59755 - DNA, 50 bp, Tyzzerella nexilis; identical to SEQ ID NO: 8825
  source 1..50: mol_type = genomic DNA

SEQ ID NO: 59756 - protein, 542 aa, Eubacterium rectale; identical to SEQ ID NO: 13321

SEQ ID NO: 59757 - DNA, 50 bp, Eubacterium rectale; identical to SEQ ID NO: 13322
  source 1..50: mol_type = genomic DNA

SEQ ID NO: 59758 - DNA, 40 bp, Eubacterium rectale; identical to SEQ ID NO: 34623
  source 1..40: mol_type = genomic DNA

SEQ ID NO: 59759 - DNA, 40 bp, Eubacterium rectale; identical to SEQ ID NO: 34624
  source 1..40: mol_type = genomic DNA

SEQ ID NO: 59760 - DNA, 50 bp, Eubacterium rectale; identical to SEQ ID NO: 8825
  source 1..50: mol_type = genomic DNA

SEQ ID NO: 59761 - protein, 542 aa, Coprococcus comes
MIYQKGSNLFNVAIYIRLSREDGDKEESDSVGNQRKLLTEYVNKHDDFILYDVYIDDGFTGTNFNRPDFHRMIADIEDNKVNCVVVKDLSRFGRDYIDTGRYLERIFPELNVRFISVTDNIDSMKQAYDMLLPIKNIFNEQYARDISNKIQATVKSKQKAGEFIGAFTSYGYKKSPANKNKLVIDEYASEVVKRVFTMYAQGIGKQSIAKILNAEGILCPSEYKKLNGENYKNCNRLEKTSYWTYSTIKVMLQNELYIGNMVQGKKHQRMRSKQRPVEKENWIRVENTHEPIIDRQLWDKVEKLLTKKHRDIDLETNKNIFAGFIKCGDCGRAMMKNFWRRADGSKSYSFYCGTYKRSGKDYCTPHTLPFQVLNDIVLGDLKQIIRNVENLQELVKSQSFTATKIRKSTDIELTKLKAELERVKKLKKSIYEDYKDELISKEEFLSYREDYQQKETLYSKQIETLEEKKKESVTEDVFETPWLRRLLELKDIEELDRDIIVEMIDQITVYENRKLKISYNFGNELEHLFSSVYCEDLEKKAI

SEQ ID NO: 59762 - DNA, 50 bp, Coprococcus comes; identical to SEQ ID NO: 13322
  source 1..50: mol_type = genomic DNA

SEQ ID NO: 59763 - DNA, 40 bp, Coprococcus comes
  source 1..40: mol_type = genomic DNA
tatcatgctcgatgccggtcacggaggacgtgatccggga

SEQ ID NO: 59764 - DNA, 40 bp, Coprococcus comes
  source 1..40: mol_type = genomic DNA
tatcatgctcgatgccggtttcggaggacgtgatccggga

SEQ ID NO: 59765 - DNA, 50 bp, Coprococcus comes; identical to SEQ ID NO: 8825
  source 1..50: mol_type = genomic DNA

SEQ ID NO: 59766 - protein, 542 aa, Blautia faecis
MLYQKGSNLFNVAIYIRLSREDGDKEESDSVGNQRKLLTEYVNKHDDFILYDVYIDDGFTGTNFNRPDFHRMIADIEDNKVNCVVVKDLSRFGRDYIDTGRYLERIFPELNVRFISVTDNIDSMKQAYDMLLPIKNIFNEQYARDISNKVQATVKSKQKAGEFIGAFTSYGYKKSPANKNKLVIDEYASEVVKRVFTMYAQGIGKQSIAKILNAEGILCPSEYKKLNGENYKNCNRLEKTSYWTYSTIKVMLQNEIYIGNMVQGKKHQRMRSKQRLVEKENWIRVENTHEPIIDRQLWDKVQKLLTKKHRDIDLETDKNIFAGFIKCGDCGRAMMKNFWRRADGSKSYSFYCGTYKRSGKDYCTPHTLPFQVLNDIVLGDLKQIIRNVENLQELVKSQSFTATKIRKSTDIELIKLKAELERVKKLKKSIYEDYKDELISKEEFLSYREDYQQKETLYSKQIETLEEKKKESVTEDVFETPWLRRLLELKDIEELDRDIIVEMIDQITVYENRKLKISYNFGNELEHLFSSVYCEDLEKKAI

SEQ ID NO: 59767 - DNA, 50 bp, Blautia faecis; identical to SEQ ID NO: 13322
  source 1..50: mol_type = genomic DNA

SEQ ID NO: 59768 - DNA, 40 bp, Blautia faecis; identical to SEQ ID NO: 34633
  source 1..40: mol_type = genomic DNA

SEQ ID NO: 59769 - DNA, 40 bp, Blautia faecis; identical to SEQ ID NO: 34634
  source 1..40: mol_type = genomic DNA

SEQ ID NO: 59770 - DNA, 50 bp, Blautia faecis; identical to SEQ ID NO: 8825
  source 1..50: mol_type = genomic DNA

SEQ ID NO: 59771 - protein, 514 aa, Vibrio vulnificus
MKAYIYSRISSAIQKKGHGLDRQQDIALTYAAQLGFDISEEVLQDVASGYHGKQMEGRLGVFLEGIKRGKIESPAALIVESLDRLGREHTMDALPRFIDIVNHGVEIHEVSTGIVYNREETHKIHIAIAIMERAHNESLMKSKRARAAANKRLQRAQQGENVVINVNLPCWIRSQDGKLELVPEYAVVIRRIFELYLEGKGSNKVAQILREENHPYFTSNIHSKKIRSRVWTDQRVMDIIKKDSTCGVFRSTANPDTVIDGYYPAAIDKATFERAQVLRMSRVRTAKKSKKGLNILSGLLRCGHCGSSLQYTRSYSNKKKTRMYENLRCRDRAARMNCDSRSVPLRPLEKLILGWVGTIPLFDIKAASNDELEQKKAELTQLEQQAENLVELLATGLTRVKDKYLQLEQQIDSAKKEISSLSVTNSSSIDKIDYFQAIDLENEEYREQVQQELALIIDRVSVKCDGEDAEIDIYLNSRIHNHQRFIGKKKQLDKARQTMRTLRPSAAHVDSFVE

SEQ ID NO: 59772 - DNA, 50 bp, Vibrio vulnificus; identical to SEQ ID NO: 42442
  source 1..50: mol_type = genomic DNA

SEQ ID NO: 59773 - DNA, 40 bp, Vibrio vulnificus
  source 1..40: mol_type = genomic DNA
taaagtccattatcatggcatgcttacggatggaaccgta

SEQ ID NO: 59774 - DNA, 40 bp, Vibrio vulnificus
  source 1..40: mol_type = genomic DNA
taaagtccattatcatggccagcttacggatggaaccgta

SEQ ID NO: 59775 - DNA, 50 bp, Vibrio vulnificus; identical to SEQ ID NO: 34655
  source 1..50: mol_type = genomic DNA

SEQ ID NO: 59776 - protein, 494 aa, Pseudomonas fluorescens
MLDNWERDNPTFTLNRDLTFKDLGISGRSGKHLKNGFGKLLEAIEKGAIGVGDVVLVEAIDRAGRMEPGIMIRVLTDILNAGVALVTLDDGQKYTQEALRGGSLYILVGKVQAAFNYSQSLSDRMKASYKSRNVLAASGVIPKRYTPVWLTSEGELLGEIAPFIKQAFEDYAAGLGERRIYERILEAGGDKHDCFIKMAPSTVKRWMKNKTAIGEWQGIPNVYPRVVEPDLFYRVQKRLSEGYVQRAAPTKHKYTGLVVCGECGKNFNTKSYKNKANPPPPVMECSSRARRGSTACPNSKGIPEAVIGVAFQLSCWDHISKALQGQVLTESMKREVVIDGLLSELSVKIAKVARAVAEVDDVEELIVALRALKAEKLSLEGEKKALSHEQATVKEKILNSAEIMKDPMKANALLQSVGYRIVCNLDRTIHTPVGVFTYQGWGRAEDVHKVVTHEGVLLKLPVARQTQTPRKRDNVKVDVMSVLEGKALRFGVRS

SEQ ID NO: 59777 - DNA, 50 bp, Pseudomonas fluorescens
  source 1..50: mol_type = genomic DNA
gatgtatacattgcagattgttgtgtccagcacgcggcaatgtgggaatc

SEQ ID NO: 59778 - DNA, 40 bp, Pseudomonas fluorescens; identical to SEQ ID NO: 54218
  source 1..40: mol_type = genomic DNA

SEQ ID NO: 59779 - DNA, 40 bp, Pseudomonas fluorescens
  source 1..40: mol_type = genomic DNA
ctcgtagtacaccggctggatgaagatcatgtcgtaaatc

SEQ ID NO: 59780 - DNA, 50 bp, Pseudomonas fluorescens
  source 1..50: mol_type = genomic DNA
gattcttatttctaagtttgttgtatccagtacacgagacagtgtgaagt

SEQ ID NO: 59781 - protein, 505 aa, Microbacterium maritypicum
MTRAALYLRQSMDRDGRSEGIDRQRARCRALVESRGWEVAGEYVDNDVSASKPRGKGTAWHRLTEDAKAGRVDVVVAVDQDRILRGIRDLVTLMDVGAKITTVDGEIDLATADGEFRATLAAGLARFEVQRKSERQKRANAHRRERLLPSGGRRAFGYSKLAVGASAEWPKRVTADGREYPDYGHEPLEPEATAVRRGYAMLLAGATLRSIARAWNADGLTTTAGKPFEAYSVRNVLANPRNAGLVAPPRSATEGQSAQQNLRLADLPVGSWEPLVTPETWAAARDLLADPVRRSNPGALPKSLLSGIARCGVCGGPMKAGVVRGIRSYRCSESPHLSRKRDDADHFITHVVLDRLARPDAVEILRRDDAPNVAELRARLLAKQQGEANVLALVAGGHTTLAKAEAMLRDLRAEMGALEAQMSDAGRVDVLGDVVARAEDAGAAYEARWAAVAEAWQALDVDRQRAIVRALLSIEMRSPGKGSRAPRDAAGRLAHTEATLALTWH

SEQ ID NO: 59782 - DNA, 50 bp, Microbacterium maritypicum
  source 1..50: mol_type = genomic DNA
ctatgtcctagctcgatcacttgagtaaaaggatcgattcaggtcatact

SEQ ID NO: 59783 - DNA, 40 bp, Microbacterium maritypicum
  source 1..40: mol_type = genomic DNA
gtacgatcgcgttctgcgtgtggcttggacgatggcagat

SEQ ID NO: 59784 - DNA, 40 bp, Microbacterium maritypicum
  source 1..40: mol_type = genomic DNA
gtacgatcgcgttctgcgtagggcttggacgatggcagat

SEQ ID NO: 59785 - DNA, 50 bp, Microbacterium maritypicum
  source 1..50: mol_type = genomic DNA
gtatgtccttctatggtcaccagaagaaagagatgggaacaaggcaaact

SEQ ID NO: 59786 - protein, 544 aa, Clostridium acetobutylicum
MEKIIEKKENLKKVYGYVRLSRDEDKEQASLENQKQIIRTYAKNNGYILVKIFEDDNVSGMTFDREGLNELKEVIENGNIDILLVKDLSRIGRHKAYSALFMEELRSKKIKVISIAENLDNMDENNDILIGFKQILNEQYAKDISRKIRAAFHQKQKEGLVIVPPFGYEKNNQTNKIEIDEECAGVVKKIFSLYIGGFGYKKIAQQLTEEKVHTPSWHQFQKSGKVYHAGKKWIGQDIWSDRTIARILSNEAYIGTLKCHTTTRSVIYKTRGLIPKDEQIIHENFYPPIIDEEVWEKTKAIKKNRTRGHVRASGNSKIHKYAGLLICKDCGSGFVAKKRKWNGIERIEYICNAYHRFGKTVCTPHRIREEELDNILCGFLERLKETCEENLNRADKFITKWNSKKRNYDKSIDKIQREIFSLKTEVKAYAKQLAKQLINEELFQELTQETKEKIDILENQIDTFQEVKKISKNAKAGLLKSKEIIDKIIEEKDLVSADLQMLVDKIIVHQSCTGELELDIRVNTPFKLHSELKSTFTVIEEQSS

SEQ ID NO: 59787 - DNA, 50 bp, Clostridium acetobutylicum
  source 1..50: mol_type = genomic DNA
actgtcatagaggagcagtccagttgtgagggcgactactcggtgattag

SEQ ID NO: 59788 - DNA, 40 bp, Clostridium acetobutylicum
  source 1..40: mol_type = genomic DNA
attggcagacgcgcacgtttgaggggcgtgtgggataacc

SEQ ID NO: 59789 - DNA, 40 bp, Clostridium acetobutylicum
  source 1..40: mol_type = genomic DNA
attggcagacgcgcacgttttaggggcgtgtgggataacc

SEQ ID NO: 59790 - DNA, 50 bp, Clostridium acetobutylicum
  source 1..50: mol_type = genomic DNA
actttcagagctttgcagaccaaatttgaggggaaggggttggtgttttg

SEQ ID NO: 59791 - protein, 525 aa, Erysipelotrichaceae bacterium I46
MIHSFQPEDLIVLQADELSCDPTAVQDILDLSFHMKIRVISILDRITIKAQGAYLRKMEHMTFTSVVRQKTGNFWRADIYDKLGIESKEVKKKKRIGIYCRVSTREQTLGYSIDNQKNKCRDYMNLFNDDYVEPVFYIDEGHSASTLERPSIKQMLQDVRNHKLNEIIIYKLDRLTRNVIDTYELLSMFTENDVNLVAVMDNLDITTANGMLVVGILAIFAQWERETIIERTNDGLLQMAMEGKYPKSGVLLGYTKDKDKYLSIDEETAPIIRSIFMYARAGYPLSDIRIKIKEIYDYKLRTDRIKRIIFENGYYGEFTYKDYVFPDVMQAIVSKEDAMEAKKVVGKRSVAYGKEQNKFYFRNKITCNNCGGLLGGIPTYKRNKKYYYYYCKKCNQRINQDVISHQIIHDMIIYTDKTDYKNEAEVILRRINSLQRKLKTVSRQYAEDFLSDEAYDTVVKSINLKLNKEKARFGRIKIINGHNWNELSDSEKRGFVEQTILTMRVDLNKKEIIKIEYHENDSKKK

SEQ ID NO: 59792 - DNA, 50 bp, Erysipelotrichaceae bacterium I46
  source 1..50: mol_type = genomic DNA
tggttcgtgcatgtaacgcacgtggcaccatgtgcaaatttaacgaacta

SEQ ID NO: 59793 - DNA, 40 bp, Erysipelotrichaceae bacterium I46
  source 1..40: mol_type = genomic DNA
ggttcgaatcccgtacgcgtcaccaatagacagataaagc

SEQ ID NO: 59794 - DNA, 40 bp, Erysipelotrichaceae bacterium I46
  source 1..40: mol_type = genomic DNA
ggttcgaatcccgtacgcgggaccaatagacagataaagc

SEQ ID NO: 59795 - DNA, 50 bp, Erysipelotrichaceae bacterium I46
  source 1..50: mol_type = genomic DNA
tagttcatgatgttagtgcatgttggtccatgtgcaataggaatcaaata

SEQ ID NO: 59796 - protein, 479 aa, Rhodococcus fascians
MTDGDGTSGRIRAATYVRISEDPTGQERGVTRQADDCDALADGRGWTVVARYRDNDISALRGKPRPGYQALLDAAERGEFDHIVIYGLSRLWRSRSERAVAMDRLSRARVGVAMVKGTDLDFTSASGRMYAGILGEFDTAESELKAERVARASLQRAREGKANGAVAFGWRRDYVRDASGRVLDWRDLVDERQASVVRSIVGDLLAGKTLRSITARLNEARVPSPQGKRFITSSVRKLALRELNVGLRTHRGEVIGKAALEPLVSELDHSRVKALLADPVRRTQKAASRTHLLTFGIGKCGVCGGVLAVKRTGPAGAKQALYVCKESGCVGRRESWVDDLVVATVCHRLARPDAWDVFAPDESVAAAAGERVSAIRARLDGAADMYAAEKIDASQLARISERLTRELEEAEGIAIRADTPRALTIMKMAESGDVRASWDALELSQRRAVLETLQVQVVIHRARGGPGFKPESVSVTWGS

SEQ ID NO: 59797 - DNA, 50 bp, Rhodococcus fascians
  source 1..50: mol_type = genomic DNA
gttgtccgcccaagacccccagggaaccctaaagactctcaaggggtaat

SEQ ID NO: 59798 - DNA, 40 bp, Rhodococcus fascians
  source 1..40: mol_type = genomic DNA
tttgccgacgccgccggggaacagggaatcaccggtgaag

SEQ ID NO: 59799 - DNA, 40 bp, Rhodococcus fascians
  source 1..40: mol_type = genomic DNA
tttgccgacgccgccggggtgcagggaatcaccggtgaag

SEQ ID NO: 59800 - DNA, 50 bp, Rhodococcus fascians
  source 1..50: mol_type = genomic DNA
cttgtcggcctgtcacccaatgggtgctctctagaggacagaggggtaaa

SEQ ID NO: 59801 - protein, 548 aa, Vibrio alginolyticus
MRLAYSYIRFSSLEQAKGDSFRRQTALAKDYCDKHGLKLADLTLRDLGKSAYHGTHFKDGALGEFINAVKEGTIPAGSYLLVESMDRLSREKISIALGRFMELLGLGISIVTLQDNRTYTTQSLDRIEDLMLSLVFMMRAHEESATKSKRLREAHKEKRKQARENLKPTGYNTPHWIELTESGYELIPDRVELLKRIFQMTIDGLGAIAIHKQLNQEAIKPWGRSKTGWHTTYIKKILRARTVLGEYQPFKTENGKRVKDGEPIQGYYPEAIDVDTFKRANLAIESRQGKTSGTRKNVINNLFTGLVVCKNCGATMHYLNKGSGSKGGQYLVCSRARQGAHHDGIFCKYASMRYPIVEEAILTIAATLNLKLHTASSQEESAYIKEQLSDLSRNLKTVEASILRLVDLLDSSTGSKALLTKLEQREAQQQELEQRYRELEKRLDEIELTPKSNNVWKELKHTLKTLKVEAADRTNVTLRSKVNSQLSKCVDSIEFDAISKLVTINIDESREVLIKFDMRQDSYVIKPSWDMREFLPATYTVKEALRKR

SEQ ID NO: 59802 - DNA, 50 bp, Vibrio alginolyticus
  source 1..50: mol_type = genomic DNA
aggggtgattccgattacaacaagctattagagtgtctgaaataacccct

SEQ ID NO: 59803 - DNA, 40 bp, Vibrio alginolyticus; identical to SEQ ID NO: 5183
  source 1..40: mol_type = genomic DNA

SEQ ID NO: 59804 - DNA, 40 bp, Vibrio alginolyticus
  source 1..40: mol_type = genomic DNA
cgctggaaaccacaacttatatttccttggcccgccaggt

SEQ ID NO: 59805 - DNA, 50 bp, Vibrio alginolyticus
  source 1..50: mol_type = genomic DNA
aagagtgatctcctttacttaaagtaatctgattgtagataataacatct

SEQ ID NO: 59806 - protein, 464 aa, Mediterraneibacter glycyrrhizinilyticus
MKSKTLRCAIYIRVSTTEQMMHGKSLEAQKDYLIHYAKEHDMNIVGIYADEGKTARKELKRRKAIQELVKAVERDEIDVILFWRLDRWFRNLSDFYKVQDILDQHNVRWISASEPGINMETRDGRLQLNVVLSIGQNEVDTTSERIKFVNEASIRQGKVIFGDSNMPIGYIVGTVDGVKRMVKDPEKEDLVNAFYRYFRTHQSKMKTLKFIQENYDPTFSYSQLRNMLESDFYHGAYRDNPHYCPAYLTEKEWAEIQEISNRNVKHPASGRVYLFSGMMRCPVCGQLLAGRGGSSIINRKTRETRTYCYYRCNKACIDHMCTYRHNVSQNLIEEYLISNLEEEYNRYKIQSQNIHSKADLPKKKRTPEQVKKEMQRLNLLFQKERIEWDYYNEEYEKLTTELSSLEESDQKPKTNFDNIEKILHNDFRKTYDNLSPENRRAFWRSIIKEIHINTSHEVTGIDFY

SEQ ID NO: 59807 - DNA, 50 bp, Mediterraneibacter glycyrrhizinilyticus
  source 1..50: mol_type = genomic DNA
tcttgtactaactataccgccccatttggagtcatgtagttagtacaaga

SEQ ID NO: 59808 - DNA, 40 bp, Mediterraneibacter glycyrrhizinilyticus
  source 1..40: mol_type = genomic DNA
tttggatcttgtatgtgggtttggagcagataaagtcatg

SEQ ID NO: 59809 - DNA, 40 bp, Mediterraneibacter glycyrrhizinilyticus
  source 1..40: mol_type = genomic DNA
tttggatcttgtatgtgggagtggagcagataaagtcatg

SEQ ID NO: 59810 - DNA, 50 bp, Mediterraneibacter glycyrrhizinilyticus
  source 1..50: mol_type = genomic DNA
tcctgtactaaagtctccgccccaagaggagatatggttttgttaccata

SEQ ID NO: 59811 - protein, 497 aa, Streptococcus constellatus
MSKIALYIRLSVEDQMKKDESESIINQRYFLNDFLDRNDEFKSFQREEYIDDGYTGTNEKRPSFQRMLEEVKNGKINAIIVKDLSRFMRDYISLGDYLENIFPFLGIRFIAINDGYDSAKEKGNGTDLDIQFKGLLYDFYTKDISQKVKTVTTELKKQGKFLAWSPPFGYMKDPDDKHNIIIDEKTAWIVRKVYDLALTGLASRKIAAVMNEENIPTPNERKKELTNMDYEYNIVSSDTRDAPTWTNGTVVDILSNENYTGTYVFNMQEKSVLTPGSFKFNPKEEWGRVYDHHEAIISREEFDKVQEIKEKNSFLKGKNTDYPWRTKSPLQGFARCPTCNHILGLTQSKFKRPDGSMRIHKYFHCRICKCNNVEHRNSRVDKLEDQVLALIKEKYGEVEVKPKEKISIKDIEKKIEKLQAKKMADFEKYKLGKMTKAKFVENKNQIDNEISNLEEKIKLYSNETEVVTDNELTRELMEKYVESVICEGSIVQKTIWK

SEQ ID NO: 59812 - DNA, 50 bp, Streptococcus constellatus; identical to SEQ ID NO: 36767
  source 1..50: mol_type = genomic DNA

SEQ ID NO: 59813 - DNA, 40 bp, Streptococcus constellatus
  source 1..40: mol_type = genomic DNA
catcctcgatttcttcgctggttcggggacaacgggtcat

SEQ ID NO: 59814 - DNA, 40 bp, Streptococcus constellatus
  source 1..40: mol_type = genomic DNA
catcctcgatttcttcgctgattcggggacaacgggtcat

SEQ ID NO: 59815 - DNA, 50 bp, Streptococcus constellatus
  source 1..50: mol_type = genomic DNA
gctgtcagtagcataacaggagaggagtttgaggacaggaaaaccacaca

SEQ ID NO: 59816 - protein, 497 aa, Streptococcus agalactiae; identical to SEQ ID NO: 39046

SEQ ID NO: 59817 - DNA, 50 bp, Streptococcus agalactiae; identical to SEQ ID NO: 14077
  source 1..50: mol_type = genomic DNA

SEQ ID NO: 59818 - DNA, 40 bp, Streptococcus agalactiae
  source 1..40: mol_type = genomic DNA
attttaggacttgtcatagggattatgggcaaccccgtgt

SEQ ID NO: 59819 - DNA, 40 bp, Streptococcus agalactiae
  source 1..40: mol_type = genomic DNA
attttaggacttgtcataggaattatgggcaaccccgtgt

SEQ ID NO: 59820 - DNA, 50 bp, Streptococcus agalactiae; identical to SEQ ID NO: 59815
  source 1..50: mol_type = genomic DNA

SEQ ID NO: 59821 - protein, 547 aa, Mycobacterium sp
MTTNRPLRALIVIRLSRVTDATTSPERQLKDCREVCKQRGYEEVGIAEDLDISGAVNPFDLKKRPHLARWLTQEHHAFDVIVVYRVDRLTRSIRHLQELMHWADDHGKLVVSATEPHFDTSSPFAPVVIALMGTVAQMELEAIRERNASAFKHNFSKGKYRGGVPPFGYVPVRDDSGDWRLVQDAAQVEVIREVVERVLAGEPLRAIAHDLTRRRVPTPRDAFAAHQGRDPKGYAWHSSRLKAFLTSQTLLGRVVSREQLTDAHGRPQRDAKGHKLFGDDVLVRGDDGSPVVRAEPILSRDVFQRVQAELETREVRSDPTSRTTGLLLRIIYCGVCGSPAYRLKGGPGRKPRYRCASHQGSSVQACGNKTIALDYADAEVERQILQNMGPLERKRRVWFAGNDHTDELSEIDAALTDIAEVIGTGQFKRGTTQRALLDERLAHLTTRQTELASVPSQPPGWVYEPTGETLADWWADASDEEKNIWLRQYGFRYEWRSHSGDNGRIVVDEFNQVGDLTLDLDADMLLGPLGDIVAALSEGSLPDDDGE

SEQ ID NO: 59822 - DNA, 50 bp, Mycobacterium sp
  source 1..50: mol_type = genomic DNA
cgggtgtaaagcgcgataatcgcgtagtcgattgtccatcattcataccc

SEQ ID NO: 59823 - DNA, 40 bp, Mycobacterium sp
  source 1..40: mol_type = genomic DNA
gggcatgtcgacggtcgagtacgcaatcggcaccatcgcg

SEQ ID NO: 59824 - DNA, 40 bp, Mycobacterium sp
  source 1..40: mol_type = genomic DNA
gggcatgtcgacggtcgagcccgcaatcggcaccatcgcg

SEQ ID NO: 59825 - DNA, 50 bp, Mycobacterium sp
  source 1..50: mol_type = genomic DNA
cgggtgatagggagaataatggccccgttgaatgtccagatgtcagacct

SEQ ID NO: 59826 - protein, 562 aa, Brevibacterium luteolum
MATASNNTDPVRDDPAQSLIDPPEGAAVAVSYLRVSTKEQAERGGRDEGFSIPAQREANRRKAGQLGAAVVEEFVDAGESARKADRPELMRMIRYVKQHKVAYCIVHKVDRLARNRADDVTIHLALQQAGVLLVSATENIDETPSGMLLHGIMSTIAEFYSRNLATEVTKGMTQKAAGGGTLGKAPIGYLNVRTRDELGREARTVELDPERAPLVQWAFKAYASGNWTVSQLHDELTSRGLMSLPTPKRPSKPMAVSSVHRLLTNPYYKGDVTYRGVNYKGAHQPLVPAEVWYQVQSVLTAHKSAAEATQIHDHYLKGTIHCGGCGSRLIVSNAKNRHGNVYCYFVCSGRHSKRTNCDRSAILIADVEKLIEDYYQRIQITPAQHEALAGMLHHEFDRLMSAEVDELAQLTANRDRLQHEQERLLQAHYADAIPLALLKREQDRILGELDQVSRRIDAHHGEYADARAHLDDALNLLTNCADIYNRCDDANRRLCNQAFFTKVYIDEDDELRVENNRPFEMLLDPEINANALTWAENADKTRTTTNDSVGKGSSLVRRVEVR

SEQ ID NO: 59827 - DNA, 50 bp, Brevibacterium luteolum
  source 1..50: mol_type = genomic DNA
gggttcgagccttgtgcgtcgggtggaggtaagggtgtgtggttgcacga

SEQ ID NO: 59828 - DNA, 40 bp, Brevibacterium luteolum
  source 1..40: mol_type = genomic DNA
cagaggcctgttattcggtggaggtaaggggactcgaacc

SEQ ID NO: 59829 - DNA, 40 bp, Brevibacterium luteolum
  source 1..40: mol_type = genomic DNA
cagaggcctgttattcggtacaggtaaggggactcgaacc

SEQ ID NO: 59830 - DNA, 50 bp, Brevibacterium luteolum
  source 1..50: mol_type = genomic DNA
aggcttcaggaagctgcctcaggtacagggaagggcaggaaggtgtacga

SEQ ID NO: 59831 - protein, 555 aa, Brevibacterium aurantiacum
MNATSPRTDPVRSLVDPPADGALAVSYLRVSTREQAERGGTDEGFSIPAQREANNRKAEQLGAVIVEEFIDAGASAKSADRPDLMRMIQYVKANKVAYCIVHKVDRLARNRSDDVAIHLALQQAGVMLVSATENIDQTPSGMLLHGIMSSIAEFYSRNLATEVTKGMTQKAIGGGTVGKAPIGYLNIRTTDELGREARTVELDPERAPMIQWAFKAYASGNWTVSQLHDELTSRGLTSVPTPKRPGKPLAVSSVHRMLINPYYKGDVIYRGTRYAGSHEPLVPPEVWYQVQSVLTAHKSAAEATQLHDHYLKGTVFCGACGSRLMVSNAKNRHGNVYPYFVCSGRHSKRTNCTRGAILIEDVEQMIERYYERVQITPAHREALGGMLHHEFDRLMAEETDELGQLTANRDRLQGEQERLLQAHYADAIPLALLKREQDRILGELDQVTRRIDAHHGEYADARAHLEDALNLLANCADIYARCDDTNRRLCNQAFFTKVYVEEDDELRVEYQRPYEMLLDPKINGNALNWAQDSKKARILANDSLGKGSSLVPWVG

SEQ ID NO: 59832 - DNA, 50 bp, Brevibacterium aurantiacum
  source 1..50: mol_type = genomic DNA
gttcgagccttgtgccttgggtgggcctccgtagggagtttgagaacatc

SEQ ID NO: 59833 - DNA, 40 bp, Brevibacterium aurantiacum
  source 1..40: mol_type = genomic DNA
gggtcttactttcgggtgggccccgtggggatcgaaccca

SEQ ID NO: 59834 - DNA, 40 bp, Brevibacterium aurantiacum
  source 1..40: mol_type = genomic DNA
gggtcttactttcgggtggaacccgtggggatcgaaccca

SEQ ID NO: 59835 - DNA, 50 bp, Brevibacterium aurantiacum
  source 1..50: mol_type = genomic DNA
atacgagccaatggggttgggaggaagcctgttgggtggatgagagcatc

SEQ ID NO: 59836 - protein, 548 aa, Rhizobium leguminosarum
MKAKANLALATPGRAALYLRVSTGRQAEHDLSIPDQRRQLRAYCEAKGIEVVAEFVEPGASATDDKRPEFQKMMDAASEKPAPFDCIIVHSFSRFFRDQFQLEFYFRRLAKNGVKLTSITQDLGDDPISGMMRQIMALFDEYQSKENAKHTLRAMRENARQGYWNGSRPPYGYRIIAAETRGQRTKKKIEPDPMLIDNVKLIFRLARVGDGDGPIGSRQIAGYLNDRGIRTQTGGRWGVGGVHQILTRETYIGKHRFNVSSWRNGVEKPADEVVEVEVEPIITVEEFEEVRDIMRSRSPQLRAPRFVSGPTLLGGVAFCADCGGAMTIRTSGKGTEYRYYTCCTAARQGPKGCKGRSIPMDELNDLVVTNVVERLLSPNFLEEALGALLKRRDDAAERETGRIVTLKRNALDAENKLTRLYEAIEAGLADLTDSNLKGRIAELKRIRDSAQADVERAEGRRGERIEITPEALRTFAAAAKERMQDPDGSFRRNYIQQLVQRAEVGTDEIRIVGSRARLLQTLVASGGKPGVETAAHGVRSFNLKWLPG

SEQ ID NO: 59837 - DNA, 50 bp, Rhizobium leguminosarum
  source 1..50: mol_type = genomic DNA
gcagtttcaatctgaaatggctccccgggaccgacgaagccacgaattac

SEQ ID NO: 59838 - DNA, 40 bp, Rhizobium leguminosarum
  source 1..40: mol_type = genomic DNA
tatctctaaaactggctcgccgggccggattcgaaccggc

SEQ ID NO: 59839 - DNA, 40 bp, Rhizobium leguminosarum
  source 1..40: mol_type = genomic DNA
tatctctaaaactggctcgtggggccggattcgaaccggc

SEQ ID NO: 59840 - DNA, 50 bp, Rhizobium leguminosarum
  source 1..50: mol_type = genomic DNA
gcagtctctgtgggaaatggctcctggggacaggcgtggccgtcacagac

SEQ ID NO: 59841 - protein, 508 aa, Clostridium jeddahense
MKRAVIYARYSTDNQSHETIEVQVERCAEYAKQKGINIVEAFADEAVSGMKSSRPELQKLFRMAETGAFEVVLIYDQSRFSRDIVDWFSFRRTMQNHDIQIVSVTQPYVGGDLNDTAVFATEGINALVNQIHVLQTRQKVVDAMNRIARQGLICGGSVLLGYDVKEKRYVINKYEAEAVRLLFTLYAAGKSYKYIIQTLNEKGYKTKAGKTFGTNSINALLNNERYIGVYVYNKMLPAKNGKRNSHRANPAAIKIPGAVPQIISNDLWDKVQARLHSNKVNARNKAKVDYLLSGKLFCGKCGMAMSGTRSNGKYYYYDCSGKKRLKNCDKAPIQKDRVEQMVVDYVKEMLATGNQRCEIAQKLFEAQGKLLGSAAGIRVEIEKRIKEIDRQLENINNAIAQGIFSASTLDKLTELEAAQKKLYTQLATTDKTEISAHKSIDDILHILEYIANVPIDDIEGKKTLLAFVYRVYVYDDKIRIITNPLDENTENVKGDDLPFSEGVASPAP

SEQ ID NO: 59842 - DNA, 50 bp, Clostridium jeddahense
  source 1..50: mol_type = genomic DNA
ttaccgttttcggagggtgttgcatcaccagcaccactcataaacgtaca

SEQ ID NO: 59843 - DNA, 40 bp, Clostridium jeddahense
  source 1..40: mol_type = genomic DNA
cgtaccggttcaagtccggtcaccagcaccataaaagaca

SEQ ID NO: 59844 - DNA, 40 bp, Clostridium jeddahense
  source 1..40: mol_type = genomic DNA
cgtaccggttcaagtccggagaccagcaccataaaagaca

SEQ ID NO: 59845 - DNA, 50 bp, Clostridium jeddahense
  source 1..50: mol_type = genomic DNA
tttcagtttacagaaggttttgaaagaccagaacaaaactttaatttaca

SEQ ID NO: 59846 - protein, 514 aa, Bacillus subtilis
MAKELTKTASVAAYLRKSREDADQDDTLARHRKQLIDLVKQRGFENVDWYEEIGSADSIKNRPVFSDLLKKIENDEYDAVCVVAYDRLSRGNQIESGIISKAFKDTETLLITPTRTYDWSIEGDEMLSEFESMIARSEYRVIKKRLKQGKINAVKNGRLHSGNVPYGYKWDKNDKTAKIDKEKHEIYRLMVKWFLDEEYSATEIADKLNELGIPSPSGGSTWYSEVVADILTNDFHRGLVWYGKYRARKNGIGIEKNPDSSSIIMHKGNHEPMKSDEEHGAIIRRISKLRTFKPGRKLNKNTFKLSGLVRCPRCGKVQVVHTPKNRNPHVRKCLKKSKTRTTECNNTTGIPEEALYKAIVMKIREYNEVLFSKDSSEKKDEEARTYMNQILSLHEKAISKSNKRIEKIKEMYMDEIIDKDEFKSRIDKEKKSILEAENEIRTLKESADYHDEIEHEQRKIKWNHEKVQEFIESDQGFTPSEINLILKLIISHVSYTMVKNEYGEFDVDLRVNFN

SEQ ID NO: 59847 - DNA, 50 bp, Bacillus subtilis
  source 1..50: mol_type = genomic DNA
agtagtacccgattaaggttgcttgtgtgaaacataatttgggtactaca

SEQ ID NO: 59848 - DNA, 40 bp, Bacillus subtilis; identical to SEQ ID NO: 32788
  source 1..40: mol_type = genomic DNA

SEQ ID NO: 59849 - DNA, 40 bp, Bacillus subtilis; identical to SEQ ID NO: 58304
  source 1..40: mol_type = genomic DNA

SEQ ID NO: 59850 - DNA, 50 bp, Bacillus subtilis
  source 1..50: mol_type = genomic DNA
attattaccttctgttagttactagggtgaaacatatggaaagtagtaaa

SEQ ID NO: 59851 - protein, 501 aa, Bacteroides finegoldii
MNKVNCVIWTRVSTKYQEDNGGSLQYQKDCCTDYAKSNGFNVINSFGGSHESAKTPGKFIKEMISFIKRNNTVKFLIVSQIDRFSRDTGQGSTILNQLLEIGVTIIEATTGLRTSDHNQKMMLQMKLCFAEWDNANRTDKFTKGRISCLQSGVYTGAVPLGYDKEGKSRNRTYTINEDGKLIRKAYQWKLQGMANFQIIEKLKPYGLNLSKQKLHHILTNVFYAGKIKHKMLNYEIIDGNQPAIISYTDFLRVQEILSGRTGVYKHKKETPQFPLKRHVMCSQDRTPFTAYTVKKKNIDYYKCNCVGCKTNVSAKKLHSKYEELLSRYDIPQPLVRVLRDTISKMLCENQSEQMQNINVLKKRKSEKENKLKSCKIRYGMGDIDDEIYTMTVEALQKDLGQITLELSKYDKDLSNHENRINDILVMCCHLGGLWRNADLTTAQKLQNLLFPQGILWDKEKDDYRTFGENAALSVIRRITETYRKEKEENPCGNSSSVNLCG

SEQ ID NO: 59852 - DNA, 50 bp, Bacteroides finegoldii
  source 1..50: mol_type = genomic DNA
ctcttcggtcaatttgtgcggatgatagccgtaaaacattcaccgactaa

SEQ ID NO: 59853 - DNA, 40 bp, Bacteroides finegoldii
  source 1..40: mol_type = genomic DNA
atcttttagtgtgcggatgataggactcgaacctacacgc

SEQ ID NO: 59854 - DNA, 40 bp, Bacteroides finegoldii
  source 1..40: mol_type = genomic DNA
atcttttagtgtgcggatgggaggactcgaacctacacgc

SEQ ID NO: 59855 - DNA, 50 bp, Bacteroides finegoldii
  source 1..50: mol_type = genomic DNA
cttttaggtttctgtgttgggaggggagtcataaaaggagaataggctaa

SEQ ID NO: 59856 - protein, 584 aa, Streptococcus gallolyticus
MKKNNVEIIKADSLVRRRGDNIERHLKRVAAYCRVSSDSEDQKNSYESQVRHYKDYISQRSDWELADIYADEGISGTQVGKRQDFQRLINDCVNGEIDYIVTKAIARFARNTLDTLKYVRMLKDMQIGVYFEEENIDTLTMDGELLLTILSSVAQQEVENTSAHVKKGLKMKMQRGELVGFQGCLGYDYDVETKQISINKKEAKIVRYIFERYLEGIGGKVIARELDELGYKSPRGLKHWNDTTVLGIIKNEKYKGDILMGKTFTVDPISKRRLSNFGEEDKYYIKDNHEPIISKEDFEKAQEIRLRRAGNKKTAANVNGKRERYSKMYAFSSMLECGFCGSILSRRSWHCRSDYRKVVWHCVTSIKKGKKFCKHSKGLEELAIEGAFMEAYRQLYHSNENLMTDLLETIESELNDNSLNKELKRITNKLRTLLKKEENLVNLRLEGKISDSIYNEKYNEISSEKEFLSEEKVNIETTLKSEVDVKKRLTEFKHSLSSQKMLTEFDRTVFESIVEKIIVGGVNSDGEIDPAMLTIIFKTGETQNKNGKKFKSKRKNAKLEPDKLCPQNSDEDKKLYSQGTDNTC

SEQ ID NO: 59857 - DNA, 50 bp, Streptococcus gallolyticus
  source 1..50: mol_type = genomic DNA
ttctcaaggaacagacaacacatgtcgagtgcgtagtgttgctacaacga

SEQ ID NO: 59858 - DNA, 40 bp, Streptococcus gallolyticus
  source 1..40: mol_type = genomic DNA
tttccgaatacgcatcacgtggagacggtagtcttgatgt

SEQ ID NO: 59859 - DNA, 40 bp, Streptococcus gallolyticus
  source 1..40: mol_type = genomic DNA
tttccgaatacgcatcacgaagagacggtagtcttgatgt

SEQ ID NO: 59860 - DNA, 50 bp, Streptococcus gallolyticus
  source 1..50: mol_type = genomic DNA
gtgtgcatgcacacataacacatgaagagtgcttacagttactacactga

SEQ ID NO: 59861 - protein, 476 aa, Mycobacterium kansasii
MHTPQTAIYLRQSLDRDQNQLAIDRQRDDLLKLCKRLGWANPVQYADNNVSATKGRRQRYEELCRDIADGVIGRVAVWDMDRLHRQPRELEGFIDLVERHHVELANVGGSVDLSTPAGRYFARTRGAAARFEVEHKAERQKSANRQRAKAGKAWNVRSFGWKGDKLVAREANAIRKASRDLLNGASLWSIAAQWNSQGLKTVKGCGWTGGTVRQVLTRASNAGLVTYDVRAAQAEARIKGKPVHLAGIVEGAEPSRPAIVDRDVWEGVCTLLADPKRHTGKSPGRKHLLSGIAICDACRKPIGTGVRGTKTGGKRAVYSCKRIGCMKIVRGVELTDKRVVDAITKRLAEPDAAVTLARPTVDAKALRDQIELLRGQIREAEADYDDGQITAARMNARIERVEAKLKPLQDTLLGSHMSADVKALAGRPDAAKRFAALPLDRQRGVIDTLATVTIHALNRPGGRFDPKAITVDFERK

SEQ ID NO: 59862 - DNA, 50 bp, Mycobacterium kansasii
  source 1..50: mol_type = genomic DNA
cggtatctcagatgaatgcccgacggcacgggaattggtctaagatatcc

SEQ ID NO: 59863 - DNA, 40 bp, Mycobacterium kansasii
  source 1..40: mol_type = genomic DNA
cgacaaacaactgcccgacggcgcggtgatctggacctct

SEQ ID NO: 59864 - DNA, 40 bp, Mycobacterium kansasii
  source 1..40: mol_type = genomic DNA
cgacaaacaactgcccgactacgcggtgatctggacctct

SEQ ID NO: 59865 - DNA, 50 bp, Mycobacterium kansasii
  source 1..50: mol_type = genomic DNA
gggtatgtcttgaaaatggactaatacacgtgttttgatcaatgatatcc

SEQ ID NO: 59866 - protein, 476 aa, Mycobacterium kansasii; identical to SEQ ID NO: 59861

SEQ ID NO: 59867 - DNA, 50 bp, Mycobacterium kansasii; identical to SEQ ID NO: 59862
  source 1..50: mol_type = genomic DNA

SEQ ID NO: 59868 - DNA, 40 bp, Mycobacterium kansasii
  source 1..40: mol_type = genomic DNA
cgacaaacaactgcccgacggcatcgtgatctggacatcg

SEQ ID NO: 59869 - DNA, 40 bp, Mycobacterium kansasii
  source 1..40: mol_type = genomic DNA
cgacaaacaactgcccgactacatcgtgatctggacatcg

SEQ ID NO: 59870 - DNA, 50 bp, Mycobacterium kansasii; identical to SEQ ID NO: 59865
  source 1..50: mol_type = genomic DNA

SEQ ID NO: 59871 - protein, 583 aa, Streptococcus suis; identical to SEQ ID NO: 9831

SEQ ID NO: 59872 - DNA, 50 bp, Streptococcus suis; identical to SEQ ID NO: 9832
  source 1..50: mol_type = genomic DNA

SEQ ID NO: 59873 - DNA, 40 bp, Streptococcus suis
  source 1..40: mol_type = genomic DNA
tttcttcacacaaacgcgacatgtgcatcatgaggatact

SEQ ID NO: 59874 - DNA, 40 bp, Streptococcus suis
  source 1..40: mol_type = genomic DNA
tttcttcacacaaacgcgatctgtgcatcatgaggatact

SEQ ID NO: 59875 - DNA, 50 bp, Streptococcus suis
  source 1..50: mol_type = genomic DNA
ggcattcgtttcccccagtgaacatccgttgagtgcctgttggtgctcta

SEQ ID NO: 59876 - protein, 585 aa, Streptococcus halichoeri
MKKNNVEIIKADSLVRRRGDNFERESKRVAAYCRVSSDSEDQKNSYESQVRHYKDYISQRSDWELAGIYADEGISGTQVGKRQDFQRLINDCVNGEIDYIVTKAIARFARNTLDTLKYVRMLKDMQIGVYFEEENIDTLTMDGELLLTILSSVAQQEVENTSAHVKKGLKMKMQRGELIGFQGCLGYDYDVETKQLSINKKEAKIVRYIFERYLEGIGGKVIARELDELGYKSPRGLDHWNDTTVLGIIKNEKYKGDILMGKTFTVDPISKRRLSNFGEEDKYYIKDNHEPIISKEDFEKAQEIRLRRAGNKKTAANVNGKRERYSKMYAFSSMLECGFCGSILSRRSWHCRSDYRKVVWHCVTSIKKGKKFCKHSKGLEELAIEGAFMEAYRKLYHSNENLMTDLLETIESELNDNSLNKELKRITNKLRTLLKKEENLVNLRLEGKISDTIYNEKYNEISSEKEFLAEEKVNIETTLKSEIDVKKRLTEFKHLLSSQKMLTEFDRAVFESIVEKIIVGGVNSDGEIDPAMLTIIFKTGETQNKDGKQFKSKRKNAKLETDKLCPQNSDEDKKMYSQGPDNTRR

SEQ ID NO: 59877 - DNA, 50 bp, Streptococcus halichoeri; identical to SEQ ID NO: 9832
  source 1..50: mol_type = genomic DNA

SEQ ID NO: 59878 - DNA, 40 bp, Streptococcus halichoeri
  source 1..40: mol_type = genomic DNA
cttattcccgcaaacgcatcacgtcgaggtagtgggactg

SEQ ID NO: 59879 - DNA, 40 bp, Streptococcus halichoeri
  source 1..40: mol_type = genomic DNA
cttattcccgcaaacgcattccgtcgaggtagtgggactg

SEQ ID NO: 59880 - DNA, 50 bp, Streptococcus halichoeri; identical to SEQ ID NO: 59875
  source 1..50: mol_type = genomic DNA

SEQ ID NO: 59881 - protein, 587 aa, Klebsiella pneumoniae; identical to SEQ ID NO: 17391

SEQ ID NO: 59882 - DNA, 50 bp, Klebsiella pneumoniae; identical to SEQ ID NO: 45352
  source 1..50: mol_type = genomic DNA

SEQ ID NO: 59883 - DNA, 40 bp, Klebsiella pneumoniae; identical to SEQ ID NO: 5518
  source 1..40: mol_type = genomic DNA

SEQ ID NO: 59884 - DNA, 40 bp, Klebsiella pneumoniae; identical to SEQ ID NO: 52004
  source 1..40: mol_type = genomic DNA

SEQ ID NO: 59885 - DNA, 50 bp, Klebsiella pneumoniae; identical to SEQ ID NO: 9015
  source 1..50: mol_type = genomic DNA

SEQ ID NO: 59886 - protein, 587 aa, Klebsiella pneumoniae; identical to SEQ ID NO: 17416

SEQ ID NO: 59887 - DNA, 50 bp, Klebsiella pneumoniae; identical to SEQ ID NO: 45352
  source 1..50: mol_type = genomic DNA

SEQ ID NO: 59888 - DNA, 40 bp, Klebsiella pneumoniae; identical to SEQ ID NO: 5518
  source 1..40: mol_type = genomic DNA

SEQ ID NO: 59889 - DNA, 40 bp, Klebsiella pneumoniae; identical to SEQ ID NO: 52004
  source 1..40: mol_type = genomic DNA

SEQ ID NO: 59890 - DNA, 50 bp, Klebsiella pneumoniae; identical to SEQ ID NO: 9015
  source 1..50: mol_type = genomic DNA

SEQ ID NO: 59891 - protein, 587 aa, Klebsiella oxytoca; identical to SEQ ID NO: 17391

SEQ ID NO: 59892 - DNA, 50 bp, Klebsiella oxytoca; identical to SEQ ID NO: 45352
  source 1..50: mol_type = genomic DNA

SEQ ID NO: 59893 - DNA, 40 bp, Klebsiella oxytoca; identical to SEQ ID NO: 54713
  source 1..40: mol_type = genomic DNA

SEQ ID NO: 59894 - DNA, 40 bp, Klebsiella oxytoca
  source 1..40: mol_type = genomic DNA
gtccacgagatttttcgggatgcccagagagacaaagccg

SEQ ID NO: 59895 - DNA, 50 bp, Klebsiella oxytoca; identical to SEQ ID NO: 9015
  source 1..50: mol_type = genomic DNA

SEQ ID NO: 59896 - protein, 587 aa, Klebsiella quasipneumoniae; identical to SEQ ID NO: 17421

SEQ ID NO: 59897 - DNA, 50 bp, Klebsiella quasipneumoniae; identical to SEQ ID NO: 45352
  source 1..50: mol_type = genomic DNA

SEQ ID NO: 59898 - DNA, 40 bp, Klebsiella quasipneumoniae; identical to SEQ ID NO: 5518
  source 1..40: mol_type = genomic DNA

SEQ ID NO: 59899 - DNA, 40 bp, Klebsiella quasipneumoniae; identical to SEQ ID NO: 52004
  source 1..40: mol_type = genomic DNA

SEQ ID NO: 59900 - DNA, 50 bp, Klebsiella quasipneumoniae; identical to SEQ ID NO: 9015
  source 1..50: mol_type = genomic DNA

SEQ ID NO: 59901 - protein, 587 aa, Klebsiella pneumoniae; identical to SEQ ID NO: 17436

SEQ ID NO: 59902 - DNA, 50 bp, Klebsiella pneumoniae; identical to SEQ ID NO: 45352
  source 1..50: mol_type = genomic DNA

SEQ ID NO: 59903 - DNA, 40 bp, Klebsiella pneumoniae; identical to SEQ ID NO: 5518
  source 1..40: mol_type = genomic DNA

SEQ ID NO: 59904 - DNA, 40 bp, Klebsiella pneumoniae; identical to SEQ ID NO: 52004
  source 1..40: mol_type = genomic DNA

SEQ ID NO: 59905 - DNA, 50 bp, Klebsiella pneumoniae; identical to SEQ ID NO: 9015
  source 1..50: mol_type = genomic DNA

SEQ ID NO: 59906 - protein, 587 aa, Klebsiella pneumoniae
MPQLYSYIRWSSERQQKGTTRQRQVIGAKEFAIANGLELVEIEDPGVSAFRGKNTTHGKLGDFIDAVRQGAIPPDSWLYVENLDRLTRQEVTTAQKLFIELLDLGLTLVTGMDKRVYTLESVNKNPTDLMISLLLFSRANEESKTKQARTIGNVESLIERHRQGLPVNIKSCGKHPFWIDDSGSQYESVKRHAIYWEIAREAIELFLSGYGIYKVKRFLDEKYPNGLNGKEWGYQVLKKMRESRALIGERQINIGSHTYTLRDYYPCLCKNEVEFLHLQELKGQNSYKSKKNPLNEQIKLLSGLAILRCSKCGGTMSSFMNKGKPRYICLNGRHLQKGCVGWSLTAPLVDHCVIIALLMGYMDANRKERQDTSDISALIEAKNTSVGELNVSITNLVAVIEAGVNVSELASRLKVLSTERETFLKEIERLKERKALIDSKGSFEVSMMDFINLIHWNVLSDYAHESRDKIRSTINKIIEHVIIDKTDGCITIKIKCRGSDEQLIFCGIGRKPHWKFDIALYVEQDTDGDTTFEEKSILPMANQLMEEATKQFALIREGYISYFDKICKILAAIGYPDIDGSAFWPNR

SEQ ID NO: 59907 - DNA, 50 bp, Klebsiella pneumoniae; identical to SEQ ID NO: 45352
  source 1..50: mol_type = genomic DNA

SEQ ID NO: 59908 - DNA, 40 bp, Klebsiella pneumoniae; identical to SEQ ID NO: 5518
  source 1..40: mol_type = genomic DNA

SEQ ID NO: 59909 - DNA, 40 bp, Klebsiella pneumoniae; identical to SEQ ID NO: 52004
  source 1..40: mol_type = genomic DNA

SEQ ID NO: 59910 - DNA, 50 bp, Klebsiella pneumoniae; identical to SEQ ID NO: 9015
  source 1..50: mol_type = genomic DNA

SEQ ID NO: 59911 - protein, 515 aa, Bacillus wiedmannii
MKTAIYLRKSRADLEAEARGEGETLAKHRTTLLKIAKEMNLNVLSVREEIVSGESLVKRPEMLALLEEIEDNKYDVVLCMDMDRLGRGGMKEQGIILETFKRSNTKIMTPRKTYDLNDEWDEEYSEFEAFMARKELKIITRRMQRGRVASVEAGNYLGTHAPFGYDIHRLNKRERTLTINSEEASVVRMIFDWYANEDMGANAIRSKLNDLGYKSKLGNEWNPYSILDILKNNVYIGKVTWQKRKEVKRPDAVKRSCARQDKSDWIIADGKHEPIIPESLFEQVQEKLNSRYHVPYNTNGIKNPLAGIIKCAKCGYSMVQRYPKNRKETMDCKHRGCENKSSYTELIEKRLLEALKEWYINYKADFEKHKQDDKLKETQVIQMNEAALRKLEKELVDVQKQKSNLHDLLERGVYTVDMFLERSNVVSDRITEITSTMENLKKEIKTEIKKEKVKKDTIPQVEHVLDLYFKTDDPKKKNSLLKSVLEKAVYKKEKWQRLDDFELVLYPKLPQDGDI

SEQ ID NO: 59912 - DNA, 50 bp, Bacillus wiedmannii; identical to SEQ ID NO: 17337
  source 1..50: mol_type = genomic DNA

SEQ ID NO: 59913 - DNA, 40 bp, Bacillus wiedmannii; identical to SEQ ID NO: 52323
  source 1..40: mol_type = genomic DNA

SEQ ID NO: 59914 - DNA, 40 bp, Bacillus wiedmannii; identical to SEQ ID NO: 52324
  source 1..40: mol_type = genomic DNA

SEQ ID NO: 59915 - DNA, 50 bp, Bacillus wiedmannii
  source 1..50: mol_type = genomic DNA
tgtcattacggttctggtgtactgctgatttttccaagtaagggtaaaca

SEQ ID NO: 59916 - protein, 551 aa, Stenotrophomonas maltophilia
MATKAKVYSYLRFSDPKQAAGSSADRQLEYAKRWAAEHGMTLDAALSMQDEGLSAYHQRHVTKGALGVFLAAIDDGRIPAGSVLIVEGLDRLSRAEPIQAQAQLAQIINAGITVVTASDGREYNRAGLKAQPMDLVYSLLVMIRAHEESDTKSKRVRAAIHRQCRGWQDGTWRGVIRNGKDPSWTRLEPETKTFQLVPERAEAVKLAIRMFRDGHGAVRIMRTLAEEGLQLTNGGNPAGQLYRILRNRALIGEKVLEIDGDEYRLAGYYPSLLSAEQFADLQQATEQRAKQKGTGEIPGLITGLRISYCGYCGSAMVAQNLMNRGRREDGGPQHGHRRLICVGNSQGMGCAVAGSCSVVPIEHAIMSYCADQMNLARLFEGGDRSEALGGRLAIARARVADTTAKIERITDAMLADDAGDAPAAFMRRAREMEAALAAQQAEVEALEHEMAAVGSSPTPAVAKAWADLQEGVKALDYDARTKARQLVADTFERISIYHRGTEPEQTRSWKGTIDLVLVAKRGSARVLHVDRQTGEWRGGEEVRDLPDDPIQ

SEQ ID NO: 59917 - DNA, 50 bp, Stenotrophomonas maltophilia
  source 1..50: mol_type = genomic DNA
agtctatttgagacgacgctcgggcaccctaatgaaacaaaccctatact

SEQ ID NO: 59918 - DNA, 40 bp, Stenotrophomonas maltophilia; identical to SEQ ID NO: 21998
  source 1..40: mol_type = genomic DNA

SEQ ID NO: 59919 - DNA, 40 bp, Stenotrophomonas maltophilia; identical to SEQ ID NO: 28344
  source 1..40: mol_type = genomic DNA

SEQ ID NO: 59920 - DNA, 50 bp, Stenotrophomonas maltophilia
  source 1..50: mol_type = genomic DNA
agtgcaattgctgggtcactcgggctccctgctggaagacgcctgatact

SEQ ID NO: 59921 - protein, 557 aa, Acidovorax sp KKS102
MNHRNAISYARFSSGSQAKGSSIVRQRDAFKAWLERNPQFVPSAYSRMDEGVSGYTSANLGEGKGLHSIIQLIQEKKIVAGDALVVEAIDRLGRADFLTMVDVIGRILTAGVSIITLEDEQEYTEASVNTGAVFNLVVKIQAAHEYSNRLGIRVSAAYDRKRADARQGKTVKVSRPFWLKSGGAIDSEAGAIVRLAIEMYLNGKGTRHIAKHISPMHERLKNLNPSTLKRWFSSRALIGEWKNKGDAIGKVFERLLEDSEFYKLQAELKRRAKTQGPADKYILSGMVFCERCGAKFQTRRQYPKPTLAAPLGSQEYKDKPVILYSNCKAYLQKGSCNNSATWPYEVLEFIYRRAASGALSDVAEGIAMDSRSDELDALVASIALAEEYSETQENLYQASKKPKYLDEVAKSRKEIEELQAKADQLRLSISRQVAMDAVDVVQTFEENENFNVSHAQQVQSALDELSARPADEIANILKRYLRIKIDGKKAYSPYDQQSYLLIRRSQKHACYFLESSHPDDTVEDRTAEPIYMYHAVTKGARSIQSARSLAELEEKLA

SEQ ID NO: 59922 - DNA, 50 bp, Acidovorax sp KKS102
  source 1..50: mol_type = genomic DNA
gttcatgcttagtatgcgttcatctgacacaatgcttaataagtatgaac

SEQ ID NO: 59923 - DNA, 40 bp, Acidovorax sp KKS102
  source 1..40: mol_type = genomic DNA
attcatcgccgcgatcatctggaaccgggccggaaactcc

SEQ ID NO: 59924 - DNA, 40 bp, Acidovorax sp KKS102
  source 1..40: mol_type = genomic DNA
attcatcgccgcgatcatcaagaaccgggccggaaactcc

SEQ ID NO: 59925 - DNA, 50 bp, Acidovorax sp KKS102
  source 1..50: mol_type = genomic DNA
gatcatgctcacattgcattcagcaaacacatttctgcccactcttgcac

SEQ ID NO: 59926 - protein, 559 aa, Streptomyces scabiei
MTERKARERGCAFKGHYRDIGVSGYDPNAKRKAFERLLNDCRDGHVHEIIVFNVTRFSRREPKDAIPIVLELFSLGVTITSVSEGSFSPDSTMELIMLIMRLDAAHQDSKNKSQTISGVKKTAKDLGGWTGGAVPYGLESYPLVVTHENEGAPRSITIRRLRPASTKEDGTDQAAEVLKMVDRIFEYKDKPWTGKQNAHPASVGAIVTWLNSRQVATQNGGLWRERTVKRLLTDPRLAGMAAEPVYAHDREGNQTRNVSGYRILRDENEEPIIIGDELIPRGKFFELQDWLAGRGRGNKGGAPSKYVLTALGRFFCECGRPMTGSADVYKCSRPAGVIEPGKHEGGCTIQQRDVDTYVAARIMAVIGNADEDDPETMDTVVEAMSRLARLTENPEARSARAALLGERAQVVRSVEQLYSDLKIGIYDGEIGRRQFLADKQSLEARLKGLDDKIREVGTPDLPPLPIEQWSASEDGDPVGPTSWWAKADVEDKRMLVELFVDRIEVTKAGGRGGYSPACKVEDRVNVVMASARVGDDEAEADRTGIAAQRLGLPDVLGPQ

SEQ ID NO: 59927 - DNA, 50 bp, Streptomyces scabiei
  source 1..50: mol_type = genomic DNA
gaactgccctatagctatgaagccccagcttcatgcatttagggtacctt

SEQ ID NO: 59928 - DNA, 40 bp, Streptomyces scabiei
  source 1..40: mol_type = genomic DNA
gagctatccgtacgaagccccagtttcacagactctcttc

SEQ ID NO: 59929 - DNA, 40 bp, Streptomyces scabiei
  source 1..40: mol_type = genomic DNA
gagctatccgtacgaagccagagtttcacagactctcttc

SEQ ID NO: 59930 - DNA, 50 bp, Streptomyces scabiei
  source 1..50: mol_type = genomic DNA
caagtgccctgggactatgaagtcagaggatcattatgacaaggtgactt

SEQ ID NO: 59931 - protein, 495 aa, Intrasporangium calvum
MTARAALYLRLSVSKDDSTSLTVQEKDLRARAAAEGWTIAPEHVIRDDGISGAKNATGTAHALDLLRRGEVDVLLAWKFDRWSRAGIPALGRLMDVLASAPGARFVTIKDSVDSAAPFWGVIASILATIAEQERENVRTRVTASIAERVSVGRYTGGTTPYGYRSAPNPEGPGRILVHEEDEAAVVRDAAERILSGESVYSITRDLNAHEIPTRRGTTWSIQAVTQILTADTALGRVTHRGQLVRDEEGAPVEVWPPLVDADTWHRLAERLQVRRPLQTADGRPRRRARSNRLLSGVASCGLCAAPLYVKKNGTGRIAYACGQKSNGRPCPGVSVSADLLDTHVAGAFLAAVGPSEIFDRVEISTDDVDLAEVERSIAQLKTAQDDDDADLHTIAEQLGALKARRAAIKARPHRPTVRLVPTGETFAEAWERLTVADDVAGLRALLSPNVAILTIGKGRRGAHGLDPARVTLVAQPAFPIGAEVDEAMPAGRLVA

SEQ ID NO: 59932 - DNA, 50 bp, Intrasporangium calvum
  source 1..50: mol_type = genomic DNA
aaagcgccgctagcgtatgctggcaccccggacctcgttaggtgcgcttc

SEQ ID NO: 59933 - DNA, 40 bp, Intrasporangium calvum
  source 1..40: mol_type = genomic DNA
gacggtgcacatgccgggcacaccgctgttcagggcgatg

SEQ ID NO: 59934 - DNA, 40 bp, Intrasporangium calvum
  source 1..40: mol_type = genomic DNA
gacggtgcacatgccgggctaaccgctgttcagggcgatg

SEQ ID NO: 59935 - DNA, 50 bp, Intrasporangium calvum
  source 1..50: mol_type = genomic DNA
aaagcaccatgataatatgcttcctaccctgacctctccatgtaagctct

SEQ ID NO: 59936 - protein, 583 aa, Rahnella aquatilis
MTNKSRLYSYVRWSSDRQASGTTLARQTESARLFAVEHGLTYVEILDAGVSAFKGKNSKQGALADFISAVENGVIPSDSWLYVENLDRLSRADATTANELFLKLLRLGLTLVTGMDGKTFTLDSVNHNPTDLMLSILLFMRANEESRTKQKRVFGNVVSLVGRHNQGLPVNIKSAGSSPWWIDDSGSQFESVKPHPVHWGAAKKIVELLLQGWGCFRIATYLNERSEIYPPPRGNKGKGMKRKQSWVVANLIKMRLNRAMIGQKVITVNGLTHRLSDYFPQLCTDTEFALMQEISQKNRIPQGAEKKVITLLSGLGILRCGHCNGSMTFFSKLGKIRYVCQTGRNQNSDCGVWSIQGALVEALAVRAIINGHIGNVLSGGAQAESVAPLIDDKRQALTVIDEQVENMTQAIMLGGNLAPLVAMLTRLEEEKKSLLLEIDRLTQQEALSGGDSDIQAKILEVIDLLTPELMTDVTHPDRMKIREIVRLVLPTVTLSKKSDKSLSVDFRFSNNSHLTYKGVMSGSDKSYCVSMWDADDGPSHNEGIEKLKVKLSSVYSQLISETENIVRLQSLPTLKGKDFFGKR

SEQ ID NO: 59937 - DNA, 50 bp, Rahnella aquatilis
  source 1..50: mol_type = genomic DNA
attggcatcagaaaatatttcggcaacccgaagtatatttagatgccaat

SEQ ID NO: 59938 - DNA, 40 bp, Rahnella aquatilis; identical to SEQ ID NO: 54503
  source 1..40: mol_type = genomic DNA

SEQ ID NO: 59939 - DNA, 40 bp, Rahnella aquatilis
  source 1..40: mol_type = genomic DNA
tattatttcgcacccgggccccccgaaatacccgattgat

SEQ ID NO: 59940 - DNA, 50 bp, Rahnella aquatilis
  source 1..50: mol_type = genomic DNA
attggcatcagacaaagtttctctcccctgcagttttgtcatctgccaat

SEQ ID NO: 59941 - protein, 571 aa, Mediterraneibacter faecis
MPRRKQNPQSLKETVSTAIKKIVWRVAIYIRLSKDDGNDESYSVKNQRERLNDTLEQLMLDEDGIEFVGYYIDDGFTGVDSDRDDFQRLLTDIQNGKINCVLVKDLSRLSRNDWECKYYLQMLFVKRNVRFISLELPKLDSFKRPEEVYDINVSFQSMYNENHCRETSIKVRGTLDKKREKGQFIGAFAPYGYLKDPEDYHHLVVNPETAPVVKDIFRWYMEGMSKSAITKELLRLGIPSPYEYKKQHGAKCYNPQAAKKGGVVYWSTRTVDQILHNPTYIGDMVQGRHKVTSYKIHDIIPVDEADWFWVEGTHEAIIDADTFTKVQDLMSRNTRVSPNRSNLYLFSGFLRCADCGRGMVRNSAHGYSYYSCRTYRTLSKDLCTGGSHNIKEDIIAEAALKAIQAQIALVENMAEVIKEINSAPTRVSRTIFIDNLLKDKERELQKTAGISDSLYMDWKNGDITREEYHRMKARFQTEAEQLRETIANLQAERQEYEKEVTTDDPYLKTFLQYKNIEKLERNIVVDLIDAIYIHADKGVEIHFKFQDQHKRLMEFIENNLAAARRAKIKAV

SEQ ID NO: 59942 - DNA, 50 bp, Mediterraneibacter faecis
  source 1..50: mol_type = genomic DNA
ttttgtgtataaatacatgatgcggtggcctcatgttcatatacacaaac

SEQ ID NO: 59943 - DNA, 40 bp, Mediterraneibacter faecis
  source 1..40: mol_type = genomic DNA
ctccggatcaacatttgccgttgcttcatccaatatgacg

SEQ ID NO: 59944 - DNA, 40 bp, Mediterraneibacter faecis
  source 1..40: mol_type = genomic DNA
ctccggatcaacatttgcccatgcttcatccaatatgacg

SEQ ID NO: 59945 - DNA, 50 bp, Mediterraneibacter faecis
  source 1..50: mol_type = genomic DNA
ttttttttaaatagacatcacacacatgtcacatatatgactacacaaac

SEQ ID NO: 59946 - protein, 506 aa, Faecalibacterium prausnitzii
MARKKKVSPGNRLVAYYRYSGGSQQTEQSIEGQRRDCEAYARQHGLTIVHEYIDRHISGRGVESRLAFQQMIADSSKHLFDLVICWKTDRFARNRYDSAVYKKKLRDNGVRILYAAESSVEGPEGIILEGLMESLAEYYSAELAQKMRRGMRESALKGKAINPNRPLGLTTDEHKRFIIDEKNAPTIRFIFEHYAAGESSASIVDQLNAAGLRTSKGNSFNKCSIPRIIQNEAYHGVYICKAYDVRIDGAIPAIIDDDLWKRAQKMLTLNKQHRAPHSSHADYLLSGKLFCGCCHSLMRGISGHNCRNDVYYYYACGNKADGGTCKKKNIPKDVAENLVVNAICENILRPDTLEDLADAIAAAQQADVNQPDPERAMLEQNLADVHRKINNIIESIENGTASSRLSARLADLEQQESTLNYQLESLKEIHPPVLDRERILFLLEQFLISPNERTEDYNRRIIDTFVNRIEITDTEMLIYFNLSEASASEKQKNSQPNSCSTGNHLV

SEQ ID NO: 59947 - DNA, 50 bp, Faecalibacterium prausnitzii
  source 1..50: mol_type = genomic DNA
ttgttcgactgggaatcatctggtccacctgacacattctcactcgaaca

SEQ ID NO: 59948 - DNA, 40 bp, Faecalibacterium prausnitzii
  source 1..40: mol_type = genomic DNA
tcgtcggtcttgttccaatccgagtggcgagaatcgaact

SEQ ID NO: 59949 - DNA, 40 bp, Faecalibacterium prausnitzii
  source 1..40: mol_type = genomic DNA
tcgtcggtcttgttccaatgggagtggcgagaatcgaact

SEQ ID NO: 59950 - DNA, 50 bp, Faecalibacterium prausnitzii
  source 1..50: mol_type = genomic DNA
ttgttagtcaggttattatcatttggccctgacacactctgcctgggaca

SEQ ID NO: 59951 - protein, 460 aa, Streptococcus pneumoniae
MITTNKVAIYVRVSTTNQVEEGYSIDEQKDKLSSYCDIKDWNVYKVYTDGGFSGSNTDRPALESLIKDAKKRKFDTVLVYKLDRLSRSQKDTLHLIEDVFIKNGIEFLSLQENFDTSTPFGKAMIGLLSVFAQLEREQIKERMQLGKLGRAKSGKSMMWAKTSYGYDYHKETGTVTINPAQALTIKFIFESYLRGRSITKLRDDLNEKYPKHVPWSYRAVRTILDNPVYCGFNQYKGEIYPGNHEPIISKEEYDKTQSELKIRQRTAAENVNPRPFQAKYILSGIAQCGYCGAPLKIMLGVKRKDGSRLKKYECHQRHPRTLRGVTTYNDNKKCDSGFYYKDKLEAYVLKEISKLQDDADYLDKIFSGDNAETIDRESYKKQIEELSKKLSRLNDLYIDDRITLEELQSKSAEFISMRGTLETELENDPALRKNKRKADMRKLLNAEKVFSMDYENQKVL

SEQ ID NO: 59952 - DNA, 50 bp, Streptococcus pneumoniae
  source 1..50: mol_type = genomic DNA
gactacgaaaatcaaaaggtgcttgtgctgaccagatactcaataacctc

SEQ ID NO: 59953 - DNA, 40 bp, Streptococcus pneumoniae
  source 1..40: mol_type = genomic DNA
gagatcacgatacttccaagttagaaggcttataaacaag

SEQ ID NO: 59954 - DNA, 40 bp, Streptococcus pneumoniae
  source 1..40: mol_type = genomic DNA
gagatcacgatacttccaacatagaaggcttataaacaag

SEQ ID NO: 59955 - DNA, 50 bp, Streptococcus pneumoniae
  source 1..50: mol_type = genomic DNA
gactaggaagagtcaatggtccttcagctgcccctcagatcattaactcc

SEQ ID NO: 59956 - protein, 590 aa, Aeromonas caviae
MIYAKSSVSDLTMKSYLYSRISTLQQVQGFGIARQIQTVTDFLENAVIDARLGYQLDPNDYEILESDIGKSAFKGDNWGSSSNLGRFYEDVINRRITRGVLIVENIDRLTRLSNYDASHKLTTLITSGIDIIEVESVTCFSVRIPDSLSVLAMSISRAHNESKRKSTMGQMTWTNRINQLKNEGKASAKICPRWLSIENDKYVLDEEQAKILLSIHQMFLDGHGNTAIVRRLNDEGKLNNGVLWNTLTLQKVLKDERLTGRGIIGKQRIIHDKNISKEEKDKIIKDKLVYIDNAFPVVVPMELFSRVQSKINSSKHGSKNPKTTKNMRNLFNGLSKCGGCGNQMIVCKNGHGNQFYTCLGRRSEKTCSNVGTNYYSFEQLLLKNLKEINWDTIYNGSKSNNANSIDEQRQKIIEVEQSIKAFNNELIGLDDDGLELRIIRKIKKNKEILKSLVTDLNGLMTKEISHVEFEPNLELVHDQSNVKLRQDTNVALRKVIRSIDITRNENLVISFVKYYTDTISHLFIYDIKKNNTISKTYMTDDLVFHFDAGSIDVKTGKVELTGKELKEEDQIAFDIWLETFESAVKKVIEI

SEQ ID NO: 59957 - DNA, 50 bp, Aeromonas caviae
  source 1..50: mol_type = genomic DNA
ctgcgtaaaatgtttccctgcttcttggaactgtgatatgatttacgcca

SEQ ID NO: 59958 - DNA, 40 bp, Aeromonas caviae
  source 1..40: mol_type = genomic DNA
gcggcacaatgtcggtcagttatgacaaatattgtgccgc

SEQ ID NO: 59959 - DNA, 40 bp, Aeromonas caviae
  source 1..40: mol_type = genomic DNA
gcggcacaatgtcggtcaggcatgacaaatattgtgccgc

SEQ ID NO: 59960 - DNA, 50 bp, Aeromonas caviae
  source 1..50: mol_type = genomic DNA
ctgcgtaaatgtcttgcctgattcgctgaactagatttcccttttatcca

SEQ ID NO: 59961 - protein, 496 aa, Mycobacteroides abscessus
MGARVSVFSGPQKVSHEAQIDTATKWATAHDYPVVGAFEDLGVSASVPPDERPDLGPWIRERSHEWEVIIWSKLDRAFRSMRHCSDFIKWAETNRKVVVFAEDSMTLNYLNPSTGIDSILGELFVQIAAAFAQIELNRFKSRAEDMHRAIRPTTRWAAGLPPLGYQVVDHPSGRGKGLAIDSDAANLVREMADKLVDGWSFVRITEWLNESGKLTSQGRSRKARGLEPKGRWTTTNVIEILTGYRTLGIKTHKGQPVLDDNGEPIRLAPPLFTPERWDEVQRAAQLRKGKPRTPSDTSNPMLEVGFCAVCGSSLAQQFAKTRPRKSDGHVTHYRYYRCSRTPINCKTVFVVADDLDELLSEQFLLERGGRRVTERVFIPGEDNSYELDFINQRIELLREDRASGLFPSGEDELVYRNQMKQLLARRDELASVPVRQAGYEKVELEKTYREVWPCATPEEKRKMLIDAEISIRLGESPGKSLRAELVVGSPYPQLHA

SEQ ID NO: 59962 - DNA, 50 bp, Mycobacteroides abscessus
  source 1..50: mol_type = genomic DNA
tctcataggtgtacttctcgaccagcagtagcatacactcttgaaatatg

SEQ ID NO: 59963 - DNA, 40 bp, Mycobacteroides abscessus
  source 1..40: mol_type = genomic DNA
tagcgatgctcctggatcaacagattccgatggaggttgc

SEQ ID NO: 59964 - DNA, 40 bp, Mycobacteroides abscessus
  source 1..40: mol_type = genomic DNA
tagcgatgctcctggatcagaagattccgatggaggttgc

SEQ ID NO: 59965 - DNA, 50 bp, Mycobacteroides abscessus
  source 1..50: mol_type = genomic DNA
tctcatagtcccccttctctagcagaaggaggggagacagttgaaagatt

SEQ ID NO: 59966 - protein, 491 aa, Mycobacteroides abscessus; identical to SEQ ID NO: 39011

SEQ ID NO: 59967 - DNA, 50 bp, Mycobacteroides abscessus; identical to SEQ ID NO: 59962
  source 1..50: mol_type = genomic DNA

SEQ ID NO: 59968 - DNA, 40 bp, Mycobacteroides abscessus; identical to SEQ ID NO: 59963
  source 1..40: mol_type = genomic DNA

SEQ ID NO: 59969 - DNA, 40 bp, Mycobacteroides abscessus; identical to SEQ ID NO: 59964
  source 1..40: mol_type = genomic DNA

SEQ ID NO: 59970 - DNA, 50 bp, Mycobacteroides abscessus; identical to SEQ ID NO: 59965
  source 1..50: mol_type = genomic DNA

SEQ ID NO: 59971 - protein, 491 aa, Mycobacteroides abscessus; identical to SEQ ID NO: 39006

SEQ ID NO: 59972 - DNA, 50 bp, Mycobacteroides abscessus; identical to SEQ ID NO: 59962
  source 1..50: mol_type = genomic DNA

SEQ ID NO: 59973 - DNA, 40 bp, Mycobacteroides abscessus; identical to SEQ ID NO: 59963
  source 1..40: mol_type = genomic DNA

SEQ ID NO: 59974 - DNA, 40 bp, Mycobacteroides abscessus; identical to SEQ ID NO: 59964
  source 1..40: mol_type = genomic DNA

SEQ ID NO: 59975 - DNA, 50 bp, Mycobacteroides abscessus; identical to SEQ ID NO: 59965
  source 1..50: mol_type = genomic DNA

SEQ ID NO: 59976 - protein, 539 aa, Pseudomonas viridiflava
MAKIGARVYSYLRFSDPRQGSGSSADRQLQYAQRWAADKGLSLDESLSMRDEGLSAYHQRHVTQGALGVFLRAIEDGRIASGSVLVVEGLDRLSRAEPIQAQAQLAQIINAGITVVTASDGKEYNRAGLKAQPMDLVYSLLVMIRAHEESDTKSKRVKASIIRLCQAWQAGTYRGLIRNGKDPQWLTWTGSTWEMIPERVRTVRRALELYQEGMGAARATRVLHGEGLDYAAAGITKQQIYRLIKLQALRGAKSLSVDGENFLLEDYYPRLLSESEWADLQHLAGQRLRRRGHGEIPGIITGIGLTYCGYCGTALVAQNMMTRRKHDGTIPDGSRRLHCVSYGVNAGCTAGGSCSVVPIELALLTFCSDQLNLQRLLKVGDEGQGVRQQLAVARSAAEKLAVQLGKITDALLADESGAAPTSFIRRARELEAEQTQALKTVQQLEYELAAVSGAAKPAQADRWVELAELVRAGDYPAREKMRQLVMDTFERIVVFMRGMGSEDRSSKFIDVQLLSRTGQHRLLQINRKTGAWVASEDWD

SEQ ID NO: 59977 - DNA, 50 bp, Pseudomonas viridiflava
  source 1..50: mol_type = genomic DNA
agtatagtatgaatatcctagggacaccctaacgatatcattcctacacg

SEQ ID NO: 59978 - DNA, 40 bp, Pseudomonas viridiflava
  source 1..40: mol_type = genomic DNA
gtcaacgagcgctttcggacaacccagagagacgaatcca

SEQ ID NO: 59979 - DNA, 40 bp, Pseudomonas viridiflava
  source 1..40: mol_type = genomic DNA
gtcaacgagcgctttcggataacccagagagacgaatcca

SEQ ID NO: 59980 - DNA, 50 bp, Pseudomonas viridiflava
  source 1..50: mol_type = genomic DNA
aatatagtacctcattcataaggttactgtaatgattgagatcatacatg

SEQ ID NO: 59981 - protein, 535 aa, Sphingomonas paucimobilis
MRTVIYARFSSHLQNSRSIEDQISVCRERCEREGWTILDIFTDYAISGAAGISESQRPGLAAMLARVEAGGIDQVLAESTDRIARHQGDSFAIRERLSFARARLFTLSDGEVNDISGTFKGLMDAQFRKELGAKIKRGQKGTVAAGRSPAGLAYGYRTANKIDATGRPVRGLREVDPDQSAIVQRIFRMFVDGQSARTIAGILNREGVPGPRGSIWRSSTISGDGPRGNGILRNELYIGRLVHNRTSKVVNPATRKVAIRVNPSTEWIVEEVPHLRIIDQKDWDATRNRFDHTAQKPLHRRVRPRRMLSGLGQCGVCGGSWIVVSDERWGCKTNRSDASCTNSATISTKRYEERVLAGLKTKMLDPDIVAIFVKEYHEEYARRAAETRRDTARLQRIMDDADRKVARLVEAIASGGGEFAEVKDALAKARIDREQAREELAQIEALPVVALHPAVAADYRREVEQLHQSLKDPEAKQATIPALRALIDRIVLTPAAIRGVEIEIHGRLAAILGLATGQELPENMYSSDQFALPAP

SEQ ID NO: 59982 - DNA, 50 bp, Sphingomonas paucimobilis
  source 1..50: mol_type = genomic DNA
atgtactctagtgaccagttcgctttacccgctccaccactaaagtacat

SEQ ID NO: 59983 - DNA, 40 bp, Sphingomonas paucimobilis
  source 1..40: mol_type = genomic DNA
tacacgggttcgattcccgttacccgctccatcccttccg

SEQ ID NO: 59984 - DNA, 40 bp, Sphingomonas paucimobilis
  source 1..40: mol_type = genomic DNA
tacacgggttcgattcccgtcacccgctccatcccttccg

SEQ ID NO: 59985 - DNA, 50 bp, Sphingomonas paucimobilis
  source 1..50: mol_type = genomic DNA
atgtacccttttacccacttctcttcaccctcccccttctccaaattcac

SEQ ID NO: 59986 - protein, 523 aa, Eubacterium rectale; identical to SEQ ID NO: 29831

SEQ ID NO: 59987 - DNA, 50 bp, Eubacterium rectale
  source 1..50: mol_type = genomic DNA
ctcactatttcataatggtggggttccgcccgcaatataaaaaagtgaat

SEQ ID NO: 59988 - DNA, 40 bp, Eubacterium rectale
  source 1..40: mol_type = genomic DNA
ctcgcccactattatcctgtccggtctcatacgaagagcc

SEQ ID NO: 59989 - DNA, 40 bp, Eubacterium rectale
  source 1..40: mol_type = genomic DNA
ctcgcccactattatcctgcccggtctcatacgaagagcc

SEQ ID NO: 59990 - DNA, 50 bp, Eubacterium rectale
  source 1..50: mol_type = genomic DNA
ctcagtagtgacacactgtggagtcccacccgcaaccagcacacgtcaat

SEQ ID NO: 59991 - protein, 551 aa, Stenotrophomonas sp MYb57
MATKARVYSYLRFSDPKQAAGSSADRQLEYARRWAAEHGMALDAALSMQDEGLSAYHQRHVTKGALGVFLAAIDDGRIPSGSVLIVEGLDRLSRAEPIQAQAQLAQIINAGITVVTASDGREYNRAGLKAQPMDLVYSLLVMIRAHEESDTKSKRVRAAIHRQCKGWQDGTWRGVIRNGKDPSWTTLDPATKTFHLVPERAEAVKLAIRMFRDGHGAVRIMRALAEQGLQLTNGGNPAGQLYRILRNRALIGEKVLEIDGEEYRLAGYYPALLSHEQFADLQQATEQRAKQKGTGEIPGLITGLRLAYCGYCGSAMVAQNLMNRGRRDDGGPQHGHRRLICVGNSQGMGCTVAGSCSVVPIEHAIMSYCADQMNLARLFEGGDRSEALSGRLAIARARVIDTAAKIERITDAMLADDAGEAPAAFKRRARELEATLAEQEAEAEALERELATAAASPTPAVAKAWTDLQVGVKALDYDARTKARQLVADTFERIAIYHRGTEPEQTRSWKGTIDLVLVAKRGSARILHVDRQTGEWRHGEDVLTLPDEPLP

SEQ ID NO: 59992 - DNA, 50 bp, Stenotrophomonas sp MYb57
  source 1..50: mol_type = genomic DNA
agtatatttcaccaccccttcgggcaccccaatgaaacaaaccctatact

SEQ ID NO: 59993 - DNA, 40 bp, Stenotrophomonas sp MYb57; identical to SEQ ID NO: 21998
  source 1..40: mol_type = genomic DNA

SEQ ID NO: 59994 - DNA, 40 bp, Stenotrophomonas sp MYb57
  source 1..40: mol_type = genomic DNA
atcgacgagggccttcgggtagccaaggctgacgaagccg

SEQ ID NO: 59995 - DNA, 50 bp, Stenotrophomonas sp MYb57
  source 1..50: mol_type = genomic DNA
agtatattttctgcccccttcagataatcccattacagttacattagact

SEQ ID NO: 59996 - protein, 560 aa, Clostridium jeddahense
MARVRKSLDKTKQILALWKAALYIRLSREDGNDESYSVKNQRQRLNEFLENLMLEEEIQLVDIYIDDGCTGTDSDRENFQRMLEDIDKGIVNCVIVKDLSRLSRNDWECKKYLQHLFVVKDVRFISLELPKLDSYKNPDEVYEMGVSIQSMYNENHCRETSIKVRGTFNMKRKKGEFIGAFAPYGYLKDPDDKHCLIVDNETAPIVQDIFHWFVRDGMSKNGIVKKLIGMGTPCPAAYKRQNGMKYHNPAIVNNEPLWSARSITAILTNQMYLGHMVQGKQKVKSYKVHTRINTPESEWFIVENTHEPIIDKETFEKAQGLMQRDTRTAPQSGQLYTFSGFLRCADCGKSMGRRTSKNLVYYACRTNNTTGLCTRHSIRNDKLESIVLETIQKQIALIDGMAELIDDINNAPAPRTVSKRLTASIKLRKQELEKISGISTGLYVDWKNGDITREEYHRMKKEFEEKEQQLKQDIANLEEENKDMAQGVTSDNPYFDAFRKYKNICSLDRGIVAELIKVIHIHEGGDVTIDFNFADQHRRIVEFIENNRKELTVVENNKVG

SEQ ID NO: 59997 - DNA, 50 bp, Clostridium jeddahense
  source 1..50: mol_type = genomic DNA
cgttgtcataaaatacatgcagccaccgcaccgtgtatttaatgacaacc

SEQ ID NO: 59998 - DNA, 40 bp, Clostridium jeddahense
  source 1..40: mol_type = genomic DNA
taccggccccacaggaccgacaggtgccgacggagcgatt

SEQ ID NO: 59999 - DNA, 40 bp, Clostridium jeddahense
  source 1..40: mol_type = genomic DNA
taccggccccacaggaccgccaggtgccgacggagcgatt

SEQ ID NO: 60000 - DNA, 50 bp, Clostridium jeddahense
  source 1..50: mol_type = genomic DNA
agttgccatggactacatgcctccccctcaccatgttaaaaatctgaact

SEQ ID NO: 60001 - protein, 556 aa, Pseudomonas amygdali
MTKAYAYIRYSRAIQATGDSENRQLTALELFETSTGTNVVEVVYDKGKSAFRGDNARSGNFKEMLDRMQSGAIRRGDYLVVESIDRITRQRVLDGVELLQGILKKGINIYTTVDKKTYSYNDPSRDFENLLMISLIAKRANEESETKSGRLLSAWKARKAKAENGEVIIKKGKSIPYGLRVEEGKFVIHKEEQEEIKQLFELLLQFGINTAITKINETSLKKWNNGTLNKVIKHKTVIGCMATHRVEYTADGKAKKILTGFIENYYPNLIEPKLFYKAIDVMANRKQKNWSGRRTEQDFNIFKHCIFCAECGGKLYYDHRGSRYKGKIYPFFKCDNARVQKHVCTADNIRFEYVLGSLLDSMKMINRIATEFKRDFKGISTQARFINPKINSLLKADGENNNLVLEEKQKQLISRRTKLDNMNTQMVEADYNVPTKFIQEISKTEKEIEALNKEILLIHSALADEGTIDVQDTKTVIDLFMTDEGRAKLNYFFKTNDIIFLVSHKKATRETRFSMRRKNELIDEKICNNYIKFPLKDILGSYGLGDLQTMFDLSVS

SEQ ID NO: 60002 - DNA, 50 bp, Pseudomonas amygdali
  source 1..50: mol_type = genomic DNA
ccctgtaaacttgtgtacctaatcatgatcagatgatatgatttaccgag

SEQ ID NO: 60003 - DNA, 40 bp, Pseudomonas amygdali; identical to SEQ ID NO: 55668
  source 1..40: mol_type = genomic DNA

SEQ ID NO: 60004 - DNA, 50 bp, Pseudomonas amygdali
  source 1..50: mol_type = genomic DNA
ccctgtaaacttgtgtacctaatcctgatcagatgatatgatttaccgag

SEQ ID NO: 60005 - DNA, 40 bp, Pseudomonas amygdali
  source 1..40: mol_type = genomic DNA
cccgcgacgcccggaaatgctccgaagcctgtcgctcagc

SEQ ID NO: 60006 - protein, 465 aa, Mycobacterium marseillense
MHLPLTLLVMRAAIYTRISLDQTGEGRGVERQLDDCLKLADQLGWEVTARYDDNDISAFSGKARPGFESMLDGMKRGEFGALLCWHTDRLYRSMKDLERLIDIAEERRVQIRTVQGGDLDLSTSAGRMVARILGSVSRQESEHKGERQKRANAQQAAAGKWRTANRPFGYTTSGRLLESEAIHLRQAMLDVLAGKSISQVAREWNALGLRGTRGTSWSSPRIRRLLVNPRYARIPVYRGKPVENVVGDWDELIDVDTHRGLVAFLCDPSRLTCTSFEKVHIGSGVYLCGICDAPMRHAFAGRPRVRRYECSAKQHVTRRGEPVDALVEELVLERLSSPQVRLVVDSGEKVDVAELQAKRAALQARLDELAGLFAEGSIDGSQLRRGSSDLRAQVSAVDSVLADLAHTSPVADLLAAGEKLRERWAELTPDIKSKVIRETVTIRIMPAPRGYLPFKPELIAPEWKV

SEQ ID NO: 60007 - DNA, 50 bp, Mycobacterium marseillense
  source 1..50: mol_type = genomic DNA
aggtgcagcgtccgaacgtttatgcgcataaccgttcggccgatgcactt

SEQ ID NO: 60008 - DNA, 40 bp, Mycobacterium marseillense
  source 1..40: mol_type = genomic DNA
gggtgcagccgcggtcgtgcgcgtagaggacgatgcgctg

SEQ ID NO: 60009 - DNA, 50 bp, Mycobacterium marseillense
  source 1..50: mol_type = genomic DNA
aggtgcagcgtccgaacgtttatgtgcataaccgttcggccgatgcactt

SEQ ID NO: 60010 - DNA, 40 bp, Mycobacterium marseillense
  source 1..40: mol_type = genomic DNA
gggtgcagagggcattctgtggttcgaggaccatgcgctg

SEQ ID NO: 60011 - protein, 508 aa, Georgenia yuyongxinii
MTTSRTHRPRRAVIYIRLSVYRGEADPTTSPASQEARCRAYAESKGWDVVDVVRDLDVSGSDKGLRLDRPGLASIRERFHDVDVVIFAKLDRLARNVLDFNRFAEEARTHDVDLVSVAESLDLSTPGGRFVAQILAAFAEMEAATIAERTKLGKETAVTKLGRYGGNTPPYGYRIVEHPSGRGSALEIDPEEAAHIREAARLVLDGGSLYGAAQMLNETGSKPHRAERWGWSTLRAVLVGDAVLGRVKHRGRLILGDDGLPEVRWEPIFTLEESQRLRAILARPSDLPKDSPARAVAEQEHTTRTRAARLLSGLLTCSGCGRPMRAGVFPRRGEKVGRYVCSAEGARCPAPVTITATLVEDYVAEVFLGMAGLMPVFEVRTMNRDAAEVAQVEQAIAETTDELRAPDADIAALVERLTILRQRRDELAAQPAEPEVVKVDTGEMMAARWEREDVAGRRALVHSVLTGPMTVHPGKRGPKRLDPDRLDIPWRWEDIDVDAEIADAARVD

SEQ ID NO: 60012 - DNA, 50 bp, Georgenia yuyongxinii
  source 1..50: mol_type = genomic DNA
atgtgccgttagttgcagccagcgtgcgtcgtctgattcaataggcacat

SEQ ID NO: 60013 - DNA, 40 bp, Georgenia yuyongxinii
  source 1..40: mol_type = genomic DNA
gatgtcggggatgaccacatggacacgctcgccggtcgcc

SEQ ID NO: 60014 - DNA, 50 bp, Georgenia yuyongxinii; identical to SEQ ID NO: 60012
  source 1..50: mol_type = genomic DNA

SEQ ID NO: 60015 - DNA, 40 bp, Georgenia yuyongxinii
  source 1..40: mol_type = genomic DNA
gatgtccacattgaccacgtgcacaggctggcaggtctcc

SEQ ID NO: 60016 - protein, 568 aa, Pseudomonas aeruginosa
MARLISYVRMSTSEQLKGISLERQRNLIADFASKNDFQEVIIYEDVGRSSFAEDENQKELNKFFEELEKDNFDKGDVFALENIDRLTRRGAIDALIKVNKIIQKGLKIAIISDKEQRILEEIDIYSIITLSIDASRANKESEVKSQKGLINWEHKRRLAATEKVAMTKRAPAWIDTEIYHYFDEEKKKEIKRRRYILNEEKAQTVRLIFDLFLNGNGSLKINKILNDRKIKLLNDNVEFWEPSRINKILKNPAVYGLYQPQKQRSGKRDLVDAGEPIEDYFPAVITKEIYEQCRLIAEKNLSERKGRKGENFTNVFTGLLKCEKCGSPVHLLNCGVDKRNKSQHALIYLICKKAKFTKQCSTKRMRYDAFEASIFRAVNEINLIEVLNENNPLNDLVKKQREIETAINKKNKLLENYEKSFLENDGNVPAFMISAAKKAEIEIKELEEQKREIQNEISSLNYYNANVENSIEDIKNNSSYEKRAKINLLFHEIIKSISIDLVEKYSVITFKNDITRIIDKDGFVINVDRVNKLEIVEEDTTTISAEIANNPKLLLEYFEKMRRDLESD

SEQ ID NO: 60017 - DNA, 50 bp, Pseudomonas aeruginosa
  source 1..50: mol_type = genomic DNA
acagggttaaacttgcccgacttgatcaagtcgggtctataataccccgg

SEQ ID NO: 60018 - DNA, 40 bp, Pseudomonas aeruginosa; identical to SEQ ID NO: 4693
  source 1..40: mol_type = genomic DNA

SEQ ID NO: 60019 - DNA, 50 bp, Pseudomonas aeruginosa
  source 1..50: mol_type = genomic DNA
acagggttaaacttgcccgacttgggcaagtcgggtctataataccccgg

SEQ ID NO: 60020 - DNA, 40 bp, Pseudomonas aeruginosa
  source 1..40: mol_type = genomic DNA
gccgggcagggctgggctgggcagggctgggcaggactgg

SEQ ID NO: 60021 - protein, 568 aa, Pseudomonas aeruginosa
MARLISYVRMSTSEQLKGISLERQRNLIADFASKNDFQEVIIYEDVGRSSFAEDENQKELNKFFEELEKDNFDKGDVFALENIDRLTRRGAIDALLKVNKIIQKGLKIAIISDKEQRILEEIDIYSIITLSIDASRANKESEVKSQKGLINWEHKRRLAATEKVAMTKRAPAWIDTEIFTIYDEEKKKEIKRRRYILNEEKAQTVRLIFDLFLNGNGSLKINKILNERKIKPLNDNVEFWEPSRINKILKNPAVYGLYQPQKQRSGKRDLVDAGEPIEDYFPAVISKEIYEQCRLIAEKNLSERKGRKGENFTNVFTGLLKCEKCGSPVHLLNCGVDKRNKSQHALIYLICKKAKFTKQCSTKRMRYDAFEASIFRAVNEINLIEVLNENNPLNDLVKKQREIETAINKKNKLLENYEKSFLENDGNVPAFMISAAKKTEIEIKELEEQKREIQNEISSLNYYNANVENSIKDIKNNSSYEKRAKINLLFHEIIKSISIDLVEKYSVITFKNDITRIIDKNGFVINVDRVNKLEIVEEYTTTISAEIANNPKLLLEYFEKMRRDLSED

SEQ ID NO: 60022 - DNA, 50 bp, Pseudomonas aeruginosa; identical to SEQ ID NO: 60017
  source 1..50: mol_type = genomic DNA

SEQ ID NO: 60023 - DNA, 40 bp, Pseudomonas aeruginosa; identical to SEQ ID NO: 4693
  source 1..40: mol_type = genomic DNA

SEQ ID NO: 60024 - DNA, 50 bp, Pseudomonas aeruginosa; identical to SEQ ID NO: 60019
  source 1..50: mol_type = genomic DNA

SEQ ID NO: 60025 - DNA, 40 bp, Pseudomonas aeruginosa; identical to SEQ ID NO: 60020
  source 1..40: mol_type = genomic DNA

SEQ ID NO: 60026 - protein, 540 aa, Pseudomonas aeruginosa
MSTSEQLRGFSLERQRKLIADFAAKNDLSLENSHALEDIGHSAFSDDTQQKELTKFFEDLEKGKFQPGDVFALENIDRLTRRGPIDALMKVNAIISKGLKLAIISDKEQKILEEIDVYTIITLSIDATRANVESKNKSDKGLLNWASKRELAAVHKIAMTAQAPAWLDTQTFDVFDEEKRKDIKRRRYVLNPEKAETVKLIFELFQNGNGSLKIKNILNERRIPTFKNIEYWEPSIISKILRNPATFGLYQPKKQNTGKRDLIAACEPIEDYFPAIISRETFEQCQRIAATNTTRKGRKGKVFTNLFTGLLKCADCGGPVHLLNPGIDKRAKVPKSVNYIVCKKGKFTRECILKRLRYDDFEITLLKAIQEINLADILDENNPLDALTKKLRTIETKIDKNKKLLENFQKSFIEHDGALPSFMIDGAKQAELEIKNLLLEKSQTEVEVSQLNIYNSNIDNAVEELKANGTYETRSKINLLLHEIIKSIVIDFELNDYAIMFKNGAKRFINDGIIQNVFRTTDHKQRQSELEEIFNWNRGQ

SEQ ID NO: 60027 - DNA, 50 bp, Pseudomonas aeruginosa
  source 1..50: mol_type = genomic DNA
cacaggtaaatcatggacgtgttgatcaagtcaggcgtataatacccgta

SEQ ID NO: 60028 - DNA, 40 bp, Pseudomonas aeruginosa; identical to SEQ ID NO: 4693
  source 1..40: mol_type = genomic DNA

SEQ ID NO: 60029 - DNA, 50 bp, Pseudomonas aeruginosa
  source 1..50: mol_type = genomic DNA
cacaggtaaatcatggacgtgttgggcaagtcaggcgtataatacccgta

SEQ ID NO: 60030 - DNA, 40 bp, Pseudomonas aeruginosa; identical to SEQ ID NO: 60020
  source 1..40: mol_type = genomic DNA

SEQ ID NO: 60031 - protein, 568 aa, Pseudomonas aeruginosa
MARLISYVRMSTSEQLKGISLERQRSLIADFASKNEFQEVIIYEDVGRSSFAEDENQKELNKFFIELEENKFDKGDVFALENIDRLTRRGAIDALLKVNKIIQKGLKIAIISDKEQRILEEIDIYSIITLSIDASRANKESEVKSQKGLINWEHKRKLAATEKVAMTKRAPSWIDTEIYTVFDEEKKKEIKRRRYVLNEEKAQVVRLIFDLTLKGYGCLKIKTYLNENNIKPFNDKVQYWEPSIIPKILKNPATFGLYQPQKQRSGKRDLVAAGDPIEDYFPPVISKEIFEQCRLIAENNFSERKGRKGEKFTNVFTGLLKCEKCGSPVHLLNCGIDKRNVSQHALIYLICKKAKFTKQCSTKRMRYDAFEASIFKAVNEINLVEVLNENNPLNELIKKQRSIETAVNKKKKLLENYEKSFIENDGEVPAFMISAAKTAEIEIKELEEEKKEILNEISSLNYYNNNLENSIEEIKNNSSYEKRAKINLLFHEIIKSISIDLEEKYSVITFKNDIQRIIDKEGFIINIDRNNALEIIEEDTTTISAEIASNPKLILEYFEKMRRDLTED

SEQ ID NO: 60032 - DNA, 50 bp, Pseudomonas aeruginosa
  source 1..50: mol_type = genomic DNA
actgggttaaatctacccgtcttgatcaagacggggctataataccccgt

SEQ ID NO: 60033 - DNA, 40 bp, Pseudomonas aeruginosa; identical to SEQ ID NO: 4693
  source 1..40: mol_type = genomic DNA

SEQ ID NO: 60034 - DNA, 50 bp, Pseudomonas aeruginosa
  source 1..50: mol_type = genomic DNA
actgggttaaatctacccgtcttgggcaagacggggctataataccccgt

SEQ ID NO: 60035 - DNA, 40 bp, Pseudomonas aeruginosa; identical to SEQ ID NO: 60020
  source 1..40: mol_type = genomic DNA

SEQ ID NO: 60036 - protein, 550 aa, Faecalibacterium prausnitzii
MNRERVKVYTYKRVSTTMQIDGYSLDAQKSRIKAFADYNDYEIVREYEDAGKSGKSIEGRIQFNQMMDDIKSGKDGVSFVLVFKLSRFGRNAADVLSTLQVMQDFGVNLICVEDGIDSSKDAGKLMISVLSAVAEIERENIRVQTMEGRIQKAREGKWNGGFAPYGYQLVDGELQINEEEAAAIRVIFDRYVNTDIGSNGIAKYLENHGIRKIQRQNGKNPLFDAHLIRLILKNPVYCGKIAYGRRRTEKVHGTRNDYHLVEQDNYLLVDGLHEAIISEEVWQAAQVKLLAQAKKYEHVNKGKDTRTHLLSGIVKCPICGAGMYGNKCIKHKKDGTKYKDFYYYGCKHRTMTRGHKCEYRKQIREELLDDAVTEVIVALVSKPKFASMMQEKINMKVDTSMLDQEIANHEKQLRQFYSIKSKLMEEIDSLDPDDRHYFKRKADLDDRLYRMYDKIEDEESQMIEARAKRQAIEAEKLTGDNIYKVLMCFDKLYSAMNDVERRRVMEALISEIQIHEDRQPNGQWLKSIRFRLPIIEEDMNLSLDNNEHVE

SEQ ID NO: 60037 - DNA, 50 bp, Faecalibacterium prausnitzii
  source 1..50: mol_type = genomic DNA
agtttggacaataatgagcatgtggagacggtatgtttattgtccaaact

SEQ ID NO: 60038 - DNA, 40 bp, Faecalibacterium prausnitzii
  source 1..40: mol_type = genomic DNA
gggtgatgtcccgcacggtgagctgagcaccgtccacggt

SEQ ID NO: 60039 - DNA, 50 bp, Faecalibacterium prausnitzii
  source 1..50: mol_type = genomic DNA
agtttggacaataatgagcatgtgctgacggtatgtttattgtccaaact

SEQ ID NO: 60040 - DNA, 40 bp, Faecalibacterium prausnitzii
  source 1..40: mol_type = genomic DNA
gtatggtgtacagcacggtctgctaggcacccgccgtggt

SEQ ID NO: 60041 - protein, 527 aa, Pseudomonas saudiphocaensis
MRFSDPRQAIGSSADRQLQYAQKWAADRGLVLDESLSLRDEGLSAYHQQHVKQGALGAFLKAVDEGRIPSGSVLIVEGLDRLSRAEPIQAQAQLAQIINAGITVVTASDGREYNRAGLKAQPMDLVYSLLVMIRAHEESDTKSKRVKASIRRLCEGWKAGTYRGLIRNGRDPQWLSWDGEAWQLVPERVEAVRFALDLYRQGEGATRAVRKMAERGYELTALGLAGQQIYRLVKQPALRGAKRISVDGEDYLLEDYYPALLTDDEFHQLQASTEQRRGRRGGSDIVGLVTGLGITWCGYCGTAVVAQNLLSRARADGTLADGHRRLHCTSDSNGTGCKAASCSVVPVEKALLAYCSDQMNLTRLMEPTDDGQQLRQRLNVCLQRQGEVERQLARVTEALLADDQGAAPLAFVRKARELEAELQQLHAEAEQLEREQAVQGKGQTPAAAEQWAQLAAESQDIYSPAREQLRQLVLDTFNRIVVYMRGVVPDPKSKTIAVLLVSRAGQRVMLEVDRRTGAWKASRARRD

SEQ ID NO: 60042 - DNA, 50 bp, Pseudomonas saudiphocaensis
  source 1..50: mol_type = genomic DNA
agtatagattttatagcttaagggcaccctaacgaaataaaccctatact

SEQ ID NO: 60043 - DNA, 40 bp, Pseudomonas saudiphocaensis
  source 1..40: mol_type = genomic DNA
gtccaccgttgccttgggacacccgagtgaaacgaaccct

SEQ ID NO: 60044 - DNA, 50 bp, Pseudomonas saudiphocaensis
  source 1..50: mol_type = genomic DNA
agtatagattttatagcttaagggttccctaacgaaataaaccctatact

SEQ ID NO: 60045 - DNA, 40 bp, Pseudomonas saudiphocaensis
  source 1..40: mol_type = genomic DNA
tgccaccgctgcctcggggttcccctgggaaaggcaccca

SEQ ID NO: 60046 - protein, 542 aa, Blautia obeum; identical to SEQ ID NO: 46976

SEQ ID NO: 60047 - DNA, 50 bp, Blautia obeum
  source 1..50: mol_type = genomic DNA
tatttgcgcaaacaacaactagcacatggcggttgtagatagcgcaagta

SEQ ID NO: 60048 - DNA, 40 bp, Blautia obeum
  source 1..40: mol_type = genomic DNA
gatccttgttgatgcgggacatggcggaagcgatccgggg

SEQ ID NO: 60049 - DNA, 50 bp, Blautia obeum
  source 1..50: mol_type = genomic DNA
tatttgcgcaaacaacaactagcagctggcggttgtagatagcgcaagta

SEQ ID NO: 60050 - DNA, 40 bp, Blautia obeum
  source 1..40: mol_type = genomic DNA
ggacagtggtgatgggggagctgtctgaagctatcccagg

SEQ ID NO: 60051 - protein, 515 aa, Bacillus wiedmannii
MKTAIYLRKSRADLEAEARGEGETLAKHRTTLLKIAKEMNLNVLAVREEIVSGESLVKRPEMLALLEEIEDNKYDVVLCMDMDRLGRGGMKEQGIILETFKRSNTKIMTPRKTYDLNDEWDEEYSEFEAFMARKELKIITRRMQRGRVASVEAGNYLGTHAPFGYDIHRLNKRERTLTINPEEASVVRMIFDWYANEDMGANAIRSKLNDLGYKSKLGNEWNPYSILDILKNNVYIGKVTWQKRKEVKRPDAVKRSCARQDKSDWIIADGKHEPIIPESLFEQVQEKLNSRYHIPYNTNGIKNPLAGIIKCSKCGYSMVQRYPKNRKETMDCKHRGCENKSSYTELIEKRLLEALKEWYINYKADFEKHKQDDKLKETQVIQINEAALRKLEKELLDVQKQKNNLHDLLERGVYTVDMFLERSNVISDRITEITSTMENLKKEIKTEIKKEKVKKDTIPQVEHVLDLYFKTDDPKKKNSLLKSVLEKAVYKKEKWQRLDDFELVLYPKLPQDGDI

SEQ ID NO: 60052 - DNA, 50 bp, Bacillus wiedmannii
  source 1..50: mol_type = genomic DNA
tgtcgtcaccttgttggtgtaattaggttgactccaacagggtaataaca

SEQ ID NO: 60053 - DNA, 40 bp, Bacillus wiedmannii; identical to SEQ ID NO: 52323
  source 1..40: mol_type = genomic DNA

SEQ ID NO: 60054 - DNA, 50 bp, Bacillus wiedmannii
  source 1..50: mol_type = genomic DNA
tgtcgtcaccttgttggtgtaattgagttgactccaacagggtaataaca

SEQ ID NO: 60055 - DNA, 40 bp, Bacillus wiedmannii
  source 1..40: mol_type = genomic DNA
cgaagccctggggcccagggaatctactccacgcagcact

SEQ ID NO: 60056 - protein, 640 aa, Streptomyces albus
MHTQGTMRAAIYARVSTDEQTRGFGLGIQEEAGRKYADSRGWSVVDVYKDEGVSGSLAQRPEFDRLIADARAGRIDAVIVHRFDRVARTVGTFYRLAETLKEHEVGIASVTQDIDTTSTGGKAMLGVLATFAEMEWNTIRERTQGGLQKKAEAGGWPGGQPPYGYRIEGKGKRGSHLVIDDREAEVLREARRMLVEEGLSTPDVAARLNAQGLMTRSGRPWSYGNLRNKLVSPAVTEAKVIFRNASRTGSGHSVKVGKDGTPRHGESVTIGLPPIFTPDEAAELRRALGQSATGKPKPQASVYPLSTRLYGLCGSHYSGMRRPGGRKYRCSGRRPKFEGAPVCDCEMIDADAVEAAVWGDVVKLLSDPDRLKTMAAEWVGLAGSDQATHADRIADLDRQIRERQDALNRAVEQQIRADSAALATALRAAVTKLAEEVEQLQEMRAEAEAWQAESAAAEQRARDLETLATVARDRLADMTPTEQAEVLALLDVRVTVTGPTPKTQVGQACGLAQWFVDHGRLVPGPLTDEAWAKVEPIVKAWEPSNHRLLDHRRVIDGVLFKLRTGCTWREVPAEYGKWSALHTRAFRWLRAGVWADLINALPNEGTPVPAAVPPLRIEGRVDPRTLAGRDDSGDLAASVS

SEQ ID NO: 60057 - DNA, 50 bp, Streptomyces albus
  source 1..50: mol_type = genomic DNA
cggggacctggctgcatcggtgtcccaagacccatacaccagggtgccgc

SEQ ID NO: 60058 - DNA, 40 bp, Streptomyces albus
  source 1..40: mol_type = genomic DNA
caggctcaccatgggcgttcccggcccggtgaccagcggg

SEQ ID NO: 60059 - DNA, 50 bp, Streptomyces albus
  source 1..50: mol_type = genomic DNA
cggggacctggctgcatcggtgtctcaagacccatacaccagggtgccgc

SEQ ID NO: 60060 - DNA, 40 bp, Streptomyces albus
  source 1..40: mol_type = genomic DNA
caggctcgccggggacgtttcctgttctgtccccagctgg

SEQ ID NO: 60061 - protein, 483 aa, Streptomyces scabiei
MSRSKLAKATITPGEPAAIYCRISHTRDEDQTGVDRQERICREIAERLQLRVESTHVYVDNNRSAWQRNRKRPGWEEMLKAMGEGEIRHVIVYHPDRLMRQPKDLEELLSIADDKRILLHGEANRRDLSDPDDRFILRIEVAHACRSSDDTSRRLKEALKDHAREGRPHVGNRPYGYTRDGRAIVEEEAEIVREVYRRFLDGESPNHIAQDLAARGIPTSKGKTWNPENVRHLLSSHFVAGLRFHLGEEVAVGTWPAIIDRGQWDEVQRLKEYRAQQHRDTKKRPLRNYILRGVVTCACGARMSGSNSVRYPYYRCTRADNTDQEKCNRSVSAVPLEAFVRDVAIKVLTQLDTSGYEPATTTRPEADTIADEKDRTKLRELKEMWLSDDDFTTADFKAMRAPIIKRMKERQRKTVKRPIAVLEGIAGPEAQVNWERLEEVEDHARMNAIYRFLFAAVIVRPPTRKGRGFDTDRVDIEPNPLDY

SEQ ID NO: 60062 - DNA, 50 bp, Streptomyces scabiei
  source 1..50: mol_type = genomic DNA
tcgctgtatgggcaagacttgactgacgtcatatccagctcatacagtgt

SEQ ID NO: 60063 - DNA, 40 bp, Streptomyces scabiei
  source 1..40: mol_type = genomic DNA
ggccgcgccgacgatgatcgacgactccctcagggccgcg

SEQ ID NO: 60064 - DNA, 50 bp, Streptomyces scabiei
  source 1..50: mol_type = genomic DNA
tcgctgtatgggcaagacttgacttccgtcatatccagctcatacagtgt

SEQ ID NO: 60065 - DNA, 40 bp, Streptomyces scabiei
  source 1..40: mol_type = genomic DNA
ggcagccccggccctgacttccctctccctcagggccagg

SEQ ID NO: 60066 - protein, 618 aa, Veillonella magna
MAGIKEEKKIYLVGIYCRLSKDDGTDNESASIATQKSILTDYVKKQGWHIAKTYVDDGYSGTNFQRPSFQNMIKDIESGLINCVITKDLSRLGRNYLDCGLYLEVFFPEHNVRYIAVNDGVDTLNKSAMDITPFRNILNEMYAADISVKIKSAYRARFQQGKFMGTTAPYGYIKDPADHNHLLIDDKVAHVVKEIFDLALKGNGVAKICRHLNKQHILRPAAYAAERGEIGFERHFEGNEDKRYIWSGNSVRSILRSPIYAGNLVGYKRIAANMKSKKRPSKLPEEWEVIPNTHEGIVTQEEFDIVQQLITSRRLPQNKGGFVNIFAGVIKCVDCGCALRAMNVHRRKRPEIIDCVQYSCNNYARNGRSECSAHNIEARDLFNAVLADINCFADMAVNDEKAVRAIEKRLTETDQSRAKALEKERKKLNKRLAELDRLFSSLYEDKVMERITERNFEMMSGKYQKEQLEIEARLKEVTETLNESYEKSRGIRDFLALIRNYQGLKELDATVINALIDKILVSEREKMADGTVKQEIKIYYKFIGFVDELHIIPTKRWAAMPAKNCTVCGVEYVPGSGASRYCPACAKKIRREKSNESKRRSREQKRIACMNCPQKMTD

SEQ ID NO: 60067 - DNA, 50 bp, Veillonella magna; identical to SEQ ID NO: 11112
  source 1..50: mol_type = genomic DNA

SEQ ID NO: 60068 - DNA, 40 bp, Veillonella magna
  source 1..40: mol_type = genomic DNA
tacatctacttgtcctagggagcgagagcgtttggaatcc

SEQ ID NO: 60069 - DNA, 50 bp, Veillonella magna; identical to SEQ ID NO: 37154
  source 1..50: mol_type = genomic DNA

SEQ ID NO: 60070 - DNA, 40 bp, Veillonella magna
  source 1..40: mol_type = genomic DNA
tccatccacatgtgctaggtggggagctgggctggcatcc

SEQ ID NO: 60071 - protein, 519 aa, Amycolatopsis rubida
MGHSHNVSAGQGGRQPILDSYARLSRNQAGKLEKCATQHADNREVIERLGAVLGEEVSDPKLSAWNPKVRRPGWERIMKRIAARASDGVVLWNTDRGWRQCLDLEDLFKLIEGHDSVTVASSHGRYDLSDYNDRHQLRQEVAHNQRNSDEASDRISRRFDVLRRKGIPHLQGRSFGFPGLDRTVLKEDALDEDDKDTREQVPAELVERERAALRSGTSAILAGVTLTRLAEEWNAAGLRTVTGGSFTPVQVREILLRPRNAGLVEHDGDFVGQMRGGAVVDPGDFDRLRTLFAGRTRGRQPGNAYIGSGITTCPKCGRRLSARPHVGEYPGGERRRQYHCPKARGGCGKVAADMRAVDREIRGLVIAIMSDPNHAAAIKVARALISDRLATVEAEIRECEERQEAIAAKWGARKMTDKAFDKANEPLVKDLARLNAEREELTGGNPNGPTEAMSREEAAEKWDAADVGEKRAMLRDALGRDTLYVDPAEGKGFRRFDPKRVRVEPYKHKQSEAGRKTTP

SEQ ID NO: 60072 - DNA, 50 bp, Amycolatopsis rubida
  source 1..50: mol_type = genomic DNA
taggtaaccaaataggtatccgctctagcggaccctcttttggcgaccta

SEQ ID NO: 60073 - DNA, 40 bp, Amycolatopsis rubida
  source 1..40: mol_type = genomic DNA
gtgagtgtttatcccggctctcaccgggataaacactcac

SEQ ID NO: 60074 - DNA, 50 bp, Amycolatopsis rubida
  source 1..50: mol_type = genomic DNA
taggtaaccaaataggtatccgctgcagcggaccctcttttggcgaccta

SEQ ID NO: 60075 - DNA, 40 bp, Amycolatopsis rubida
  source 1..40: mol_type = genomic DNA
gtgagggtttatctcagctgctgccgcgacagacaatgcc

SEQ ID NO: 60076 - protein, 464 aa, Mycobacterium colombiense; identical to SEQ ID NO: 43556

SEQ ID NO: 60077 - DNA, 50 bp, Mycobacterium colombiense
  source 1..50: mol_type = genomic DNA
ctctgcgatcttgttgcgtttgtagtcgcgtggcatcaaagctagcagaa

SEQ ID NO: 60078 - DNA, 40 bp, Mycobacterium colombiense
  source 1..40: mol_type = genomic DNA
actggaccgcacgttgcgggtcgcgtggagcctggccgac

SEQ ID NO: 60079 - DNA, 50 bp, Mycobacterium colombiense
  source 1..50: mol_type = genomic DNA
ctctgcgatcttgttgcgtttgtactcgcgtggcatcaaagctagcagaa

SEQ ID NO: 60080 - DNA, 40 bp, Mycobacterium colombiense
  source 1..40: mol_type = genomic DNA
acttgaacgcaggtaggggctcaccaagggcctggcccac

SEQ ID NO: 60081 - protein, 438 aa, Rhodococcus wratislaviensis
MDNGKTLVSCAESMDLSTTTGRMLAAIIAGIAEGELEAIRERTLASRAKLRERARWAGGKPPFGYTAVKRTDGQGWALEIDPLASTLVRRIVDSVLDDQPFTATARNLNDEGVLTPGDYYRTVRAGTPSLHRVDGIEPRSKWAPTTLRQLLRSKALRGHVHHNGETVRGDDGQPLQMAEPLVTTDEWELIQAYLDRRAESRKGIKRTEASPLSGVAVCLVCGNPLHHSRHTTKGHQYRYYRCPDRHTTQIPAEYLEELVEESFLRDVADLEVRERVWVPGDSRDADLKDAQSALDELTKALGGMRSAQAVQRIHEQLRAVDARIIELESTPAREARYEYRATGGTYRDAWGAADTDGRRELLLRSGISVAINLNTGGVRRSKFHDGNWSVDIRIPEGFYEALGVEMPEHVRERLYNPKELTEEEWKALAAEPSYYEGA

SEQ ID NO: 60082 - DNA, 50 bp, Rhodococcus wratislaviensis; identical to SEQ ID NO: 9147
  source 1..50: mol_type = genomic DNA

SEQ ID NO: 60083 - DNA, 40 bp, Rhodococcus wratislaviensis
  source 1..40: mol_type = genomic DNA
gttgggtgggattcggggttcgtggaacatcactcggaac

SEQ ID NO: 60084 - DNA, 50 bp, Rhodococcus wratislaviensis; identical to SEQ ID NO: 9149
  source 1..50: mol_type = genomic DNA

SEQ ID NO: 60085 - DNA, 40 bp, Rhodococcus wratislaviensis; identical to SEQ ID NO: 9145
  source 1..40: mol_type = genomic DNA

SEQ ID NO: 60086 - protein, 526 aa, Sphingobacterium mizutaii
MTQTLFFDNFAKGKKEHKVLKSSKDCVIYTRVSSSQQADNLSLATQLKACTLYAEKMGYEIAATFGGTYESAETDERKQFTAMISFVKKYRGKISYILVYSLERFSRNDNSIWLTNELRRLGIEIVSVTQPIDTSNASGQMQQKMLFLFGEFDNQLRRQKCMAGTREMLLRGDWPTQPPMGFEVVRQNGKRRIVINAKGRLLRQAFHWKAFDNVSIETIRERLAQKGLKICHQHMSKILRNPFYCGMMAHNMLEGKVVKGNQEELVTKEVFLKVNGLLRENAQGYRIVEENAQIPLKRFMVCGHCGKPMRGYIVKKKNLYYYKCSTKACNNNKSANALNTHFERILHTFKVEGDKGITKVINQQAIARFNEQTSGEQAEYKALQEQHADIIKKIDRLEERYIEEEIGSDLYSKYRGRYKAEKEEIEKNLMKLARQVSNLDNGVGFATKFALELPLKWVSADYNTKKRIQFLLFPEGITYSKKTDECRTPRINSVFLYIAYFQQITSNKKRGIPELGLDFASFATLV

SEQ ID NO: 60087 - DNA, 50 bp, Sphingobacterium mizutaii
  source 1..50: mol_type = genomic DNA
ttttgcctcttttgcaactttggtagggtgcagttgcggaaagtctaacc

SEQ ID NO: 60088 - DNA, 40 bp, Sphingobacterium mizutaii
  source 1..40: mol_type = genomic DNA
aagctgagctttttccagtagcggggagcaggatcgaact

SEQ ID NO: 60089 - DNA, 50 bp, Sphingobacterium mizutaii
  source 1..50: mol_type = genomic DNA
ttttgcctcttttgcaactttggtatggtgcagttgcggaaagtctaacc

SEQ ID NO: 60090 - DNA, 40 bp, Sphingobacterium mizutaii
  source 1..40: mol_type = genomic DNA
aagcacagcttttttcagcatctgggtacagtcttgaatt

SEQ ID NO: 60091 - protein, 478 aa, Corynebacterium xerosis
MVELVALRKTNEVAAYVRASMDRKGDRWTVDTQLRKIRALAEAKDWNVVEVYEDNAVSATKKRRAGTRWAEMLDDARAGRFSMVVAVDMDRLLRSTKDLNTLIDLGLRVVTVDGEIDLSTADGEFRATMLAALARFEARRKAERQIRSNERRRAEGIPASTWKAFGWTREGEVIEEEAAAVRRAFDAFLGEPSLSIRRIREDLNNAGHLTARGSEFSVDAVRYLLANSLYAGFIRHYKTGELYPVQGEAFPPIVGEQTWRAAVAKLEDNVRRSARQGNQPKYLLSTIGLCGKCGATLVSGTNSRKQPTYRCGEQFHLTRQREPVDAMVTEAVLTRLSSVDVHDLVMPQEAAGPDREELLTERNALVERVKELSPLLRDIHQPVLEITAAINDVKARIDEIDAELLDRSVSVAAKLLAEVDEPVGTTERREVVESKWKALDMDRRRMLVDELVTVTIEPIMPGHVKFDPDLVRIEPRRD

SEQ ID NO: 60092 - DNA, 50 bp, Corynebacterium xerosis
  source 1..50: mol_type = genomic DNA
caacgccacaaccccgacatgcgctagcgcatatcggggttgcaacactg

SEQ ID NO: 60093 - DNA, 40 bp, Corynebacterium xerosis
  source 1..40: mol_type = genomic DNA
cgacgtcgccggcacgtagtagagcaacgcgctggcggcc

SEQ ID NO: 60094 - DNA, 50 bp, Corynebacterium xerosis
  source 1..50: mol_type = genomic DNA
caacgccacaaccccgacatgcgcgtgcgcatatcggggttgcaacactg

SEQ ID NO: 60095 - DNA, 40 bp, Corynebacterium xerosis
  source 1..40: mol_type = genomic DNA
ctggctcagcgacacgtaggtgaagaaggcactggcggcc

SEQ ID NO: 60096 - protein, 579 aa, Corynebacterium flavescens; identical to SEQ ID NO: 11376

SEQ ID NO: 60097 - DNA, 50 bp, Corynebacterium flavescens
  source 1..50: mol_type = genomic DNA
tactcgtatgtgtaagcacacgatggtacgccaatcatcacgtaacatat

SEQ ID NO: 60098 - DNA, 40 bp, Corynebacterium flavescens
  source 1..40: mol_type = genomic DNA
tgacccggaattgtgcttttgtaccccgtacgggatttga

SEQ ID NO: 60099 - DNA, 50 bp, Corynebacterium flavescens
  source 1..50: mol_type = genomic DNA
tactcgtatgtgtaagcacacgattgtacgccaatcatcacgtaacatat

SEQ ID NO: 60100 - DNA, 40 bp, Corynebacterium flavescens
  source 1..40: mol_type = genomic DNA
tgagacggaattttgctcttgtcccccagactggagtgca

SEQ ID NO: 60101 - protein, 567 aa, Mycobacterium avium
MVRALIVIRLSRVTDATTSPERQLQACQELCEKRGYQVVDVAQDLDVSAGSTSPFNRPQLGDWLTNRLGEFDVLVTCRMDRIVRRLLDLADLIRWCQEHSVALVSATEPFLDLTAPFGDIVALLVAKVAEMELAAISERNTSAARYNIRAGKYRGGVPPWGYLPDDSTGEWRLVKDPEQARLILEVVDRVLAGEPLRAIAHDLTERKIPTPRDRFAQHQGREVNGYEWHSGGLKRALTSQTLLGYAVAREPLLDAQGRIQRDAKGRKLFGPETVVRNDDGSPVVRADSILKPEVFERISVELANRENRKEPTKRSTGLLLQVVYCGVCGRPAYRFKGGTGRKPRYRCSSAQNRETCGNNSIPLDYGDYAVESILLGMLGASERLVRVWDSGSDHSAELAEVDAELVDLTSQLGTPAFRAGTPQRIKLNQRISELATRQAELSAKEIEPAGWTWQGTGELFSEWWERQDVTTRNVWLRSMNVRLEFWCSSDGRRVKVDHVNLDLGDLHTLTEQLRASGPAAEWQAVFDAMRENGVAGMEMRGDRVVLVSPDGQRSQAFDLTSDVPIVE

SEQ ID NO: 60102 - DNA, 50 bp, Mycobacterium avium
  source 1..50: mol_type = genomic DNA
gcagtgtaattcttgacaatcgaatactcgaacatgtagttttacaccct

SEQ ID NO: 60103 - DNA, 40 bp, Mycobacterium avium
  source 1..40: mol_type = genomic DNA
cgcgaccgtcccgatggcgtattcgaccgtgctcatgccc

SEQ ID NO: 60104 - DNA, 50 bp, Mycobacterium avium
  source 1..50: mol_type = genomic DNA
gcagtgtaattcttgacaatcgaaatctcgaacatgtagttttacaccct

SEQ ID NO: 60105 - DNA, 40 bp, Mycobacterium avium
  source 1..40: mol_type = genomic DNA
cccgacccaccctctggcgatggagaccgggctcctcccc

SEQ ID NO: 60106 - protein, 513 aa, Eubacterium rectale
MRNYVIALYIRLSAEDFKTESLSIPNQKLILREKAMSLPEWDDSEILEFIDNGHTGTNFERPAVQELLTMVQAGKINCIIVKDLSRFGRNSIETGYFIERVFPLYHTRFISVSDDFDTANFKGDTGGIDIAFKYLISEWYSRDMSMKTKSAKYAKMRRGEYQSVICPYGYRKSADGRMEPDEDVAPNVQMIFQWASEGNTAAEITRKLYAMNIPTPGEYRKLKGKAYYNVSRTNGVWSTSTVLRILEDQRYIGTYVIGKRKVKEIGSRHTQLKDESEWFKIPNHHPAIVSVDLFERANASIKRFSLSNKKPRDYLLRGKVFCGCCDHAMSLRNGAWFYCRHSEVAETLPCHGVRIKMADLEQVVFETIRAQMCPALGIDSNKDKLDLQTVQQTEHEEKLRSIQDSKRYLYEQYALGEIDLETYRTRKAVYDTELVQAKNVHAVITAQTKQIKSDYEIKLKQQEIVQKVGNANMLTKALIDRLINKVYVFPGDRIEIEYATQDFLETKESEKEV

SEQ ID NO: 60107 - DNA, 50 bp, Eubacterium rectale; identical to SEQ ID NO: 14627
  source 1..50: mol_type = genomic DNA

SEQ ID NO: 60108 - DNA, 40 bp, Eubacterium rectale
  source 1..40: mol_type = genomic DNA
aaggttgcttgtgtaggtgtgtcgcaactggtgaaaatga

SEQ ID NO: 60109 - DNA, 50 bp, Eubacterium rectale
  source 1..50: mol_type = genomic DNA
tttgtcgtgggcttgacatacgggacccgttacggtataataacgacaaa

SEQ ID NO: 60110 - DNA, 40 bp, Eubacterium rectale
  source 1..40: mol_type = genomic DNA
agggttccttgggcagctgactctgaactggtgaccaggt

SEQ ID NO: 60111 - protein, 553 aa, Paraburkholderia aspalathi
MTTKSRVYSYLRFSDPKQAAGSSADRQMEYANRWAAERGLQLDETLSLRDEGLSAYHQKHVKQGALGVFLLAVSEGRIAPGSVLVVEGLDRLSRAEPILAQAQLAQIINAGIAVITASDGKEYSRENLKANPTELIYSLLVMIRAHEESDTKSKRVKAAIRRLCQGWIAGTWHGIVRNGKDPHWTRVVDRTRFELEPERALAVRTMIDMFRQGHGAIRTIRELDERGLSITNGGNQSQHIYKIIRNRALIGEKTLEVDGEVYRLPNYYPALLTEAEFAELQHLAEQRGRRKGKGEIPGIVTGLGITCCGYCGTAVIGQNLMSRKRKENGHPQDGHRRIICVGYSHNAGCRVAGSCSVVPVERAVMNFCADQMNLTRLLEGDDGSTALAGRLAQSRQRAKELEAQITRITDAILADSDAPPVAFAKKARELEALLAAEHKGIEALEHELAACANNTTPAAAEAWAELVQGVEELDYDSRTQARQLVADTFSKIVVFRKGFDLTHNPYDTIDLLLVAKHGNTRMLRVDRRSGAWKATEDLVVSGDIPLPTTSTAV

SEQ ID NO: 60112 - DNA, 50 bp, Paraburkholderia aspalathi
  source 1..50: mol_type = genomic DNA
ggtttacttatgctatcttacgggcagccgagagatactatacctatacg

SEQ ID NO: 60113 - DNA, 40 bp, Paraburkholderia aspalathi
  source 1..40: mol_type = genomic DNA
atcgacaagcgctttaggacagccgaggctgacgaaaccg

SEQ ID NO: 60114 - DNA, 50 bp, Paraburkholderia aspalathi
  source 1..50: mol_type = genomic DNA
ggtttacttatgctatcttacgggccgccgagagatactatacctatacg

SEQ ID NO: 60115 - DNA, 40 bp, Paraburkholderia aspalathi
  source 1..40: mol_type = genomic DNA
atccagaagcgctttttggcccccgaggctgtcggcatag

SEQ ID NO: 60116 - protein, 523 aa, Mycobacterium dioxanotrophicus
MTNALVVIRLSRVTDATTSPERQLKACKELCAQRGYNVVGVAEDLDVSAGKTTPFSRPQLGAWLKRPHDFDVIVVFRVDRIVRRLFDLADLIRWCQEHRIALVSATEAFIDLTPASPFGDIIALLVAKVAELELAAISERNRSAAQHNLRAGKYRGGPPPWGYLPQQDEDGRWGYVQDPEQVAVILEVVERVLAGEPLRAIGHDLTERGVKTPRDRFAEVRGREVKGYAFHPGGLKRALTSPTLLGRVVVNEAPKDAHTRAEDLVRDDSGSPVVRAEPILTRDVFDRVGVELAGRENRKEPTVRTTSLLLGVIFCGVCGRAAYKLKGGKGRNPRYRCASAQYKNSCTNRSIPLAYAENELERRILQNLGSFERRRRVWFAGEDHTDELAEVNATLEDLADSIGKPGFTRGTPQRARLDARIEALSVRQAELSAAPTQSAGWRYEPTGVTVAEWWHNATLEERNVWLRQYGFRAVWRSHSEGTRTVVDEFKLDGDLTMDLDADVLFGPMVDIMTALRDADLPDD

SEQ ID NO: 60117 - DNA, 50 bp, Mycobacterium dioxanotrophicus
  source 1..50: mol_type = genomic DNA
tgcgctcaaagttttacaatcggatagtcgtttgcccgctattactaccc

SEQ ID NO: 60118 - DNA, 40 bp, Mycobacterium dioxanotrophicus
  source 1..40: mol_type = genomic DNA
cgggatgtcgacggtcgaatatgccatcggcaccatcgct

SEQ ID NO: 60119 - DNA, 50 bp, Mycobacterium dioxanotrophicus
  source 1..50: mol_type = genomic DNA
tgcgctcaaagttttacaatcggattgtcgtttgcccgctattactaccc

SEQ ID NO: 60120 - DNA, 40 bp, Mycobacterium dioxanotrophicus
  source 1..40: mol_type = genomic DNA
cccggtgtggccgctctgattggccatcggccccatcgcc

SEQ ID NO: 60121 - protein, 563 aa, Enterocloster bolteae
MARKSRVITETQKQESVKSFEWKIGIYIRLSKEDLRNNDESESVTNQRKINLEFVEEKFCNETYIIYDIYVDDGRSGTTEDTRPDFQRLSKDIREGNVNCVVCKTLARAFRNYADQGKFLEQYLPTYGCRFIAFGNPYVDTFANPDCTQNMEIPINGLMNDRYAARTSEDVRKTFRTKRNNGEFIGAFAPYGYLKNPENKNAFIIDEEAAEIVKEIFEKYLAGMSKLSIVRYLNDHSILCPTVYKQKRLGLKYQNPHSDPTKNPLWSEKTVGDILKNQMYCGDMVQGRYRIKSYKVHIQEKVPEDEWFIKEKTHEPIIDREIFDKVQRLLQKDTRTSPKNDTLYLFSGFLRCADCEKAMIRSEVKKHVYYYCSTYKRRSKKACTKHSIQHNRLEAAVLFAIQQYVYLAIDYTKIIEQINRAPIIKSQDKKLLEAISKKERELAKVIRYKQAVYQDWKDNEISQTDYRRMREDYEAQEKEITTTIKKLQNERAEQENGVDTENPFLVAFRKYENVTTLSRDILIDLVDSITVYEGGNISIVLRFADELRRVQDFIEINTHSEAV

SEQ ID NO: 60122 - DNA, 50 bp, Enterocloster bolteae
  source 1..50: mol_type = genomic DNA
ggttttcttattatccatggctccaccggacccaccataataagaaaacg

SEQ ID NO: 60123 - DNA, 40 bp, Enterocloster bolteae
  source 1..40: mol_type = genomic DNA
caccggaccaactggtgccaccggtcctacaggtgcagct

SEQ ID NO: 60124 - DNA, 50 bp, Enterocloster bolteae
  source 1..50: mol_type = genomic DNA
ggttttcttattatccatggctccgccggacccaccataataagaaaacg

SEQ ID NO: 60125 - DNA, 40 bp, Enterocloster bolteae
  source 1..40: mol_type = genomic DNA
cacaggacccagtggtgcagcagctcctgcagctgcacga

SEQ ID NO: 60126 - protein, 502 aa, Polycyclovorans sp
MRVAAYARYSSDQQRAESLDDQLRNVRHWCQRNGVPEPVAYTDAAISGASDNRPGYRALVADITGGRVDLVVVDDLSRLSRDSSEIGQLLKRVRFAGARLVGASDGVDTARKGHKIDVGLRGLMGEMYLDELADKTHRGLTGRALAGASAGGLPYGYRVAGTGQRTIDPDHAQVVRRIYNMAAAGHTPRQIAAALNADGVPSPRGSSWAMSVIYGDRKRGIGILANPIYRGRQIWNRSTWTKHPDTGRRLRSERPENEWIITEHPELRIITDAQWQAADATLQNRRSRSGAPPGRSPRHMLSGLLKCCDCGGPMVAVDAYRYGCARAKDRGPTVCASRLRVARTHVESALLAGIKRDLLSEAAYHAFEREARRLLTQAAPDTGNIEKRIRDAERTRENIMAALKAGIITAGTRQALIDAEQGVTDASAELKAARNYQPAQILPRARETWRRLVEQLADARDTPEIRSAVRELLGDEIVLGEDAGGVFAEARNGSQILVVAGA

SEQ ID NO: 60127 - DNA, 50 bp, Polycyclovorans sp
  source 1..50: mol_type = genomic DNA
cagtcagatattagtggtagcgggggcacgctccgagcaatatctgagca

SEQ ID NO: 60128 - DNA, 40 bp, Polycyclovorans sp
  source 1..40: mol_type = genomic DNA
gccaaagattggtagcgggggcaggattcgaacctacgac

SEQ ID NO: 60129 - DNA, 50 bp, Polycyclovorans sp; identical to SEQ ID NO: 60127
  source 1..50: mol_type = genomic DNA

SEQ ID NO: 60130 - DNA, 40 bp, Polycyclovorans sp
  source 1..40: mol_type = genomic DNA
gctagaaagtggtagagggggcaggatttgaactcaggca

SEQ ID NO: 60131 - protein, 533 aa, Pseudomonas chlororaphis
MPYAVGYARFSSTKQGKGSSLSRQQELISEWIENNKGYQIYPKKFEDLGRSASKGDHLKHGFGKLLEAIEQGEIKEGDVILVEAIDRIGRLPEMQMISLIDQIVSAKVQIITLQDGCTYGPIIKSEQIWSLVGKVQQAYMYSASLSERVKASYKRREALAMNGIIPKRRTPIWLNSDGTVKPDIAEAMKGAFEDALSGIGERRILKRLIQSNTAFETINPSTIRRWLTNRIAIGYWKDYKIYPSIVSDELFYQVQKRFNDEYKPPTAPRTHFLSGLIKCGDCGANMQVKINKNSPFTMRCTTRCVYGDLRCKNSKSFPVPVLLHVCYDTATGAVEKAMQNIELSSSQKKLIVIDGQLRDVGEKINNIVQSLEKYGPLPELDRKIVSLSEQRNKLEREKLLITNDTVENVSKYDTAWDYQHELIADHPMRLNALLQSSGYQIDCYSGGLMVANTSGNDFSKCVYEGYNRKIQAYKISARGNVHHITNRDGSLTKERLERFKTMLARQRTGDTTTFKAIETSAAELEMYEFYSTI

SEQ ID NO: 60132 - DNA, 50 bp, Pseudomonas chlororaphis
  source 1..50: mol_type = genomic DNA
cgtggttgtattgccgcctttttctcgctaatatctgcattaccactacg

SEQ ID NO: 60133 - DNA, 40 bp, Pseudomonas chlororaphis
  source 1..40: mol_type = genomic DNA
cgtgctggccgccttgaactcgcagttcttgtggtcgatc

SEQ ID NO: 60134 - DNA, 50 bp, Pseudomonas chlororaphis
  source 1..50: mol_type = genomic DNA
cgtggttgtattgccgcctttttcctgctaatatctgcattaccactacg

SEQ ID NO: 60135 - DNA, 40 bp, Pseudomonas chlororaphis
  source 1..40: mol_type = genomic DNA
cgtgctggcctcttggagcctgcatttctagtgggacaaa

SEQ ID NO: 60136 - protein, 548 aa, Mycobacterium xenopi; identical to SEQ ID NO: 45326

SEQ ID NO: 60137 - DNA, 50 bp, Mycobacterium xenopi
  source 1..50: mol_type = genomic DNA
gagtcgtgtcgccggctgtgtccgaggggggacttgcccacctacgacac

SEQ ID NO: 60138 - DNA, 40 bp, Mycobacterium xenopi
  source 1..40: mol_type = genomic DNA
cccctgacaagcgtgtccgaggggggacttgaacccccac

SEQ ID NO: 60139 - DNA, 50 bp, Mycobacterium xenopi
  source 1..50: mol_type = genomic DNA
gagtcgtgtcgccggctgtgtccgacgggggacttgcccacctacgacac

SEQ ID NO: 60140 - DNA, 40 bp, Mycobacterium xenopi
  source 1..40: mol_type = genomic DNA
ccactcacaaacgtgtgccactggggcctagagtcccaac

SEQ ID NO: 60141 - protein, 558 aa, Roseburia intestinalis; identical to SEQ ID NO: 3086

SEQ ID NO: 60142 - DNA, 50 bp, Roseburia intestinalis
  source 1..50: mol_type = genomic DNA
aggtatcgttatcttacctcaacaaaagatgaggttagataacgatactt

SEQ ID NO: 60143 - DNA, 40 bp, Roseburia intestinalis
  source 1..40: mol_type = genomic DNA
tttaaatgccggacggtcaaaagttgcccctgaatagccg

SEQ ID NO: 60144 - DNA, 50 bp, Roseburia intestinalis
  source 1..50: mol_type = genomic DNA
aggtatcgttatcttacctcaacaccagatgaggttagataacgatactt

SEQ ID NO: 60145 - DNA, 40 bp, Roseburia intestinalis
  source 1..40: mol_type = genomic DNA
ttaaaatgccacagggtcaccatttccaccccaatatcag

SEQ ID NO: 60146 - protein, 503 aa, Nitratireductor aquimarinus
MLQPRDLKGRTAISYARWSSERQGAGDSLRRQTEEAERFCDTYGLKLDRQIIDDGVSAFKGANLEADLGRFVAAVRSGEIPSDVVLLVEALDRVSRVNHMDALEYLSGLLKTGVTVVTLMDNRVHTLDDYRNNVASILMSLMAMSAAHEYSAKISERVRASWRGRAEKAKQGSIRISKVPFWIDRETQELNERADTARQIFAWAEEGLGQAAITQRLNALGIPSPSGKPKWGKDAVSTTLSNRAAYGSYTVKGEEIRDYFPPIVTEAQWLALRDRTAARTHNPQASNTANLFSKLLRCAHCGSPLNLTSSKQKGRTFRYLSCSGRAFKRTDCTMPNWNYQEVEDEIISRLGFLAVPLDEGDNSADSGREREIEEAIKVLSSRYDNTIAAIVDAEEPAVRQALTKKADEIAGQKQAKESELAGHRQSMARISVSAVADIAADTEEIRRLVREDRAKAKELIGDLIERIELEVDREEDRTGGDEMRFAHVTIRGRKPHTIGFTQG

SEQ ID NO: 60147 - DNA, 50 bp, Nitratireductor aquimarinus
  source 1..50: mol_type = genomic DNA
attacgtagaaagtcggatagggcttgccttgaccgacagtatacgtatt

SEQ ID NO: 60148 - DNA, 40 bp, Nitratireductor aquimarinus
  source 1..40: mol_type = genomic DNA
gttctcgggcggatagggcttgtcgagcccgccggccagc

SEQ ID NO: 60149 - DNA, 50 bp, Nitratireductor aquimarinus
  source 1..50: mol_type = genomic DNA
attacgtagaaagtcggatagggcgcgccttgaccgacagtatacgtatt

SEQ ID NO: 60150 - DNA, 40 bp, Nitratireductor aquimarinus
  source 1..40: mol_type = genomic DNA
gttctgggcagggcaggaggcctcttgcccgcctgccagc

SEQ ID NO: 60151 - protein, 543 aa, Arthrobacter sp YN
MSIANQNKELAALAEREGWEIVATFTDDGLSGGKPREKADKALRMLRDNEADVIAVYKFDRWSRMGARAVADLQDVLDARAANHSPALFIALSDGLRSDSPAWDIQVALMAALGRTERQLIRSRVAAARKYQRSTFRHSGEPAYGYRTIPHPDGKGRALELHPEESAVVRRMVDAVLDGATGYAVAKMLNAEGIKPRRSEKWTAPGVADLLRRDALLGYMTHRRPGENSRTRRPILGEDGLPVQVWPAIVTPEESAQLHAALARRGDWNKMPGAGRTRASRLLSGLVECATCGRTMRVNYTDKLKDGNRAARYVCSAPAGACPAKVSIHADMLEKHLTSEFLNVAGKLDVYEVRESTTRNVGDLAQVEQAIAATAADMAAPGADIAFLAARMAELHARRTALEAVPVETLTETVATGETFAEAWENRDTAGRRKLISSALSRRVVVKPAVKGSRKLDATRLDIPWQWTEPDAIDPAHFDDWEAATENQPNHARERICGTGPPMELTYKPDATDFRRWLLTDAERTVRAEEERLTSGDEDNGRV

SEQ ID NO: 60152 - DNA, 50 bp, Arthrobacter sp YN
  source 1..50: mol_type = genomic DNA
atgtgtcatttattagacaacggctggccgctttcttacaattgacacat

SEQ ID NO: 60153 - DNA, 40 bp, Arthrobacter sp YN
  source 1..40: mol_type = genomic DNA
cacgaagtttgggagggtctggccaatatctgcctcaacc

SEQ ID NO: 60154 - DNA, 50 bp, Arthrobacter sp YN
  source 1..50: mol_type = genomic DNA
atgtgtcatttattagacaacggcacgccgctttcttacaattgacacat

SEQ ID NO: 60155 - DNA, 40 bp, Arthrobacter sp YN
  source 1..40: mol_type = genomic DNA
cttggtgtgtggcagcatcacgccaatctctgcctcctcc

SEQ ID NO: 60156 - protein, 476 aa, Mesorhizobium opportunistum
MELDAKLTFRDLGKSAYRGANQETGYLGEFIALVESKDIKPGSYLLVESLDRLSRQPPMRTLKLLSRICEGGITVVTLDDNRAYTEEALDKDHVSLLVALMVAVRANEESEKKGRRVGEAWANKRRNAATKPLSALCPGWLRLSEDKKAFDLIPERAEIVRRVFDMTLAGKGQHAIAEALNREGVPKFGRASHWHRSYIKKMLADPSTVGAFTPHRVETVNGIKRRVPTETVEGYFPAVIDREKFDQVNAMSSGRAVKESRGGGPANILAGLSKCPGCGSTMTRVNKGGKKGGRPYLVCTKAKAKGGCDYGHKVRIDGIEAAIIQNAGWLNAALPAPDAALQINYERATAADDAVNDEIERLVGAITKLGERSSRALLNRLHQNEAAREDIRRNIADLERLIAETLTNRVQVTAGQFVDATEAEPRDVALINATLRQLFSKVEVNWPSGQLLFHWKHAPAETTGIMYAWPNEEAPH

SEQ ID NO: 60157 - DNA, 50 bp, Mesorhizobium opportunistum
  source 1..50: mol_type = genomic DNA
acggggtctttcgtacacatcatgaacatggtatggacagaagaccccct

SEQ ID NO: 60158 - DNA, 40 bp, Mesorhizobium opportunistum; identical to SEQ ID NO: 58518
  source 1..40: mol_type = genomic DNA

SEQ ID NO: 60159 - DNA, 50 bp, Mesorhizobium opportunistum
  source 1..50: mol_type = genomic DNA
acggggtctttcgtacacatcatggccatggtatggacagaagaccccct

SEQ ID NO: 60160 - DNA, 40 bp, Mesorhizobium opportunistum
  source 1..40: mol_type = genomic DNA
cccgggcgccccgtgcctcgcaggagtgtggacgccgccc

SEQ ID NO: 60161 - protein, 465 aa, Staphylococcus schleiferi
MNVAIYCRVSSQEQANEGYSIHEQERKLKSFCEVNNWKNYKVFVDAGVSGGTINRPAFNNLLANLDKFDLVLVYKLDRLTRSVRDLLSLLETFEEHGVSFRSATEVFDTTSAIGKLFITIVGAMAEWERSTIRERSLFGSHAAVREGNYIRVAPFCYDNIDGKLVPNEHKKVIEYIVKKLLEGVTATEIARRLNNANNYPPTIKNWSKTTVIRLVNNPVMRGHTKHGDLFIENTHEPIITEHNYKRISERLSSRVNYKKQTHTSVFRGVLECPQCGHKLHYFKSKLKNKSKTYYSEGYRCDYCRTDKTARNIAITFSEIEREFIEYMSNIRLSDNYGIEVEPKNEVIKIDINKIMRKRSRFQEAYGDGLMTKEEFKQKMKETQKLIDEYEEAESKNDVDDHITKEQVQAVQNLFRHIWDSPNVTREDKEEFVRQSIKKIDFDFIPKSKVNKTPNTLKINNIDLHF

SEQ ID NO: 60162 - DNA, 50 bp, Staphylococcus schleiferi
  source 1..50: mol_type = genomic DNA
catgtatggtttagcactttgtaggtggatattgttacaaaccatacata

SEQ ID NO: 60163 - DNA, 40 bp, Staphylococcus schleiferi; identical to SEQ ID NO: 51873
  source 1..40: mol_type = genomic DNA

SEQ ID NO: 60164 - DNA, 50 bp, Staphylococcus schleiferi
  source 1..50: mol_type = genomic DNA
catgtatggtttagcactttgtagtaggatattgttacaaaccatacata

SEQ ID NO: 60165 - DNA, 40 bp, Staphylococcus schleiferi
  source 1..40: mol_type = genomic DNA
taataaataaatgaataaatacgctgcattactgctcatc

SEQ ID NO: 60166 - protein, 650 aa, Gimesia panareensis
MAFGFYFVCVPFLKNLRILFYGRISKDEQRQQSIEDQLQYCKEFLSEAGVDVTSVEMIFDSGISGEVHSRPGIDQVRRGIWDRKWDLIICEDSSRLYRSISPCMDLVGAAVDNDIRVICINDRVDTANDDWQQKLEEAQRHHGQDKFFTRYRIKRTHNGLWEKGAAIGLLRAGYERYQKDPDQHNAPKYDRIDPQWVEAIRTAFEMVADGQSLDTVALHLTEQGVRKTTNAQTEEWTECNVLSLIRCPLYRGEERFRETISRKQYSTGKSKPVKNSDPDKILTRAMPHLRMVEDWLWHKANQAIDQRITRSPHPSGKDHPLSGIPRNSRSPLSNIFVCGICGSKMYMEGRNEGGFRCSAATKGKCWNKTTALRDFSYRQIGVAVSETILKSSDSILEPLTTYIESLLLSPADVEGLKIRLKRRRSELKRKQENLLRLVMNSDEPLEFVEAKAEELQKQLDTLKLDEQQLESQLSQSRTLPSRDEIADKLQEAAGKVLSMERTSGDVLERILKGPIRAVPCQQFGSNKVVLRAKMTLQLAEFGSQGLELKLSSTEEFPSPPEVFETDILVDLFEPSSAPRNAMSALELYNRDRERRPTLEQIAGHLGISKRGAHLALKMGKGMQEQGLTDPFIPLTEAPENASRWRHKQTA

SEQ ID NO: 60167 - DNA, 50 bp, Gimesia panareensis
  source 1..50: mol_type = genomic DNA
gcgtttttaagcggagagagggggaaactcggctccgggtttccgcaagt

SEQ ID NO: 60168 - DNA, 40 bp, Gimesia panareensis
  source 1..40: mol_type = genomic DNA
aataagcggagagagggggattcgaacccccggtcccgtt

SEQ ID NO: 60169 - DNA, 50 bp, Gimesia panareensis; identical to SEQ ID NO: 60167
  source 1..50: mol_type = genomic DNA

SEQ ID NO: 60170 - DNA, 40 bp, Gimesia panareensis
  source 1..40: mol_type = genomic DNA
agacagcagacagagggggaagtgaaaccccagtgccttt

SEQ ID NO: 60171 - protein, 565 aa, Coprococcus comes
MKDVKEDTKKIVRILLRVSSDQQLEADGDLSIQRKIVVEEVKKHEEWILDSKEYFEGSNSGYKNSVADRDVLQEALRDAENKEYDILLAYKDDRLGRRMLEIPMYIMSLKQFGVDVYTVKDGLLTPDLGDITGMLMLSMRYAMAEKSSSDTGMRVKDTAQKLVQQGKFMGGKAPYGYKLEYSGEYSKHQRALKHLVIAPEQAEVVKYIYELSFYKEFGSGKIASSLNNDSRYKNLAPNDVWKSGTITSILTNPIYAGYTAYKRRETQNGMSHSLDRKDWIIAEKQNKEITIINPELWEKVQISRQKRRTKYQKQPWNEKATIISRNDGNLALIDVAYCGYCGRKLTNGTKYDYWTIKGTGERRSSQKSIYKCQNVWQGVPHEKMKQIRADKIEPIVFKKLSEYVGRLQEDENIFEQILENQSFEKKRQEQILVREKRNLQEIEKNIDILNDAIPNAITGTYPLSLEDLAKSIEKQKDKASKQKTVVEELETNIKNLSVSQEDWENLYHNLPTWQDIFMNADVATKRVLVNKLIERIDITDDTVVIRFKVDLDHFCPQPRMTVNER

SEQ ID NO: 60172 - DNA, 50 bp, Coprococcus comes
  source 1..50: mol_type = genomic DNA
ccacgaatgaccgttaacgaaagggtcacttcgtataaggtcattcacgg

SEQ ID NO: 60173 - DNA, 40 bp, Coprococcus comes
  source 1..40: mol_type = genomic DNA
accgggtttacaccgaatggtatcgcaatcagggctatga

SEQ ID NO: 60174 - DNA, 50 bp, Coprococcus comes
  source 1..50: mol_type = genomic DNA
ccacgaatgaccgttaacgaaagggacacttcgtataaggtcattcacgg

SEQ ID NO: 60175 - DNA, 40 bp, Coprococcus comes
  source 1..40: mol_type = genomic DNA
cccggggtcacacagaacagaagcggacccagggctatgg

SEQ ID NO: 60176 - protein, 552 aa, Pseudomonas viridiflava
MLGYTFHAPVDQKMTKKCFPYVRFSSTRQEDGSTRARQNELIDAFVTKHGLDVDRHLEDAGTSAHRGKNAGAEGVLGQFLRQVRMGEIDKGSYLLIENFDRLSRDKIVRSNKIFTDLLYAGIKIVILDKNKIYDAENLDFGDWISALVEFERANAESERKSDFSSKAWRFNREKMRNGEIVTKKVPTWLKVENNAFVIDHVKVERINTLFKLSLSKGLQEATREYNDLYSEKLAIHQTQYLLSNRKLIGEHSPQKIHYDESGQLKRKDEGEAIPNYYPAVVDEKLFYQVQEVIKSRRPFAGRYSGQRYNVFRDLILCSVCGGTMRYMNKGERDYFLCTNSMTGKCHIPAKLGQLSIRGKKLFGLFFAFTEGLNVSALLEENTQASTLKAETMKMEAKRNQITSRLEDFKAEVKTMILDGKIIPSTYNELISDLESNRIHIDQELEKKTKELDQIYMSEKSFSGLKDNDIASIIYDRSEESVEKRVRYNNELRKIIKNIKVNCMMVSMQVEFFNGVTRFIMENKNNEPPLMMEHNFEESTRIMYEAAKKYIPK

SEQ ID NO: 60177 - DNA, 50 bp, Pseudomonas viridiflava
  source 1..50: mol_type = genomic DNA
ttggaacctatcgcataacatatgcagacatgctaggctatacgttccac

SEQ ID NO: 60178 - DNA, 40 bp, Pseudomonas viridiflava
  source 1..40: mol_type = genomic DNA
cctggcgaagcagtaaatgcagccatgctcacagcctcga

SEQ ID NO: 60179 - DNA, 50 bp, Pseudomonas viridiflava
  source 1..50: mol_type = genomic DNA
ttggaacctatcgcataacatatgaggacatgctaggctatacgttccac

SEQ ID NO: 60180 - DNA, 40 bp, Pseudomonas viridiflava
  source 1..40: mol_type = genomic DNA
cctggccaggcagggaaggaggggatgctcacagacctca

SEQ ID NO: 60181 - protein, 477 aa, Streptomyces sp ETH9427
MARKVGVYTRISRDDEGESLGVARQQQDCERLADLRSWQVVKTYEDNDVSAFKRNVVRGEFELMLRDLRAGLLDGIVSYDLDRLARQPRDLERLIEIFDERPSLEFATVTNDINLGSPDGRTMARIMVAFANKSSHDASRRIKRKHLELAQQGKDSGGPAPYGWRKDDRTKVDPVAAEAIREAQREILAGVRIGTIRTRWQQQGLGNPRAGTKRMAHHHVEQILTSPRLVGYRTYHGEILLGEDGEPVKGNWERINTLEEWEAVCAAVAERKQKHPGKSLARKYLLSGIARCGLCKTKIRGQNNRRWEPGSKAARYTYQCSVVNGGCGKVSRIGEPVDRLIAQLVLEEQRTRAAVTAVPGHQGWPREAELKQVTHDIAQLVEAERSKQITVATLLQLLPAKERLRDELKLERARFYKEQKQAEAKGEVANLTVEEFFALPVERQQEIVLHSLSAVIINPAGRGQRKFDPSLIEPVWR

SEQ ID NO: 60182 - DNA, 50 bp, Streptomyces sp ETH9427
  source 1..50: mol_type = genomic DNA
ctatgtactggaggcaagacgctccaggctgacttgcctcgatgagagta

SEQ ID NO: 60183 - DNA, 40 bp, Streptomyces sp ETH9427
  source 1..40: mol_type = genomic DNA
gacgggcggctggacgctccacgggaagttgatccactcg

SEQ ID NO: 60184 - DNA, 50 bp, Streptomyces sp ETH9427
  source 1..50: mol_type = genomic DNA
ctatgtactggaggcaagacgctcagggctgacttgcctcgatgagagta

SEQ ID NO: 60185 - DNA, 40 bp, Streptomyces sp ETH9427
  source 1..40: mol_type = genomic DNA
gacaggtggcaggaagcccagcgggaagctgttgaaatag

SEQ ID NO: 60186 - protein, 525 aa, Bifidobacterium bifidum
MARKKRFAPNDNNLAIAYYRFSSHSQNDASIDQQRELAHEWADAHGFKIVQEYEDAAISGTTDARPGFQQMLAEVAKIRPHTLIMWKTDRLGRDKYVLAMAKKKIRDAGCEIHLLAEHIPTEGPEGVLIEGLMEAMAEYYSRQLSQNIQRGMDYNAQHALYNGHKLFGYDVDRSTKKYIPDPNTSPFVQWAFKEYASGKPLKVIAEEMNAQGLRTPRNAKFSVNMLNKMLKNRAYIGEYHHGDITVAGGMPVLVDEATFDRAQRRFAENKRKGSQRAHGMDGADAPRYWLTGKLYCGECGSTMQGVSGTSKTGRTYYYYYCSAQRRKECHLHKARKRDLEDMVLFALHNIVDDEENVTALALDAAEYYEKSHDDTAYLEALEAKRREVEKSLANLVKVIERGVVSDTVTQRLAQLEEQKSALNDAIGTENVRVSLCEDRHSIQAYFDKFLHADVNDPEIRDQVFEYFVDKVYLYDDKLVVSMWFSEDDKQEITWRDWFSLDEYWTDESPFVKGEAAEFDCFPLGS

SEQ ID NO: 60187 - DNA, 50 bp, Bifidobacterium bifidum; identical to SEQ ID NO: 45212
  source 1..50: mol_type = genomic DNA

SEQ ID NO: 60188 - DNA, 40 bp, Bifidobacterium bifidum
  source 1..40: mol_type = genomic DNA
ggttcaattccccgcagctccactccaagggccgcatgat

SEQ ID NO: 60189 - DNA, 50 bp, Bifidobacterium bifidum
  source 1..50: mol_type = genomic DNA
agttcgactgcttccccctcggctagaccagaagaggaagcgtcgaactc

SEQ ID NO: 60190 - DNA, 40 bp, Bifidobacterium bifidum
  source 1..40: mol_type = genomic DNA
agttcaggcccccgatgttagtctcccaggaacgcatgat

SEQ ID NO: 60191 - protein, 540 aa, Salinispora arenicola
MTAPTKATMAKRRRPRSGFGDMPTGTRRVALYVRRSTDDEHQPFSIDAQLTALISYVNSQPGWVVLPEPFSDDASGASTDRPGLQRALRAAKAGRYDVLLVYRVDRFSRRLSDLLDLLGELDDAGVAFASATEPFDTSTSIGRMLVQLLGVFAEFERETIIDRVINGMNAKAAKGKWPGGNRPYGYNIDKETQKLIPHEHEAPILREIVRLYVHERLGTRGIADELNRRGIGNRTGKKWSGLTIGRILDNSAYVGDIVYDDTHVTDAHPALIDRETWRRVREIAESRSDAHNQRAMSDSDYHLTGLITCPKCGNKYIGTSAKGRNKTYNYYTCYSRVRYGAHGCDGPRLDAPALDTATLTALNHFYRNADRLIGDAITRAQAQHRDSHADRRGELDAIEAAITAKTAARDRYRSAFEAGTMDEADAGPRLRELRTEIDTLKVRRDEIADAIEDEPSAPSPSTLDRIRAHLACVIAEGTSAERKATIEQLIAEIKITEDEEIIPVFKIPGPDAAPTGGATSEATPEANEPEAVRAMLHVVW

SEQ ID NO: 60192 - DNA, 50 bp, Salinispora arenicola
  source 1..50: mol_type = genomic DNA
gttcgcgcaatgcttcacgtggtgtgggccggaggtaccaccatgcgaac

SEQ ID NO: 60193 - DNA, 40 bp, Salinispora arenicola
  source 1..40: mol_type = genomic DNA
caaggggcctttcttgtggtggggcgggcgggacttgaac

SEQ ID NO: 60194 - DNA, 50 bp, Salinispora arenicola
  source 1..50: mol_type = genomic DNA
gttcgcgcaatgcttcacgtggtgttggccggaggtaccaccatgcgaac

SEQ ID NO: 60195 - DNA, 40 bp, Salinispora arenicola
  source 1..40: mol_type = genomic DNA
aaaaaggccagctttgtggttggacaggctggagttgaac

SEQ ID NO: 60196 - protein, 543 aa, Streptomyces acidiscabies
MTGVTLPGSPGQIPGEPMRSSTGMKPNVAALSALVSEAGRSTYQIPGVKLSTFRSGQPTRSRQSVTPVAATAAPVRPELAFSLRLSRASDESSSLDVQLRACRIKAEALGFDAETIAAACANPYVDDGVSGGSSLESRKKGMVRIMADRPVTVIAWKLDRFARSCREFHKLMDWADANGVRLVTSDGMLDSADKSGTGRMVANIIAAVAEWELGIITDRSEAAHEERRTQGRWISGKAPFPYMVERRDGKAYLAEDPNAFALVRKQIDALLTGGKGGSLAATAEPLPIGRQQWRKLLRGVVLRGQREHKGELVTEEDGTPVQFGPEVIDAATYKRVQERLKELEAGERAERRDAPWLAGMVLCSHGCKMNGGLSSRKRPLYKCENGHGSIMADRIEPLVFAEFRDKHGDANLYEVKYSGGVDHSADMEDNAAQRKRITNAIAKMGDDADDMLTDKLRELKAVFARLDAEHAPEVIETWTLTDTLLWEAWDAATEDARRGMLADWGCKVTVYPNGHPGGRVSIDWSPVEEAEEDSEPATYQKAA

SEQ ID NO: 60197 - DNA, 50 bp, Streptomyces acidiscabies
  source 1..50: mol_type = genomic DNA
gtatcccgggcggtgtaccgttcgagggaactgttcacctcctaggacat

SEQ ID NO: 60198 - DNA, 40 bp, Streptomyces acidiscabies
  source 1..40: mol_type = genomic DNA
gatcgggcggccctgctccagccacgtgtaccaggtgacg

SEQ ID NO: 60199 - DNA, 50 bp, Streptomyces acidiscabies; identical to SEQ ID NO: 60197
  source 1..50: mol_type = genomic DNA

SEQ ID NO: 60200 - DNA, 40 bp, Streptomyces acidiscabies
  source 1..40: mol_type = genomic DNA
gcccaggctggcctgctggagacacgtgtcccagctgact

SEQ ID NO: 60201 - protein, 514 aa, Vibrio parahaemolyticus
MKAYIYSRISSAIQKKGHGLDRQQDITLTYATQLGFDISEEVLQDVASGYHGKQMEGRLGVFLEGIKRGKIESPAALIVESLDRLGREHTMDALPRFIDIVNHGVEIHEVSTGIVYNREETHKIHIAIAIMERAHNESLMKSKRARAAANKRLQRAQQGENVVINVNLPCWIRSQDGKLELVPEYAVVIRRIFELYLEGKGSNKVAQILREENHPYFTSNIHSKKIRSRVWTDQRVMDIIKKDSTCGVFRSTVNPDTVIDGYYPAAIDKATFERAQALRMSRVRTAKKSKKGLNILSGLLRCGHCGSSLQYTRSYSNKKKTRMYENLRCRDRAARMNCDSRSVPLRPLEKLILGWVGTIPLFDIKAASNDELEQKKAELTQLEQQAENLVELLATGLTRVKDKYLQLEQQIDSVKKEISSLSVTNSSSVDKIDYFKAIDLENEEYREQVQQELALIIDRVSVKCDGEDAEIDIFLNSRIHNRQRFIGKKKQLDKARQTIRTLRPCAAHIDSFVD

SEQ ID NO: 60202 - DNA, 50 bp, Vibrio parahaemolyticus
  source 1..50: mol_type = genomic DNA
tacagtggtttacattggaacggcacgctgttagcatgtataccacagtt

SEQ ID NO: 60203 - DNA, 40 bp, Vibrio parahaemolyticus; identical to SEQ ID NO: 34653
  source 1..40: mol_type = genomic DNA

SEQ ID NO: 60204 - DNA, 50 bp, Vibrio parahaemolyticus
  source 1..50: mol_type = genomic DNA
tacagtggtttacattggaacggccagctgttagcatgtataccacagtt

SEQ ID NO: 60205 - DNA, 40 bp, Vibrio parahaemolyticus
  source 1..40: mol_type = genomic DNA
gggcctgcagtaccagggccagcctaaggagggcactgct

SEQ ID NO: 60206 - protein, 542 aa, Coprococcus comes
MKLQKVLNLFNVAIYIRLSREDGDKEESDSVGNQRKLLTEYVAKKDDFILYDVYVDDGYSGTNFNRPSFQRMIADIEDGKVNCVVVKDLSRFGRDYIDTGRYLERYFPELGVRFISVTDSIDSMKQAYDMLLPIKNIFNEQYARDISKKIQATVKSKQKAGEFIGAFTSYGYKKSPVDKNKLVIDDYAADVVRRIFSLYIQGYGKQRIAKLLNAEGILCPAEYKKVNGENYKNCNRLESTTYWSYSTINSILHREMYVGNMVQGTKHQRMRSKQKKMPKEEWIIVENTHEPIIDKATWEKAQSLLQKRTRELDLETNKNIFAGFVKCGDCGRAMTKNMWRRADGSKTYSLYCGTYKRNGKQYCTPHTLPMAVLEDIVLGDLKAIVDSVDNLKELVQSQSFTASKVKRIADTELSKIKAELERVKRLKKSIYEDYREELISKEEFLSYREDYLKKEELYSKQIEALEEKKKDNVTEDVFETPWLKRLLELKDIETLDRDIVVEMISEIKVYENRKIKITYNFGNELEHLFSSVYSVESEGKAI

SEQ ID NO: 60207 - DNA, 50 bp, Coprococcus comes
  source 1..50: mol_type = genomic DNA
catttgcgcaattaacaccctgcacatggaggaacacagttgcgcaagta

SEQ ID NO: 60208 - DNA, 40 bp, Coprococcus comes; identical to SEQ ID NO: 59763
  source 1..40: mol_type = genomic DNA

SEQ ID NO: 60209 - DNA, 50 bp, Coprococcus comes
  source 1..50: mol_type = genomic DNA
catttgcgcaattaacaccctgcagctggaggaacacagttgcgcaagta

SEQ ID NO: 60210 - DNA, 40 bp, Coprococcus comes
  source 1..40: mol_type = genomic DNA
tctcaggctccatgccagagccgctgaacatgaacctgga

SEQ ID NO: 60211 - protein, 550 aa, Cupriavidus alkaliphilus
MISKARVYSYLRFSDPKQAAGSSADRQLEYATRWAAEHEMQLDSALSLRDEGLSAYHQRHVKQGALGVFLRAVEGGQIPPGSVLVVEGLDRLSRAEPIQAQAQLAQIINAGITVVTASDGREYNRARLKAQPMDLVYSLLVMIRAHEESETKSKRVKAAIRRQCQGWVAGTWRGIIRNGKDPQWVREESNAFVLVPERAEAILAAVRMFKAGHGAIRTVRALSGMGLAMTAGGNPAQQIYRTIRNPALVGTRVLEVDGEEYKLEGYYPPLISPEEFSELQHLADQRGRRKGKGEIPGVVTGLGITYCGYCGTALVGQNLMYRKRMDDGRLAPGHRRLICVGYSHNTGCPVGGSCSVVPVEQAVMSFCADQMNLTRLMEGDNSATSTSARLALARQRAADIEAQIDRITQALLADDGNAPAAFARKARELEAKLEEKNKGVAALEHELAATASATPPAAAAAWAELVAGVEELDYDARMKARQLVADTFARIVVYHRGFRPDESDGRSIDVMLIAKRGSTRMLHIDRRSGGWRAAEDLSLPAEGGLPWPPG

SEQ ID NO: 60212 - DNA, 50 bp, Cupriavidus alkaliphilus
  source 1..50: mol_type = genomic DNA
ggtatatttttgcttgctttcgggcacccgagagataccatacctatact

SEQ ID NO: 60213 - DNA, 40 bp, Cupriavidus alkaliphilus
  source 1..40: mol_type = genomic DNA
gtcgaccagcgctttcgggcagccaagggaaacgaatccc

SEQ ID NO: 60214 - DNA, 50 bp, Cupriavidus alkaliphilus
  source 1..50: mol_type = genomic DNA
ggtatatttttgcttgctttcgggttcccgagagataccatacctatact

SEQ ID NO: 60215 - DNA, 40 bp, Cupriavidus alkaliphilus
  source 1..40: mol_type = genomic DNA
gtagacaagggctaccggattgcagagggaaatgaaccgc

SEQ ID NO: 60216 - protein, 532 aa, Vibrio sinaloensis
MIERNEAQVYLYIRFSRKTQEDGDSERRQLECAHRAAEKYNLTINEDFIMTDRGFSAFKAAHIRRGALGGFLEAVKSGDVAKGSILIVESLDRLSREAPFFAQMQFSSLISDGISIITANDGNIYNTREMNRRPEVFYGIYAVMQRAHEESKRKQALSAGSIKGKILKHERGEHTTNFTSVPSWITNKKDGYELNEKAKAVELIVNMYLNHEGLNTISRELAEREIKSPTGRKRWGITTIRKVLDNPALYGLNKFKLRYDSDGVTVEEKFEFENFYPALISKEEFLIIQERKKKKANSREAYGSVTYLLSSYGKDRCVCSKCGYTTGSQMQKQVNRKGEYTQSVMRLHCRKHKETLDCCSSFKCERLEHAFINAIHKELNPDFLKSHKTTKGNEESIRAQISDIDNEFKMLMKKQEKMKSMDLKLEIMKRIDELDSKRYELTEILNKKLTQVNGEADYEKLKSLANKCLNIKNSNERKLFKQILIQSVKQIVIDFKTESLACYFNNGNHLSLNYRTETDSYQTTIFYKRKPR

SEQ ID NO: 60217 - DNA, 50 bp, Vibrio sinaloensis
  source 1..50: mol_type = genomic DNA
agaagttacattataaattatcgctctgtatagcgttaaaagtaactttc

SEQ ID NO: 60218 - DNA, 40 bp, Vibrio sinaloensis
  source 1..40: mol_type = genomic DNA
gaagtatccaaacgcgccatcagtccagtgaatgtcttgc

SEQ ID NO: 60219 - DNA, 50 bp, Vibrio sinaloensis
  source 1..50: mol_type = genomic DNA
agaagttacattataaattatcgcgttgtatagcgttaaaagtaactttc

SEQ ID NO: 60220 - DNA, 40 bp, Vibrio sinaloensis
  source 1..40: mol_type = genomic DNA
gaactacccaaacaccccagtagtagaatggatgttttta

SEQ ID NO: 60221 - protein, 508 aa, Terrilactibacillus laevilacticus
MTKRCAVYVRVSTDKEEQKKSLVNQREIFEHYIVERGWDLYKIYSDVQSGTKAIKRPGFQQMLQDAKEHKFDVILAKELSRLARNGELSYKVLNSLLVNSGIDIITLDGAINSVEQQTNMYGLYAWVYENESQTMSRRIKYSFEAKARNGEFNGSIPPYGYTIVDKQLILRNDFTTDVVRRIFKSYIVGQGIDHIARQLLEDKISTPSQVACKKNASPIWYGSSIKGILQNEHYIGNLVQQRETSISVTSTKRKKNASEDIIRVEGTHEPIISKQDFDLVQQLLKQRSRKHSHAKYHLFTNVAFCADCGKGMHYKKNRKGYVCGSFDKHGHTLCSDNIVREADLIDVITSDIKSLYTRISSKKFKDVLDKRLHSSESKRLKKLQQLKIQIDTFKSDKTEALRCKIRREITDEEYQALVKETNAKILDLITTKEELEKDSSTQVNDRQLNELFEKIEQFIKHPTLNDEILHRLIKKIEIKKDGSPRIYYRFSDPHLSFIFFQATHNIRH

SEQ ID NO: 60222 - DNA, 50 bp, Terrilactibacillus laevilacticus
  source 1..50: mol_type = genomic DNA
tcaagcgacacacaacattcgacatgcgtagaatgcagtgtgtagtaagt

SEQ ID NO: 60223 - DNA, 40 bp, Terrilactibacillus laevilacticus
  source 1..40: mol_type = genomic DNA
caatgcgaccgtctccacgtgcatcgtctgcggaaacatg

SEQ ID NO: 60224 - DNA, 50 bp, Terrilactibacillus laevilacticus
  source 1..50: mol_type = genomic DNA
tcaagcgacacacaacattcgacacccgtagaatgcagtgtgtagtaagt

SEQ ID NO: 60225 - DNA, 40 bp, Terrilactibacillus laevilacticus
  source 1..40: mol_type = genomic DNA
ccaggcgtccttggccaggcccagcgtctgcggcttcatg

SEQ ID NO: 60226 - protein, 491 aa, Mycolicibacterium fortuitum
MAQERAALYARISYDRTGESVGVTRQMKDLRELATARGWQVVAEITDNDISATKGKARPGYDRIWHLVTTGQVEHVVVWQSSRLMRSRKDRAEVISTFGKHAVDIVAAKGPSFDLRSAYGRGQADMVTSFDTMESEVKSERVTAAIKHLASQGRAWGFCPYGWDRSGRNQTVNEHEAAIVRELVDRLLAGETLAELYRDMNRRDEPAPGYAQWGKLTDEQRARREAKGHTEPPRAWAKSTIRTLVRRDANIGVRRYKGQEIKGDWPAIVDPGKHARVVALLGSEQRRSHSGPRPGARKHLLTNGIGKCGVCGGVLRVSNRNGRRDRTRIYMCNDPAKGCTGRQQDKVDELVARVVIGRLAQPDALDWLLGDDEQAQRSAQRCEEIQRRLDDAADSYADGRIDTRALERITARLTPELEAERRERDAAVRSLDLEVLRPLAGPEAAACWEAMPVTVRRAVLETLGVEVVILPRVKHGPGFEPESVRFDWPIA

SEQ ID NO: 60227 - DNA, 50 bp, Mycolicibacterium fortuitum
  source 1..50: mol_type = genomic DNA
acaccctccttgtgagcgagcagacagcttagatattcttagggggtact

SEQ ID NO: 60228 - DNA, 40 bp, Mycolicibacterium fortuitum; identical to SEQ ID NO: 58823
  source 1..40: mol_type = genomic DNA

SEQ ID NO: 60229 - DNA, 50 bp, Mycolicibacterium fortuitum
  source 1..50: mol_type = genomic DNA
acaccctccttgtgagcgagcagacggcttagatattcttagggggtact

SEQ ID NO: 60230 - DNA, 40 bp, Mycolicibacterium fortuitum
  source 1..40: mol_type = genomic DNA
caggtaggcgccctgtgcgcgcctggtgactccgggcacc

SEQ ID NO: 60231 - protein, 576 aa, Bacteroides ovatus
MRGAIYSRVSTIDQDYNRQTNELKEYAKYMGIEITHVFEEKESGFNDDRPEFAKLKELTKDDIDIVLVWELSRLSRRSLYLQQQIEYFTKKGICVYAKKENLRTLDENGEEDRNTKFIIGIIAMIAEQEVATLKSRSISSKRNKIIKEGNSYTYKAPYGYDYSTETKKLSINEEEAKTVRRVIELSANDYSSARIALILNAENIPTRSKTKIWTMGTINTMLSNPVYKGEAEYMLKGTEPKKGKRYKRPIEVAIVKTPTIVSAELFDLSREKMKGRAFRSKSTGVKHFQLLRGLIYCPYCKIKYTYEGGRDLYVCHDKHKKAKNKPDCFSKAIKATRIEKIVWELVRLLFSQELATGKAQEQEEPLRQEIEAHKKLLIGIEDKLNDLTAQANAIVNAAIDIKREMPNMPDLYINKLREAASLDKESKKYQYEKDRLNKLILSCEDKIKAINSLSNEKVLVDSITDDMERYELIHKVIDHMVIYGEDSIYSLVVVTFKTGQEVYIGYKSKGYQYYTIFHPSQSVWFDTEKRLGYITTMKSPDSLVLSLETVTKEYSVTNFIKVLDVPKNRRYYENQS

SEQ ID NO: 60232 - DNA, 50 bp, Bacteroides ovatus
  source 1..50: mol_type = genomic DNA
agttgtacctgctaatgttaaatcttgataacacatttgcaggtacaact

SEQ ID NO: 60233 - DNA, 40 bp, Bacteroides ovatus
  source 1..40: mol_type = genomic DNA
cgcgtatatctgggtggtctttatgttggagtgtcccagc

SEQ ID NO: 60234 - DNA, 50 bp, Bacteroides ovatus
  source 1..50: mol_type = genomic DNA
agttgtacctgctaatgttaaatcaggataacacatttgcaggtacaact

SEQ ID NO: 60235 - DNA, 40 bp, Bacteroides ovatus
  source 1..40: mol_type = genomic DNA
ctggtctctctgggtggtcagtatgcagtagtatggcagt

SEQ ID NO: 60236 - protein, 485 aa, Rhodococcus qingshengii
MDAVIYVRVSHDKKGQGRSVEEQESECREVCADNGWTVREPVVKDNSIGASRYSRAKSRPGFDSLPNILRRGDVLVVWASDRAGRKMEDHLVLRDMCEQLGVIFCAGGQVYDFSKTADRARAGHEAVDAEQESSRTRDRVVRAVKARANKGDAHGALPFGYVRTFDPVTGERNWHVDPVAAQLIRDAVETLLAGGSLYSIAELWNSRGMTTNYYVKEKTVNGVVVPAKHGQPWQGRTVRNLLKRPTLAGLRTYRGEIVGPGNWEPIITRDQHERVCAVMADPTRKGRHGRQAKHLLTNIATCSVCGAGIRYMRNTGAKDQYRCPVGHVGRSAEPVDAWVIEHMFRLIDIWRDQVFFFSDDDEADAADVSGSSLLWEQARALKQRLDALTDQAIAGTISAEQLARATAVLEPQIEAAKAKAQADTIHPLLFRLGESNNDLWKSWTIEERRSLVRAVVDITIHPAINGARKFDPATVKIVWKGQKKA

SEQ ID NO: 60237 - DNA, 50 bp, Rhodococcus qingshengii
  source 1..50: mol_type = genomic DNA
ctatgcattcaacgactcttgagtgagtcggggagtcgcaacgggcatag

SEQ ID NO: 60238 - DNA, 40 bp, Rhodococcus qingshengii
  source 1..40: mol_type = genomic DNA
gctgtcacggatcgtcgccgagtcggcgatccgtgacctg

SEQ ID NO: 60239 - DNA, 50 bp, Rhodococcus qingshengii
  source 1..50: mol_type = genomic DNA
ctatgcattcaacgactcttgagtcagtcggggagtcgcaacgggcatag

SEQ ID NO: 60240 - DNA, 40 bp, Rhodococcus qingshengii
  source 1..40: mol_type = genomic DNA
gctggcacagatcttcacccacacggcggtccacgtgctg

SEQ ID NO: 60241 - protein, 463 aa, Ruminococcus gnavus
MRRKTTAPVEKILLRVAIYIRVSTDKQVKDGDSMRDQLATGQKYIDSHENMILVDTYIDDGISGQKLKRDDFQRLIDDVRAGRIDLIIFTRLDRWFRNLRHYLNTQDILDKHGVSWTAIEQPYFDTSTPHGRAFVNNSMIWAELEAQNDSDRILGVFDDKVDNGEVLSGSTPLGYTIVNKHLVPDDDAPTAVAIFQYYRKTGNLSMTLRYMESEFGLVRSAASLKNMLTNTKYIGEFRDNKNYCPAIIDRDLFFDVQRLLKINIKSGKKHDYIFSGLVVCDDCDHIMSGCQQRARGRVRADGTRIIYKYSVYRCRQGVNLHRCPNRKLVFETTLEKMLLERIRPELENYIAEYEVANLPALRTDAKRRSVEGKMQKLKDLYLNDLITMDEFKLDREKLLMQLEKINAEDSRPVKDLSYLKNFLKMDFESVYDSLSIPERRELWRSIVKEIRVDHDKNIHIIFL

SEQ ID NO: 60242 - DNA, 50 bp, Ruminococcus gnavus; identical to SEQ ID NO: 12872
  source 1..50: mol_type = genomic DNA

SEQ ID NO: 60243 - DNA, 40 bp, Ruminococcus gnavus; identical to SEQ ID NO: 29898
  source 1..40: mol_type = genomic DNA

SEQ ID NO: 60244 - DNA, 50 bp, Ruminococcus gnavus
  source 1..50: mol_type = genomic DNA
tatactactaactgaacccctccggccggtaggttcaatttagtagtatg

SEQ ID NO: 60245 - DNA, 40 bp, Ruminococcus gnavus
  source 1..40: mol_type = genomic DNA
tggcaaaaccttggctcctgcctccttatctgcaatgatc

SEQ ID NO: 60246 - protein, 549 aa, Streptomyces hygroscopicus
MARVLGVVRLSRVSDETTSPERQRRSIQRWADQEGHVVVGWAEDIDVSGGVEPWKRPEFGKWLPSTIGKEVSAIEHRIAVEESRADEYDIICALKIDRLSRRVLHVHTLLEWCEKSGKEVATVEDGINLSTQMGKLLLSLIASFAEGELEAIKARAKSSYNHLVKEGRWRGGRTPYGYREEKQETGDGWKLVPDDYGTDTAGTLREIVRRLIAGESANSIAQWLNEDVSKTPTSLDAQMIRSGKTPKGSRWTAANTAKVVRSRCVLGQMEVSEEVMVDGKKTTRRRVVRDADGQPLQRAEPLITHEEWELANKKLDENTSKRNGNRKGGSPLLRVAFCTCGEPAYLGPGRNWPYYRCASRTTHKPCPTGSKGIAAHTLEDVVEKAFLLAAGDVEIVRKVFRPGVDYTRDIEEVNRALSDLREDREAGLYSSELGKQEYREAYKRLDARREQLIAQPTRPDTWEEIPTGETYRERWSTLSTQHEKGRELRAAGVKAVIHAEPIPGMTAAQLMAPDGHDGMWQHLVGRVQVLIPMDFKQRLRSMAAVHSEG

SEQ ID NO: 60247 - DNA, 50 bp, Streptomyces hygroscopicus
  source 1..50: mol_type = genomic DNA
gcgtcaaagttgccagttggcggtgtttccaatgatcaattttgataccg

SEQ ID NO: 60248 - DNA, 40 bp, Streptomyces hygroscopicus
  source 1..40: mol_type = genomic DNA
ccagccgtacacgttggcggtgtcgaagaagttgatgcca

SEQ ID NO: 60249 - DNA, 50 bp, Streptomyces hygroscopicus
  source 1..50: mol_type = genomic DNA
gcgtcaaagttgccagttggcggttcttccaatgatcaattttgataccg

SEQ ID NO: 60250 - DNA, 40 bp, Streptomyces hygroscopicus
  source 1..40: mol_type = genomic DNA
cctgccgcccacgtcggcctcgtcgcagcagccgttgcta

SEQ ID NO: 60251 - protein, 538 aa, Mycobacteroides saopaulense
MATAVIYLRVSTKGQATRGNEAEGFSIPAQRDACERKTQALGATVVREFVDAGESARSADRPELQRMLKYLAANPTTYVIVHKLDRLARSRADDVQITLAIQASGSTLVSVTENIDSTPSGALLHGIMSSIAEFYSRNLANEIMKGTKQKALSGGTPTIAPIGYLNVRETVNGREIRTIRTDPDRAHHIRWAFEQYATGDWTLRTLSTALNSRGLSQRPTPNRPARPLPTNKLHKVLRNRYYLGYVTWQGIEYPGSHEPLIDPATFDQVQHTLTAHQRSGERSSRRKHHLAGSLYCGRCNSKLIYAVSTGRHGGKYGYWFCIGRHTLRNGCHLPYLPEERVEAAVAGLWHTTQLPTATIETIRASLTDDLAVYGAHTDQELTLLNRRIKEVERERLKWADLAMDGTVPRDIARDKQAALATQLGQLEHQRTSLTSTNIDHTEVINTALDLLGRCSDAYEHATEATRRDLNQAYFERILLDSTDGEPIIKSAEQTEIIELIATAEREPELTTSGKADLALTTYSTVKGSKIASLVELRG

SEQ ID NO: 60252 - DNA, 50 bp, Mycobacteroides saopaulense
  source 1..50: mol_type = genomic DNA
gggttcgaagatcgcctctttggtggagctaaggggacaactatcgaacc

SEQ ID NO: 60253 - DNA, 40 bp, Mycobacteroides saopaulense
  source 1..40: mol_type = genomic DNA
tgtgacctgggattgaagtggagctaaggggactcgaacc

SEQ ID NO: 60254 - DNA, 50 bp, Mycobacteroides saopaulense
  source 1..50: mol_type = genomic DNA
gggttcgaagatcgcctctttggtgcagctaaggggacaactatcgaacc

SEQ ID NO: 60255 - DNA, 40 bp, Mycobacteroides saopaulense
  source 1..40: mol_type = genomic DNA
tgggagctggctttggagggcagctgggggaaccagaacc

SEQ ID NO: 60256 - protein, 506 aa, Rhizobium changzhiense
MSDKSILTIGYARVSGKKQVKEGDGLGSQEARIREYARNRGYPGLSMIFTDDKSGGTHDRPGLAAMLKFLMKNRGATCVLIIDDITRLARSVVIHHKLRAAIAATGARLEIPNLELGDSPDDLLVENLLASVSQHQRQKNGEQVRNRMRGRLLNGYWCFSSKPPAFAFARIAGQNILVPREPVASIVTEALEGFASGRFQTQAEVQRFLQNSPGFPKQKDETVKFDRVTEMLTSVLHAGMIEYLPWKVSIRKGHHAGLISYDTYQRIQIRLNENAKAPARADLRQHFPLRQAVQCAHCGWLLGGAYSRGRNAEYPYYFCLNKECLRYRKSFSSDEMHGKFEALLKTMTPADEVIDIATSIFRETWEKRSAGSAERTALLRREISSTEKHIGLLIDRIADSSDPELIQAYEARLVDLQRQKAALSEKIEDSEQKLPDFNVTLRTALEFLASPWKLWETGDIEDRRAVRKLVFTEHLQYAPESGFRTAETTLPFRVLADIAANNVEVV

SEQ ID NO: 60257 - DNA, 50 bp, Rhizobium changzhiense
  source 1..50: mol_type = genomic DNA
atagcggctaataatgttgaagtggtgcagccaacgggagaaagttcgaa

SEQ ID NO: 60258 - DNA, 40 bp, Rhizobium changzhiense
  source 1..40: mol_type = genomic DNA
aaacaggattatgaaggtggtgcgggcgacgggggtcgaa

SEQ ID NO: 60259 - DNA, 50 bp, Rhizobium changzhiense
  source 1..50: mol_type = genomic DNA
atagcggctaataatgttgaagtgtggcagccaacgggagaaagttcgaa

SEQ ID NO: 60260 - DNA, 40 bp, Rhizobium changzhiense
  source 1..40: mol_type = genomic DNA
gaatttgattttgaaggtgtgggtggtgacagggttcaaa

SEQ ID NO: 60261 - protein, 541 aa, Brevundimonas vesicularis
MNKETPLVATRAALYLRVSTTRQAEHDVSIPDQKRQGEAYCLSRGYQLIDTFVEPGASATNDRRPEFQRMIEAGTSKPAPFDIVVVHSFSRFFRDHFELEFYVRKLAKNGVKLVSITQEMGDDPMHVMMRQIMALFDEYQSKENGKHVMRALKENARQGFWNGALPPIGYRIVAAEQRGTKTKKKLEIDPLHADTVRLIYRLALEGNGTSGPMGVKAIVSHLNARRIFTRDGGRWGIGQLHRILTRRTYIGEHEFNKRGKTKELKPVSEIVMVPVPPLIDLETFDAVQAHLRSRNPKVTPPRVVSGPTLLTGICFCEKCGGAMTIRTGKGGRYRYYTCSIKARQGETGCSGRSIPMEKLDTIVASHIEDRLLQPDRLEEVLASVLDRRHERAERRQEHIAELNRRAAETDLRLKRLYDAIESGVADLSDPALKDRIVGLKALRDQAQVDAERAQAMLESSGNQAVTPATVRRFADVARQRIRLDGGGYRRDHLRAFAQRVEVGETEVRIMGSKGELLHTLFAVSRGKSAGIGVPSLGLKWR

SEQ ID NO: 60262 - DNA, 50 bp, Brevundimonas vesicularis
  source 1..50: mol_type = genomic DNA
tgcccagcttgggactgaagtggcgggccgcgcccgacgatgatgagcac

SEQ ID NO: 60263 - DNA, 40 bp, Brevundimonas vesicularis
  source 1..40: mol_type = genomic DNA
gtgtcgtggggacgatggcggagagggtgggattcgaacc

SEQ ID NO: 60264 - DNA, 50 bp, Brevundimonas vesicularis
  source 1..50: mol_type = genomic DNA
tgcccagcttgggactgaagtggcgagccgcgcccgacgatgatgagcac

SEQ ID NO: 60265 - DNA, 40 bp, Brevundimonas vesicularis
  source 1..40: mol_type = genomic DNA
ctgtctggagggccatggagaagaggctgggagtcaagcc

SEQ ID NO: 60266 - protein, 495 aa, Mycobacterium avium
MTTEVTEKPQLRAGCYCRISSDPKDKRQGVDRQREDTTTLCEVKNWIPAGFYIDNDRSASNGKARPEWERLLADVKAGRIDAIAAWNQDRGWRLMRELETLREFFTGLDRRVPLATTGQGDIDLYSPDGVLQAQVKTAVSEHEVAMMKVRQRRAARQKAECGKPSWKRAFGYLPDTRSKEEDDGTRQPDPRTAPLVAEAYRSIIAGASLGDVCKAWNAAGAYTLNGKEWTQPQMSNFLRKARNAGLRSHNEEIVMKVVDGEVVPVKGAWPALVDEATWRQAQAVLNAPGRAPGAKSVQRHNLTGALLCGNAGCDGYLAGNWQMQKHKGGPRAYAVAYRCKTCFGVSIRAEHIEPLLYKLVSARLARPDAVDLLKAELHDTEEAERIRTEKSVLRGRLNELAVERAQGLLTGAQVRTATEIVQAQLDALDAAEQDQERRRLFDQIPLGKPEVAAAVSDLSPDRFRAVLSVLARVTILPVGKGSHVFRPERVQIEWL

SEQ ID NO: 60267 - DNA, 50 bp, Mycobacterium avium
  source 1..50: mol_type = genomic DNA
gaaagttcttttcgtattcggtcccaatgacgagtccggaaagtactctc

SEQ ID NO: 60268 - DNA, 40 bp, Mycobacterium avium
  source 1..40: mol_type = genomic DNA
caaatgcctgtgccgacaacatcatcggctcaaaaccttc

SEQ ID NO: 60269 - DNA, 50 bp, Mycobacterium avium
  source 1..50: mol_type = genomic DNA
gaaagttcttttcgtattcggtccctatgacgagtccggaaagtactctc

SEQ ID NO: 60270 - DNA, 40 bp, Mycobacterium avium
  source 1..40: mol_type = genomic DNA
ccactgcctgtgctgacacctccatcaacacagatcctcc

SEQ ID NO: 60271 - protein, 548 aa, Mycobacterium chimaera
MSLRFAFYGRVSTEDAQDPDASRSWQKRRATDLITPHGGVLAADYFDVGQSRSLPWKRRPEASRLLIDVASRDRNFDAVVIGEPARAFYGPQFALTFPVLTHHGVGLWVPEVGGAVDPGSEAHDLVMTLFGGMSKGERARIQMRVRTAMSALAQDTNRYLGGRPPYGYRLVDAGPHPNAAKANLGQRLHRLEPDPATSSVVERIYRMYADGAGLRYIAQELTDDGVPSPSQYDPARNRHRDPRGWSHSAIRAILDNPTYLGVRVWGKQEKYEVLVDPDDVAAGYETRMRWRDQADWIAPDRRTHEALIHDDLAQAVRLRTLARRGPGLVCSRESIVPYALRGLLFCAACGRRMQGAARVGKQTTRILYRCELGKSRSVPADLSDHPRTVYLREDEVTVQLDEWIATLADPDDLARGQDADSAARTGYAALQRQLSEANRKVAALVNAVESGVAVEDLTAALRRRTAERDELKARLERAERPLAMSAAQISELVEELGGLAAVLGEATGAERAQVYASLGLRLDYDPHLRQVTATADLSRVAGCVRGGT

SEQ ID NO: 60272 - DNA, 50 bp, Mycobacterium chimaera
  source 1..50: mol_type = genomic DNA
gagtcgtgtcgccggatgtgtccgaggggggacttgcccacctacgacac

SEQ ID NO: 60273 - DNA, 40 bp, Mycobacterium chimaera
  source 1..40: mol_type = genomic DNA
cggctcagtcgtgtgtccgaggggggacttgaacccccac

SEQ ID NO: 60274 - DNA, 50 bp, Mycobacterium chimaera
  source 1..50: mol_type = genomic DNA
gagtcgtgtcgccggatgtgtccgtggggggacttgcccacctacgacac

SEQ ID NO: 60275 - DNA, 40 bp, Mycobacterium chimaera
  source 1..40: mol_type = genomic DNA
aggctcagccgtgagtccctgaggggagcagattcaccac

SEQ ID NO: 60276 - protein, 548 aa, Mycobacterium intracellulare; identical to SEQ ID NO: 45316

SEQ ID NO: 60277 - DNA, 50 bp, Mycobacterium intracellulare
  source 1..50: mol_type = genomic DNA
gagtcgtgtcgccggatgtgtccgaggggggacttggccacttacgacac

SEQ ID NO: 60278 - DNA, 40 bp, Mycobacterium intracellulare; identical to SEQ ID NO: 60273
  source 1..40: mol_type = genomic DNA

SEQ ID NO: 60279 - DNA, 50 bp, Mycobacterium intracellulare
  source 1..50: mol_type = genomic DNA
gagtcgtgtcgccggatgtgtccgtggggggacttggccacttacgacac

SEQ ID NO: 60280 - DNA, 40 bp, Mycobacterium intracellulare; identical to SEQ ID NO: 60275
  source 1..40: mol_type = genomic DNA

SEQ ID NO: 60281 - protein, 548 aa, Mycobacterium intracellulare; identical to SEQ ID NO: 38736

SEQ ID NO: 60282 - DNA, 50 bp, Mycobacterium intracellulare; identical to SEQ ID NO: 38737
  source 1..50: mol_type = genomic DNA

SEQ ID NO: 60283 - DNA, 40 bp, Mycobacterium intracellulare; identical to SEQ ID NO: 60273
  source 1..40: mol_type = genomic DNA

SEQ ID NO: 60284 - DNA, 50 bp, Mycobacterium intracellulare; identical to SEQ ID NO: 40874
  source 1..50: mol_type = genomic DNA

SEQ ID NO: 60285 - DNA, 40 bp, Mycobacterium intracellulare; identical to SEQ ID NO: 60275
  source 1..40: mol_type = genomic DNA

SEQ ID NO: 60286 - protein, 463 aa, Blautia marasmi
MRRKTTAPVEKILLRVAIYIRVSTDKQVKDGDSMRDQLATGQKYIDSHENMILVDTYIDDGISGQKLKRDDFQRLIDDVRAGRIDLIIFTRLDRWFRNLRHYLNTQDILDKHGVSWTAIEQPYFDTSTPHGRAFVNNSMIWAELEAQNDSDRILGVFDDKVDNGEVLSGSTPLGYKIVNKHLVPDDDAPTAVAIFQYYRKTGNLSMTLRYMESEFGLVRSAASLKNMLTNTKYIGEFRDNKEYCPAIIDHDLFYDVQRLLKINIKSGKKHDYIFSGLVVCDDCDHIMSGCQQRARGRVRADGTRITYKYSVYRCRQGVNLHRCPNRKLVFETTLESMLLDRIRPELEKYIAEYEVANLPALRTDAKRRSVEGKMQKLKDLYLNDLITMDEFKLDREKLLMQLEKINAEDSRPVKDLSYLKNFLKMDFESVYDSLSIPERRELWRSIVKEIRVDHDKNIHIIFL

SEQ ID NO: 60287 - DNA, 50 bp, Blautia marasmi
  source 1..50: mol_type = genomic DNA
tatactactaactgaacccctccggtcggtaggctcaatttagtagtatg

SEQ ID NO: 60288 - DNA, 40 bp, Blautia marasmi
  source 1..40: mol_type = genomic DNA
gctgctgtccaggttgccggttggttcgtcagccaggata

SEQ ID NO: 60289 - DNA, 50 bp, Blautia marasmi; identical to SEQ ID NO: 60287
  source 1..50: mol_type = genomic DNA

SEQ ID NO: 60290 - DNA, 40 bp, Blautia marasmi
  source 1..40: mol_type = genomic DNA
gctgctttctaggaagcctgtcgggtggccagccagggtt

SEQ ID NO: 60291 - protein, 584 aa, Pseudomonas reactans
MPTAYAYIRYSSKAQGEAGRDSVDRQMASIQAITKQQGIELPSENIYSDTGISAHDGSNKRKGKLKELIDMISDMHIKEGDYIFVESIDRLSRQRLLQAKELVNGILEKGVILITTIDGQRYEKPNETNRIDDLQQDILLSVIAKRAYEESKTKSVRRKSAWNRAKKLAEEEKVIFNAHNPPYGIRYNTELNCFEIEEEEAQEIRDFFESLKYVGVSLSIKKLNAYSKRKWSSRNIKHLIDTKYVLGAYMAQRRDENKKKVFERYIENYYPQIVSYELFNEAIAAMKNRAQRKNYGNQSVGSLNIFRHSIKCDCCDASMLFEKQTNPKGVVYPYFQCYTRKELKNGCDQPRFRFDLAFGLFLELIYQSTTHEDFDVHPWQNEIEDTGIQYEWITRESGMKYRLPTQEDIDEEERTENFKELLIKLLSNRETQTKDNKKIVELNNLLLEQKSYRDNLMKSFAGFTSGVIPKEFLEVVSKTEANINDIEQSLAELQTQINIKKTTINIYSENDIIDLYKTEDGRLKINQFFVANDITFKFNFDKTTRTLFAKIFQNGFEIDRIAKQFSLHNPLKEFGINNLNEYFN

SEQ ID NO: 60292 - DNA, 50 bp, Pseudomonas reactans
  source 1..50: mol_type = genomic DNA
gtgtgagatagccccctaccattcgagactggtaggtggtattctcacac

SEQ ID NO: 60293 - DNA, 40 bp, Pseudomonas reactans
  source 1..40: mol_type = genomic DNA
ggtactgcgcgaaccactggaatcagggcatatcgtaatc

SEQ ID NO: 60294 - DNA, 50 bp, Pseudomonas reactans
  source 1..50: mol_type = genomic DNA
gtgtgagatagccccctaccattcgcgactggtaggtggtattctcacac

SEQ ID NO: 60295 - DNA, 40 bp, Pseudomonas reactans
  source 1..40: mol_type = genomic DNA
tgtgctgggctgagcactggcatgagggcctgccataatc

SEQ ID NO: 60296 - protein, 513 aa, Eubacterium callanderi
MHNYVIALYIRLSVEDFKTESLSIPNQKLILREKAMSLSEWDNSEILEFIDNGHTGTNFERPAVQELLTMVQAGKINCIIVKDLSRFGRNSIETGYFIERVFPLYHTRFISVSDDFDTANFKGDTGGIDIAFKYLISECYSRDMSMKTKSAKYAKMRRGEYQSVICPYGYRKSADGRMEPDEDVAPNVQMIFQWASEGNTAAEITRRLYAMNIPTPGEYRKLKGKDYYNVSRTNGVWNTSTVLRILEDQRYIGTYVIGKRKVKEIGSRHTQLKDESEWFKIPNHHPAIVSVDLFEKANASIKRFSLSNKKPRDYLLRGKVFCGCCDHAMSLRNGAWFYCRHSEVAETLPCHGVRIKMADLEQVVFETIRAQMCPALGIDSNKDKLDLQTVQQAEHEEKLRSIQDSKRHLYEQYALGEIDLETYRTRKAVYDTELVQAKNVHAVITAQTKQIKSDYEIKLKQQEIVQEVGNANMLTKALIDRLINKVYVFPGDRIEIEYATQDFLETKESEKEV

SEQ ID NO: 60297 - DNA, 50 bp, Eubacterium callanderi; identical to SEQ ID NO: 14627
  source 1..50: mol_type = genomic DNA

SEQ ID NO: 60298 - DNA, 40 bp, Eubacterium callanderi
  source 1..40: mol_type = genomic DNA
tgctctggtcgcaaaggtgtgccggagatcatgaaaacga

SEQ ID NO: 60299 - DNA, 50 bp, Eubacterium callanderi; identical to SEQ ID NO: 41899
  source 1..50: mol_type = genomic DNA

SEQ ID NO: 60300 - DNA, 40 bp, Eubacterium callanderi
  source 1..40: mol_type = genomic DNA
ggctctgctcatgaaggtgaagagggcatcaggaaaagga

SEQ ID NO: 60301 - protein, 508 aa, Streptomyces cyaneofuscatus
MPIAPEHLALLYTGPFDAYLYGRASRDPKKKGRSVGSQLSEGRELCEENGWPIKAEFPDVDRSASRYAKRAREKFEEMIAGIESGDCRILVAWEASRYYRDLEVYIRLRNACMANGVLLCYNGTVYDLSKRADRKATAQDALQAEDEAEGMRDRNLRTVRQNAKAGAPHGRLLWGYARRYDVDTGDLVEQYVHPERGPIVRDIFERVAAGQTEYSILKVLRSKGERLPGQRWEYHNLQGMLRNIGYNGRRIHQGRDAGKATWPAIVDDELFAAVQQIVSAPGRRTTDSTAVVHLLSGIARCGLCPGTPPPHLKVLNNRGGILSYQCSEKYDVVIAKAKTDAYVEEAVIEYLESKAALAAFTSTEDQKRASTARARMKQLQGQLDEGRVLAGQLDASGVPRLSVTSLASLEASLMPQIEKAKAESERLNVPPVLRGLVGRPNVDAIWQDMTIEQRRTVLRAVVNIRLMKARVSGVRKIEPGRIRLTFYGEPGFVSDWHRAGRLRQSVAE

SEQ ID NO: 60302 - DNA, 50 bp, Streptomyces cyaneofuscatus
  source 1..50: mol_type = genomic DNA
gcatctgttgagtgaaggttggcccccgccaaccttactcagacagatgg

SEQ ID NO: 60303 - DNA, 40 bp, Streptomyces cyaneofuscatus
  source 1..40: mol_type = genomic DNA
caggatcgacaggttagccccggacacagccaacaagtgc

SEQ ID NO: 60304 - DNA, 50 bp, Streptomyces cyaneofuscatus
  source 1..50: mol_type = genomic DNA
gcatctgttgagtgaaggttggcccacgccaaccttactcagacagatgg

SEQ ID NO: 60305 - DNA, 40 bp, Streptomyces cyaneofuscatus
  source 1..40: mol_type = genomic DNA
caggaaagacaggtttgcacatgactgtgacatcatgtgc

SEQ ID NO: 60306 - protein, 529 aa, Schaalia hyovaginalis
MTTTADTKILTVPGEGRVTAVTYQRVSTKEQATTGGRDEGFSIPAQREANRRKAETLGAQVVAEFVDAGESARSAKRPGLQQLLDYIATHQVTYCIVHKVDRLARNRLDDVDIHRQLIDAGVQLVSATENIDETPSGMLLHGIMSSIAEFYSRNLAAEVTKGMTQKVAAGGTPSRAPIGYRNIRKRDAQGREYRTVEIDPDRAPLIRWVFETYAAGEHTVPDLLAEATARGLTTVPTPKRPSGPVGRSTFFKLLRNPYYIGQVRYQGALHPGAHEPIIGVETWQQVQTLLDTRATAGERRRKHDHYLKGTLYCGTCKARLQLDYARNKQGIRYAYYICSGRATKRTACTRRAVPVGVAEQLVADCYQQMTITERRYQQLAGRVEAEFDQRLAERSQAIDDLTATKTRLKSEADKLLEAHFADAIDLDTLKRHQDRIRVALNDVTRRLEAERRDHEGPRKHLATALRLLADCATMYERTDDLGKRLANQAFYQRILITEDEKAAIQLNEPFAALAPTSTDVRCSNTSNLV

SEQ ID NO: 60307 - DNA, 50 bp, Schaalia hyovaginalis
  source 1..50: mol_type = genomic DNA
gtcaggtgttctaatacatccaatctggtggacgccggtggactcagccc

SEQ ID NO: 60308 - DNA, 40 bp, Schaalia hyovaginalis
  source 1..40: mol_type = genomic DNA
gcgatcagcccgtttcgtgatggtggagccaatgggactc

SEQ ID NO: 60309 - DNA, 50 bp, Schaalia hyovaginalis
  source 1..50: mol_type = genomic DNA
gtcaggtgttctaatacatccaatagggtggacgccggtggactcagccc

SEQ ID NO: 60310 - DNA, 40 bp, Schaalia hyovaginalis
  source 1..40: mol_type = genomic DNA
gaggtcaggctgattggtgagggggctgccactgggcctc

SEQ ID NO: 60311 - protein, 505 aa, Collinsella intestinalis
MPRKPKKTETRKGVIYARFSSHAQREESIMDQLRVCSDYAEREGIEIAATYADEARSGTNTAGRPEFLRMVSDAQKSDWDCVIVYKSDRFARNRYDAATYKAKLRKAGVELLSATEGVPDGPEDIILESVLEGMAEYYSANLAQNVLRGMEGNALKCHHNGVRVFGYDCMPDGSYKINEHEAQGVRAVFAMLDSGSTKAAAARHLNKGGWRSKRGGEFGVQSIKQMLGNEKYVGVYSWGEVRVEGGIPAIIERGTWDRAHAKLKMRGTRKVVKNESYLLSGKMFDVDGNLYESCCGTSRNGKRHYYYRVKSTGASMRKENAEERVRRAVARVLDENPELDETIVDIAMQAQSESESMEREAVEAMRKRLPQIDREMDNLIDLAAKTGAGRTIPEKLRALEREREVLALQIQDMESRAPLIEPDMVRYLLFQLRKCSGPDSVVRGFVDRIEVDAEGGMLVIFNLCTPSDLREQQNGEPQRAWFAKLSSGSPYRIRTGDLRLERAAS

SEQ ID NO: 60312 - DNA, 50 bp, Collinsella intestinalis
  source 1..50: mol_type = genomic DNA
taatgaggctcggagtgcctcggaaactcttggtagccccccgatcaact

SEQ ID NO: 60313 - DNA, 40 bp, Collinsella intestinalis
  source 1..40: mol_type = genomic DNA
gttcaaaaacccgggggataactcttggtagcccgtaccg

SEQ ID NO: 60314 - DNA, 50 bp, Collinsella intestinalis
  source 1..50: mol_type = genomic DNA
taatgaggctcggagtgcctcggacactcttggtagccccccgatcaact

SEQ ID NO: 60315 - DNA, 40 bp, Collinsella intestinalis
  source 1..40: mol_type = genomic DNA
gctcaagtaccaagtggatcactcttggttgcccccattg

SEQ ID NO: 60316 - protein, 541 aa, Anaerobutyricum hallii; identical to SEQ ID NO: 52861

SEQ ID NO: 60317 - DNA, 50 bp, Anaerobutyricum hallii
  source 1..50: mol_type = genomic DNA
tgtacctataattcaagagcgattgagttcgctcaagtattataggcata

SEQ ID NO: 60318 - DNA, 40 bp, Anaerobutyricum hallii; identical to SEQ ID NO: 52858
  source 1..40: mol_type = genomic DNA

SEQ ID NO: 60319 - DNA, 50 bp, Anaerobutyricum hallii
  source 1..50: mol_type = genomic DNA
tgtacctataattcaagagcgatttagttcgctcaagtattataggcata

SEQ ID NO: 60320 - DNA, 40 bp, Anaerobutyricum hallii
  source 1..40: mol_type = genomic DNA
ggagaaaatatttgcaaactaattatcaaacaaaggaaca

SEQ ID NO: 60321 - protein, 560 aa, Enterocloster asparagiformis; identical to SEQ ID NO: 3676

SEQ ID NO: 60322 - DNA, 50 bp, Enterocloster asparagiformis; identical to SEQ ID NO: 3677
  source 1..50: mol_type = genomic DNA

SEQ ID NO: 60323 - DNA, 40 bp, Enterocloster asparagiformis
  source 1..40: mol_type = genomic DNA
agtagggccggttgccccggtcggcccggtgggtcccata

SEQ ID NO: 60324 - DNA, 50 bp, Enterocloster asparagiformis; identical to SEQ ID NO: 17064
  source 1..50: mol_type = genomic DNA

SEQ ID NO: 60325 - DNA, 40 bp, Enterocloster asparagiformis
  source 1..40: mol_type = genomic DNA
agttgggctggatgccccaagctgccctccaggacccgta

SEQ ID NO: 60326 - protein, 462 aa, Mycobacteroides chelonae
MEAVIYTRVSDDDSGRSRSTQDQETECRAYCERQGWPIKAVLCDEGIGASRYSRGEREAFKQLETILEPGNVLVFWEASRSQRDLAAYVKLRDLSAKIGAFWCYSGKLFDLTKGDDRFVTGLDALLSEREVDQFRERVERGRRSAAVRGKPGPGPAPWGYKPLRDERTGDFTNWVLDPEEAHLVRDAARSSLAGESLRSIIGRINADGTRHRRRPQSMTALRRTLMNPQLAGLRKYRGQVIGEGTWEPIISLEDHEKLCALLTSPDRKTHHGTEPKWLLTGIAVCGVCGSPMATKDNKSNRIYICKANRGCVGRNVDYADAVVKEAVLTVLENLDPSIFAEGDDATKEALAELRELEDLLDEYVELASAKEITPRAYAKFEQKLLPQIEAARSRLTASQRMSAALAIAGPDARRLWANLEANGAQGLQDRRAIVRFFEITIKPMGRTGKKLVPESIGVRLRD

SEQ ID NO: 60327 - DNA, 50 bp, Mycobacteroides chelonae
  source 1..50: mol_type = genomic DNA
tatcaccccttgtgaacctgctgggggcagaacgttgcataggggtgata

SEQ ID NO: 60328 - DNA, 40 bp, Mycobacteroides chelonae
  source 1..40: mol_type = genomic DNA
catcaatgtcacctgctggggacgtctagtcaccggggtg

SEQ ID NO: 60329 - DNA, 50 bp, Mycobacteroides chelonae
  source 1..50: mol_type = genomic DNA
tatcaccccttgtgaacctgctggaagcagaacgttgcataggggtgata

SEQ ID NO: 60330 - DNA, 40 bp, Mycobacteroides chelonae
  source 1..40: mol_type = genomic DNA
cagcaatggcacctactgaaatcttctaggcagggaggtc

SEQ ID NO: 60331 - protein, 538 aa, Burkholderia insecticola
MELDRSLMLRDEGQSAYHGDHVTKGAFGGFLREVEAGHVPPGSVLIAESMDRMSRATVIDALMQLLAIISRGITVVTMADKREYSQDGINKNPFDLMFSIMLMAQARTEIDNRATRIRAAARARATNWVKLDERKRLGVGKDPGWVEYDSKTNEFQFWEPFTTPLLALIGFFRQGYSLRCCFDQLEAAGIPLPPDRMVNGKIRKGGLSNTTRLHEIIQNRALIGEKTVEIEGQEYAMPNYYPALTEAEFIELQALRSQRGRTAGTRSEIVSFVTGMRLTFCMKCGSALANQNMLGRSLREDGLPQDGHRRLYCTSATQADKSKRCGTGSMSIVPVERAVMDYCSDQIKLTSLFVENDDIARNLNGLLRLARAEVDKTQAQIDRVTEALALSDGELPSLVTKLRELETLLKAHQASVTKHEFALVPLDRTSKPAMAQRWIELREDVTRLDAAARTQARQLVLDTFKRIDIRPVTRKNEELIELRLTSKHDVIRGFLIDRKTGAWHSETIVDDPKHQALTRRRQPRARKEAGRIAGQQAT

SEQ ID NO: 60332 - DNA, 50 bp, Burkholderia insecticola
  source 1..50: mol_type = genomic DNA
ggttcacattcagtccgttagcgtgtgccgtaacgaacggaatatagact

SEQ ID NO: 60333 - DNA, 40 bp, Burkholderia insecticola
  source 1..40: mol_type = genomic DNA
cggctacgtgcttttcgaagtgccgagcaatctgctgctc

SEQ ID NO: 60334 - DNA, 50 bp, Burkholderia insecticola
  source 1..50: mol_type = genomic DNA
ggttcacattcagtccgttagcgtcagccgtaacgaacggaatatagact

SEQ ID NO: 60335 - DNA, 40 bp, Burkholderia insecticola
  source 1..40: mol_type = genomic DNA
gggctacctgcttcacacacagccccgcaatctgttggtg

SEQ ID NO: 60336 - protein, 558 aa, Mycobacteroides abscessus; identical to SEQ ID NO: 18751

SEQ ID NO: 60337 - DNA, 50 bp, Mycobacteroides abscessus
  source 1..50: mol_type = genomic DNA
gaaccctttggtggagctaaggggacaactatcgaaccccgtcggggcgc

SEQ ID NO: 60338 - DNA, 40 bp, Mycobacteroides abscessus
  source 1..40: mol_type = genomic DNA
ttattgtggagctaacgggactcgaacccctgacccccac

SEQ ID NO: 60339 - DNA, 50 bp, Mycobacteroides abscessus
  source 1..50: mol_type = genomic DNA
gaaccctttggtggagctaaggggtcaactatcgaaccccgtcggggcgc

SEQ ID NO: 60340 - DNA, 40 bp, Mycobacteroides abscessus
  source 1..40: mol_type = genomic DNA
tttttcagtagagatggggtctcgaactcctgaccccaag

SEQ ID NO: 60341 - protein, 618 aa, Sellimonas intestinalis; identical to SEQ ID NO: 11111

SEQ ID NO: 60342 - DNA, 50 bp, Sellimonas intestinalis; identical to SEQ ID NO: 11112
  source 1..50: mol_type = genomic DNA

SEQ ID NO: 60343 - DNA, 40 bp, Sellimonas intestinalis
  source 1..40: mol_type = genomic DNA
gtccgaaaggcgagcatcggatttacgaccgggaggcaag

SEQ ID NO: 60344 - DNA, 50 bp, Sellimonas intestinalis; identical to SEQ ID NO: 36309
  source 1..50: mol_type = genomic DNA

SEQ ID NO: 60345 - DNA, 40 bp, Sellimonas intestinalis
  source 1..40: mol_type = genomic DNA
ggctgaaatgggagaatcgcttgaacgaacggaaggcaga

SEQ ID NO: 60346 - protein, 577 aa, Burkholderia pseudomallei
MSNADAAKPVAYSYIRFSTAQQALGDSLRRQVELTEQYCEEHGLALARASAYRDLGVSAFRKKNIEAGKLAEFISAVKSGKVASGSYLIIEQFDRLSRAEINVALRLFLDLVDAGIFVVTLADRKVWNKDSVADVGDLITAIIYMSRANDESERKSDRLSAVWAQKKKRAADGTATRIVTSEAPRWLRANADKTGFNIVPELAESVRRVFEMRINGAGVVAICRRANQERWPVPGKMPVQKAAESDSDFAERRKASGQWHQSLVSRILKNRAVLGEYQPRRLDTENMGNRVAVGDPIRGYFPAIIDDTTFLRAQATSLRRGVRPGRRDPHARNWLYGLVKCGQCGNSLVRKNKTSAKQPGYSRYYCVARVRGVTKCPSVNSVQLEALVNYVTASWLPNNWAADTSLEALKARADVLEVAIAASRKNIDGLADLAGSVTAASARKALIEKLDAEGNALGMKEHELARVRAELADSTSVNSSEDVHDRLLKISREIDEIASGQAGIDGSLRLREELARLFEKVVVYQEGGYIEFFIKGRTEPVWLPLDFVSLEPPSEPSAAQLEAAERDIDALRHAMGA

SEQ ID NO: 60347 - DNA, 50 bp, Burkholderia pseudomallei
  source 1..50: mol_type = genomic DNA
cggtgcagttagttacccacctttgagattgtcggtccgtatctgcgttc

SEQ ID NO: 60348 - DNA, 40 bp, Burkholderia pseudomallei
  source 1..40: mol_type = genomic DNA
atcgggcagcccgacgatcgagaacgacggcagcccgttg

SEQ ID NO: 60349 - DNA, 50 bp, Burkholderia pseudomallei
  source 1..50: mol_type = genomic DNA
cggtgcagttagttacccacctttaagattgtcggtccgtatctgcgttc

SEQ ID NO: 60350 - DNA, 40 bp, Burkholderia pseudomallei
  source 1..40: mol_type = genomic DNA
agcgatcgtcccggagagcaagaacggcggcagcccggcg

SEQ ID NO: 60351 - protein, 522 aa, Corynebacterium diphtheriae
MGLRVTQIPATKPVTSAAFRQATATRRVAAYARVSTASEEQATSYEAQVGYYTEMINSRVDWELAGIYTDEGITGTSTKHREGFKRMVADALAGQIDLIVTKSVSRFARNTVDSLTTVRELKEAGVEIFFEKENIWTLDAKGELLITIMSSLAQEESRSISENVRWGIKKRFADGQVFMPYPNFLGYDKGPDGRPQVNEDEAKVVRRIYRLFLSGYSANAIATTLTKEGIPSPGHTKGKWHAQVVDSILRNEKYKGDALLQKTYITDFLTKKQVKNQGEVAQYYVTGSHEAIIDPDTWDLVQAELASRKGRRGIYPFTQKLKCSVCGAYYGSKVWHSNDPYRSMVWQCNNKYQVEHPKSMPHPRDEEIQAAFNRALSKYVTAHPEVAQTVQSALDNAMNTGDLEAEQATTLVTIEGLTAMMDKEVQANTRIAQDQQAYRQRFAKLEDEFTAATTRYDELTQQIAEKQARAVIMRNYLDTLAGITAPVELFDRRLWHVLIDHGTIEPDGSMAFTFKDGTTISA

SEQ ID NO: 60352 - DNA, 50 bp, Corynebacterium diphtheriae
  source 1..50: mol_type = genomic DNA
tgtatcaacaagcccaacgtagggaaacgttggttgtcgctattgatacg

SEQ ID NO: 60353 - DNA, 40 bp, Corynebacterium diphtheriae
  source 1..40: mol_type = genomic DNA
gatggattacatcatggctaatccgccgttcaacattaag

SEQ ID NO: 60354 - DNA, 50 bp, Corynebacterium diphtheriae; identical to SEQ ID NO: 60352
  source 1..50: mol_type = genomic DNA

SEQ ID NO: 60355 - DNA, 40 bp, Corynebacterium diphtheriae
  source 1..40: mol_type = genomic DNA
gttggagtagatcaaagctaattccccttccaactctaag

SEQ ID NO: 60356 - protein, 546 aa, Mycolicibacter terrae
MSLRFAFYGRVSTEDAQDPEASRSWQKRRATDLIGPHGGVLVTDYFDVGQSRSLPWKRRPEASRLLADVAGRDRGFDAVVIGEPARAFYGPQFALTFPVLTHYGVGLWVPEVGGAVDPGSEAHDLVMTLFGGMSKGERARIQMRVRTAMSTLAQDTTRYLGGRPPYGYRLVDAGPHPNPAKASLGQRLHRLEPDPATAPVVERIYRMYADGAGLRYIAQRLTDDGVPSPSQYDPARNRHRDPRGWSHSAIRAILDNPTYLGVRVWGKQEKYEVLVNPDDVAAGYETRMRWRDQAAWVVPDRRTHEALITDELAQAVRLRTQTRRGPGLVCSRESTVPYALRGILFCAVCGRRMQGAARGGKQATRILYRCELGKSRSVPVDLTDHPRTVYLREDAVTPRLDQWIASLADPEDLARGQEVDPGAGNAALLRQLSEANSKVAALIAAVESGVAVEDLTEALRRRSAERDELKARLERVEQPRAMSAAQITELVQELGGLAAVLGEATGPERAQVYASLGLRLDYDPHLRQVKATADLSRVAGCVRGGT

SEQ ID NO: 60357 - DNA, 50 bp, Mycolicibacter terrae; identical to SEQ ID NO: 442
  source 1..50: mol_type = genomic DNA

SEQ ID NO: 60358 - DNA, 40 bp, Mycolicibacter terrae
  source 1..40: mol_type = genomic DNA
acctaaaagttgtgtccgaggggggacttgaacccccacg

SEQ ID NO: 60359 - DNA, 50 bp, Mycolicibacter terrae; identical to SEQ ID NO: 442
  source 1..50: mol_type = genomic DNA

SEQ ID NO: 60360 - DNA, 40 bp, Mycolicibacter terrae
  source 1..40: mol_type = genomic DNA
ccatatagcttgtggcagaggtgggatttgaacccccagc

SEQ ID NO: 60361 - protein, 577 aa, Burkholderia pseudomallei
MSNTQATKPVAYSYIRFSTAQQALGDSLRRQVELTERYCEEHGLTLARASAYRDLGVSAFRKRNIEAGKLAEFIRAVESGKISPGSYLIIEQFDRLSRAEVNVALRLFLDLVDAGIVVVTLADKKVWNKDSVADVGDLITAIVYMSRANDESERKSDRLSAVWEQKKMRAADGTATRIVTSEVPRWLRANANKTGFDVVPELADSVRRVFEMRINGAGIVAICRRANQERWPLPGKMPVKKLGESDEDFAERRQAGGQWHQSLVARILKNRAVLGEYQPRRIDTDGTGERVPVGEPIQRYYPSIIDETTFLRAQATALRRGVRPGRRDPHARNWLYGLVKCGACGNSLVRKNKTSAKQPGYSRYYCAARVRGSTNCPSVNSAQLEGLVSYVAASWLPANWSADASLDALKAHADALELEIASLKNKINGLADLAGGVTTASAKKSLIERLDAEGDALDAREKELAHIRAELADRTSLGADADVHERLQQISREIDAIASGREGLDGAMRLREELARVFQKVTVHHAEGYIELFIKGRAESVWLPLDFVSLEPPSEPSAEQLEAAERERDALSQAMSD

SEQ ID NO: 60362 - DNA, 50 bp, Burkholderia pseudomallei
  source 1..50: mol_type = genomic DNA
cggcgcaattaactacccacgattgagaacgtagagatataatcgcaccg

SEQ ID NO: 60363 - DNA, 40 bp, Burkholderia pseudomallei; identical to SEQ ID NO: 58103
  source 1..40: mol_type = genomic DNA

SEQ ID NO: 60364 - DNA, 50 bp, Burkholderia pseudomallei
  source 1..50: mol_type = genomic DNA
cggcgcaattaactacccacgattaagaacgtagagatataatcgcaccg

SEQ ID NO: 60365 - DNA, 40 bp, Burkholderia pseudomallei
  source 1..40: mol_type = genomic DNA
tttggagagctcaactatcaagaatgacagcagaaagttg

SEQ ID NO: 60366 - protein, 618 aa, Clostridium innocuum; identical to SEQ ID NO: 11111

SEQ ID NO: 60367 - DNA, 50 bp, Clostridium innocuum; identical to SEQ ID NO: 11112
  source 1..50: mol_type = genomic DNA

SEQ ID NO: 60368 - DNA, 40 bp, Clostridium innocuum
  source 1..40: mol_type = genomic DNA
ttgcccgtggcgtccatccgatctggaacagcgccaggga

SEQ ID NO: 60369 - DNA, 50 bp, Clostridium innocuum; identical to SEQ ID NO: 42609
  source 1..50: mol_type = genomic DNA

SEQ ID NO: 60370 - DNA, 40 bp, Clostridium innocuum
  source 1..40: mol_type = genomic DNA
tttcctctggctttcactatttatggtacagcgccagggt

SEQ ID NO: 60371 - protein, 468 aa, Collinsella intestinalis
MPKTAVIYARFSCNKQREASIDDQLRICRQWCQREKYAIVAEYCDYAISGRTDDRPEFQRMVANAGESDIVLVYMMDRFSRGEYDAPIYKRELAQHGVKLVSALEQIPDSPEGIIYEKLLEGLAACESKKTAIRTRRGMEGNALKCKTNGVRVFGYASNEADEYVINEDEAAFVREAFKRRIAKETTNSIARDFAARGVKTSQGNPCGYSMVERMVKNRKYTGRYEWGGVVKEGGMPAIIDEVTFMEAQGIRAAKERSAESWGDFALSGKAICAGCGRNLQGVSGRGRGNRKYEYYRCHDGCVKPVRREELEGEIVKALRALLQDREEALRIARMVAESSDGAEVAARRKQAAQSLSAAERGLKNILNAIEQGIIAPGAKERIAELEHQRDRAKLDLEAIRDDQIDPERLADFLQCGSALDDATLLKAFVYQASVSDEECIVTLNYDVENNEPARLDIQRVRTKCKWC

SEQ ID NO: 60372 - DNA, 50 bp, Collinsella intestinalis
  source 1..50: mol_type = genomic DNA
gggttcgtacaaaatgcaaatggtgcaccgtttgcgcatctcctcgaacc

SEQ ID NO: 60373 - DNA, 40 bp, Collinsella intestinalis
  source 1..40: mol_type = genomic DNA
gtccggacacagcaatggtgcccccaacgggattcgaacc

SEQ ID NO: 60374 - DNA, 50 bp, Collinsella intestinalis
  source 1..50: mol_type = genomic DNA
gggttcgtacaaaatgcaaatggtgtaccgtttgcgcatctcctcgaacc

SEQ ID NO: 60375 - DNA, 40 bp, Collinsella intestinalis
  source 1..40: mol_type = genomic DNA
gtcaggaaacaaccatggggtggccaatcggagttgaacc

SEQ ID NO: 60376 - protein, 506 aa, Pseudomonas aeruginosa; identical to SEQ ID NO: 52046

SEQ ID NO: 60377 - DNA, 50 bp, Pseudomonas aeruginosa
  source 1..50: mol_type = genomic DNA
ggatttctccaagggcaatttgaaaatggcgcacctcgacgaagaaacgt

SEQ ID NO: 60378 - DNA, 40 bp, Pseudomonas aeruginosa
  source 1..40: mol_type = genomic DNA
ccttggcgtggtgaagatgtatggcgcagcggacgggact

SEQ ID NO: 60379 - DNA, 50 bp, Pseudomonas aeruginosa
  source 1..50: mol_type = genomic DNA
ggatttctccaagggcaatttgaagatggcgcacctcgacgaagaaacgt

SEQ ID NO: 60380 - DNA, 40 bp, Pseudomonas aeruginosa
  source 1..40: mol_type = genomic DNA
cccagacctaatgaatatagatggcccagtggaagggact

SEQ ID NO: 60381 - protein, 515 aa, Bacillus cereus
MKTAIYLRKSRADLEAEARGEGETLAKHRTTLLKIAKEMNLNVLSVREEIVSGESLVKRPEMLALLEEIEDNKYDVVLCMDMDRLGRGGMKEQGIILETFKRSNTKIMTPRKTYDLNDEWDEEYSEFEAFMARKELKIITRRMQRGRVASVEAGNYLGTHAPYGYDIHRLNKRERTLTINSEEASVVRMIFDWYANEDMGANAIRSKLNDLGYKSKLGNEWNPYSILDILKNNVYIGKVTWQKRKEVKQPDAVKRSCARQDKSDWIIADGKHEPIIPESLFEQVQEKLNSRYHVPYNTNGIKNPLAGIIKCSKCGYSMVQRYPKNRKETMDCKHRGCENKSSYTELIEKRLLEALKEWYINYKADFEKHKQDDKLKETQVIQMNKAALRKLEKELLDVQKQKNNLHDLLERGVYTVDMFLERSNVVSDRITEITSTMENLKKEIKTEIKKEKVKKDTIPQVEHVLDLYFKTDDPKKKNSLLKSVLEKAVYKKEKWQRLDDFELVLYPKLPQDGDI

SEQ ID NO: 60382 - DNA, 50 bp, Bacillus cereus; identical to SEQ ID NO: 1612
  source 1..50: mol_type = genomic DNA

SEQ ID NO: 60383 - DNA, 40 bp, Bacillus cereus; identical to SEQ ID NO: 55208
  source 1..40: mol_type = genomic DNA

SEQ ID NO: 60384 - DNA, 50 bp, Bacillus cereus; identical to SEQ ID NO: 1614
  source 1..50: mol_type = genomic DNA

SEQ ID NO: 60385 - DNA, 40 bp, Bacillus cereus; identical to SEQ ID NO: 1615
  source 1..40: mol_type = genomic DNA

SEQ ID NO: 60386 - protein, 535 aa, Bacillus infantis
MKKLTNIVGYLRVSTIEQSEEGFSLEAQEAEIRKHCEQHNLNLLGIFCDAGITGTSIEKRKEFQRMLSVIANAKEVYGTEVQYVMAWKLSRLSRNMRDLVNTLDYLERHNVYIKTVTDGIDTSTATGRSIIMFSGIMAEMERENIVSQCRLGMKQRARKGNYNGGKVLGYKSNSDKELEIDEDEAKIVREIFRMFTEENWGYKKIATQLNYMGYKTIKGRDWSINGIKQVIDNPIYVGFIRWGRYEFWNKKRRAGKSEDFVFVKGKHIPIITEETWEKTKQIREIRGKKPEKVFEGNFLLTGLLKCPGCGASMVAHKVKNRYRPGEYYRYYACGNYTNKGIKTCKTNLIKADYAEEYVLKEIGKLVDDPSIIKSVVKKLKKANEVDTEPMMNELKKIKKDLENIQAKTEQNLRLELENKISINILTQRMEFLEAHEKETKEKIFRLESEIHNIETQGLLDADFIQQILHHFNHMFEVADIKQRKQLLHSLIDRITVNQGDTTNERTISKITLIFEPQEVEALSKNKKFVPTYDTV

SEQ ID NO: 60387 - DNA, 50 bp, Bacillus infantis
  source 1..50: mol_type = genomic DNA
gtttgtccctacttatgatacggttcaccgtaacattaccaggggcaaac

SEQ ID NO: 60388 - DNA, 40 bp, Bacillus infantis
  source 1..40: mol_type = genomic DNA
caactacttatgataaggctccccccgattgatcctaaac

SEQ ID NO: 60389 - DNA, 50 bp, Bacillus infantis
  source 1..50: mol_type = genomic DNA
gtttgtccctacttatgatacggtataccgtaacattaccaggggcaaac

SEQ ID NO: 60390 - DNA, 40 bp, Bacillus infantis
  source 1..40: mol_type = genomic DNA
caaccacctatgctatggtatttccctgctgatcataaac

SEQ ID NO: 60391 - protein, 551 aa, Urinicoccus massiliensis
MKNKKAYVYTRVSTSMQIDGYSLDAQEERIKQYAKAYGIEIIETYKDAGKSGTSISGRNEFIAMLNDIEAEKDKVDYVMVFKLSRFGRNAADVLQSLQVMENHNVNLICVDDSLDSSKDSGKLVITILSAVAEMERENILSQTMEGRKQKAREGKWNGGFAPIGYSLDNGELVVNEDEAKAVRMIFDLYANSDMGANGVSKYLVSLGINKPIRQNGKNPYFSASLIRQILDNPVYNGKIAYGRRKTIKDKTTGKIKLEKSDHYIIAQGNHEALIDDELWNTVQEKRKSQAKKYEKINRGKDERVHILSNLIKCPYCGAGLYGNKSRKRNKNKEGEHYKDYYYYGCKHRQMMNGHKCTFNKQIRAELIEKEVETIITQVVSNPTFAKKIEEKINIQIDTKEIDEVINKHLAKIRQLTGTKASLINQIDSLNFEDKHYDRKYTDLNLRLDAIYDQLEYAEMQLNDSRKRKEAILEEKITSDNIYKILVNFNSLYTVLSDIDKKRLLNEMIEEIQIYDEKTEKDTWIKSVVFKLPLIDNEIDFGLDNKDNVETV

SEQ ID NO: 60392 - DNA, 50 bp, Urinicoccus massiliensis; identical to SEQ ID NO: 12612
  source 1..50: mol_type = genomic DNA

SEQ ID NO: 60393 - DNA, 40 bp, Urinicoccus massiliensis
  source 1..40: mol_type = genomic DNA
tccatagacaatgcatgtggagacggtagtgttgatatca

SEQ ID NO: 60394 - DNA, 50 bp, Urinicoccus massiliensis
  source 1..50: mol_type = genomic DNA
ggtttggacaataaagataatgtcgcgacggtagctctgttgtccaaact

SEQ ID NO: 60395 - DNA, 40 bp, Urinicoccus massiliensis
  source 1..40: mol_type = genomic DNA
accagatacattgcagttggcgttggtattgttgaaatta

SEQ ID NO: 60396 - protein, 578 aa, Faecalibacterium prausnitzii
MGYVVKKAAQRFEEKKAAIYVRVSTQYQVDRASLPVQREELINYAKYALGISDYVIFEDAGYSAKNTDRPDYQQMMARMRTGEFSHLLVWKIDRISRNLLDFSVMYAELKELGVVFVSKNEQFDTSSAMGEAMLKIILIFAELERKTTSERVSAVFVSRANDGIWNGGKVPYGYSYDKESKTFSIAEDEAKIVRLIYSLYESEKSIVRVARIMNERGLKSRAGNDWSPTTVHTILSSPFYSGTYRYNYRDESNTKRFREKGKDEWVLVENHHPAIVSPERQAAVGVILESKHYNKNATYQRKNVHVFAGLLTCGCCGSTMAATTDKVRADGWRPSMYICSRRRKSEDCTNKYVSDVTLGPFVLNFFANLIKASNSFGRTTSIETLEKKLLRGEALSHVDHIERPGLEELYNHLRSGFDEKRFEPPTIAATETSADLSERDLLLSEKRRLERALNRLKTIYLYGDDEMASKDFNIERERITKALSEVDSRINELDIANAFDLSLSDEAFMQKASQFILTQQLLDKRYVNYERFIRKIDPKIVKDFLNETVSNFCIKDGLTTSILLKNGIELRFSYKTAE

SEQ ID NO: 60397 - DNA, 50 bp, Faecalibacterium prausnitzii; identical to SEQ ID NO: 47507
  source 1..50: mol_type = genomic DNA

SEQ ID NO: 60398 - DNA, 40 bp, Faecalibacterium prausnitzii
  source 1..40: mol_type = genomic DNA
tcacaggatcagcatcgcatcgccgaaggaaaagaagcgg

SEQ ID NO: 60399 - DNA, 50 bp, Faecalibacterium prausnitzii
  source 1..50: mol_type = genomic DNA
ttcccgcctcgtataaacatcgcaaaccccatactgacgggagtcgggat

SEQ ID NO: 60400 - DNA, 40 bp, Faecalibacterium prausnitzii
  source 1..40: mol_type = genomic DNA
tctcagcaccagaattgcaaagctgaatgaagaagagtgg

SEQ ID NO: 60401 - protein, 578 aa, Faecalibacterium prausnitzii
MGYVVKKAAQRFEEKKAAIYVRVSTQYQVDRASLPVQREELINYAKYALGISDYVIFEDAGYSAKNTDRPDYQQMMARMRTGEFSHLLVWKIDRISRNLLDFSVMYAELKELGVVFVSKNEQFDTSSAMGEAMLKIILIFAELERKTTSERVSAVFVSRANDGIWNGGKVPYGYSYDKESKTFSIAEDEAKIVRLIYSLYESEKSIVRVARIMNERGLKSRAGNDWSPTTVHTILSSPFYSGTYRYNYRDESNTKRFREKGKDEWVLVENHHPAIVSPERQAAVGVILESKRYNKNATYQRKNVHVFAGLLTCGCCGSTMAATTDKVRADGWRPSMYICSRRRKSEDCTNKYVSDVALGPFVLNFFANLIKASNSFGRTTSIETLEKKLLRGEALSRVDHIERPGLEELYNHLRSGFDEKRFESPTIAATESSADLSERDLLLSEKRRLERALNRLKTIYLYGDDEMASKDFNIERERITKALSEVDSRIDELDIANAFDLSLSDEAFMQKASQFILTQQLLDKRSVNYERFIRKIDPKIVKDFLNETVSNFCIKDGLTTSILLKNGIELRFSYKTAE

SEQ ID NO: 60402 - DNA, 50 bp, Faecalibacterium prausnitzii; identical to SEQ ID NO: 47507
  source 1..50: mol_type = genomic DNA

SEQ ID NO: 60403 - DNA, 40 bp, Faecalibacterium prausnitzii; identical to SEQ ID NO: 60398
  source 1..40: mol_type = genomic DNA

SEQ ID NO: 60404 - DNA, 50 bp, Faecalibacterium prausnitzii; identical to SEQ ID NO: 60399
  source 1..50: mol_type = genomic DNA

SEQ ID NO: 60405 - DNA, 40 bp, Faecalibacterium prausnitzii; identical to SEQ ID NO: 60400
  source 1..40: mol_type = genomic DNA

SEQ ID NO: 60406 - protein, 581 aa, Nocardia nova
MTEPSARDERFRLKKAVALLRVSSKGQLGAAMDADPDGLSIGTQRASTQTKAVSLSAEVVEFFIEPGYSASKLTIEQRPVFKDLWTYVTTHRDVEYVIVYMRSRIFRNRYEAAIVEHQLKQLGIRLVSVHEDFGEGPYADAIAGVVDVMNQLTTTVQGLDIQEKMRRKAVDLGGTLGRAKLGYLNVTIKVDGHDVNTIRLDEQRAPLVLRAFELYATNEYSIERLEATMADLGLTTKATKRYPEQPVSGSKLHTMLSDPYYIGFVRYKGQVYPGRHEPLVSHELFERVQEVLGLRSGRGQRDRVHQHHLKGFLFCQRCRKAGRTSRLIYTEPQGRGGIRYRYFVCRGRQDGVCNLPHLPVELVEQAVIDHYDTLTLPADFITEIRARMAKVVADETTTTREMHAALTRRLKELDDQEDRLIRLMRFGSMPEAKIRTELLDVQIERERAEAGLTQTSAELAAGAQVLNDALHLASDPQQLYQGADDATRRLLNETFYERFYLDDLEVVEDDKTPIMHELHDAHCAYRQHHAAVPDGLALVEERAGHPAKRAALNGEPPQKDQSGPSLASVFSVAGSTKAAHV

SEQ ID NO: 60407 - DNA, 50 bp, Nocardia nova
  source 1..50: mol_type = genomic DNA
tggttcaactaaggccgctcacgtcgagatactgggacggtattcgaacc

SEQ ID NO: 60408 - DNA, 40 bp, Nocardia nova
  source 1..40: mol_type = genomic DNA
attcccggtcgtccgtggtcgggatgacaggatttgaacc

SEQ ID NO: 60409 - DNA, 50 bp, Nocardia nova
  source 1..50: mol_type = genomic DNA
tggttcaactaaggccgctcacgttgagatactgggacggtattcgaacc

SEQ ID NO: 60410 - DNA, 40 bp, Nocardia nova
  source 1..40: mol_type = genomic DNA
attccaggtcctccagccttgggactccaggatttatacc

SEQ ID NO: 60411 - protein, 641 aa, Microbacterium aurum
MTSDDDRSNFYNARATPVGPPESPRSAEEGLDFEGQQRVNPEDLNGGNPLMSPQNLGIASPEAPVNSLDGLEHLLNAHTGRAPEGGHTGLAQAVVYLRVSTPRQLHTAADIDEDGNSIATQRVEALRKVRELRATVAKEFVEPGQSAQTISKRTEFKKLLRYVDEHPQVKYVVIYMRSRVFRNFTDAAITKRQLLEKGVRLISAKEEFGEGYMADAMEAITDIMNEVQVRMNGEDVKVKMAHKVEQGGTVGRAKLGYLNVRKDFNGRLVNTIDVDFERAPLVAWAFEQYATGRYSISQMTHMLEERGLTTRPSPSRPAQAVSRSRLALILRNPYYTGVIRYKGSLYVGRHEPLVSKETFLKVQEVLDHRNRKGDRDIVHFHYLKGLLYCGPCKDAGRTSRLVYSQNAGNGGTYEYLVCTARQHKECSLPWLRVEQIEGEVLPVVAAEALSPEAIEDIRDAVNKSIANILAQDRDVKAQLTKQLRKLEAQEERLIELAATGSLPIAKIRERIEKTTLQKEAVLEQLEVTADRLQYGTETALAYIDLLSDPGELYRRASDTVRRDLLTAYFDSMTVRVEDSRVHVSGERRAISNRLREVGGEIAVAEGQNNQGKTETPRSRAGSSVRSTVSSFDHGSSNVRMA

SEQ ID NO: 60412 - DNA, 50 bp, Microbacterium aurum
  source 1..50: mol_type = genomic DNA
tggttcgagtaacgttcgtatggctgacctaaacgacctctgttctaacc

SEQ ID NO: 60413 - DNA, 40 bp, Microbacterium aurum
  source 1..40: mol_type = genomic DNA
ccgggggtttgcgtcttgctggggtacctggactcgaacc

SEQ ID NO: 60414 - DNA, 50 bp, Microbacterium aurum
  source 1..50: mol_type = genomic DNA
tggttcgagtaacgttcgtatggcctacctaaacgacctctgttctaacc

SEQ ID NO: 60415 - DNA, 40 bp, Microbacterium aurum
  source 1..40: mol_type = genomic DNA
cagaggttttgggtcttgcctgtttacctgatctccattc

SEQ ID NO: 60416 - protein, 499 aa, Actinomyces oris; identical to SEQ ID NO: 45866

SEQ ID NO: 60417 - DNA, 50 bp, Actinomyces oris
  source 1..50: mol_type = genomic DNA
atacgtctctggtctcgcatagtggccactatgtacgaacgaagacatac

SEQ ID NO: 60418 - DNA, 40 bp, Actinomyces oris
  source 1..40: mol_type = genomic DNA
gccggcgaaggccgcggccgccaaggtgccgatagcgtac

SEQ ID NO: 60419 - DNA, 50 bp, Actinomyces oris
  source 1..50: mol_type = genomic DNA
atacgtctctggtctcgcatagtgttcactatgtacgaacgaagacatac

SEQ ID NO: 60420 - DNA, 40 bp, Actinomyces oris
  source 1..40: mol_type = genomic DNA
gatagccatggcccctgccttcatggtgcttatagtgtac

SEQ ID NO: 60421 - protein, 550 aa, Rhodococcus opacus
MSTSANPSRVLGRLRISRATDESTSIERQREFITRWAEAHGHTVVGWAVDEDVSGSVDPFDTPALGPWLTDPSKAHEWDILAAWKLDRLGRNAIQLNKLFGWTLEHGKTLVSCSESMDLSTTTGRMLAAIIAGIAEGELEAIRERTLASRAKLREVARWPGGKPPFGYTAVKRTDGQGWRLEVDPLARSVVRRIVDSVLDDQPFTATARILNEEGVLTPGDYYRTVRAGTPSLHRVDGIEPRSKWAATTIRQLLRSKALRGHVHHNGETVRGDDGQPLKMADHLVSADEWELIQAYLDRRAESRKGIRRSESSPLSGVAVCLVCDNPLHHSRHTTKGHHYRYYRCPEKHTTQIPAEKLETLVEEGFLRQVGDLEVRERVWVPGDTREAELREAVRAYDELRKLLGTVVSSTAEQRLRDQLTATDVRIAELESTPAREARWEYRATGGTYLDAWGAADTDGRRELLLRSGITVAVHLETGGVRRSKFHDGTVSADIRIPFGFYESLGLQRPEYLTEMFGTLTEIDMAGVEIGGGKAVFVSKTGERTEFPLT

SEQ ID NO: 60422 - DNA, 50 bp, Rhodococcus opacus
  source 1..50: mol_type = genomic DNA
gttgcgctaaagctgcaatcccactcgtggaacattagcttgaacacaac

SEQ ID NO: 60423 - DNA, 40 bp, Rhodococcus opacus; identical to SEQ ID NO: 57733
  source 1..40: mol_type = genomic DNA

SEQ ID NO: 60424 - DNA, 50 bp, Rhodococcus opacus
  source 1..50: mol_type = genomic DNA
gttgcgctaaagctgcaatcccacgagtggaacattagcttgaacacaac

SEQ ID NO: 60425 - DNA, 40 bp, Rhodococcus opacus
  source 1..40: mol_type = genomic DNA
agtgtgtgggattagcagtgagtgcaacatgaattgaaaa

SEQ ID NO: 60426 - protein, 468 aa, Rhodococcus opacus
MHEWDIIVSWKLDRLGRNAIQLNKLFGWCGEHGKTLVSCSESIDLGTWAGRMLAGVIAGLAEGELEAIRERTLASRAKLRERARWAGGKPPFGYTAVKRTDGQGWALEIDPLASTLVRRIVDSVLDDQPFTATARNLNDEGVLTPGDYYRTVRAGTPSLHKDDGIIEPRSKWAATTIRQLLRSKALRGHVHHNGETVRGDDGQPLQMAEPLVTTDEWELIQAYLDRRAESRKGIKRSESSPLSGVAVCLVCDNPLHHTRHTTKGHQYRYYRCPDKHTTQIPAEYLEELVEEYFLRDVADLEVRERVWVPGDSRDADLKDAQSALDELAKALGGVRSARAVERLHEQIRAVDARIVELESTPAREARWEYRATGGTYLDAWGAADTDGRRELLLRSGISVAINLNTGGVRRSKFHDGNWSVDIRIPEGFYEALGVEMPEHVRERLYNPRELTAEEWKALAAEPSYSEEV

SEQ ID NO: 60427 - DNA, 50 bp, Rhodococcus opacus; identical to SEQ ID NO: 9147
  source 1..50: mol_type = genomic DNA

SEQ ID NO: 60428 - DNA, 40 bp, Rhodococcus opacus; identical to SEQ ID NO: 57733
  source 1..40: mol_type = genomic DNA

SEQ ID NO: 60429 - DNA, 50 bp, Rhodococcus opacus
  source 1..50: mol_type = genomic DNA
gttgcgctaaagctgcaatcccacgagtggaacatcagcttgaacacaac

SEQ ID NO: 60430 - DNA, 40 bp, Rhodococcus opacus; identical to SEQ ID NO: 60425
  source 1..40: mol_type = genomic DNA

SEQ ID NO: 60431 - protein, 551 aa, Caballeronia novacaledonica
MKNARVFSYLRFSDVRQKAGTSIAHQQEYAAKWAADHGLTLDTSLNLRDEGLSAYHLKNVTKGALGTFFKAIDSGRVPSGSVLVVESHDRLSRAEVDVALAQLLNIIHSGITVVTANDGQVYSREQIKDKPWSLMYSMIEMMRAHQESDIKSKRVKASLRLQCEGWLKGTWRGHIAVGKDPKWIRFDRNRNQFELVGEYAESLRALIGFYRAGHSPSRSFERMREAGIALPPCVSNVPRLHAILANRNLVGEKTIKVEGETYLLPGYYPALLTEAEFASLQYLRAQRGRRVGRAEVISFMTGLGITFCARCGYAMGNQNIMSRPKRADGLPHEGHRRLVCTGAQKAADRCTVGSCSIVPVERALMAFCSDQLNLASLFVEDHEKTRQLNSALALARQQVDQTADEVRTYLGVKAIGGASTPAMILEHMTRLSPRLDQEKSRVTALEHDLEALHRHCTPAVSEVWGALREGVDRLDEVARTKARQLIADTFARIEVSLQDRGMIGLRLVSKRDIVRILWIDRKTGERRDQLTVENTHHTALAKERRGRKRAA

SEQ ID NO: 60432 - DNA, 50 bp, Caballeronia novacaledonica
  source 1..50: mol_type = genomic DNA
ggtatatccacactcttttacggcacgcctaaggagactctgtatatact

SEQ ID NO: 60433 - DNA, 40 bp, Caballeronia novacaledonica
  source 1..40: mol_type = genomic DNA
cagaatgatgttgctcggcacttcgaagatgaagtagccg

SEQ ID NO: 60434 - DNA, 50 bp, Caballeronia novacaledonica
  source 1..50: mol_type = genomic DNA
ggtatatccacactcttttacggctcgcctaaggagactctgtatatact

SEQ ID NO: 60435 - DNA, 40 bp, Caballeronia novacaledonica
  source 1..40: mol_type = genomic DNA
cagaataatttggccattctcttctaagatgatgttgcct

SEQ ID NO: 60436 - protein, 600 aa, Vibrio gigantis
MIHPKEQLDAYIYSRVSKDVQVQGDGIRRQIDGAIRFVESKNKENLQNGLPTYAIADEFITDRGLSAYKGFNTATNGGLGAFLEAARKGDIKRGSLLVVEAVDRISRMPADESRKTFSLFKEYGIDVAIVKFGIIIKHSESTTLENDLLITAAIHLAHMESQQKSNRINDYFENKRMKEKEGGEKRTSICPSWMKLSEDKRSFELIPDRERVMKRIINMKLDGLGCHRIASTLNSEGVPYFNGKTWSTEIVRKYCKMIQLYGAFQRVKHVRTDAGTKKQPWGDIEQNYYPAIIDEQTFLRLKKSFKRSGGRQTGAFSNLFSKLLFCPQCGSSMSYYKPNRGRKKVRCRKQIDNQGCTQRALNYEEIETRLVKALAGLDYAKINDSSFTDLSEELSSLEANIAELNENVEVVTKQLMENINPRLYSILTDKLTKLDDEIQSEKAKFDELSILHRNYDTTIINSLKLDNNEDRERYNNFVKQFVKYIICTDEEQGGSLRVVFKADAIGELPFSFSDEKNDKAVSEVFTANRSISDTQAVRSINLDKSSGMYLPLLKEITDVKQPNDLSDSRELIRYMHAVRMAVKRNPSKWKEIAEQAKLRY

SEQ ID NO: 60437 - DNA, 50 bp, Vibrio gigantis
  source 1..50: mol_type = genomic DNA
tgcgatactaatagtaacccaaccaatgaagagtttgtaatagtatcgca

SEQ ID NO: 60438 - DNA, 40 bp, Vibrio gigantis
  source 1..40: mol_type = genomic DNA
agcgatggttatcccaaccaatgaagagttcgtgattgct

SEQ ID NO: 60439 - DNA, 50 bp, Vibrio gigantis
  source 1..50: mol_type = genomic DNA
tgcgatactaatagtaacccaacctttgaagagtttgtaatagtatcgca

SEQ ID NO: 60440 - DNA, 40 bp, Vibrio gigantis
  source 1..40: mol_type = genomic DNA
agagattgtcatcccagtctttgcagatttcttctgtgct

SEQ ID NO: 60441 - protein, 470 aa, Mycolicibacterium fortuitum
MSKANQIPAAIYVRISQDRTGAALGVERQEEDCRKLAESLGWQVARVFSDNDTSAYSGKRREGYEKLLSAIEAGEVKGVLAWHPDRLHRSVLELEHYVAVSRKHGIDTHTVQAGHWDLSTPSGRAVAITLSAWAQHESEHKGERIRRARVQQAKAGKFHGGIRPFGFEPDGVTVRESEAAEIVKMVNAVVAGVSLRSIVRDLNERGVLTATGKTWRSQYVRELVCAPRIAGLSAHHGEIAATAVWPALVPRETWEAARAILTAPGRRTNPGGGPAPKHLGSGLYICGVCGERTLRVGRASGQEPAYRCGNREVRFTGGHVSRRAAQLDAFVEAVVVERLTRPGLIDSAKRGDDSAELSALRTEQDVIRLRLEQLAESFAAGEIDRAQLAAGTNKLRARAETITETLARLGGRSPLDFITDTAVDVPELWQSLTMGQRRAIVDYLCDVKIVPLGRGTKGFSPKGVEITWKR

SEQ ID NO: 60442 - DNA, 50 bp, Mycolicibacterium fortuitum
  source 1..50: mol_type = genomic DNA
tctcttaagtgtcttgggaccgctccggccttcccggcaccgtagttatg

SEQ ID NO: 60443 - DNA, 40 bp, Mycolicibacterium fortuitum
  source 1..40: mol_type = genomic DNA
cagatgcggtggcaccaacccggccttgccggcccggatg

SEQ ID NO: 60444 - DNA, 50 bp, Mycolicibacterium fortuitum
  source 1..50: mol_type = genomic DNA
tctcttaagtgtcttgggaccgctctggccttcccggcaccgtagttatg

SEQ ID NO: 60445 - DNA, 40 bp, Mycolicibacterium fortuitum
  source 1..40: mol_type = genomic DNA
gagatggggtttcaccatcctggccaggcaggtctggctg

SEQ ID NO: 60446 - protein, 493 aa, Faecalibacterium prausnitzii
MTAVIYARYSSDNQREESIEGQIRECTAYAEKNGITVVKHYIDRALSAKTDNRPDFQQMIKDSEKRLFDIVLVWKLDRFARNRYDSAHYEYQLERNHVKLVSATEPISDSPAGIMVKSMLTGMAEYYSAELSEKVVRGMTENVLKGKYNGGTIPIGFKVDEEKFFQVDPLKAPFVVEAFQRYNDGATMKELMNWLNDSGVTTNRNQKFTYNSIQTLLTNRRYIGENRFKDIVMPDSIPVIIEKELFDSVQDKIAKNRRAPARHKAEDDYLLTTKLFCGMCGAMMFGECGTSRNKNVHHYYKCANAKRTKTCKKKTVRKEWLEDLVVNETMKMIRDDDSIQSIVDAVMILQEQENTVLPLLEKQMKDIENGIENLLNAIQAGVLTSSTKGRLEKLEAQQKELEIRIAEEKLAKPKVSADFVKFWLTNFRKLDPNVKSHRETLINTFVNAVYLYDEKVLITFNYKDGTKTITFDEIAVKDAPEGNGSDLGCFAPP

SEQ ID NO: 60447 - DNA, 50 bp, Faecalibacterium prausnitzii
  source 1..50: mol_type = genomic DNA
ggttcggatttaggttgcttcgctccaccaaacaagaaaaatccgaacct

SEQ ID NO: 60448 - DNA, 40 bp, Faecalibacterium prausnitzii
  source 1..40: mol_type = genomic DNA
ggttcgaatccacccgcgcccaccaaaaagcctcaacgta

SEQ ID NO: 60449 - DNA, 50 bp, Faecalibacterium prausnitzii
  source 1..50: mol_type = genomic DNA
ggttcggatttaggttgcttcgctttaccaaacaagaaaaatccgaacct

SEQ ID NO: 60450 - DNA, 40 bp, Faecalibacterium prausnitzii
  source 1..40: mol_type = genomic DNA
tgttagtatcaacccgtgcttttcaaaaaacctcactgtt

SEQ ID NO: 60451 - protein, 650 aa, Nocardiopsis sinuspersici
MRAAVLERVSTEEQTLGYGLDVQDEACKGYVGARGWSLVDVYADEGVSGSLTSRPEFDRLMADAEAGHIDTVVVHKFDRVGRTGRAFWRWIWRLEDLDIAIVSVTQDIDTTTTHGKLMLQQYAAFSELEYNLIRERTQGGLQAKAARGGWVGGAPPYGWRIEGQGKRGSYLVADEHEATVLRTARAYLVERGLDVGDTAARLNAMGMLTRSGRPWSAVNLRARLLSDSTTKAQVVFRNPARASAGRGAKINRDGTPKYGATVVIPLDPIFTPAEVTELREALRPTRPGTGPERRAYPLSKRLFGQCGAYYVGGKGGRKDRPNGVGVGPTYRCKGRVAHHRGAQVCDDSAIPAREMEARVWDEVVALLGDADRLRAMAAEWVKSVASGSATDHAERIADLDRQIAEHSRAITQTVTDYAKAGLPAVAVEAATRTLTSELEQLEAMRAEAIAWQAETEAARSRADDLADLADMARERLADLGPDERAEVLELLDVRVTVTGPVPMPQIGKPCSLSQWFINNDRMVPPELCDEAWALVAPIVDEWEGGRRTHSGTMLDGRAVLNAVFHKARTRCTWREIPDRYGNGNSIHTRFKRWDADGTWARVMEALPNVGTPHLGMVGLPSVRIEGRVDPRLVADTGAGHEAGTHETGSP

SEQ ID NO: 60452 - DNA, 50 bp, Nocardiopsis sinuspersici
  source 1..50: mol_type = genomic DNA
gcgggtacccacgaaacaggctcgcccacgcctgtttccggggcatccgc

SEQ ID NO: 60453 - DNA, 40 bp, Nocardiopsis sinuspersici
  source 1..40: mol_type = genomic DNA
ccgggtgctgatggcggtccccggtccggtcacctcggcg

SEQ ID NO: 60454 - DNA, 50 bp, Nocardiopsis sinuspersici
  source 1..50: mol_type = genomic DNA
gcgggtacccacgaaacaggctcgggcacgcctgtttccggggcatccgc

SEQ ID NO: 60455 - DNA, 40 bp, Nocardiopsis sinuspersici
  source 1..40: mol_type = genomic DNA
acgtggcctgatggaggtcggaagtcctgactcctcggca

SEQ ID NO: 60456 - protein, 564 aa, Blautia marasmi
MDKTQEKKIVRVLLRVSSDQQLEADGDLGIQRQIVIEDIKKHPDWIIDSKEYFEGSKSGYKNSITERDILQEALRDAENGEYDILAAYKDDRLGRRMFEVPVYIMSLKNFGVDVYTVKDKMITPKNPNDVTELMMLTMRYGMAQKSSADTGLRVKDTAKKLIQQGKFMGGKPPYGYKLELSGEISKHQRALKHLVVVPEQAEVVRYIYDLSFHKEFGSGKIASTLNADDRYRILAPNDVWKSGTITSILTNPIYAGFTAYDRRQRVNGKYRSLKSKDWILAEKPNDEITIVDRELWDKVQIMRAERGGMYRKKPENEVATVISRNDGMLALIDVAHCGYCGRKLTNGTKYDYWTIKDTGERRTSKKAIYKCQNVWQGVPHEPMKQIRADKVEPIVFEALADYVGKLQENENVFEQIVENQNQEKRLLERKLSKEKQTLDTIRKNIDILEDKLPEAITGTYILSLEDLARNIEKQKTNEKKQEEIVNRIEMDVQNTSVSINDWESLRSKIPTWQEIFLNADTPTKRVLVNKLIERIDITEEKVVIRFKINLDFFLTQSRMTNNEV

SEQ ID NO: 60457 - DNA, 50 bp, Blautia marasmi
  source 1..50: mol_type = genomic DNA
tcccgaatgaccaataacgaagtggtcactccgttaaaggtcattcaggg

SEQ ID NO: 60458 - DNA, 40 bp, Blautia marasmi
  source 1..40: mol_type = genomic DNA
accgggtctacacggagtggtaccggaacaaaggctatga

SEQ ID NO: 60459 - DNA, 50 bp, Blautia marasmi
  source 1..50: mol_type = genomic DNA
tcccgaatgaccaataacgaagtgtgcactccgttaaaggtcattcaggg

SEQ ID NO: 60460 - DNA, 40 bp, Blautia marasmi
  source 1..40: mol_type = genomic DNA
acagggtggagaggcagtgtgactggagcaaaggcttgaa

SEQ ID NO: 60461 - protein, 575 aa, Methylobacterium aquaticum
MTQNQTVKVAYSYTRISTREQAKGEGILRQLATARSWAESHGYRLDESLSDIGVSSFRGANRKRGALAGFLEGVQSGEIEPGPLLVENVDRLSREPVMTAFGTFQSLIHAGVTVVLLDLGPGWELTAQVLNAESWRLQAVISMMQRAHDESRTKSHRSLSKAESKRRMAVTGIPFSKHGPAWLVWSSTGWLEHDERVQVIKKIFTLALDGLGSYRIALALNRDAVPTFGGAATWQSSYVSKILRNEAVLGVWKPHRLVDGKEQPTGERIEGHFPSIIEKADWLKVQREILPRNSPGQKGKHRSNLFSGKCFCTLCGWPMALNAVHKGGKKAGYLVCTQKSRLKACKAKRNFRCDVVEDAVLSEIHIDLGRMGRDEAAAAKTQEIERRVGGAEYDRGEAKRQLDTFTLALAQAKPAAMQHLMNEINARATQIEALDEEIATLGAELARLRATPKDLVRGLTTLKRKLAKANDEERYALRSKLALVLGKAITRIDCDPDGFEVRVAVRDVIYIFSGEGAVLAVQMLRFGEPDEELLEWAAFNDCGISIVGDRVVLPSVAHAVHYRLRFGGVLRMQAE

SEQ ID NO: 60462 - DNA, 50 bp, Methylobacterium aquaticum
  source 1..50: mol_type = genomic DNA
tggtatgtgaatcaatctggctacgagctatccgacgcattcacatactg

SEQ ID NO: 60463 - DNA, 40 bp, Methylobacterium aquaticum
  source 1..40: mol_type = genomic DNA
gccttatgtccacggcatcgaggggccggacgacatgccg

SEQ ID NO: 60464 - DNA, 50 bp, Methylobacterium aquaticum
  source 1..50: mol_type = genomic DNA
tggtatgtgaatcaatctggctactagctatccgacgcattcacatactg

SEQ ID NO: 60465 - DNA, 40 bp, Methylobacterium aquaticum
  source 1..40: mol_type = genomic DNA
gcctaatgaccacagcaggtaggggctgcatggcatggtg

SEQ ID NO: 60466 - protein, 587 aa, Streptococcus pyogenes; identical to SEQ ID NO: 10016

SEQ ID NO: 60467 - DNA, 50 bp, Streptococcus pyogenes
  source 1..50: mol_type = genomic DNA
gtgttcctatcctatggacaacacatgtggagacggtagcacttttgtcc

SEQ ID NO: 60468 - DNA, 40 bp, Streptococcus pyogenes
  source 1..40: mol_type = genomic DNA
ttgtttccgcaaacgcatcacgtcgagtgcgtagggttgc

SEQ ID NO: 60469 - DNA, 50 bp, Streptococcus pyogenes
  source 1..50: mol_type = genomic DNA
gtgttcctatcctatggacaacactcgtggagacggtagcacttttgtcc

SEQ ID NO: 60470 - DNA, 40 bp, Streptococcus pyogenes
  source 1..40: mol_type = genomic DNA
ttgtttccccaagcggctatcgaagatggcgtaggggtga

SEQ ID NO: 60471 - protein, 471 aa, Candidatus Galacturonibacter soehngenii
MKRDLVTDKNISIGVTILLDYLTLKTYGVEVWFTEDNIWTMNDEDGELRLSIMATLAQNESKKISQRVKAGQMISFKNGVLYGNGNILGYDRVGDKLVVNKEQADTVKRIFELYLAGNGVRKIQDIMEQEGRKTATGLTRWQSGNINRVLRNPFYCGRIVYRKQYVPDYLVQKKINNHGAVDKVYVEGSHEKLVSPEDFDRAQELREKHKSVKTDKNGKAIGQSPCKHLWGNKLVCTCGHAMNRRIAHKANDGTLSYIYQCYGQLRTGTPAGRLKKGLDIEGICDNSSFMEWKLEVQADFVFKKLLGNKDAIYKEAMAMAQDVAEVKAPERNDKERLEANNRQIEKLNRQLANLVDMCSEGDISREVFRSKKKKLEDQISNLEKLNDECRQRVLELEDNGAKDRRIDSLSEFIKMTAFDARAKIPDTVIDNFVDQIVFDHGAFIWYLNPVFGNEVYKQDASDWKKNSICNL

SEQ ID NO: 60472 - DNA, 50 bp, Candidatus Galacturonibacter soehngenii
  source 1..50: mol_type = genomic DNA
gtacgttacaggcctgtcccagcacaggcagctatcgccgagtcacgtca

SEQ ID NO: 60473 - DNA, 40 bp, Candidatus Galacturonibacter soehngenii
  source 1..40: mol_type = genomic DNA
tgctcgtttggcagcagcgcaggcagcattgaataataaa

SEQ ID NO: 60474 - DNA, 50 bp, Candidatus Galacturonibacter soehngenii
  source 1..50: mol_type = genomic DNA
gtacgttacaggcctgtcccagcagtggcagctatcgccgagtcacgtca

SEQ ID NO: 60475 - DNA, 40 bp, Candidatus Galacturonibacter soehngenii
  source 1..40: mol_type = genomic DNA
tgatcctcaggcaccagtggtggcagcaatggacagaaaa

SEQ ID NO: 60476 - protein, 532 aa, Vibrio breoganii
MRQVAYSYTRLSSAKQILGHGATRQRENIEALCEARGWTLSDKTFNDLGVSAYRAKNRSEGALGLFIDAVEQGVIPQGSILVVESIDRLSREEVDKSLRLMLTLLDLGILIFTVSDQKLYRSGSPNAMLDIMTWLIVASRANEESAVKSKRIRDAKMRHKAQARETGRIITRQCPKWLTVNQSKTQFIIDEVMVKTIKSIFQWYSEGIALRGICDKLNAYGATWKPATITSLLINRKVLGEFQPLRYTEQGKEIPDGDVIPNYYPRIIDDTLFTQCQIIRESKKSRGRTASEPYANLFKGLLVCGECGSGIGLSTDRNGKRVYKNLRCANRSEVKCSAKRWKYDVIETIIIVALQHLPWNTGSRSASEALCASLSDSIEILNAEYQMLATKAENALEALIALPTNKILQAKAEAIDHDMQEKGERLVKLRAELEQADRVRLVDSLDHVDLHQVLDGLYSDDEDARAKTNLFLHKHVSEITMDTFNDDPKLHGRLSLRMTSGETASVEVWNDYKGYSITMSDGSQYWSEIERV

SEQ ID NO: 60477 - DNA, 50 bp, Vibrio breoganii
  source 1..50: mol_type = genomic DNA
gttctggcaacagggaatgcgattgtagtacccttggcctttacccgata

SEQ ID NO: 60478 - DNA, 40 bp, Vibrio breoganii; identical to SEQ ID NO: 52148
  source 1..40: mol_type = genomic DNA

SEQ ID NO: 60479 - DNA, 50 bp, Vibrio breoganii
  source 1..50: mol_type = genomic DNA
gttctggcaacagggaatgcgatttgagtacccttggcctttacccgata

SEQ ID NO: 60480 - DNA, 40 bp, Vibrio breoganii
  source 1..40: mol_type = genomic DNA
ctttgtaagtgctatgatttgggtgtggtttgtccccatc

SEQ ID NO: 60481 - protein, 555 aa, Mycobacterium chimaera
MGVARQLEDCRRLAADRGWPVGAEYVDNDVSAFSGKLRQQYARMLADLESGDRDAVIVYNLDRLHRRPVELEEFVTLCESVGVRDVATVTADIDLGNDDGLFMARIFAAFAAKESGRKSARVQRKMLQNAQAGLPHGSARPFGYEDDKITVRESEAAVVREMVDRYLAGQSLRSLTIWLNETGIAPSVAKSWQTTSVRQVMSSGRIAGLREHRGEVIGAAVWPAIITAAERDRVLARLSARSVTKTRTARTYLLSGMLRCGRCGNRLYSQARHSNPQNRVRRYVCLKGPDHGGCGRLTVVAAPVEELLTESVLTRLDSPQLADVLAGKASADHDVAALAAAVEADQERLDELAGLYADGAISAREWIAARDPITERITAARRDIAAATNTTTIFELVGTGGALRAGWTDLDLGRQQAIVKAVLDHAVIAPGTPGVRRLDIGRVAPVWRVWPPPRAGGGGPGPGGGGGVGGGGARGGGVGPAGRAGWSAPIRVAMRAMTAGSVTVTDRPWRSHEAVSQAMNSGRSCSGTAPASLLPAAGGGDVAITRRPVAPAGCG

SEQ ID NO: 60482 - DNA, 50 bp, Mycobacterium chimaera; identical to SEQ ID NO: 50932
  source 1..50: mol_type = genomic DNA

SEQ ID NO: 60483 - DNA, 40 bp, Mycobacterium chimaera
  source 1..40: mol_type = genomic DNA
cgggcccacgcatgcctcgaacctcaaggcgctgtgtcgt

SEQ ID NO: 60484 - DNA, 50 bp, Mycobacterium chimaera
  source 1..50: mol_type = genomic DNA
ggggtagcttgggaacttgtcagccaggtcataagctgttaaactacccc

SEQ ID NO: 60485 - DNA, 40 bp, Mycobacterium chimaera
  source 1..40: mol_type = genomic DNA
caggctcaagcaatcctcccacctcaggcccctgagtagt

SEQ ID NO: 60486 - protein, 449 aa, Mycobacterium chimaera; identical to SEQ ID NO: 35371

SEQ ID NO: 60487 - DNA, 50 bp, Mycobacterium chimaera; identical to SEQ ID NO: 50932
  source 1..50: mol_type = genomic DNA

SEQ ID NO: 60488 - DNA, 40 bp, Mycobacterium chimaera; identical to SEQ ID NO: 60483
  source 1..40: mol_type = genomic DNA

SEQ ID NO: 60489 - DNA, 50 bp, Mycobacterium chimaera; identical to SEQ ID NO: 60484
  source 1..50: mol_type = genomic DNA

SEQ ID NO: 60490 - DNA, 40 bp, Mycobacterium chimaera; identical to SEQ ID NO: 60485
  source 1..40: mol_type = genomic DNA

SEQ ID NO: 60491 - protein, 546 aa, Aureimonas altamirensis
MNMHSSTITARAALYLRVSTARQAEHDISIPDQKRQGEAYCEQRGYQLVETYVEPGATATNDKRPEFQRMIEAGTSKPAPFDIVVVHSFSRFFRDHFEMEFYVRKLAKNGVKLVSITQEMGDDPMHQMMRQIMALFDEYQSKENAKHVLRAMNENARQGFWNGARPPIGYRIVAAEQRGSKVKKKLEIDPLHADTVRLIYRLFLEGDGTSGAMGVKAIATYLNERRFFTRDGGRWGLAQIHAILTRTTYIGEHRFNTRSHKDREKKPESEVAIMVVPPLIEREIYDAVQARLKSRNPMVTPARVSSGPTLLTGICFCTKCGGAMTLRTGRGSAGQTYRYYTCSTKARQGKTGCKGRTIPMDKLDHLVADHIGDRLLQPKRLETVLASVIDRRQERAERRREHLAELHRRITEADQRLGRLFDAIEAGMVDKDDAMAKERMVSLKALRDQAAADAERTQLALDSSGNQGVSPDMLKGFARKARERIRLDDGGYRRDHLRALAQRVEVADDEVRITGSKSELLRTLVAASSVETAAFGVHSSVLKWRA

SEQ ID NO: 60492 - DNA, 50 bp, Aureimonas altamirensis
  source 1..50: mol_type = genomic DNA
atagttctgttcttaaatggcgcgccgcaccgggtgaagaagacaacttt

SEQ ID NO: 60493 - DNA, 40 bp, Aureimonas altamirensis
  source 1..40: mol_type = genomic DNA
tttggcgatgaatggcgcgcccgaaaggattcgaacctct

SEQ ID NO: 60494 - DNA, 50 bp, Aureimonas altamirensis; identical to SEQ ID NO: 60492
  source 1..50: mol_type = genomic DNA

SEQ ID NO: 60495 - DNA, 40 bp, Aureimonas altamirensis
  source 1..40: mol_type = genomic DNA
gttggtgatgaagggcgccccagaaaggatcctagaccgt

SEQ ID NO: 60496 - protein, 531 aa, Cupriavidus basilensis
MRIVLYVRVSTDRQAEQGMSMEDQIAACKTWAKEKGHVIVEIFQERGASAFALEKRRPEFDRMIAAALSDAKPFDLIVVHMQSRFYRRNADRELLERQLESKGVHVVTLGQPRPEDETSSFIVRNVTGIVDEAQSIASGKRVAQCMAANAKAGYFNGSRAPYGYKTKATDIPARSGVKKILVVNEDEADTVRRIFALARFGKNAMVMGMKRIAEELNANGTLHRGTQWTIRHVEGVLKNSVYYGKLVTFRRNSRTGANNPPSKWVTTNVPPILDKAIFDDVQHNLAERKPPNTENRASQVPTLLTGLLICNHCKKGLMLVTGKSGKYKYYRCLSKQKVSPDACTCPNFPKTDLEKVVLTAVVERVLDPQRVSRLVGELGEIWKDARKPDAGHLRTLRTRASALEASLARIYEELDKQRLDLDSTLQDFIRAKQQARATVIEELRVLDARQHLPFRKFGRDQIKSFVAAAKAALSDPANPLARQFLHAVVTEICVDAKKCRIRGNRAQLASTISRWKGNEEEVPSDLSDWCA

SEQ ID NO: 60497 - DNA, 50 bp, Cupriavidus basilensis
  source 1..50: mol_type = genomic DNA
ccagtgacctatcagattggtgcgccatacaggacgtggctgggcactgg

SEQ ID NO: 60498 - DNA, 40 bp, Cupriavidus basilensis
  source 1..40: mol_type = genomic DNA
caaggaaaatcttggtgcgcccggctgggatcgaaccagc

SEQ ID NO: 60499 - DNA, 50 bp, Cupriavidus basilensis
  source 1..50: mol_type = genomic DNA
ccagtgacctatcagattggtgcggaatacaggacgtggctgggcactgg

SEQ ID NO: 60500 - DNA, 40 bp, Cupriavidus basilensis
  source 1..40: mol_type = genomic DNA
caaggaaaattttagggcagaagcccaggatgcaaccagg

SEQ ID NO: 60501 - protein, 618 aa, Clostridium fessum; identical to SEQ ID NO: 11111

SEQ ID NO: 60502 - DNA, 50 bp, Clostridium fessum; identical to SEQ ID NO: 11112
  source 1..50: mol_type = genomic DNA

SEQ ID NO: 60503 - DNA, 40 bp, Clostridium fessum
  source 1..40: mol_type = genomic DNA
cgatacacgcgttccgaaggacgtcgtaccgatgtatacc

SEQ ID NO: 60504 - DNA, 50 bp, Clostridium fessum; identical to SEQ ID NO: 39649
  source 1..50: mol_type = genomic DNA

SEQ ID NO: 60505 - DNA, 40 bp, Clostridium fessum
  source 1..40: mol_type = genomic DNA
tgccaccagctttccaaagtatgttgtaccaatttatacc

SEQ ID NO: 60506 - protein, 460 aa, Microbispora rosea
MIIYTRQSMDRTGEELGVTRQREDAEQLAKLRGWTAVRTLTDNDRSAAGRKPREGFEALLQALERGEAQAVIAWDWTRLERNRRDGLRLIETCQKHGVTLAFVRGADIDLSTPAGRLVADVLSGVARHEIDQKSDRQRRAMLQAAQDGRWVSGRKPFGYQPDGVTIVPEEADAVRWGFDSVLSGVPLAEIAREWNARGFSGQSREWKWGSVRHVLANPRYAGLRAHSGEIVGRAVWPAVVSEETWRAAQDIFEKRAAMTTPRGARRLLTAIGRCGGCDATVHAGGAFSTYPMYRCGGYTKSPGGKADPSVRHVHRKALPIEDFVSRVVIERLSQPDAAELLIDRKRPDTGALRAEAVALRERLENLAIDYADGTLTKSQMRTANERLTMKLNVIESQLADAGRVDVLGPLVKADDVAAVWETLGTARQRLVIDTLMIVRLDSPGRGVSVFRPETVRIEWK

SEQ ID NO: 60507 - DNA, 50 bp, Microbispora rosea
  source 1..50: mol_type = genomic DNA
atccgctaaaaatctgtcctgctggtggcctagacatacttttagcggac

SEQ ID NO: 60508 - DNA, 40 bp, Microbispora rosea
  source 1..40: mol_type = genomic DNA
tctggatcgtgtgctccgcgtctcctggacactcgcggat

SEQ ID NO: 60509 - DNA, 50 bp, Microbispora rosea
  source 1..50: mol_type = genomic DNA
atccgctaaaaatctgtcctgctgcgggcctagacatacttttagcggac

SEQ ID NO: 60510 - DNA, 40 bp, Microbispora rosea
  source 1..40: mol_type = genomic DNA
tcttgaccttgtgatccgccgcgcccggccactcataggt

SEQ ID NO: 60511 - protein, 548 aa, Streptomyces hygroscopicus
MADDDLLTRAQWGNLTGQNWAVLARLSTDESDGEAAEDVPEYGRRAPLTGRDIKSTEEQDRDGRKFVEKRGGRVVHTYFEPDTSAWRKRRVREPDGRIVYRVVRPIFEGALDDLKAGQAPNGERLDGLIVYDIDRLTRDPRHLEDAIDVVERSRRPILDITGSLDLLTENGRAVARLVVTMSNKQSADTARRVRRKHRALEREGIPTGGARPFGWNDDKRTLHPDESKHIRKAVERILGGAPFRAIPLEWNEAGVMTPRGNKWTPSKVKEMFRNPRLCGYRSRKVWQTNPVTGGEMQRWEIVHDDDGHPVVGQWDRIITVEEWRALVDVIGESMGPGDGHNSRKYLGTGTLRCDKNECGAALRVVKAPKSAKKPEGFFYYACADKGQGGCAGTKIPGPETDEAIKELVFAKWEEEAARREAAAVPQEWSGESDLARVREDIEEAKEARERRIISKEQYFSLLQRYTAEERRLQRERNQWFKRRYASQGEPANLREDWDGLTIVEKRSHVEQTLTAVLVAPAVGRRKPVQTRLTPLFRTEDDIQESEED

SEQ ID NO: 60512 - DNA, 50 bp, Streptomyces hygroscopicus
  source 1..50: mol_type = genomic DNA
gtggtacatctgagtacctgttgcgggcagcaggttcgcgaatgtacctt

SEQ ID NO: 60513 - DNA, 40 bp, Streptomyces hygroscopicus
  source 1..40: mol_type = genomic DNA
ctggtcggtcccctcgaccgggcgcagcagctcgaaccac

SEQ ID NO: 60514 - DNA, 50 bp, Streptomyces hygroscopicus
  source 1..50: mol_type = genomic DNA
gtggtacatctgagtacctgttgctagcagcaggttcgcgaatgtacctt

SEQ ID NO: 60515 - DNA, 40 bp, Streptomyces hygroscopicus
  source 1..40: mol_type = genomic DNA
cttgtcagtgccttcgccctaacacagctgctggaagccc

SEQ ID NO: 60516 - protein, 468 aa, Collinsella aerofaciens
MPKRAVIYARFSCNRQREASIEDQLRVCREWCAREGYEVAAEYCDRAVSGRTDDRPEFQRMIANAGESEIVLVYMMDRFSRGEYDAPIYKRELATHGVKLVSALEQIPDSPEGIIYEKLLEGLAACESRKTAIRTKRGMEGNALKCKTNGVRIFGYRRNGDDEYEVDEAQAAWVREAFALRLERMSMNAIAREFARRGLRTRKGNPCGQAMVQQMLRDRRYTGRYEWGGIVREGGMPAIVDEVTFMEVQGIKCRKQRSSENWGDFALAGAALCAECGRNLQGVSGRGRNNVKYEYYSCPGSCVRNIRREELEGSIASALRGLLGDRGEALQIANMVAERADTAEVRARRRQAEDSLRAAERGLRNILNAIEQGVIAPGVNERIAELEEQQARARYDLEAITDERIDPERFADFLQCGTALDDATLLKAFVWQAVVSEDEILVTLNYDKKGEPARLDIQRVRAKLEWCP

SEQ ID NO: 60517 - DNA, 50 bp, Collinsella aerofaciens
  source 1..50: mol_type = genomic DNA
ggttcgagcaaaattggaatggtgccccgtctgcctagattctagaaccg

SEQ ID NO: 60518 - DNA, 40 bp, Collinsella aerofaciens
  source 1..40: mol_type = genomic DNA
ggtcttacgttcgatggtgccccatgttggattcgaacca

SEQ ID NO: 60519 - DNA, 50 bp, Collinsella aerofaciens
  source 1..50: mol_type = genomic DNA
ggttcgagcaaaattggaatggtgctccgtctgcctagattctagaaccg

SEQ ID NO: 60520 - DNA, 40 bp, Collinsella aerofaciens
  source 1..40: mol_type = genomic DNA
ggtgctatgttgggtgtttctccatgttggaacctcacca

SEQ ID NO: 60521 - protein, 468 aa, Collinsella aerofaciens
MPKRAVIYARFSCNRQREASIEDQLRVCREWCAREGYEVAAEYCDRAVSGRTDDRPEFQRMIANAGESEIVLVYMMDRFSRGEYDAPIYKRELATHGVKLVSALEQIPDSPEGIIYEKLLEGLAACESRKTAIRTKRGMEGNALKCKTNGVRIFGYRRNGDDEYEVDEAQAAWVREAFALRLERMSMNAIAREFARRGLRTRKGNPCGQAMVQQMLRDRRYTGRYEWGGIVREGGMPQIVDEVTFMEVQGIKCRKQRSSENWGDFALAGAALCAECGRNLQGVSGRGRNNVKYEYYSCPGSCVRNIRREELEGSIASALRELLRDRGEALQIANMVAERADTAEVRARRRQAEDSLRAAERGLRNILNAIEQGVIAPGVNERIAELEEQQARARYDLEAITDERIDPERFADFLQCGTALDDATLLKAFVWQAVVSEDEILVTLNYDKKGEPARLDIQRVRAKLEWCP

SEQ ID NO: 60522 - DNA, 50 bp, Collinsella aerofaciens; identical to SEQ ID NO: 60517
  source 1..50: mol_type = genomic DNA

SEQ ID NO: 60523 - DNA, 40 bp, Collinsella aerofaciens; identical to SEQ ID NO: 60518
  source 1..40: mol_type = genomic DNA

SEQ ID NO: 60524 - DNA, 50 bp, Collinsella aerofaciens; identical to SEQ ID NO: 60519
  source 1..50: mol_type = genomic DNA

SEQ ID NO: 60525 - DNA, 40 bp, Collinsella aerofaciens; identical to SEQ ID NO: 60520
  source 1..40: mol_type = genomic DNA

SEQ ID NO: 60526 - protein, 562 aa, Frankia sp EAN1pec
MERELSDGTVEGIAIDPETGEERPFLRRPGRRTRAVVYPPFKSYGVEVRPGTKPIWLYLRLSKYHRDGADAIERHRIDLTRLLAIQGGWTIMGEYVDNDSASAAAVRTRKGWHALNADVEAGTVTAVAFWKLDRTNRIATRCMEWIARCQIKGVMLVSHQDSADELNTATAGAKLVVGIKAILAEVETDVMSERQLNAKRHAAEAGFHHGGTRPFGWMAGARETDELGRSGVRLVPHPVEFEALKAAVPLVISGKSLRSVARYWKDQFGITTADGSLMAEANIRRMLTSPRMVGYRMRQVPEHQRGVKINLFDYVARDAEGNPVIAQQPVCDLAVWRQVVSKLEAARNSQTRSPWGSFEWLLTGLTYCECGHRLYGLQKAYKGEGGVIRRRYAYRCTANRRKGAGTCTYRSVLHAEPGEAHVQGWLFAYLTDDRLAQARAKEDAARQLASPTGSLMRDLEAARAEREILVAQQGSPAYRGPKVGILLGMIDNVQERIDKLEAQANAATVDTLPVTSHADLIAQWPDMDLSQRRQLLARVIERIDVTAGKEPLAERVKIAPRL

SEQ ID NO: 60527 - DNA, 50 bp, Frankia sp EAN1pec
  source 1..50: mol_type = genomic DNA
acggtgtactagggttctggcgacgagtcgtgcaaactaaagtacaccct

SEQ ID NO: 60528 - DNA, 40 bp, Frankia sp EAN1pec
  source 1..40: mol_type = genomic DNA
cggtgtgctttttcttgacgaggccccggagttcggacgc

SEQ ID NO: 60529 - DNA, 50 bp, Frankia sp EAN1pec
  source 1..50: mol_type = genomic DNA
acggtgtactagggttctggcgacttgtcgtgcaaactaaagtacaccct

SEQ ID NO: 60530 - DNA, 40 bp, Frankia sp EAN1pec
  source 1..40: mol_type = genomic DNA
ggctgagctccttcttgacttggccctggggttgggccct

SEQ ID NO: 60531 - protein, 517 aa, Methylobacterium radiotolerans
MTTRTTRRATSQQTLAVIYCRISSKKQDREGDGLASQETRLREYAARCGYQIVEVFRDKLTGSESQRPGLRDMIAFVAGDKKNRYRILIDHLDRFTRDFYLHADLRRAIANTGALLETPAGVLDGRSSSRLMENVTVAFADYHRVNNAEQTVNRMKSRLQNGFAVFCAPSGYRFGRVSGLNGRVLVRDEPAASIVVEALEGYASGRFESQADVVRFLEEHPSYPKPKNGKVPHQRVGDMLRNPIYAGYVEAPKWDIPRRKGHHEALISLDTHQRIQDRLNGLRSTYRTDLSVDFPLRGFVICDDCDGPLTACWSTSGSSQRKRHPYYQCPRKACASYGKAIRRDLIEGEFEAILKNAQPRPQLFEAATAMMKELWARKQKNRAAEARALEAGLAQIDKQVDQLVDRIVETSVPAVVRALEEKLQRLENEKLLLNEKIASGAAPQGSFDLRLRTALAFVASPWSLWSTGRIEDRRAVLKLTFADQLRYKRGEGFRTANLTLPFKVIADVFSGEMGMAR

SEQ ID NO: 60532 - DNA, 50 bp, Methylobacterium radiotolerans
  source 1..50: mol_type = genomic DNA
ttttagcggtgaaatgggaatggcgcgcccacccggcggcatttcgaacg

SEQ ID NO: 60533 - DNA, 40 bp, Methylobacterium radiotolerans
  source 1..40: mol_type = genomic DNA
ggaaaatgcagggaatggcgcgcccgaaaggattcgaacc

SEQ ID NO: 60534 - DNA, 50 bp, Methylobacterium radiotolerans
  source 1..50: mol_type = genomic DNA
ttttagcggtgaaatgggaatggcgggcccacccggcggcatttcgaacg

SEQ ID NO: 60535 - DNA, 40 bp, Methylobacterium radiotolerans
  source 1..40: mol_type = genomic DNA
gtaaaatgaagggagtggaggggcttatagagctcgaacc

SEQ ID NO: 60536 - protein, 548 aa, Salinispora tropica
MSQKRKRTRALGVIRLSKHSNRPDDPSTSPERQRQHILSVAASKGMEVVGWAEDLNISAVKVAPWKRPQLGLWLPNLSLENPAGGRVEEYDCLIFWKIDRIARSVGDFALLIKWAQENEKNLIATDGTVDLSTSYGKAMAQIVAVFAELEADIIRERVNDARQALRDDGRWGGGRYPYGLIPRQAEGGGWRLEHHPENAERLREIVRRVIAGESMNAIGRDFDTRGIPTPSGGKLWEQVHLTPILRHRSLLGEAMHNGQPVRDDLGRIVQASDPLVTRVEWDNLQSRLDQISIPKFRQSGVSMLLRLVFCGRCGLPLWLRRKTVKGVEYRYSGCSGAWCASQKRTCDAPGIRTDILEGMIEEMILSVIGGLEVIKVIESAGDDRREELAEKSAKLADLLVAYAGAPESVKSRLAPDMEALQARVSELEAQPVIEPERRKVNTGKTFRDLWESSDDEGRRGLLIEAGIRIEAMKTSADFNGIPARLSNRPERDDGAIMFHRSGDVAAAIFLPRDLSARVTGDPEAATPVGRQSPLPPFQWTSLDPVITV

SEQ ID NO: 60537 - DNA, 50 bp, Salinispora tropica
  source 1..50: mol_type = genomic DNA
cttgaacatcttgacggataggacaggtcttgaccggcaacatgttcaac

SEQ ID NO: 60538 - DNA, 40 bp, Salinispora tropica
  source 1..40: mol_type = genomic DNA
gctcgcctgcggcctggacaggccgtacccgacgggcaac

SEQ ID NO: 60539 - DNA, 50 bp, Salinispora tropica
  source 1..50: mol_type = genomic DNA
cttgaacatcttgacggataggacgggtcttgaccggcaacatgttcaac

SEQ ID NO: 60540 - DNA, 40 bp, Salinispora tropica
  source 1..40: mol_type = genomic DNA
gctcacctgcagcctgcagggtctctaccagatgagccac

SEQ ID NO: 60541 - protein, 503 aa, Nocardia cyriacigeorgica
MDTENRRAVIYARASKDRSGVGRSVQQQEAECREWIEEHGWAEGPVFTDNDISASKFSTAERPGYQSLLKALRGGDVLCVWESSRAGRRMEDHLQLRELCANKGVLLCIGGRVYDMTNPDDVHALNQAASTAEYESARMSKRIRRSIKRSAAQGKPHKMLPYGYKKDKETGLWVEDEQAAPIVREVVRRVLAGEGFRGIAKDLNERQVPKPGRGAADVGKPWQGAVLARMVKQASYSGYRTHHGKIVGRGEWPALISEDDRERLLALLEDPDRRMTTRGPEVRHLLTGIAVCGVCGRDVRWRKPKRNTHGHYLCRDSHVARSEPETDAVVVKAMWKAIEEWKADALLWLEVEEDDEGNEIGYAAPKNSAFTEQRRQARELRERLADLERRMINGTIRPEVYERADAELTPRINELEAQARAELVNPIVKALATDTRRLWRGMSLEEKREFVRFTVRVRILPMRRGPFDPSSVEVASALPDHDRTTVAVLRSSALAGGAPVISQ

SEQ ID NO: 60542 - DNA, 50 bp, Nocardia cyriacigeorgica
  source 1..50: mol_type = genomic DNA
ttcgccccgtatatgaccctgtctacggttgatgttggttaccgggcgta

SEQ ID NO: 60543 - DNA, 40 bp, Nocardia cyriacigeorgica
  source 1..40: mol_type = genomic DNA
ggtgccccacatcatctcgacagtgaacgtcaacggcgtg

SEQ ID NO: 60544 - DNA, 50 bp, Nocardia cyriacigeorgica
  source 1..50: mol_type = genomic DNA
ttcgccccgtatatgaccctgtctaaggttgatgttggttaccgggcgta

SEQ ID NO: 60545 - DNA, 40 bp, Nocardia cyriacigeorgica
  source 1..40: mol_type = genomic DNA
ggtggcgtacatcatgaagaaaatgaacgtcaatggtgat

SEQ ID NO: 60546 - protein, 535 aa, Pseudomonas mediterranea
MPYAVGYARFSSIKQGKGTSLERQQALIAEWISNNSQYTLYPKKFQDLGRSASKGEHLKHGLGKLLEAIRQGEIKEGDVILVEAIDRIGRLPEMQMFSLINDIITAKVKIVTLQDGITYGPDIRSDQIWALLGKVQQAFNYSESLSQRIKASYKTRETIAKHGGIPKRRTPIWLNSDGTLKHAIADAMKGAFEDALAGLGERRILKNLIKQHDAFEKINPSTIRRWLINRTAIGYWKDNKIYPPIVSEELFYQVQQRFEDEYKPATAPRSYFLSGLIRCGECGANMQIKVNKHSPFTMRCSTRCKFGDMRCQNEKSFPIPVLMHICQDTATLALEKAMQSIQLSSQRKEIIIIDGQLREVHKRISNLVDSIARYGAIPEVDQQISAAIEERKGLEQRKLFLDTDSEINNCKYEEAWDYQYDLIENNPMRLNALLQSAEYSITCYRDGRMNTSTHGNEFSRSQYIGHSRKKQAYAVLINEETKYITTNDEMTAIKRISAFREFLEERIQHVENAKHATSPLNAEDEVYEFYKTIEV

SEQ ID NO: 60547 - DNA, 50 bp, Pseudomonas mediterranea
  source 1..50: mol_type = genomic DNA
tgtagttgcattgccgccttctgctcgctattctatgcaatatacctatc

SEQ ID NO: 60548 - DNA, 40 bp, Pseudomonas mediterranea; identical to SEQ ID NO: 58713
  source 1..40: mol_type = genomic DNA

SEQ ID NO: 60549 - DNA, 50 bp, Pseudomonas mediterranea
  source 1..50: mol_type = genomic DNA
tgtagttgcattgccgccttctgccagctattctatgcaatatacctatc

SEQ ID NO: 60550 - DNA, 40 bp, Pseudomonas mediterranea
  source 1..40: mol_type = genomic DNA
agtgctggctgcattgaatcaactgttctgatggtggacg

SEQ ID NO: 60551 - protein, 551 aa, Anaerostipes hadrus
MKNKKIKCDIYTRVSTTMQVDGYSLDAQKEKLKRYAEFQNMEIVNEYSDEGKSGKSVEGRPEFQRMLDNIENGTDEVQFVLVFKLSRFGRNAADVLNSLQRMQDFGVNLICVEDGIDSSKDSGKLMISVLSAVAEIERENILVQTMEGRKQKAREGKWNGGFAPYGYELVNGELQIAEDEAEIIRLIYDKFIHTNMGISAIAAWLNQHGYKKKKRQNNTLDAFASSFIKGVLDNPVYCGKLAYGRRKNEKVSGTRNEYRIVKQENYMLHDGIHEGIISETDWELAHQKREKTGVKYEKTHSLDHEHILSGILRCPLCGSGMYGNVNRKKKKDGTLYKDYFYYACKHRRLVDGHKCGYRKQWSEEKINNAVEEVIRKLVKNPKFEEAILNKIGSRIDTEEIEKEIDGLEKQHRQLTGAKARLGQQMDSLDIMDKFYEKKYQDMETRLYRLYDEIEGVENSIEEVKNRLLNIQQQKISEENVYQFLLYFDKLYDKFTDLEKKEFLNSFVEQVDIYEQEQPDGRFLKHIKFRFPVYFGDRETQELCWDNESTVE

SEQ ID NO: 60552 - DNA, 50 bp, Anaerostipes hadrus
  source 1..50: mol_type = genomic DNA
tgttgggacaacgaaagtactgtggagacggttgttcttttgtcccaaca

SEQ ID NO: 60553 - DNA, 40 bp, Anaerostipes hadrus
  source 1..40: mol_type = genomic DNA
cccgaatacggttcatatcgagagtatggtgttgatacaa

SEQ ID NO: 60554 - DNA, 50 bp, Anaerostipes hadrus
  source 1..50: mol_type = genomic DNA
tgttgggacaacgaaagtactgtgaggacggttgttcttttgtcccaaca

SEQ ID NO: 60555 - DNA, 40 bp, Anaerostipes hadrus
  source 1..40: mol_type = genomic DNA
accaagttaggtttacatcaggaatatagtgttgatttaa

SEQ ID NO: 60556 - protein, 534 aa, Pseudomonas gingeri
MPYAVGYARFSSAKQGSGTSLERQQEMIAKWIGENPEYKIYPKTFEDLGRSASKGDHLKHGFGKLQEAIELKEIGEGDVILVEAIDRIGRLPELKMFSLINQIIEAGVRIITLQDETVYGPIITAGQIWLLLGKVQQAFTYSQELGGRIKKSYTIREQMARKGLIPKRRTPIWLNTDGTLKDDIAAAMKTAFEDALSGLGERRILKRLKAMHSAFEKSHPASVRKWLTNKTAIGFWREHLIYPPIVSQELFYQVQRCFEEAYVPASSPTKHFLSGLVKCGNCGSSFQVKVNKSSPNSMHCSARAIHGIDRCENGTSFPVPVLLHICHDTATLAVENALQNIELSKTKKQSIILEGRLNDIAKKITNLMDSLEQYGPVPELDIQIKLLLSERTKLENEKLYLAEDDTVNTSNYENAWDYQHELIEDDPMRLNALLQSVGYQIKCYANRSILANTIGNELSKSTYINYNRKIQAYRLLVNGNIYNIANREGTFTKERLRTFEEMLRAQREGTALYKEVQLPPEQQEMYDFLESLEG

SEQ ID NO: 60557 - DNA, 50 bp, Pseudomonas gingeri
  source 1..50: mol_type = genomic DNA
cgtagttgcattgccgacttcttctcactataatcagcaataacaccatg

SEQ ID NO: 60558 - DNA, 40 bp, Pseudomonas gingeri
  source 1..40: mol_type = genomic DNA
ggtgctggccgccttgaactcgcagttcttgtgatcgatc

SEQ ID NO: 60559 - DNA, 50 bp, Pseudomonas gingeri; identical to SEQ ID NO: 60557
  source 1..50: mol_type = genomic DNA

SEQ ID NO: 60560 - DNA, 40 bp, Pseudomonas gingeri
  source 1..40: mol_type = genomic DNA
gctcactgcagccttgatctctgggttctagtgatcgatc

SEQ ID NO: 60561 - protein, 512 aa, Adlercreutzia equolifaciens
MAQHLRAVIYARFSCDKQRDASIDDQVEACTGYCEHMGYEIAGVYPDYALSGRSDDRPQFLRMVDDAKKGLFDVVVVWKIDRFARNMMDQFHYERELSLSGVTLESCKENIAGNTIEADMNKGMLALFAQIRSQQSAVDTVRGMLGKAEKGQYLGIPRFGYSHEGDEITLDPRWAPVAKRLHTDYLSGVSIEHLAAELRDMGATTSVGTEPDYKFVRGILRNMAYAGVYEWGRKKDSRGRVIRDEDGRPVPLVRKEGGMPAIVSMDTKLACLRLLGCHKRYSDRYDYLLAGRLFNAATGAPMNGEYATGRSGAKYFYYADRSGKRRVSVRKEQIEEALAAAVRGVLSDDGVLDALAARAAAMRREMDKSAESATEAARADLAALERRKGNILDAVADGAPWQSLKGKLDEIESAMDAARRRISEAERRGEGNGYEQRMAAFLRSRKFAELPDEKIISMFVGSAAYFEGRAAAMLNFTDERGDFAELRDIIVQEIKKSNPRSDLEFDCLKSGS

SEQ ID NO: 60562 - DNA, 50 bp, Adlercreutzia equolifaciens
  source 1..50: mol_type = genomic DNA
gagttcgactgtttgaagtctggctcccccgttttccacctcatcgaacc

SEQ ID NO: 60563 - DNA, 40 bp, Adlercreutzia equolifaciens
  source 1..40: mol_type = genomic DNA
ggactcgtaaaattctggctccccgggtaggattcgaacc

SEQ ID NO: 60564 - DNA, 50 bp, Adlercreutzia equolifaciens
  source 1..50: mol_type = genomic DNA
gagttcgactgtttgaagtctggcgtccccgttttccacctcatcgaacc

SEQ ID NO: 60565 - DNA, 40 bp, Adlercreutzia equolifaciens
  source 1..40: mol_type = genomic DNA
ggaatctaaaatttcagccgtccctgggtgggctcgaacc

SEQ ID NO: 60566 - protein, 542 aa, Blautia massiliensis; identical to SEQ ID NO: 18396

SEQ ID NO: 60567 - DNA, 50 bp, Blautia massiliensis; identical to SEQ ID NO: 18397
  source 1..50: mol_type = genomic DNA

SEQ ID NO: 60568 - DNA, 40 bp, Blautia massiliensis
  source 1..40: mol_type = genomic DNA
aatcgttctggatgccggacatggtggagaagatccgggt

SEQ ID NO: 60569 - DNA, 50 bp, Blautia massiliensis
  source 1..50: mol_type = genomic DNA
aatttgcgcaattaacacccagcattcgggggaacacagttgcgcaagta

SEQ ID NO: 60570 - DNA, 40 bp, Blautia massiliensis
  source 1..40: mol_type = genomic DNA
aacagttctggttgctggatttggcagaaaaggtcatgct

SEQ ID NO: 60571 - protein, 543 aa, Ralstonia solanacearum
MSKARVYSYLRFSDPKQAAGSSADRQIEYARRWAAERNLELDDTLSLRDEGLSAYHQRHVKQGALGVFLSAAEGGRIAPGSVLIVEGLDRLSRAEPIQAQAQLAQIVNAGITVVTASDGKEYNRERLRSQPMDLVYSLLVMIRAHEESDTKSKRVKAALRRQCQQWIDGKWRGIIRSGRDPHWVEIRDGQFALVPERVAAVREALALFSRGHGKTKILRTLTERGLSMSNAGNHGTFIYRLVRNPMLMGTRVFEIDKEEFRLQGYYPALLSPEEFAVLQHLADERKGTRVKGEIPGLLTGLGITHCGYCGAAMVAQNYMGRARKADGTPQDGHRRLHCVSDSQNSGCVVAGSVSIVPIERAIMTFCADQMNLTKLIEGDDGSAAVAGRLALARQKASGLQAQLERLTTALLADDGNAPPATFLRRARELEEQLSAERRVIESLEREVLASASTTAPAAADVWAKLTHGVLALDYESRVRARQLVADTFSRIVIYHAGFRPGEGTEKRIGIQLVAKHGNVRMLDVDRKSGGWRAAEDFDLRALT

SEQ ID NO: 60572 - DNA, 50 bp, Ralstonia solanacearum
  source 1..50: mol_type = genomic DNA
agtatacttttgctatcctacgggcacccaagcgacaccattcctatact

SEQ ID NO: 60573 - DNA, 40 bp, Ralstonia solanacearum; identical to SEQ ID NO: 55188
  source 1..40: mol_type = genomic DNA

SEQ ID NO: 60574 - DNA, 50 bp, Ralstonia solanacearum
  source 1..50: mol_type = genomic DNA
agtatacttttgctatcctacgggttcccaagcgacaccattcctatact

SEQ ID NO: 60575 - DNA, 40 bp, Ralstonia solanacearum
  source 1..40: mol_type = genomic DNA
atcccccagtgccttgcacttcccgggtgagacaatgccc

SEQ ID NO: 60576 - protein, 583 aa, Ruminococcus bicirculans
MSIKYSIAGYCRISVDEEMDRDNTSIENQKAIIADFVKRKFPDSTLDFYEDRDRSGYTFEQREGYQELRKKMLRLEYDILIIKDFSRFSRRNSKGLVELEDLRDAGMRIISIGDNIDYPTYDDWTAIQFRFLINEMPVTDTSKKVKSVIKRRQEEGKWICAVPYGYVMINNKTMQFEVDEPAAEVVRDIFDRYNSGWGYKKIANYLTDKHIPTPRMCEKMRREAKGEECKREVKQTWSIITVSEILQNDFYIGTLRQGKYRRKKINGGEVKQDETDHIVFENNHTPIVDYKVFALAQEQLKKRTTSHYRGVKKYDNVYSGYLFCGDCGSPMFAMSRNDLAPAYTCGTYHKRGTKGCTSHHTRVDMLDDLLKSYIKKVRDNSTEMIERLQESIAKEQHETKSSQSTVDVIKGQIEDAKAEMKMLTRQQARDVMKHPDRAEIIEETYTEMIDELTLRIEGLKNQMQLAVDKHNTVVRVNRTARTVLEIFDDIINKPALDKNDLNFIIDKIVVFENRIEIHLKADIDCLLKYGTLTEQQLVTVGADGSAENFNQGTKIGKSAGQLAAAVTDSRGRNLSVNVISNGD

SEQ ID NO: 60577 - DNA, 50 bp, Ruminococcus bicirculans
  source 1..50: mol_type = genomic DNA
agtgtcaacgttatcagtaacggcgacccgttacagacaacgttgaacta

SEQ ID NO: 60578 - DNA, 40 bp, Ruminococcus bicirculans
  source 1..40: mol_type = genomic DNA
catgcgtatccgtgagggcgaccccctcgagatctacacc

SEQ ID NO: 60579 - DNA, 50 bp, Ruminococcus bicirculans
  source 1..50: mol_type = genomic DNA
agtgtcaacgttatcagtaacggcagcccgttacagacaacgttgaacta

SEQ ID NO: 60580 - DNA, 40 bp, Ruminococcus bicirculans
  source 1..40: mol_type = genomic DNA
catgaggcttcgtgacagcaggcccagtgacatctacacc

SEQ ID NO: 60581 - protein, 455 aa, Mycobacterium sp VKM Ac-1817D
MIDQWSSINGHTVAGYAEDVDVSGSVDPFDTPQLGHWLSDRADEFDVIAVWKLDRLSRDSIKLNKLVGWCLDNGKTIVSTSESIDLNTPVGRLIANVIAFLAEGELEAIRERQRASRAKLRQTARWPGGRPPFGYNVVSKQLVIDPVAHAVVNEIVNRVIDGASVSSVADELNRWGMPAPSDYYQSLRGHPGPFTVKWKPTPIRNMLRSRALLGVVHHEGRTVRDDNGEPIQLAPPLIDRDQWELLQAALDKISTGSFTPRDASPLSGLVTCFECGSPCYHTVSRINRAKYGKSYEYRHYRCYAKCGAPMMPANFLEQLAEESFIESWGTREIVEKVYVRGDEHESDMRRELEALDELTAALESAVSRTAKLRIQQQISKVDARIAELEQLPQRESRYEDRPIGKTYGQEWADADTAGKHRLLKTAGITISASKVKNSDAWQFGIVEDHERYAVE

SEQ ID NO: 60582 - DNA, 50 bp, Mycobacterium sp VKM Ac-1817D
  source 1..50: mol_type = genomic DNA
gttcggttacttgtgatgttcgattcctcgtgcatcaccgttaccttaac

SEQ ID NO: 60583 - DNA, 40 bp, Mycobacterium sp VKM Ac-1817D
  source 1..40: mol_type = genomic DNA
gttcgcctacatctcggcttcaccgttcgtgctgcagaac

SEQ ID NO: 60584 - DNA, 50 bp, Mycobacterium sp VKM Ac-1817D
  source 1..50: mol_type = genomic DNA
gttcggttacttgtgatgttcgattgctcgtgcatcaccgttaccttaac

SEQ ID NO: 60585 - DNA, 40 bp, Mycobacterium sp VKM Ac-1817D
  source 1..40: mol_type = genomic DNA
gagcccctgcttcctgccttgacccttcctgcttcagaac

SEQ ID NO: 60586 - protein, 581 aa, Brevefilum fermentans
MNSVEVIKGQGLVARRGNSQEFERQRVAAYCRVSTDNEDQLSSYKSQVQHYTEYIKSKNEWVFAGIYADEAITGTQTKKREDFQRLINDCMNGEIDLVITKSISRFARNTLDTLRYVRMLKEKNVAVFFEEENINTLTMDGELLLVILSSVAQQEVENISANVKKGLKMKMQRGEIVGFQGCLGYDYHPEDKSLTVNEEEANIVRYIFQRYIEGTGCTILSNELKNLGYKTKRGLTSWPASTVINIIKNEKYKGDLLLGKTFTVDPISKRRLVNFGEEDKFYIKGHHDPIVSEEVFAKAQEILAKRGYPRRLNPDGKREKYSRKYAFSSLLQCGFCDTTLSRRSWHAGARHKKLIWQCTLATKKGKKYCPESKGIEESIVEEAFLEAYKLLCGNDKSIIDDFLALAEETLTEANVEKIISRTERDLVAAENKKSKLIDLRLEGTIDDDAFSSKLFDLDNNIDTLKSTLNDLSVTKNQQDDLRSRILGFKAILESNQVLEKFDRYVFESIVEKVVIGGYEEGGTPDPGLITFVFKTGYKQKLHKNNYGIVRRQFDQDGNAILPSSSSQTESFSASSYASANT

SEQ ID NO: 60587 - DNA, 50 bp, Brevefilum fermentans
  source 1..50: mol_type = genomic DNA
cgtcctcttatgctagcgcaaacacatgtcgagactatgacagtactacg

SEQ ID NO: 60588 - DNA, 40 bp, Brevefilum fermentans
  source 1..40: mol_type = genomic DNA
cctattacccgaatcgacccaagcggattaaggtgcttaa

SEQ ID NO: 60589 - DNA, 50 bp, Brevefilum fermentans
  source 1..50: mol_type = genomic DNA
cgtcctcttatgctagcgcaaacatatgtcgagactatgacagtactacg

SEQ ID NO: 60590 - DNA, 40 bp, Brevefilum fermentans
  source 1..40: mol_type = genomic DNA
catataacctgaatagacctaaatctattaaagtacttga

SEQ ID NO: 60591 - protein, 500 aa, Streptomyces dengpaensis
MQSPEQQRYSCEQYAQRNGIKIVGEPVEDLDLSGTSSSKRQISAIIARIRSGEANIVLVWKWSRFGRNIRESQVNLHELEKAGGRLIAATEDYDTDTYHGRFSRDNMLLVADLQAGIIGATWQEAHDRRHRTGLPHTGQARFGYTRCPDCRRKEDFPDQFHHCKSCEGVLVVDPVRGPALGEAYERYVAGASISGIARDMKERGIRSLNGAVMKATAWQVVMDSGFAAGLIRWRGSEFRRLHGRAAKRPDTYDNWASGKHTAIIPMDVWEAYKKLRQNPATIPWSTEAKYAYSGLLRCGVVGESGDKCNRRMTASALIRSDGGAGMKLFRCPGIAVKECSGVTITLKRLDAATLVWLEEFARGADMGLMAMKRSARRAQAESDIPSVRAEIVATQSKKKKLLDLYLRDLVSEDDYRETVEQLATSLTALENRLAVLEIDTGEGIVPTAADFGKLLDLWPRMTPDEQRAALSRVVAYIEIEKTPGKQYNRISIVPRWEVAA

SEQ ID NO: 60592 - DNA, 50 bp, Streptomyces dengpaensis
  source 1..50: mol_type = genomic DNA
gttcgtgtttcctcttgcgcgacacatgtcgctcgtgatagaacacatat

SEQ ID NO: 60593 - DNA, 40 bp, Streptomyces dengpaensis
  source 1..40: mol_type = genomic DNA
gttgtgggccatgccgacccagagcgccgagaagttgtac

SEQ ID NO: 60594 - DNA, 50 bp, Streptomyces dengpaensis
  source 1..50: mol_type = genomic DNA
gttcgtgtttcctcttgcgcgacatatgtcgctcgtgatagaacacatat

SEQ ID NO: 60595 - DNA, 40 bp, Streptomyces dengpaensis
  source 1..40: mol_type = genomic DNA
cttgtgggaccagcccacttaaagcgtccagcagttggac

SEQ ID NO: 60596 - protein, 593 aa, Pseudomonas carnis
MPLCFPYVRFSSQKQAEGNSVVRQSERIESFVSRHNLTVDTRLEDHGISSFRGANAKKGQLSGFLQKVRDGEIPPGSYFLIENWDRLSRQVLDASIEIFSDLIRSGIKIAVLDEDTVYDDLTSNSFIRAIVQFERAHSESLRKSDMSKASWRAKHKAMAEGTIATEKCPQWLTVTGGAWIKREDICLHIETMFSLAQTYGVAETGRRLNTQFGTSYKTHQIQYLLRNRRLLGEHSPVERSKEHGKNVPTGQMVEHYYPQVISPATFEEVQTILKSRKPFSGRQDATNLNIFRNLLVCAECGGSTRFMLRSGKEFYYCTASITGGCVDDQIRSIRGEFLRRVLFKFEHWTAIRDYIAAGSDVLKVLKKEEAVAVAKLTLLETRADGLKKKHNAEEDLDRGETYADLLTDTRKAIVTAKADIDRIKQEVANLDGAFALSDSNADSFESMLTCDSEQARTDRQRLNRYLRGVFLKLELHFPTRKLVTQPIPALANRISPVVAYIQQPKDNRTGDDYGHHTWISKDQQTLIIKRIKARLRRAGIPSPTFEQVKPIYESVAYSLLPKRKPQCKNLPNLADLPEELKDVVWKAPDLFLK

SEQ ID NO: 60597 - DNA, 50 bp, Pseudomonas carnis
  source 1..50: mol_type = genomic DNA
tcggtacgaattgttgagtacggccagctgtgctagattatacgtaccga

SEQ ID NO: 60598 - DNA, 40 bp, Pseudomonas carnis
  source 1..40: mol_type = genomic DNA
ccgcgcatagcagtagatgcaaccatgttcacaaccacga

SEQ ID NO: 60599 - DNA, 50 bp, Pseudomonas carnis
  source 1..50: mol_type = genomic DNA
tcggtacgaattgttgagtacggcgagctgtgctagattatacgtaccga

SEQ ID NO: 60600 - DNA, 40 bp, Pseudomonas carnis
  source 1..40: mol_type = genomic DNA
acgagcatcgcaggagatggatgcataggcacatccacgt

SEQ ID NO: 60601 - protein, 521 aa, Amycolatopsis keratiniphila
MATKLQVASLELRAYLRVSKDASGEERSPNEQWSDLEDDGAAEGFTLHASPYRDIGSASRHARKARTNFDRMVRDLVSGEFGADGLALWEPSRGSRKVSEWARLIEMLAERKLGVWVHTDGRLYDLSRARDRKDLQDAAVDAEYESGKTSERQIRSQAARAARGGAAGRLSFAQVSEYDPRTGKLIRRSWDDEKAALVIEAFNWVDRGKSLNTLEKKWYKDGVRNGVGNAFTSVQIREMLRNRSYIGERVHVAGQIIRWWKADPDDVTIIKGDWEPLLKLEDGSADRALFDRVQDILTDVSRVTTRGGGARHFISMIAKCDVCDGVICANKRHGKPVYVCRAKGCVTIGQEITDKFAEELIIEYFSRDDEYASLNHNVDDTAELAAAKRELLEIDAHYQSMKSLMGKRKMSPEAFAELEPGVLADLAEAQRKVDMLRTPAEVREFLRPGEDIEARLEEADIYELRKIAAYVFSPARLGEFRIMKSPIRGHRVPVEHRVRFGRLDTERVERPGEAANPVGVV

SEQ ID NO: 60602 - DNA, 50 bp, Amycolatopsis keratiniphila
  source 1..50: mol_type = genomic DNA
tggtactacggcgggtgcttatcttcagagaaaccctcttagtggtaccg

SEQ ID NO: 60603 - DNA, 40 bp, Amycolatopsis keratiniphila
  source 1..40: mol_type = genomic DNA
ggttccgaccggttttccctcgtacatgaccgtcgtcgcc

SEQ ID NO: 60604 - DNA, 50 bp, Amycolatopsis keratiniphila
  source 1..50: mol_type = genomic DNA
tggtactacggcgggtgcttatctttagagaaaccctcttagtggtaccg

SEQ ID NO: 60605 - DNA, 40 bp, Amycolatopsis keratiniphila
  source 1..40: mol_type = genomic DNA
gtttccgactggtgtcaccttgttattgatcttcgtagcc

SEQ ID NO: 60606 - protein, 469 aa, Corynebacterium flavescens
MSRIAAYVRASVDFTGERWSVGTQKEVIARRAEERGWKIVDVYEDSGVSASKARGPKTDWARMLRDADAGHIDMVVAVDVDRLLRSTKDLNTLIDHGLKIVTLDGEIDLSTADGEFRATMLASIARFETRRKSERQLRSNARRRAEGLPASAWTPFGWTKDGKVVPDQAEAVRRAFDAFLGEPSLSIRRIREDLNAAGHRTARGSEFSTDAVRYLLGNPLYAGFIKKYSTGELHPVTDERFPPIVAEQTWRAAVAKLEDNVRRAAKQGNQPKYLLSSVGLCGKCGATLVSGTNSQGVGTYRCGDHFHLSRQRAPVDAMVTEAVLTRLSAGDVHDLVVPKEDVGVDREALLTERNALVERVNELSPLLSDVSQPVIEITQAINDVKARIVEIDAELHDRSVSQTADFMVDIDDPVGTVQRREAVERKWDAWDMDRRRLLVDELVTVTIEPIRPGRVKFDPDLIRIDPSRN

SEQ ID NO: 60607 - DNA, 50 bp, Corynebacterium flavescens
  source 1..50: mol_type = genomic DNA
gagtgttacaacttctacatgcgctagtacatctctgggttgtagcattc

SEQ ID NO: 60608 - DNA, 40 bp, Corynebacterium flavescens
  source 1..40: mol_type = genomic DNA
gggcgtcattgacatgcgctatgaaaacccgctctacctg

SEQ ID NO: 60609 - DNA, 50 bp, Corynebacterium flavescens
  source 1..50: mol_type = genomic DNA
gagtgttacaacttctacatgcgcccgtacatctctgggttgtagcattc

SEQ ID NO: 60610 - DNA, 40 bp, Corynebacterium flavescens
  source 1..40: mol_type = genomic DNA
ggccttccttgacctgggccctgactaccatctctatctc

SEQ ID NO: 60611 - protein, 541 aa, Mariprofundus ferrooxydans
MQKKAYSYIRFSSPQQLKGDSLRRQLEASRAYAEAHNMILDDSLRDIGVSAFKGKNATEGALKKFIELVEAGRIEKGSVLILESLDRLSRQQVFTALGLFSSILSAGIEIVTLADNQHYTAESINDVGQLMFSLISMSRSHEESAVKSKRLAASWENRRKLAIEGKRPMTGQCPRWLRLSDDKARFEVIEERAEIIRDIFRQSIAGTGQRKIAANLNERGVPTFNGGDMWHSSYIAKIIRSKSVIGEYQPKQKGEPIGEAIADYYPAVVSEELFYKAQSARVSRQNPASAGRKGLKFTNLFTGMCKCWACGTTYRLIRNGRLHMFRCNSNYMSNGCACDKRWRYREVEAAALVALSNKVDWFSALGGHTNNRQALESELSILRGRLADTEKQVERFAELFSMADGAMLTDARNRYMKAMQAADELRLAIESKEAELRTFSPVQERVDRLSAAIFDLRYRKKQDAALYELRARINAAFRDAGLCLYFFEQGVIYEVASTGQAGVIITEANREAEALLARAELVNHGLKGLKEALTCSTASSG

SEQ ID NO: 60612 - DNA, 50 bp, Mariprofundus ferrooxydans
  source 1..50: mol_type = genomic DNA
gattgaccaatgtggcccaatatgaaatacttcggctacattagcgcgag

SEQ ID NO: 60613 - DNA, 40 bp, Mariprofundus ferrooxydans
  source 1..40: mol_type = genomic DNA
cggcattgcgcacgatttcaataatatgctggctgcgctg

SEQ ID NO: 60614 - DNA, 50 bp, Mariprofundus ferrooxydans
  source 1..50: mol_type = genomic DNA
gattgaccaatgtggcccaatatggaatacttcggctacattagcgcgag

SEQ ID NO: 60615 - DNA, 40 bp, Mariprofundus ferrooxydans
  source 1..40: mol_type = genomic DNA
cacccctgcccatgctttggataataggctggctgacctg

SEQ ID NO: 60616 - protein, 548 aa, Streptomyces sp CFMR 7
MAGSSRSFLNPELVKALEGGKTFEEWLDGRIPGLDYARISGDQAVRSSTQARSKEKGRGVRHQHEGNEEVAADHGIAIVRFYEDNNITAAVPEIIRPAFVEMTKALLHRKVPEGFPVRAVVATEHERVWRLPEDYIRFRRAVITAGDGIFIEREKEYDIASTGGNIVGLVNSGVSEGEVAKTKERITRNILRRAQDGTTPGGRRRFGYLPQDPLKGRKVNEKLCPEESPWAIQMKKWALEGAAWKTIAARLRERNIVGASGKPWSGETVRQYLVNATNYGYRQLHGTLVTDKEGAPVVGKWETIGTFQEWEFICALSQKRGAKTGSRITNGGGKNPAPPEGRARKYMFSGYLRCGAIPVDVMCNTKIGGTRRPTKANPDMHEYVCNELGCGGVARNGKEIDAHLEALVVAALEARYKSVPKKDTPWEGESLLVEIKKKKKTLTSRWMEGEVSDDTFYELLPGLDDKIAGLEQDREEHHVILAEKNAFSGWDRSRWYGDPEKNILPMDLTQKRMAIGKIIRAVIIHPLPPGRSRKAPFDPTLLKVIPRR

SEQ ID NO: 60617 - DNA, 50 bp, Streptomyces sp CFMR 7
  source 1..50: mol_type = genomic DNA
aacccatgttgactgatccactcgtctcagtcaatctgtaaaccggtggt

SEQ ID NO: 60618 - DNA, 40 bp, Streptomyces sp CFMR 7
  source 1..40: mol_type = genomic DNA
gtagtcggccatccactcgtcgttgaagatcttgctcagg

SEQ ID NO: 60619 - DNA, 50 bp, Streptomyces sp CFMR 7
  source 1..50: mol_type = genomic DNA
aacccatgttgactgatccactcggctcagtcaatctgtaaaccggtggt

SEQ ID NO: 60620 - DNA, 40 bp, Streptomyces sp CFMR 7
  source 1..40: mol_type = genomic DNA
gtagtagctgatcctctgggcattgaggagctccctcagg

SEQ ID NO: 60621 - protein, 503 aa, Corynebacterium aurimucosum
MTTRAAIYLRISLDAAMDGLAIDRQRQDCEALAEQRGWDVVHTYVDQSISASKKDVDRPDYDAMVASFERGEIDAIICWNLDRLTRQPAQLEEWIDRAEEQGLKLVTENGDVDLATDGGRMYARIKAAVARGEIERKSMRQSRAQQQRAEQGRWYSGGVRPIGYTSTGEIIPSEAAAVLGMFRAVERGNSMRDIARALSGVDQPGLPDIPTTPRHMHTVVTERNARRRAAGQEEKSVPDAQPWAYTSLHSILRNPVYAGYSTYKKAKRKGVKNKYRRVTHIVRDPDTGEPVKGQWEPIVTPDLWWRVQNVLDDPDRLTNKERRNTRRHLGSGLYVCDEFGNPVHTHADRYRCAACGLVRTHSVDDFVLAVIRARLGRDDLADLLPTADDDEVDAIDDELAELRAKLARVQADYDEELIEARDLKRARNRYEPQIEKLETRRARLAGASALLDTTGYASPVDAFDNAELAVQRRVINTLCQVRLRRGVRGTKTFNPESVQIVWN

SEQ ID NO: 60622 - DNA, 50 bp, Corynebacterium aurimucosum
  source 1..50: mol_type = genomic DNA
ctgcaagcggtatcaggccgttgaactgcgcgcccggtaggcggtgggag

SEQ ID NO: 60623 - DNA, 40 bp, Corynebacterium aurimucosum
  source 1..40: mol_type = genomic DNA
ttaaggctgtgcccgtggaactattaggttcacccacagt

SEQ ID NO: 60624 - DNA, 50 bp, Corynebacterium aurimucosum
  source 1..50: mol_type = genomic DNA
ctgcaagcggtatcaggccgttgatatgcgcgcccggtaggcggtgggag

SEQ ID NO: 60625 - DNA, 40 bp, Corynebacterium aurimucosum
  source 1..40: mol_type = genomic DNA
ttattgatgtgcccatggatatattaacttaaatcacaaa

SEQ ID NO: 60626 - protein, 503 aa, Corynebacterium aurimucosum
MTTRAAIYLRISLDAAMDGLAIDRQRQDCEALAEQRGWDVVHTYVDQSISASKKDVDRPDYDAIVASFERGEIDAIICWNLDRLTRQPAQLEEWIDRAEEQGLKLVTENGDVDLATDGGRMYARIKAAVARGEIERKSMRQSRAQQQRAEQGRWYSGGVRPIGYTSTGEIIPSEAAAVLGMFRAVERGNSMRDIARALSGVDQPGLPDIPTTPRHMHTVVTERNARRRAAGQEEKSVPDAQPWAYTSLHSILRNPVYAGYSTYKKAKRKGVKNKYRRVTHIVRDPDTGEPVKGQWEPIVTPDLWWRVQNVLDDPDRLTNKERRNTRRHLGSGLYVCDEFGNPVHTHADRYRCAACGLVRTHSVDDFVLAVIRARLGRDDLADLLPTADDDEVDAIDDELAELRAKLARVQADYDEELIEARDLKRARNRYEPQIEKLETRRARLAGASALLDTTGYASPVDAFDNAELAVQRRVINTLCQVRLRRGVRGTKTFNPESVQIVWN

SEQ ID NO: 60627 - DNA, 50 bp, Corynebacterium aurimucosum; identical to SEQ ID NO: 60622
  source 1..50: mol_type = genomic DNA

SEQ ID NO: 60628 - DNA, 40 bp, Corynebacterium aurimucosum; identical to SEQ ID NO: 60623
  source 1..40: mol_type = genomic DNA

SEQ ID NO: 60629 - DNA, 50 bp, Corynebacterium aurimucosum; identical to SEQ ID NO: 60624
  source 1..50: mol_type = genomic DNA

SEQ ID NO: 60630 - DNA, 40 bp, Corynebacterium aurimucosum; identical to SEQ ID NO: 60625
  source 1..40: mol_type = genomic DNA

SEQ ID NO: 60631 - protein, 463 aa, Corynebacterium aurimucosum
MHTYVDQSISASKKDVDRPDYDAMVASFERGEIDAIICWDLDRLTRQPAQLEERIDRAEEQGLKLVTANGDADLATDGGRMYARIKAAVARGEIERKSMRQSRAQQQRAEQGRWYSGGVRPIGYTSTGEIIPSEAAAVLGMFRAVERGNSMRDIARALSGVDQPGLPDIPTTPRHMHTVVTERNARRRAAGQEEKSVPDAQPWAYTSLHSILRNPVYAGYSTYKKAKRKGVKNKYRRVTHIVRDPDTGEPVKGQWEPIVTPDLWWRVQNVLDDPDRLTNKERRNTRRHLGSGLYVCDECGNPVHTHADRYRCAACGLVRTHSVDDFVLAVIRARLGRDDLADLLPTADDDEVDAIDDELAELRAKLARVQADYDEELIEARDLKRARNRYEPQIEKLETRRARLAGASALLDTTGYASPVDAFDNAELAVQRRVINTLCQVRLRRGVRGTKTFNPESVQIVWN

SEQ ID NO: 60632 - DNA, 50 bp, Corynebacterium aurimucosum
  source 1..50: mol_type = genomic DNA
ctgcaagcggtatcgggccgttgaactgcgcgcccggtaggcggtgagag

SEQ ID NO: 60633 - DNA, 40 bp, Corynebacterium aurimucosum; identical to SEQ ID NO: 60623
  source 1..40: mol_type = genomic DNA

SEQ ID NO: 60634 - DNA, 50 bp, Corynebacterium aurimucosum
  source 1..50: mol_type = genomic DNA
ctgcaagcggtatcgggccgttgatatgcgcgcccggtaggcggtgagag

SEQ ID NO: 60635 - DNA, 40 bp, Corynebacterium aurimucosum; identical to SEQ ID NO: 60625
  source 1..40: mol_type = genomic DNA

SEQ ID NO: 60636 - protein, 517 aa, Micromonospora aurantiaca
MSHMTLRDPLGRVRAIIYVRLSSHRGDIDPSTSPARQEEVCRAYCLAKGWEVHPHVVRDLDVSGSDKGLRLDRPGLREIRERWPDVDVVIFAKLDRLARNVIDFRAFADEAAENGAALVSVAESLDLTTTSGRFVATILAAFAEMEAATIAERTTAGIEKARELGRWAGGAAPYGFQVVPAPDGPGFVLAPEPEAAAVVREAAERVLAGESLYAISKDFNARGVPTRSAKLIAEGRTKREKAAPWATQTLSQVLTNPATVGRSVYRGELIRDDRGMPRQLWAPLLPLEAWHRLRAVLAVNGEAAEGRGRRVRAARLLSGIAYCAGCGRKLYASSRKHPSGNTVPTYACAARRNGQGCEGVAITAEMTEEAVTRQFLARVGAWSVVEAVTVTVDDGRRADVEAGIADLARQMTERGANVAALAARLAELHAAREALPATAATEVRRVETGRTFGEEWAARDTDGRRALLASCGARAVIHRAAVRGRKLFDESRIDLRLGEFDDPEAQRLAEIAAEEAS

SEQ ID NO: 60637 - DNA, 50 bp, Micromonospora aurantiaca
  source 1..50: mol_type = genomic DNA
gtgtggcactgcttcacaacccgcacgcagaaacgtaccatgtcccacat

SEQ ID NO: 60638 - DNA, 40 bp, Micromonospora aurantiaca
  source 1..40: mol_type = genomic DNA
gcgccagcagttgacgcgcacccgaaggctgttgccgtcg

SEQ ID NO: 60639 - DNA, 50 bp, Micromonospora aurantiaca
  source 1..50: mol_type = genomic DNA
gtgtggcactgcttcacaacccgcctgcagaaacgtaccatgtcccacat

SEQ ID NO: 60640 - DNA, 40 bp, Micromonospora aurantiaca
  source 1..40: mol_type = genomic DNA
gcgccagtagttccagctactccggaggctgtggcagaag

SEQ ID NO: 60641 - protein, 516 aa, Micromonospora aurantiaca
MGTALKDPLGRIRAIIYVRLSSHRGDLDPSTSPARQEEVCRAYCAAKGWDVHPHVVRDLDVSGSDKGLRLDRPGLGEIRDRWGDVDVVIFAKIDRLARNVVDFRAFANEAEQHGAALVSVAESLDMTTPSGRFVATILAAFAEMEAATIAERVTAGIAATRKLGRWAGGAAPYGYKVVPAPDGPGYVLAPEPQAAAAVREAAERLLAGESLYRIAHDFNARGVPTRSAMLIAQGRTRRTKPAPWSTQVISQMLVNPATVGRSVYRGEVMRGDDGLPRQLWEPILPLDTWHQLRAALAANGDGVAGRGRRVRAARLLSGIATCAGCGRKLYASSRKHASGTTVPTYACAARRNGQGCKGVAITAEMTEQYVEREFLRMVGHWPVVEVVTVAVDDGRRADIEAAIADTARQMTERGADVPALAARLGELHAAREALPATAVTEMREVETGETFAEAWQARDVDGRRTLLVSARARVVVHRAAVHGRKIFDESRIDLQLGVFDDPEAQRLAEIAAEEAM

SEQ ID NO: 60642 - DNA, 50 bp, Micromonospora aurantiaca
  source 1..50: mol_type = genomic DNA
gtgtgggtgtcactcaagacccgcgtacgtaaggttaccatctcccacta

SEQ ID NO: 60643 - DNA, 40 bp, Micromonospora aurantiaca
  source 1..40: mol_type = genomic DNA
cgacggcaacagccttcgggtgcgcgtcaactgctggcgc

SEQ ID NO: 60644 - DNA, 50 bp, Micromonospora aurantiaca
  source 1..50: mol_type = genomic DNA
gtgtgggtgtcactcaagacccgcagacgtaaggttaccatctcccacta

SEQ ID NO: 60645 - DNA, 40 bp, Micromonospora aurantiaca
  source 1..40: mol_type = genomic DNA
cttctgccacagcctccggagtagctggaactactggcgc

SEQ ID NO: 60646 - protein, 457 aa, Oscillibacter sp
MSEKNIISDGKVMRAALYPRVSTEEQAKYGLSIHDQQNDLEQYAKANGMKVVGVFADAGFSARKKIEKRPAMMALLDAVRRDEVDIVLVTKLDRWFRNIGEYYKVQDILDAHNVSWKAIYEDYETATASGRLKINIMLAVAQDEADRTSERIKKINEGKRLRREALTGDKPLGYTIINKKFVKDPQTALAVDAFFRKYMACGSVSATQDYIREEFGLTIPYQGANKMLRSTAYYGVYYGVDGMCPPYITKEQYDQIQTMRRKVIKRTDENRIYLFSGLIVCGDCGGRIGGKVNQDHKTFHYNCSNHFCRRKPCGNNRSISEKKLEKYLLDTVECKLESYKTEFSAVQENVVEKDYRSEINALRGKLSRLKDLYLNELLTMDEYKKDYASITEKIHELEIKQQPPRPSNLPQIQKLLSHNWRDMYGALSPMQKREFWRIIIKEIRWYPDRHIEFDINL

SEQ ID NO: 60647 - DNA, 50 bp, Oscillibacter sp
  source 1..50: mol_type = genomic DNA
ctactacacaagcaatacccttctgtgctggggtatctcttgtgtagtag

SEQ ID NO: 60648 - DNA, 40 bp, Oscillibacter sp
  source 1..40: mol_type = genomic DNA
atacggattgtattcctgcgtgctgggacttagaaataca

SEQ ID NO: 60649 - DNA, 50 bp, Oscillibacter sp
  source 1..50: mol_type = genomic DNA
ctactacacaagcaatacccttctatgctggggtatctcttgtgtagtag

SEQ ID NO: 60650 - DNA, 40 bp, Oscillibacter sp
  source 1..40: mol_type = genomic DNA
atacatattatatatctgtatatagtgactgagaaataca

SEQ ID NO: 60651 - protein, 513 aa, Ruegeria arenilitoris
MSNLDTKIAAVIYVRVSSSKQIKEGDGLESQLTICREFALKNNLDVEKEFRDIASGRLDQRKGMSSLLSYLKRSKGHTKAVIIDDVSRLARGMKAYLRIKEEIESAGGKLVSPRLRFGESADEILFEMMQAVFSQHFSQKNAETNKSRTRGRMLNGYYSFSRLPVGYLYVRSDNRGRKKVVRDEPVASILSELLSGFAAGRFETVGEAKSFLENDPTFMRYIGKSRLTYSYVSAILRRPIYAGRYSNLKWNIPLTTGKHSPLISYEEHHKILKRLDGKVVARVRQDVSEDFPLRGFVLCEACGNFMTANWSGGRSKHYPYYICRKHGCGRAGKSIRREQIEGEFESLLRQIQPEPGFVKVFSQMLRDAWELRRLKDRQSRRERKKRISQINSEIEKTTDRYVDTELEVVSSALERKLEKLHNEKAHEEHKLREFDLNSPDFSDAFEPAMRILSRPFDIWKKSTLEWRKAMLRMIFAAPAVYSHKQGFRTVNLTLPFRALEDLKASESGLVPPH

SEQ ID NO: 60652 - DNA, 50 bp, Ruegeria arenilitoris
  source 1..50: mol_type = genomic DNA
aagcttcggagtctggtttggtgcccccacacgaacaaacttcgaaccag

SEQ ID NO: 60653 - DNA, 40 bp, Ruegeria arenilitoris
  source 1..40: mol_type = genomic DNA
taagttgtttaactggtgcccccacacggactcgaaccgc

SEQ ID NO: 60654 - DNA, 50 bp, Ruegeria arenilitoris
  source 1..50: mol_type = genomic DNA
aagcttcggagtctggtttggtgcttccacacgaacaaacttcgaaccag

SEQ ID NO: 60655 - DNA, 40 bp, Ruegeria arenilitoris
  source 1..40: mol_type = genomic DNA
tatgctatttagctgttgcttccacactgatgcaaacctt

SEQ ID NO: 60656 - protein, 618 aa, Sellimonas intestinalis; identical to SEQ ID NO: 11111

SEQ ID NO: 60657 - DNA, 50 bp, Sellimonas intestinalis; identical to SEQ ID NO: 11112
  source 1..50: mol_type = genomic DNA

SEQ ID NO: 60658 - DNA, 40 bp, Sellimonas intestinalis
  source 1..40: mol_type = genomic DNA
cccttgtttttgttcctacgagccgaaacaagggcaattc

SEQ ID NO: 60659 - DNA, 50 bp, Sellimonas intestinalis; identical to SEQ ID NO: 11114
  source 1..50: mol_type = genomic DNA

SEQ ID NO: 60660 - DNA, 40 bp, Sellimonas intestinalis
  source 1..40: mol_type = genomic DNA
aaactgtgtgtgatccttcaggcccaaacatgggcaatta

SEQ ID NO: 60661 - protein, 538 aa, Mycobacteroides abscessus
MATAVIYLRVSTKDQATRGNEAEGFSIPAQREACGRKVQALGATVVQEFVDAGESGRSADRPALQRMLAYLTSNPTAYVVVHKLDRLARSRADDVQITLAIQAAGSTLVSVTENIDSTPSGALLHGIMSSIAEFYSRNLANEIVKGTKQKALSGGTPTIAPIGYLNVRETVNGREIRTIRTDPDRAHHIQWAFEQYATGDWTLRTLSTALNSRGLSQRPTPSRPARPLPTNKLHKVLRNRYYLGYVTWQGIEYPGNHEPLIDPATFDQVQHTLTAHQRSGERSSRRKHHLAGSLYCGRCNSKLIYAISTGRHGGKYGYWFCIGRHTLRNGCDLPYLPEERVTTAVVGLWHATQLPTAAVETIRNSLTDDLAAYSAHADQELTLLDRRIKEVGRERLKWADLAMDGTVPRDIARDKQAALAIQLGQLEHQMTSLTSTNIDHAEVINTALDLLGRCSDAYERAPEATRRDLNQAYFERILLDSTDGEPIIKSAEQTEIIELIATAERKPELTYSGKADLALTTYSTVKGSKIASLVELRG

SEQ ID NO: 60662 - DNA, 50 bp, Mycobacteroides abscessus; identical to SEQ ID NO: 51082
  source 1..50: mol_type = genomic DNA

SEQ ID NO: 60663 - DNA, 40 bp, Mycobacteroides abscessus
  source 1..40: mol_type = genomic DNA
tctgacctgggattattgtggagctaaggggactcgaacc

SEQ ID NO: 60664 - DNA, 50 bp, Mycobacteroides abscessus
  source 1..50: mol_type = genomic DNA
gggttcgaagatcgcctctttggtaaggctaaggggaacactctcgaacc

SEQ ID NO: 60665 - DNA, 40 bp, Mycobacteroides abscessus
  source 1..40: mol_type = genomic DNA
tcttacctgcactttttttaaagctactggtactccatcc

SEQ ID NO: 60666 - protein, 556 aa, Mycobacteroides abscessus; identical to SEQ ID NO: 18761

SEQ ID NO: 60667 - DNA, 50 bp, Mycobacteroides abscessus
  source 1..50: mol_type = genomic DNA
gggttcgattaagaaccctttggtggacctaagtggacaactatcgaacc

SEQ ID NO: 60668 - DNA, 40 bp, Mycobacteroides abscessus; identical to SEQ ID NO: 60663
  source 1..40: mol_type = genomic DNA

SEQ ID NO: 60669 - DNA, 50 bp, Mycobacteroides abscessus
  source 1..50: mol_type = genomic DNA
gggttcgattaagaaccctttggtaaacctaagtggacaactatcgaacc

SEQ ID NO: 60670 - DNA, 40 bp, Mycobacteroides abscessus; identical to SEQ ID NO: 60665
  source 1..40: mol_type = genomic DNA

SEQ ID NO: 60671 - protein, 558 aa, Mycobacteroides abscessus
MSQPAGEAALSAVSYLRVSTKDQASRGGLAEGLSIPAQRSAIEVKARTIGAEIVMEFADAGESGRSADRPQLQEMLRYLRNNHVDLVIVHKIDRLARNRADDVTINLAIRQAGAQLVSVTENVDESPQGQLIHGIFSAVADFYSANLAQEVLKGMEQKVRGGGTIGRAPVGYLNIRTTINGREARQVAIDPDRADHVRWAFDTYATNPDMTLSRLTTLLHDRGLTIRATANQAERPLQRSQVHKMLTRRFYLGYTTLRGVEYPGNHQALIDERTFRQVQDRLATNRGSGNRERKHLQYLAGILYCGRCRSRLVYTINRGRHGGLYEYYACTGRQSKKTGCDAPHFAVARIEEAVALVWDAEHAAWQTQAIPAVHEELVQNLRALREESGRNTRLIQRRIEKVQRDRHKWAENAIDGIVPADIARDKQAQLARQLASLTTELASLEAAGIDTEATLNQLIDQISDPGRAYRRLDDGLRRTYNQAWFSRIYIDAVPDNSNSPLRTNTDRTVISQSLETCRQILLAAQNNSADPEGSAEIIDIGSRRTRGSIKNPLVELRG

SEQ ID NO: 60672 - DNA, 50 bp, Mycobacteroides abscessus
  source 1..50: mol_type = genomic DNA
gggttcgattaagaaccctttggtggacctaaggggacaactatcgaacc

SEQ ID NO: 60673 - DNA, 40 bp, Mycobacteroides abscessus; identical to SEQ ID NO: 60663
  source 1..40: mol_type = genomic DNA

SEQ ID NO: 60674 - DNA, 50 bp, Mycobacteroides abscessus
  source 1..50: mol_type = genomic DNA
gggttcgattaagaaccctttggtaaacctaaggggacaactatcgaacc

SEQ ID NO: 60675 - DNA, 40 bp, Mycobacteroides abscessus; identical to SEQ ID NO: 60665
  source 1..40: mol_type = genomic DNA

SEQ ID NO: 60676 - protein, 550 aa, Streptococcus dysgalactiae
MSKEKIKVYLYTRVSTSIQIDGYSLEAQKSRMKAFALYNDYEIVGEYEDAGKSGKSIEGRVQFTRMMEDIKSGKDGVSFVLVFKLSRFARNAADVLSTLQIMQDFGVNLICVEDGIDSSKDAGKLMISVLSAVAEIERENIRVQTMEGRIQKAREGKWNGGFAPYGYQLIDGKLLINEEEAIAIRTIFDQYVNTSIGANGISKYLENHGIRKIPRQNGKNPLFDAGLIRKILKNPVYNGKIAFGRRTLEKVHGTRNEYKQVEQDEYLISEGIHEAIVSDEVWQAAQVKLKSQAKKYEHVNKGKDTRTHLLSGIVKCPICGVGMFGNKCIKKKKDGTKYKDFYYYGCKHRQMIRGHKCTFSKQIREELLDDAVAEVIIKLVSNPKFASMMQEKINMKVDTSEIEKEIDNYQKELRKSHSTKFKLIEEIDNLDVEDKHYKRRKQDLDDRLYRMYDKIEELESLLIDAKAKRQTIEAEKLTGDNIYKVLIYFDKLYKVMNDVERRQLISALISEIQIYEEKQPNGQWLKSITFKLPIIDENINIGLDNDEHVE

SEQ ID NO: 60677 - DNA, 50 bp, Streptococcus dysgalactiae
  source 1..50: mol_type = genomic DNA
caatataggtttggacaacgatgaacacgtggagactatagcgttgatac

SEQ ID NO: 60678 - DNA, 40 bp, Streptococcus dysgalactiae
  source 1..40: mol_type = genomic DNA
atttgtttccacagacgcatcacgttgagtgcgtagtgtt

SEQ ID NO: 60679 - DNA, 50 bp, Streptococcus dysgalactiae
  source 1..50: mol_type = genomic DNA
caatataggtttggacaacgatgagaacgtggagactatagcgttgatac

SEQ ID NO: 60680 - DNA, 40 bp, Streptococcus dysgalactiae
  source 1..40: mol_type = genomic DNA
gttattttccacacacttagaaccttgagagatttgtgtt

SEQ ID NO: 60681 - protein, 529 aa, Salinispora tropica
MASSSRRRAILLARLSDNRVDVDLTDEGIPSGLDDQLRRMQDRAGELGWDMWKVIKNPRLSAYKRRKVVLPDGRREYRVFRPDLREALADLAAGRANALLCLDLDRAFRDPKDLQDLIDVVDHSPHDIVVESVTGSLHMEKGRDNFDAEIRVLVANKASRDTARRVAAARERQALNGQYGGGKRPFGFCSGPPKIVPDGGRTDEAVCAWHGGRDCQSGVTPIKAETEVIADCSRRLLQGVSLRSMALELRGKDVPTVTGAKWSAETLRDVLLRPRNAGLIVYRGEVLDGVTAPWKPIVARETFEEVRALLTDPGRETAPGAPPRWTGSGIYRCGLCTPPSSKTDKPATCHVTRGGTNPRYTCREYSHLARNAYRTDEVVFAHVMYAITHPRAYELLAPAAPDVDAAALRTEKATIRKNLERMAEDEVLGLRTRAQVLAATRRANARIGEIDELLNMTLTEDPLAEVVNAVDPVKVWKDMPLANRRIIVDRLCTVTILSARPGRRFDVASVRVDPKHPLGATPPEFLGAG

SEQ ID NO: 60682 - DNA, 50 bp, Salinispora tropica
  source 1..50: mol_type = genomic DNA
gtgtgtcacattgtgggattggtcttgccgcacaccgtgttctagcacag

SEQ ID NO: 60683 - DNA, 40 bp, Salinispora tropica
  source 1..40: mol_type = genomic DNA
ccgttcggcgagcatggtcttgccggcgccgggtgggccg

SEQ ID NO: 60684 - DNA, 50 bp, Salinispora tropica
  source 1..50: mol_type = genomic DNA
gtgtgtcacattgtgggattggtccggccgcacaccgtgttctagcacag

SEQ ID NO: 60685 - DNA, 40 bp, Salinispora tropica
  source 1..40: mol_type = genomic DNA
gtctccggcgggcaggggccgggctgcgctgggtgggcca

SEQ ID NO: 60686 - protein, 581 aa, Pectobacterium carotovorum
MPLLYSYIRWSSDRQAKGTTLQRQMASAKEFALTNGLELVEIIDPGVSAFRGKNTKSGKLGDFIDAVKEGIIPDDSWLYVENLDRLTRQDVTTAQKLFIELLDLGLTLVTGMDRRVYTLESVNQNPTDLMISILMFSRANEESKTKQTRTVGNVETLVERHKQGLPVNIKSCGKHPFWIDDTGSQYEAVRQHPEYWKIAREAIEQFLQGHGIYKVKRYLDEKYPNGLNGKEWDYQVLKRLRENRALIGERTIKIGNREHKLIGYYPSLCIDEVEFLKLQELKEQNGYKSKKDKPSDSINLLSGLTLMRCSKCGGTMTGFLNRGKPRYICLNGRHLQKGCVGWSVASPLVDHCVITTLLIGYIDTNRKENQDTTELTKLIERKSNDINAIDSSIANISLAIEKGANIDQLVDRVKVLSSDREKIIKEVDKLRTRKTVIETKGSFELTIMEFMDLIQWDVFVDIANESRNKIRAVINDIIEYVVIDKTDGCITIKVKCLGSDDVFVYGGDKRKPFWKFYVEQHFDETTELLTSDISIDEKLLEAANLYGKVVDTYKTYYETVKDMMAVVGYPEIDGAAFWPNR

SEQ ID NO: 60687 - DNA, 50 bp, Pectobacterium carotovorum
  source 1..50: mol_type = genomic DNA
cgatcaataattttgacttttgggcaccctaatgataaaaatccaatctt

SEQ ID NO: 60688 - DNA, 40 bp, Pectobacterium carotovorum
  source 1..40: mol_type = genomic DNA
gtcgacgaggtttttcgggcagccgagggaaacaaagccg

SEQ ID NO: 60689 - DNA, 50 bp, Pectobacterium carotovorum
  source 1..50: mol_type = genomic DNA
cgatcaataattttgacttttgggtaccctaatgataaaaatccaatctt

SEQ ID NO: 60690 - DNA, 40 bp, Pectobacterium carotovorum
  source 1..40: mol_type = genomic DNA
gagggcgagggctttccagtagcagagggaagcagagcca

SEQ ID NO: 60691 - protein, 454 aa, Flavonifractor sp An10
MIRAAQEKKFQIILCKSQSRFTRDMELVEKYIHGLFPLWGVRFIAVADNADTEIKGNKKARQINGLINEWYLEDLSENIRMVFDMKRRQGQYIGGFPIYGYRKDPDNKGHLLVDPEAAEVVRQIFRWSLEGHGKQSIAHMLNDLGVVNPTRYKAERGWDSNHFCKQDFGLWNKNTVWRILRNEIYTGVMVQGRTKKASYKSKAIIVMPRDRWFRVEGTHEAIIDRETFETVQRNLDIRSREDGTGMVHPLAGLVKCMDCGGTMSKTSNGKKGKAQVYYLRCKLYADSGTKKLCTRHSIRLDRLIELVSQRIRDYIGAYYHLEELELPLPKDDHREALLQEQKTLSAQLEKRSMALKNLYLDKVSGVLSEGQFVELNQDFLTEKSRLERRLAQIDQEFSEQEQPRNQEEVMAKARELLELKALPRELAVMLIEKIEIGEQDPETGRQEVKIHWKF

SEQ ID NO: 60692 - DNA, 50 bp, Flavonifractor sp An10
  source 1..50: mol_type = genomic DNA
aggtgtcctaaagggacaatacccatggcacagcaccattaggacaccct

SEQ ID NO: 60693 - DNA, 40 bp, Flavonifractor sp An10
  source 1..40: mol_type = genomic DNA
gtggacggcacttcgccccatgtggtggagcccaaatacc

SEQ ID NO: 60694 - DNA, 50 bp, Flavonifractor sp An10
  source 1..50: mol_type = genomic DNA
aggtgtcctaaagggacaatacccagggcacagcaccattaggacaccct

SEQ ID NO: 60695 - DNA, 40 bp, Flavonifractor sp An10
  source 1..40: mol_type = genomic DNA
gtcgtgcgcactcagcaccaggtggaggcgcccaaagtcc

SEQ ID NO: 60696 - protein, 525 aa, Clostridium scindens
MNIAAYCRVSTDKSDQLNSLETQKQFFTEYVQRTGDHLVKVYADEGISGTKIKNRKEFLQMMADAEHGLFDMVVVKDISRFARNTVDLLQNIRRLKALGIETQFLTANMTSMGNSEFVLTIFGALAQEESANTSKRIKFGKKVNAEKGRVPNIVFGYDKTIGDYFNLTINEKEAKVVRQIYQWYTEEGYGCAAISNKLNEQGSRTKRNCKWSQNAVSRILTNELYTGKIINGKQEVADFLTGQRKEKDETEWLVTEQPELRIIDDEVFEQAQKILHSRNQAFNLNHERQSNKYLFSTLIKCKECGWSFRRTVRKYKNTYVRWVCSGHNGKGADSCPNAVTLDEEELIEVLQEYFSNVLKNKKKVIQYVVKEFQRVYKAKDENVEYEKELKGKLAKLKAMREKYMDMYTDDLITRQELNDRIGGARQEIERLENELKMVTYQITKGDQLEELLNITFQSIEDITDVHQMTNTQLKKIIEKIEVDKDGNVDIYLKLLGDLGLDEAILVSDRSEMPDAENAQNNHDRT

SEQ ID NO: 60697 - DNA, 50 bp, Clostridium scindens
  source 1..50: mol_type = genomic DNA
acgctcaaaataatcacgaccgcacatatagaggtaataatatagaacgg

SEQ ID NO: 60698 - DNA, 40 bp, Clostridium scindens
  source 1..40: mol_type = genomic DNA
agttagcaagtctaccatacataaggacgtaacggaacgc

SEQ ID NO: 60699 - DNA, 50 bp, Clostridium scindens
  source 1..50: mol_type = genomic DNA
acgctcaaaataatcacgaccgcaattatagaggtaataatatagaacgg

SEQ ID NO: 60700 - DNA, 40 bp, Clostridium scindens
  source 1..40: mol_type = genomic DNA
agttaacaagtcaatgataattgagtaagtgatggggcgc

SEQ ID NO: 60701 - protein, 533 aa, Pseudonocardia dioxanivorans
MARSTTAQRTKKAAMTTLGDDVRVGIYVRRSTDDEHQPYSIEAQDTRLESYIGSQPGWRLVARFPDDASGATTERPGLHRALAAARAGLIDVLLVYRVDRFSRNLRDMVMLLDELDSAGVVFRSATEPFDTSTPMGRMLVQMLGMFAQFERDTIIDRVIAGMERKHAKGKWKGGKRPFGYQVDKTTHTLVIDEHEAVIVRLIFDLYTKDRLGSRAIAKVLNDRGHRTSSGGKWSGYQVIRALNNRVYLGELTFRETTVTNTHAPIIDLTAWEQAQAILDARGESHAHRAASGSDYVLTGRLRCPKCGKAMIGTRATGRNRTYRYYTCWNLARYDASKCDFKRLNADAVDAAVLDALTGFYRTRHDLIADAIAHEQKQHRAAHADRHAELATVENEMTKTGVAIDRYLTAFERGTMDEELVADRLTELRAKSKQLRVRRDELTLALDDEPAMPEPATLAAVADQIAEIITDGTHNQIKALVEALVAKVTITGPDRLIPVFRIPQPRNNDGAAPALPAETAPNGVVRTMTKSVEL

SEQ ID NO: 60702 - DNA, 50 bp, Pseudonocardia dioxanivorans
  source 1..50: mol_type = genomic DNA
cacaatgactaaatcggtggagctggtgcgccggctcgggctgaaccggc

SEQ ID NO: 60703 - DNA, 40 bp, Pseudonocardia dioxanivorans
  source 1..40: mol_type = genomic DNA
cggcagggagagtggagctgaggggaatcgaacccctgac

SEQ ID NO: 60704 - DNA, 50 bp, Pseudonocardia dioxanivorans
  source 1..50: mol_type = genomic DNA
cacaatgactaaatcggtggagctgatgcgccggctcgggctgaaccggc

SEQ ID NO: 60705 - DNA, 40 bp, Pseudonocardia dioxanivorans
  source 1..40: mol_type = genomic DNA
aggcagggggagggcaagtgagggaacatgaacccctggc

SEQ ID NO: 60706 - protein, 525 aa, Dechloromonas agitata
MAVALYGRVSTVRQFEKDLSIPDQIKQMREWCEQHGYVVAKAFIEKGASGTDDRRPAFQELIAEACQKPSPYEAVIVHSLSRFYRDSLEFALYERRLNQCGVKLISITQQTSDDPSGEMARKIFSIFDEYQSKENGKHTLRAMRENARQGYWNGSRPPFGYTTEVVTVSKDKVKKRLVIDEMEARIVRQIFEGYLRGDSGAGQGAKLIATELNRLGYTHRGTTWTRGRVHEVLSNSTYVGDFYFNRVCNKTGEKKPEAEWIHMSVPAIIDRNTFETVQQRKASRSADVVNPAIVGSKTLLTGIAKCGLCGAGMTLVTGKGGKYRYYKCATRTCKGNHLCENPAMPMDKLDDAILGLLAEQVFTPERVMAMLTELRGEIEACQNKEKNEIAGLQKEMEELDKATARLYEAVEKGLFPLDQTLRVRSEKLQAQREEVVSKMNRFSRRRALPEIQAGQVSNFCKALREKLLDRSSGFGKAYLNCLVNEVRVTGGEVLVTGSKEKLAMAVADTKKGTSIEVPKSVLGWL

SEQ ID NO: 60707 - DNA, 50 bp, Dechloromonas agitata
  source 1..50: mol_type = genomic DNA
gaagtgcccaaatctgtattgggttggctcgccagaagtgacggttctga

SEQ ID NO: 60708 - DNA, 40 bp, Dechloromonas agitata
  source 1..40: mol_type = genomic DNA
ggctaagtgcttgattttttggctccccgacctgggctcg

SEQ ID NO: 60709 - DNA, 50 bp, Dechloromonas agitata
  source 1..50: mol_type = genomic DNA
gaagtgcccaaatctgtattgggtttgctcgccagaagtgacggttctga

SEQ ID NO: 60710 - DNA, 40 bp, Dechloromonas agitata
  source 1..40: mol_type = genomic DNA
ggctaattttttgattattttgtttcccaggctggtctca

SEQ ID NO: 60711 - protein, 548 aa, Mycobacterium sp VKM Ac-1817D; identical to SEQ ID NO: 441

SEQ ID NO: 60712 - DNA, 50 bp, Mycobacterium sp VKM Ac-1817D; identical to SEQ ID NO: 442
  source 1..50: mol_type = genomic DNA

SEQ ID NO: 60713 - DNA, 40 bp, Mycobacterium sp VKM Ac-1817D
  source 1..40: mol_type = genomic DNA
gcgttgattgggtgtccgaggggggacttgaacccccacg

SEQ ID NO: 60714 - DNA, 50 bp, Mycobacterium sp VKM Ac-1817D
  source 1..50: mol_type = genomic DNA
agtcgtgtcgccggatgtgtccgactggggacttgtccgtctacgacacg

SEQ ID NO: 60715 - DNA, 40 bp, Mycobacterium sp VKM Ac-1817D
  source 1..40: mol_type = genomic DNA
atgtagtttgggtgtcttactgtggtctttaacccgcagg

SEQ ID NO: 60716 - protein, 548 aa, Mycobacterium sp VKM Ac-1817D; identical to SEQ ID NO: 13166

SEQ ID NO: 60717 - DNA, 50 bp, Mycobacterium sp VKM Ac-1817D; identical to SEQ ID NO: 442
  source 1..50: mol_type = genomic DNA

SEQ ID NO: 60718 - DNA, 40 bp, Mycobacterium sp VKM Ac-1817D; identical to SEQ ID NO: 60713
  source 1..40: mol_type = genomic DNA

SEQ ID NO: 60719 - DNA, 50 bp, Mycobacterium sp VKM Ac-1817D; identical to SEQ ID NO: 60714
  source 1..50: mol_type = genomic DNA

SEQ ID NO: 60720 - DNA, 40 bp, Mycobacterium sp VKM Ac-1817D; identical to SEQ ID NO: 60715
  source 1..40: mol_type = genomic DNA

SEQ ID NO: 60721 - protein, 548 aa, Mycolicibacterium fortuitum; identical to SEQ ID NO: 9226

SEQ ID NO: 60722 - DNA, 50 bp, Mycolicibacterium fortuitum; identical to SEQ ID NO: 17512
  source 1..50: mol_type = genomic DNA

SEQ ID NO: 60723 - DNA, 40 bp, Mycolicibacterium fortuitum; identical to SEQ ID NO: 60713
  source 1..40: mol_type = genomic DNA

SEQ ID NO: 60724 - DNA, 50 bp, Mycolicibacterium fortuitum
  source 1..50: mol_type = genomic DNA
agtcgtgtcgccggacgtgtccgactggggacttggccacttacgacacg

SEQ ID NO: 60725 - DNA, 40 bp, Mycolicibacterium fortuitum; identical to SEQ ID NO: 60715
  source 1..40: mol_type = genomic DNA

SEQ ID NO: 60726 - protein, 491 aa, Corynebacterium striatum
MAATTKQRAAIYARISLDKQEEAGVKRQIHLATKQAEADEAEVVAEYVDNNVSAFSGEYRPEYDKLIHAIENREIDVVYVYALDRLTRRTKDTLALFELCEKHHVTVKANRGYNIDPSDPASRLTIVILGLIAEQESIDRAARIRAAYEDRARNGRPKTGGRRMFGYEPDAVTVIDDEAEALRGAAAMVIAGKTLRETVREIFHARGLTATSGRPMTAPTLRDLLLNPRARGLSTFNPTDPDTGYRLVKDRQVVGRGTWPAIIDEATGEKLDAVLRDPSRRRSHSGNAPRYFLASALTCTCGDPMYARSRRNKAGEPRRYYTCKRSEPGGTHVSIGAEVDDLIEAVILKRMEQPDAIEALQQALSPEDDGLTEQLQELAGERNALLARREQIEEAIIAADVDMSTFARVSKKIEDQISTIDEKMRELTTSRDADPLAVELADGPDFAEWWGGASVEDKRRLTRLLMEIRILPGKAGAKQFDPHRVKITWRQ

SEQ ID NO: 60727 - DNA, 50 bp, Corynebacterium striatum
  source 1..50: mol_type = genomic DNA
cgtacctataaccaaggttctggtaatcctgaatgtggatttgggctaca

SEQ ID NO: 60728 - DNA, 40 bp, Corynebacterium striatum
  source 1..40: mol_type = genomic DNA
tgcggctaccggcagcggaaagagcgaattgctgcgaaca

SEQ ID NO: 60729 - DNA, 50 bp, Corynebacterium striatum
  source 1..50: mol_type = genomic DNA
cgtacctataaccaaggttctggtcgtcctgaatgtggatttgggctaca

SEQ ID NO: 60730 - DNA, 40 bp, Corynebacterium striatum
  source 1..40: mol_type = genomic DNA
cgcagctacgcccagcggccggagcgagttgcagtaagca

SEQ ID NO: 60731 - protein, 568 aa, Bacillus amyloliquefaciens
MTDIKDVFKHHKSRVDKIDTIEEKTKKDTYGVLIRVSDVKQVTKDSIPMQRERAYKFIKERDGILYKEYIEEAVSASKNSIKQRPVLQELLKDIEDGKINKVIAYKRDRLSRIQKDWLTILDTIFKNNCDIEFTSAEEQPISSNPMVRGIMEPVLGFLANMESNNTSMRVKETRASIAAKGRWTGGTLPYGYDLNKNKEIVVIKEVIPSLIEIEDLYLNGIGVGSITRYMNGHEVKHLGKRKKGADIKRVVYKGRKTYWTESAVEGVLFNPFYAGIIEYSKEGNKHLQYDQDKFVREKGFHEAIRTLDKQEKIYEMKSKKSISAPRKFSTTFLLTGLVYCSECGSPIQSRTVLKKERNNEKYCYYVCASKQNKDKTSRNEMCPSKNFKQNILEDFVVSKLLEMFDGFNKDNLKEEILKGIDQGKSTIETDIVSAQAELKELQSELVSIMNLMKRVSPESPLYEEIITDYEKSYTETLLKKKEIEEKLESLQQSIKENNDKEIEQNIVLDALKNFSIVFKEASQVQRKTLLDSIIKRIDISQDGKLNILCNFELPKDGESYVHSINRRP

SEQ ID NO: 60732 - DNA, 50 bp, Bacillus amyloliquefaciens
  source 1..50: mol_type = genomic DNA
gttatgttcattccattaaccggcgacccgctaagggtgtagaacataac

SEQ ID NO: 60733 - DNA, 40 bp, Bacillus amyloliquefaciens
  source 1..40: mol_type = genomic DNA
ggggcaggagccgaccggcgacccgtttaattctatgatt

SEQ ID NO: 60734 - DNA, 50 bp, Bacillus amyloliquefaciens
  source 1..50: mol_type = genomic DNA
gttatgttcattccattaaccggccacccgctaagggtgtagaacataac

SEQ ID NO: 60735 - DNA, 40 bp, Bacillus amyloliquefaciens
  source 1..40: mol_type = genomic DNA
gggacatgagcagaccagccaacattctaattctgggagt

SEQ ID NO: 60736 - protein, 537 aa, Rhizobium leguminosarum
MQSSSLLRAVGYCRVSTDKQLERDLSVPDQQRQINQHCEKNGWRLVNHYIEGGLTATDDNRPEFQRMIERATDDDHPFDVIVVHSFSRFFRDLIGLELYIRRLAKSKVQVVSITQPLGSGPEHDMLRQMIGLFDEYTSKEISKHVRRGLKENARQGFWNGSRPPLGYRLEEAERRGERIKKRLAVDEIEAETVRLIFRLYRVGDGKSGPIGIKSIAKYLNAAGHRTRQGGYFGSSLIQVMLRNTTYKGEFLYNKRNYKTEEENPVEETVLVAVPVIIDPTEFGVVQALLSARNRLVTPPRIVTGPILLTGLTFCSKCGGAMTMSSGTSHTKKVYNFYSCLAFRKKGKLACDGCNVSMPALDKLVVGRLTERLFTKERIAEIIREIAQRRATKSTQADKRAAELRRRALDGEVRLNRLYRSIEEGIVELDDLLREKVAALQSDRRKAQDALDRLTEATIPAPEVSEGMIDEFVKVMRESISEGSVPFRKAYIRSVVERIEVSDDTITIVGAKLKIDQAVKAKELPLSSVRGFEPKWYA

SEQ ID NO: 60737 - DNA, 50 bp, Rhizobium leguminosarum
  source 1..50: mol_type = genomic DNA
ttcgcggttttgaaccgaagtggtacgcccctccggacaaaactgcgaac

SEQ ID NO: 60738 - DNA, 40 bp, Rhizobium leguminosarum
  source 1..40: mol_type = genomic DNA
gcctatcatcaggagtggtacgccctaggggagtcgaacc

SEQ ID NO: 60739 - DNA, 50 bp, Rhizobium leguminosarum
  source 1..50: mol_type = genomic DNA
ttcgcggttttgaaccgaagtggtctgcccctccggacaaaactgcgaac

SEQ ID NO: 60740 - DNA, 40 bp, Rhizobium leguminosarum
  source 1..40: mol_type = genomic DNA
gtatataatcaggggtgtgctgccctttgggggtcccacc

SEQ ID NO: 60741 - protein, 464 aa, Staphylococcus pseudintermedius
MKVAIYTRVSTQEQANEGYSITEQKRKLISFCEVHDWNSYEVFTDAGFSGGSTKRPSLQKLFDSLDDYDLVLVYKLDRLTRNVRDLLEMLEVFESKNVSFKSATEVFDTTTAIGKLFITMVGAMAEWERETIRERSLFGSRAAVSEGNYIREAPFCYDNNDGKLVPNQHSKIIDYIVSEFKKGLSANEIAKRLNATNQLPPKIKSWNRVTINRLIRNPVLRGHTKHGDMFIENTHEPVISENDYLTILETLEKRTHKSNTKHHSIFRGVLVCPQCKNRLHLYAGRIKTSNGYQYKVRRCKCDRCSKDKTVQSVSINESEVERVFIETLKGFDLNKFKIDLEPKKVPKIEYNETKIKAQRKKYTRSWSMGYIDDDEYYELMGETQKLLDSIEKEEIQPISNDLSRKQIESVTNLLLKGWQLMSVEEKEEIILSTVKEIHFDYISRKENKNGSTNTIKINRICFKY

SEQ ID NO: 60742 - DNA, 50 bp, Staphylococcus pseudintermedius
  source 1..50: mol_type = genomic DNA
aatggtagttatgttacaatgtccgtcgcgcttgttacataactatcatt

SEQ ID NO: 60743 - DNA, 40 bp, Staphylococcus pseudintermedius
  source 1..40: mol_type = genomic DNA
tataaacgggactactaatgtcgcaccagtgccccccata

SEQ ID NO: 60744 - DNA, 50 bp, Staphylococcus pseudintermedius
  source 1..50: mol_type = genomic DNA
aatggtagttatgttacaatgtccagcgcgcttgttacataactatcatt

SEQ ID NO: 60745 - DNA, 40 bp, Staphylococcus pseudintermedius
  source 1..40: mol_type = genomic DNA
tataaaagggactcctaagagctctcctgtgctctttcta

SEQ ID NO: 60746 - protein, 572 aa, Mycobacterium shimoidei
MRALIVVRLSRVTDATTSPERQLQACRELCARRGYEVVGIAEDLDVSAAATSPFDRPQLGDWLTNRLGEFDVLVFYRMDRIVRRLLDLADLIRWCQQHSVLVVSATEQFLDLTQPFGDIIALLVAKVAEMELAAISDRNASAARYNIRAGKYRGGIPPWGYLPQQDEDGNWRLVQDPEQVTVIREVVERVLTGEPLRAVAHDLTARKVLTPKDRFAQLQGREVKGYQWHSSPLKRALTSPTLLGQIVAREPLTDAQGRVKRDSKGRKVFGPETVVRNDDGSPVVRSEPILTREVFDRVGAELADRENRKEPTKRSSGLLLQVIYCGVCGRPAYRLKGGVGRKPRYRCASAQYRDPCGNRSIPLEYADETVETLLLGVLGTSERLERVWDSGSDHSAELAEIDSTLADLADQLGSPAFRKGTPQRDRLDARIEALAARQAELAAEAIKPAGWTWQPTGEKFADWWDRQDVTARNVWLRSMGFTLGFVYSLDGKGPTLNVDFADLETLRQQLETSGPAANLQQAFEAMKANGIAGLELRTGEVIVHLTDGRTETIHHTGGAVDDQIDATDRKGA

SEQ ID NO: 60747 - DNA, 50 bp, Mycobacterium shimoidei
  source 1..50: mol_type = genomic DNA
acggtgtaatctcacaccaccgagtacgcgatcggctcggtttacaccgt

SEQ ID NO: 60748 - DNA, 40 bp, Mycobacterium shimoidei
  source 1..40: mol_type = genomic DNA
gggcatgtccaccgtcgaatacgccatcgggaccattgcc

SEQ ID NO: 60749 - DNA, 50 bp, Mycobacterium shimoidei
  source 1..50: mol_type = genomic DNA
acggtgtaatctcacaccaccgagagcgcgatcggctcggtttacaccgt

SEQ ID NO: 60750 - DNA, 40 bp, Mycobacterium shimoidei
  source 1..40: mol_type = genomic DNA
gcgcatctcgcccttcgccagcgacatcaggaccatctcc

SEQ ID NO: 60751 - protein, 548 aa, Mycobacterium kubicae; identical to SEQ ID NO: 38736

SEQ ID NO: 60752 - DNA, 50 bp, Mycobacterium kubicae; identical to SEQ ID NO: 38737
  source 1..50: mol_type = genomic DNA

SEQ ID NO: 60753 - DNA, 40 bp, Mycobacterium kubicae
  source 1..40: mol_type = genomic DNA
aaccccagttcggtgtccgaggggggacttgaacccccac

SEQ ID NO: 60754 - DNA, 50 bp, Mycobacterium kubicae; identical to SEQ ID NO: 38739
  source 1..50: mol_type = genomic DNA

SEQ ID NO: 60755 - DNA, 40 bp, Mycobacterium kubicae
  source 1..40: mol_type = genomic DNA
gacacctggtctgtgtccggggctgggttcgaatccccac

SEQ ID NO: 60756 - protein, 556 aa, Agrobacterium rosae
MKGDGVRRQVEASHAYAATNGLTIDDELTDIGLSGYHGDHVATGALGGFLELVKTGKIDKGSVLIVESLDRLSREDIITAQSQLMSLLAAGVDVVTLIDNQRYSRSASLGDIVLSLVSMARANEESRTKSERAKAKIAQRRTDAMNGKKTFVLNGPSWINQIPIGGGQYRFELNERAQTVRDIFEMYDSGIGAHTISKILNAEKRPVFASRGVFALWRDASIMFFLRSEAAIGTYAIGSDFKVPDYYPRLVPDDVWFRIQDRLSANKTKAAGRRGEKFTNLFQGFAVCHNCGTPIRTIRGGNKNAYAYYACQQKFIGGSGCDQQGRKFIRLEAIEEAILDHVNEYHTDSKNGSVGQRENVAMELDSAKAESAEVAKRITNVRSVLETVDNDDDRLAFMGRLSELRKESERHNHTVAVLEKRLREIDENNQQQVDVNKLILDEIRQWSTMDKDTLYRSRAKINQSLSKIISTVRFDLPAKEAYVFVGGMTKAWRINDQGELTGQLDWSHIPWSVLQTFSKNELGIDKAKLRDAKAINASIEGERLPEELFGKHLTGH

SEQ ID NO: 60757 - DNA, 50 bp, Agrobacterium rosae
  source 1..50: mol_type = genomic DNA
tcgtgattaaaggtactctccagttcgttggagagtaggattgatttgaa

SEQ ID NO: 60758 - DNA, 40 bp, Agrobacterium rosae
  source 1..40: mol_type = genomic DNA
atagcgccacttcgccagctcgtcggaccacgcgaaatga

SEQ ID NO: 60759 - DNA, 50 bp, Agrobacterium rosae
  source 1..50: mol_type = genomic DNA
tcgtgattaaaggtactctccagtccgttggagagtaggattgatttgaa

SEQ ID NO: 60760 - DNA, 40 bp, Agrobacterium rosae
  source 1..40: mol_type = genomic DNA
gcagtcccacttcgccaggccctggggccagttgaaatga

SEQ ID NO: 60761 - protein, 467 aa, Streptomyces cacaoi
MAFLKDVLDWQKLIYVGDDSAFDISTETGRLIAYAKATQAAGELRKIRERAQKSRDYLRRHGLWPGGNLPFGYKPVQIIVGEKIHYKLGQEKTYSKLLRKIREQIVRDKTPIRQIAAQLTSDEILTWKDYEATLPPLPGARKKKREPKGAAWHPSAIAALFKNVACIGWVTYTDKTTGKVRIAELDNGDPVMFTDEPILTEAEREEVLAVIEERGSKPLRARSEVSRESGVGRCGECGEGLTINRVTHRLKSGLKRYERYRCASSTKAIACPEPAYIEKDLLGGFVDSSILTQLGDKQEVRIKKQKGDDPRPELEKYRTRLDRVEKEDEEGLYDDDRESYFKKRKSLLAKIKELEAKPVIPDTVEYEFTGRTFGQKWQGMTSSEQREYLIAHNVVIGAWRSGQIESQRAAFIWFGDLVKAANAMGVEATPSDTPLWGFDRLNLTPEQEQKARELVAETLPEGEKAPF

SEQ ID NO: 60762 - DNA, 50 bp, Streptomyces cacaoi
  source 1..50: mol_type = genomic DNA
attgtgcgtttgcagatcgtcgaccacccgacgatccattaggacacaag

SEQ ID NO: 60763 - DNA, 40 bp, Streptomyces cacaoi
  source 1..40: mol_type = genomic DNA
gcggacccacgtcgtcgaccacccgctggtggcgcacaaa

SEQ ID NO: 60764 - DNA, 50 bp, Streptomyces cacaoi
  source 1..50: mol_type = genomic DNA
attgtgcgtttgcagatcgtcgacaacccgacgatccattaggacacaag

SEQ ID NO: 60765 - DNA, 40 bp, Streptomyces cacaoi
  source 1..40: mol_type = genomic DNA
gctgacccaattcttagaaaaccctttggtggcatgcaaa

SEQ ID NO: 60766 - protein, 550 aa, Brevundimonas diminuta
MSRKPMATTAGVQTRAALYLRVSTGRQAVNDLSIPDQRRQLEAYCESKGWETTAEYVEPGNTATDDRRPSFQSMIEAALTKPPAFDVIVVHSFSRFFRDQFQFEFYVRKLAKNGVRLVSITQELGDDPMSVMMRQIMTLFDEYQSRENAKHTLRAMKENARQGFWNGARPPIGYRVVAAEQRGVKIKKTLEIDPLQAETVRTIYRWALTGDGAQGPMGLKTIATKLNEQNIRTRDGGRWGVGTVHQILTRSTYMGEHRFNTRDHKTRTPKPESEHAIMAVPPIVSKADHDAVRARLASRNPKWTPPRVSTGPNLLTGICFCGFCGGAMTLRTGKGQAGGQYRYYACSTRARMGEAGCTGLAVPMHKLDDAIINHLETRLLDPDRLAALMEQLLDRREEWADQRRGHIAEMRRRATEAEAKLNRLYEAIENGLLAPDDASLKDRVAELSGTRDQARADVERISASVERLAPTITPDALARFATAARRKLRDRTSGYRRDHLRALTQRVEVISKTEARIIGSRTELLRALASSDGGSYAAAGGVLGFKPKWR

SEQ ID NO: 60767 - DNA, 50 bp, Brevundimonas diminuta
  source 1..50: mol_type = genomic DNA
ttctcggttttaaaccgaagtggcgcgccggcgcgcacgaagccgagaac

SEQ ID NO: 60768 - DNA, 40 bp, Brevundimonas diminuta
  source 1..40: mol_type = genomic DNA
catgataaagagagatggcgcacccgaagagattcgaact

SEQ ID NO: 60769 - DNA, 50 bp, Brevundimonas diminuta
  source 1..50: mol_type = genomic DNA
ttctcggttttaaaccgaagtggcgagccggcgcgcacgaagccgagaac

SEQ ID NO: 60770 - DNA, 40 bp, Brevundimonas diminuta
  source 1..40: mol_type = genomic DNA
caaggtaaagagatatagtgatctctaagagattagaaac

SEQ ID NO: 60771 - protein, 484 aa, Fusicatenibacter saccharivorans
MKGVIYARYSSDNQREESIEGQLRECKEYAERNDITILGTYIDRALSAKTDNRPEFQHMIKESAKGLFDVVLVWKLDRFARNRYDSARYKNLLKKNGVKVISARENISEGSEGIILEAMLEGYAEYYSAELSEKVIRGLTDNALKCKYNGGTVPMGYYIDEQQYYQIDPKTAPVVLEMFTKYSEGATMQELVNLLNSRGMRSIRGGKITLNIMNHLLKNRRYMGEYSYRDVVKENGIPAIVPKELFERVQERLAKNKKAPARHKAEDDYLLTTKLYCGKCGSFMVGESGTSHTMKVHRYYRCVNTKKKKLCDKKAVKKDWIEDLVVNYTMKAIMNDEVMERLIDTLMELQKKESTDLPLLKKQLAETEKGINNMLNAIQAGIFTPSTKQRLDELEETKSQLEVSILQEEMHKPLLTREQIAFFIYRFRKFDVTKREQRQRLIDSFVNAVYLYEDKIILTFNYKDGSKTITLAEVEGSDLSVLGA

SEQ ID NO: 60772 - DNA, 50 bp, Fusicatenibacter saccharivorans; identical to SEQ ID NO: 17467
  source 1..50: mol_type = genomic DNA

SEQ ID NO: 60773 - DNA, 40 bp, Fusicatenibacter saccharivorans
  source 1..40: mol_type = genomic DNA
ggttcgagtcccactaaccgcagaaaaatcgttacagttc

SEQ ID NO: 60774 - DNA, 50 bp, Fusicatenibacter saccharivorans
  source 1..50: mol_type = genomic DNA
ggttcggatttatccgtactcggtctaccagataatgataatccgaaccc

SEQ ID NO: 60775 - DNA, 40 bp, Fusicatenibacter saccharivorans
  source 1..40: mol_type = genomic DNA
gctcccagtcccaccaaccctacaaaactccttattcttg

SEQ ID NO: 60776 - protein, 511 aa, Clostridium fessum
MNIAAYCRVSTDKADQLNSLEAQKEFFSEYTKRTGDTLVRLYADEGISGTKIKNRKEFLRMMADAEHGLFDMVVVKDISRFARNTVDLLQNVRKLKSLGIETQFLTANMTSMGNSEFVLTIFGALAQEESANTSKRVKFGKKMNAEKGRVPNIVYGYDKTIGDYFNLAINEEEAAVVRQIYEWYIKDGYGAAKISIFLNERGLRTKRNCQWSQNGVCRILTNELYTGKIINGKQEVTDFLTGQRANKDETEWMVVERPDLRIIEPEVFEQAQQIMQSRGKAFKVDKERQSNKYLFSTLIKCKECGWSFRRTVRTYKNTYVRWVCSGHNGRGADNCPNAVTVDEEELIEVLQEYFAELLKAKKNVIRYVVGEFQRVYKAKDENLNYEKELNAQLAKLQKTRQKYMDMYADDLISREELNDKIGGMRKEIERLENELKMVAYHLTKGEQLESVLGRTFKEIEDITDVHQMTNAQLKRIIQKIEVDKDGNVDIYLRLLGDLGLDETVLIRHDET

SEQ ID NO: 60777 - DNA, 50 bp, Clostridium fessum
  source 1..50: mol_type = genomic DNA
ccgttctaattcgtcacgacgaaacatacagaagtgataaaatggaacgg

SEQ ID NO: 60778 - DNA, 40 bp, Clostridium fessum
  source 1..40: mol_type = genomic DNA
gatcagtaaatctaccgtgcataaagatgtggccgagcgc

SEQ ID NO: 60779 - DNA, 50 bp, Clostridium fessum
  source 1..50: mol_type = genomic DNA
ccgttctaattcgtcacgacgaaacctacagaagtgataaaatggaacgg

SEQ ID NO: 60780 - DNA, 40 bp, Clostridium fessum
  source 1..40: mol_type = genomic DNA
aattgctaaatcaacagggcctaaagatgtgggcgtgtga

SEQ ID NO: 60781 - protein, 544 aa, Burkholderia gladioli
MANFQSGAERAVAYSYVRFSTAKQQLGDSLRRQVAMAEEFCAKNGLELHPVSFRDLGVSAFKRRNLERGALAAFLDAVKTGKVAKGSYLVIEQFDRLSRAETDIALKLLLDLVHSGIKLVTLVDEKIWDKEAVKDIGNLILAIVFMSRANNESAAKADRLSRVWGEKKKAAAASGKIMSRECPRWLEVNEDKSAFVVLEDRAESVRKVFAMRIAGHGVVSIVNRANKEEWPVPGKGETWHISLVGRLLRNRALLGEYQPHKSGSDDRGRVPIGEPVAGYYPAILDEQTFLRVQATRERKAQFPGRRDVNYRNWLQGLLKCTCGQSFVRKNKTSAKQPGYARYYCAARSRGASDCASVGAKEVETAVIYAVSQIAPQFWNGSDRLAELISLVDVQQVNLTAAQQRRDRFLEAIGMADAVIPSLMQRLTAAEAEVVAAETALAATRAEISEMKVDGGDVFENIVKAIANVESLDARAELREDLSRVLLKCVIDAEAGVVHAHVRGESTPILVPLTLNAKIPGAVMGEMTVEQFVAAYGRSPEHFES

SEQ ID NO: 60782 - DNA, 50 bp, Burkholderia gladioli
  source 1..50: mol_type = genomic DNA
tggttcggttagtagttgactatttccatcgtcgggtcataattgcaccg

SEQ ID NO: 60783 - DNA, 40 bp, Burkholderia gladioli
  source 1..40: mol_type = genomic DNA
caatggcctgccctcgttctcgatcgtcggcctgcccgac

SEQ ID NO: 60784 - DNA, 50 bp, Burkholderia gladioli
  source 1..50: mol_type = genomic DNA
tggttcggttagtagttgactattctcatcgtcgggtcataattgcaccg

SEQ ID NO: 60785 - DNA, 40 bp, Burkholderia gladioli
  source 1..40: mol_type = genomic DNA
cagaggcctgctcacgttcctgatcttctgacttagcggc

SEQ ID NO: 60786 - protein, 461 aa, Mycobacterium marinum
MRAGVYLRISEDRSGERLGAARQREDCLALCRAKVWTPTEYLDNDTSATNGKPRPAYERMLADIRDGRIKAVVAWDLDRLHRRPIELEGFMALADEKHLALATVSGDVDLSTAQGRLVARLKGSVAAHETEHKVARQRRAGRQKAATGAPNWSRAFGYLDGTHQPDPAIAPLVKQAYAAILSGASLGDVCRMWNDAGALTVGGHMWRPAEVSKFLRKPRNAGLRTYGHTYGPATRDAVVAKGDWPPLVDEETFWAAQAALDATGRSPGRKSVRRHLLTGMLRCGRCNDGYLAGIPDARKKLTYRCKNCLSLSIRAEHVEPLLYELVAGRLAMPDAVNLLRAEQHDTAEAEKLRTERATLLARLDEIADERADGLLTGKQAQRATDRIQENLAKIEARQQDQERLRVFDGIPLGTAEVAEKIARLSPDRFRAVLDVLMAPVVMPVGKSGKIFNPDRVKPNWR

SEQ ID NO: 60787 - DNA, 50 bp, Mycobacterium marinum
  source 1..50: mol_type = genomic DNA
atgtgttctttaacggttcgatgtcatcaccgaacctttgaagtacacta

SEQ ID NO: 60788 - DNA, 40 bp, Mycobacterium marinum
  source 1..40: mol_type = genomic DNA
gccgcacctcgaccacggacagccaagaaccaacagctac

SEQ ID NO: 60789 - DNA, 50 bp, Mycobacterium marinum
  source 1..50: mol_type = genomic DNA
atgtgttctttaacggttcgatgtagtcaccgaacctttgaagtacacta

SEQ ID NO: 60790 - DNA, 40 bp, Mycobacterium marinum
  source 1..40: mol_type = genomic DNA
gccactccccacccccaggaggcgcagcaccaacagctac

SEQ ID NO: 60791 - protein, 531 aa, Mycobacteroides abscessus
MKPRVLIVVRLSRVTDATTSPERQVTACRELCATRGYEVVGVAEDLDVSASKTTPFDRPQLGRWLADPSKFDVIVFFRVDRIVRRLFDLADLIRWSREHSVTLVSATETHFDLSTDFGDIIALLVAKVAEMELEAISERNASAFRHNIKAGKYRGGMPPWGYMPSRDEESGDWRLVQDPIQVSVIHDVVERVLKGEPLRAIAHDLTAQGIPTPKDRFAQTQGREASGYEWHSAPLKRALTSPTLLGRVVTREPLLDAQGRIQRDTKGRKVFGPETVVVGDDGSPVIRAEPILSREVFDRVGVELSGRENRKEPTKRSSGLLLRVIYCGECGRPAYRLKGGTGRKARYRCASAQYKDPCPNRTIALDWAESELERRILMNLGPLERKRRVWFPGNDHSDELSEVNELLSDLTDQLGTGTFKRGTPQRVRLDERIQSLTKRQEVLAALPQEPAGWRYEATGELFSDWWESQDTEARNIWLRQMNFRVVWKSHAEGVSTVVDEFKLDGDLTMDLDADQLFGPIVDVVAELSNLK

SEQ ID NO: 60792 - DNA, 50 bp, Mycobacteroides abscessus
  source 1..50: mol_type = genomic DNA
ggagtgtaaagctcaactttcgactacgcgctggttgaggattacacccc

SEQ ID NO: 60793 - DNA, 40 bp, Mycobacteroides abscessus; identical to SEQ ID NO: 28373
  source 1..40: mol_type = genomic DNA

SEQ ID NO: 60794 - DNA, 50 bp, Mycobacteroides abscessus
  source 1..50: mol_type = genomic DNA
ggagtgtaaagctcaactttcgactccgcgctggttgaggattacacccc

SEQ ID NO: 60795 - DNA, 40 bp, Mycobacteroides abscessus
  source 1..40: mol_type = genomic DNA
ggtgaagcccacagccacatcctcaaaggacaccaactcc

SEQ ID NO: 60796 - protein, 547 aa, Mycobacteroides abscessus
MMQEMTKKRALICIRLSRVTDATTSPERQRQACEELCKARGYDVVGIAEDLDISAGKTSPFDRPQLGQWLRDPTRYDVIVFMRVDRFVRRLFDLADAIRWSQDHGVTLVSATESHFDLSTKLGGVVALLVASIAEMELDAISERNSSAFKHNFTLGKWRGGQAPWGYVPEKIDGEWRLVQDPAQVEVIHDVVAKVLEGQPLRAVAHELTTRGIPTPRDSFAMHQGREVQGYAWHPSRLKAFLTSQTLLGRVVMREQLKDAQGRPQRDAKGRKIFGDDVLVTNDDGSPVVRAEPILTMSVFKRLCAELEGRENRKEPTKRSTGLLLRIIYCGVCGQAAYRLKGGAGRKPRYRCASAQGSSVHQCENRTISLEWADGEVERQILQNMGPLERKRRVWFSGNDHTDELTEVNDMLEDLVDQLGTGVFKRGTPQRERLDQRIAVLTARQTELSASPRVEPGWVYEGTGETLADWWVEASDQEKNIWLRQYGFKYEWVSHSGDNGRIVVDDFKQVGDLTMDLDADTLLGPVWDIVSAMSDPVNIEAYNALPD

SEQ ID NO: 60797 - DNA, 50 bp, Mycobacteroides abscessus
  source 1..50: mol_type = genomic DNA
ggggtgtaaagcgaaacattcgactacgcaattgaaccggtttcataccc

SEQ ID NO: 60798 - DNA, 40 bp, Mycobacteroides abscessus; identical to SEQ ID NO: 28373
  source 1..40: mol_type = genomic DNA

SEQ ID NO: 60799 - DNA, 50 bp, Mycobacteroides abscessus
  source 1..50: mol_type = genomic DNA
ggggtgtaaagcgaaacattcgactccgcaattgaaccggtttcataccc

SEQ ID NO: 60800 - DNA, 40 bp, Mycobacteroides abscessus; identical to SEQ ID NO: 60795
  source 1..40: mol_type = genomic DNA

SEQ ID NO: 60801 - protein, 504 aa, Mycobacteroides abscessus
MRQQLRAIVGSRVSHLSDQVETTSKVSHLAQRAEGERWAKSRGYEVVGAFEDLGVSAGRTTPFERPDLGKWLAPERLHEWDVLVFSKIDRAFRSTSDCVDFARWAKGNRKIIAFSGDGLVLDYLNPKSDSLDQMMSELFIYIGSFFAQLELNRFKTRATDRISHLRMTDRVSHGVPPLGFRTVPHPSGQGKALARDPEGYALLHEIKGKLLHENYSLTGLVQWLNETGRQTAVAKARKGDAKWSVTSLKRTLTSERTQGLRMSGGKPVLDSQGTPIRMAEPTFTDDEWEQIQQALNQRSTSGRARYMTDNPFAGIVYCICGYAVAQHRRKSSSGKEHTYVRCGQGCRGAWKLADVYEQLDFSFLGGYADQEMTKLVFVPGEDRSEELAGIERSIARLRWESDNDLVDDEDLYQSRMAALLSRKREIGQIVVPARWERQGTGKTYRELWADPETDRRQVMRDARIRLVLHFIPKGSDAPFVTQAHFVDMWNPAEEGKSTWLEAVT

SEQ ID NO: 60802 - DNA, 50 bp, Mycobacteroides abscessus
  source 1..50: mol_type = genomic DNA
gttgtcgtatgtgcggccttcacgttgtactgtgccatacatgagacaac

SEQ ID NO: 60803 - DNA, 40 bp, Mycobacteroides abscessus; identical to SEQ ID NO: 56058
  source 1..40: mol_type = genomic DNA

SEQ ID NO: 60804 - DNA, 50 bp, Mycobacteroides abscessus
  source 1..50: mol_type = genomic DNA
gttgtcgtatgtgcggccttcacggtgtactgtgccatacatgagacaac

SEQ ID NO: 60805 - DNA, 40 bp, Mycobacteroides abscessus
  source 1..40: mol_type = genomic DNA
aggtccggtggccttcacggtgctctgcctcagccggctg

SEQ ID NO: 60806 - protein, 504 aa, Mycobacteroides abscessus
MKQQLRAVVGSRVSHLDDDKATTRKVSHKAQTEEGERWAKSQGYEVVGAFEDLGVSAGKTTPFERPDLGKWLAPERLHEWDVLVFSKIDRAFRSTSDCVDFARWTKENRKILAFSGDGVVLDYLHPKGESLDQMMSEFFIYVGSFFAAIELNRFRTRATDRLSYLRMTDRVSHGVPPLGFRTVPHPSGQGKALERDPEGYALLHEIKDKLLHENYSLTGVVQWLNETGRQTAVAKARKGDAKWSVTSLKRTLTNERTQGLRMSGGKAVLDSQGIPIRMAEPTFNDDEWEQIQQAVNQRSTSGRARYMTDNPFAGIVYCVCGYAVAQHRRKSSSGKEHTYVRCGQGCRGAWKLADVYEQLDFSFLGGYADQEMTKLVFVPGEDRSDELAGIERSIARLRWESDNDLVDDEDLYQSRMAALLSRKREIGQIVVPARWERQGTGKTYRELWADPETDRRQVMRDARIRLVLHFIPKGSDAPFVTQAHFVDMWNPAEEGKSTWLEAVT

SEQ ID NO: 60807 - DNA, 50 bp, Mycobacteroides abscessus
  source 1..50: mol_type = genomic DNA
gttgtcgtatgtgcggccttcacgttgtaccgtgccatacatgaaacaac

SEQ ID NO: 60808 - DNA, 40 bp, Mycobacteroides abscessus; identical to SEQ ID NO: 56058
  source 1..40: mol_type = genomic DNA

SEQ ID NO: 60809 - DNA, 50 bp, Mycobacteroides abscessus
  source 1..50: mol_type = genomic DNA
gttgtcgtatgtgcggccttcacggtgtaccgtgccatacatgaaacaac

SEQ ID NO: 60810 - DNA, 40 bp, Mycobacteroides abscessus; identical to SEQ ID NO: 60805
  source 1..40: mol_type = genomic DNA

SEQ ID NO: 60811 - protein, 532 aa, Mycobacteroides abscessus; identical to SEQ ID NO: 20966

SEQ ID NO: 60812 - DNA, 50 bp, Mycobacteroides abscessus
  source 1..50: mol_type = genomic DNA
gttgtcgtgtgtgcggccttcacgttgtactgtgccatacatgaaacaac

SEQ ID NO: 60813 - DNA, 40 bp, Mycobacteroides abscessus; identical to SEQ ID NO: 56058
  source 1..40: mol_type = genomic DNA

SEQ ID NO: 60814 - DNA, 50 bp, Mycobacteroides abscessus
  source 1..50: mol_type = genomic DNA
gttgtcgtgtgtgcggccttcacggtgtactgtgccatacatgaaacaac

SEQ ID NO: 60815 - DNA, 40 bp, Mycobacteroides abscessus; identical to SEQ ID NO: 60805
  source 1..40: mol_type = genomic DNA

SEQ ID NO: 60816 - protein, 533 aa, Bosea thiooxidans
MHDTTTTKPKAYSYLRFSTAEQSKGDSHRRQLALAEEYCRQKGLELDRTTTFEDLGVSAFSGKNRRKGALRAFLDAVEEEIIPSGSYLLVESLDRVSREAILDAQATFLQIVNAGITLVTLKGTPKEYSRATVNANPVDLLVSLLEMIRANEESETKSQRIKADWSRKRTRAAAGEAITSQIPAWLQRVGKGFEVIEERAAIVRRIYDLTLQGLGQHAIMAMFNKEGLKPFGRAKWWHRSYVRLVLHNPAVVGTFVPHRMVAGRREPLEPIPNYYPAVITPETFEAVRALDKPVAGPTKMFASMFSGLVKCEECGGPMVRTRKGQAPKPFYHVFVCHNAKLGLGCECRTVRQQTLEDMLRSQMFKFIEDAPTHDEDLTEELNRVEEHISITQEQAAMLVDAIAQRPLPQLVDRLALLDAELVEMRARKVELEAAFRDTARPVVMKRLTDLDDLLDKGEGDIRPRAQVLLRQVLDHIVIHFDREASRRKPRGHLEFVWKSGGRSYLDWGPMFYPVKPTTRSSRRSVDDEEPQQA

SEQ ID NO: 60817 - DNA, 50 bp, Bosea thiooxidans
  source 1..50: mol_type = genomic DNA
tcggtgtcattggttgataactggaaccagttgtgttcaaaagacaccga

SEQ ID NO: 60818 - DNA, 40 bp, Bosea thiooxidans
  source 1..40: mol_type = genomic DNA
cgaaggcggcctcgactggaaacccctgtccttgacgccg

SEQ ID NO: 60819 - DNA, 50 bp, Bosea thiooxidans
  source 1..50: mol_type = genomic DNA
tcggtgtcattggttgataactggccccagttgtgttcaaaagacaccga

SEQ ID NO: 60820 - DNA, 40 bp, Bosea thiooxidans
  source 1..40: mol_type = genomic DNA
caaaggacccctccccggcccacccctgctcttgacgccc

SEQ ID NO: 60821 - protein, 560 aa, Burkholderia multivorans
MAKKPKGKVYSYLRFSDPKQAAGSSADRQMEYAARWATEHDMQLDATLTLRDEGLSAFHQRHIKQGALGVFLRAIEDGRIQPGSVLIVEGLDRLSRAEPIQAQAQLAQIINAGITVVTASDGREYNRERLKAQPMDLVYSLLVMIRAHEESDTKSKRVKAAIRRQCEGWVAGTWRGIIRNGKDPHWVRLGEHGKFEHVPERVLAVRTMIDLFREGHGAIEITRRLTEQNLYVSNAGNYSVHMYRIVRNHALIGEKRISVDGEEFRLDGYYPPILTREEFAELQQTMSERGRRKGKGEIPNIITGLSITVCGYCGRAMTTQNSKARAPKGKSVVRRLSCPMNSFNEGCPIGGSCESEIVERALMRYCSDQFNLSRLLEGDDGTARRTAQLAVARQRASDIEAQIQRVTDALLSDDGKAPAAFTRRARELETQLEEQRREIEALEHQIAASSAHGIPAAAEAWAQLVDGVLALDYDARMKARQLVADTFRKIVVYQRGFAPIDDAAADRWKRSGTIGLMLVTKRGGMRLLNVDRRTGCWQAEDDLDPSLIPSDGLPMLPLDA

SEQ ID NO: 60822 - DNA, 50 bp, Burkholderia multivorans
  source 1..50: mol_type = genomic DNA
aatatattttcagacacgctcggcaacccgaacgtgaggcaaaatacatt

SEQ ID NO: 60823 - DNA, 40 bp, Burkholderia multivorans
  source 1..40: mol_type = genomic DNA
cacgctggtcacgctcggcaatccgaagatcatgctgttc

SEQ ID NO: 60824 - DNA, 50 bp, Burkholderia multivorans
  source 1..50: mol_type = genomic DNA
aatatattttcagacacgctcggccccccgaacgtgaggcaaaatacatt

SEQ ID NO: 60825 - DNA, 40 bp, Burkholderia multivorans
  source 1..40: mol_type = genomic DNA
caggctggtgatgctgggccccgtgaaaatgatgtagttc

SEQ ID NO: 60826 - protein, 569 aa, Burkholderia multivorans
MILRTSEPVMAKNPKGKVYSYLRFSDPKQAAGSSADRQMEYAARWAIEHDMQLDASLTLRDEGLSAFHQRHIKQGALGVFLRAIEDGRIQPGSVLIVEGLDRLSRAEPIQAQAQLAQIINAGITVVTASDGREYNRERLKAQPMDLVYSLLVMIRAHEESDTKSKRVKAAIRRQCEGWVAGTWRGIIRNGKDPHWVRLGEHGKFEHVPERVLAVRTMIDLFREGHGAIEITRRLTEQNLYVSNAGNYSVHMYRIVRNHALIGEKRISVDGEEFRLDGYYPPILTREEFAELQQTMSERGRRKGKGEIPNIITGLSITVCGYCGRAMTTQNSKARAPKGKSVVRRLSCPMNSFNEGCPIGGSCESEIVERALMRYCSDQFNLSRLLEGDDGTARRTAQLAVARQRASDIEAQIQRVTDALLSDDGKAPAAFTRRARELETQLEEQRREIEALEHQIAASSAHGIPAAAEAWAQLVDGVLALDYDARMKARQLVADTFRKIVVYQRGFAPIDDAAADRWKRSGTIGLMLVTKRGGMRLLNVDRRTGCWQAEDDLDPSLIPSDGLPMLPLDA

SEQ ID NO: 60827 - DNA, 50 bp, Burkholderia multivorans
  source 1..50: mol_type = genomic DNA
aatatattttcagacacgctcggcaacccgaacgtgagtcaaaatacatt

SEQ ID NO: 60828 - DNA, 40 bp, Burkholderia multivorans; identical to SEQ ID NO: 60823
  source 1..40: mol_type = genomic DNA

SEQ ID NO: 60829 - DNA, 50 bp, Burkholderia multivorans
  source 1..50: mol_type = genomic DNA
aatatattttcagacacgctcggccccccgaacgtgagtcaaaatacatt

SEQ ID NO: 60830 - DNA, 40 bp, Burkholderia multivorans; identical to SEQ ID NO: 60825
  source 1..40: mol_type = genomic DNA

SEQ ID NO: 60831 - protein, 506 aa, Hungatella hathewayi
MNAVIYARYSAGPGQNEQSIEGQLRDCRDYAKKNDITIIDTYIDRHISGTDFENRTEFNRLIKDCERHQFSAVIVWKVDRFGRNREEIAMNKVKMKKHGVKLLYAKEHIPDGPEGIILESLLEGMAEYYSAELSQKVRRGLRESMLKGHALGGNPMLGYKIINKKYVVDPVTSPIVVEIFERYAAGETAKAIATDLNTRGVVNAKGDPFKNNTIYFILRNEKYIGIYRYGDIVVNDVIHPIINMELWGKVQMILEMNSRNRSRSRCTAPEEFLLTGKIFCEYCKRPIIGESGTSRNGASHYYYKCSSRKNKGAKCAKSTFRKTDLENFIVSQTIDNVLHPDTIDYLAKKVVEIQNSDAQELQMQSLRKQLSDVQKGLNNLVNAVEMGIITDTTKERMMALEERKEELKICIAKAEIKRPKLTEEMVEYWLNKFRDQDVDSTEFKIRLINTFVNSIYLHNDYAIIVYNFCDDESGHRAEIRAQLDDALRAKKEDQTCSSDPTQVPAT

SEQ ID NO: 60832 - DNA, 50 bp, Hungatella hathewayi
  source 1..50: mol_type = genomic DNA
cgtctgatcctactcaagtgccggcgaccgtactacagacgaacattatt

SEQ ID NO: 60833 - DNA, 40 bp, Hungatella hathewayi
  source 1..40: mol_type = genomic DNA
gcagcttttttactgccggcgaccggaatcgaaccggtac

SEQ ID NO: 60834 - DNA, 50 bp, Hungatella hathewayi
  source 1..50: mol_type = genomic DNA
cgtctgatcctactcaagtgccggcaaccgtactacagacgaacattatt

SEQ ID NO: 60835 - DNA, 40 bp, Hungatella hathewayi
  source 1..40: mol_type = genomic DNA
tcagcttttttcatgccagcaaatgtgatcaaactgatac

SEQ ID NO: 60836 - protein, 507 aa, Hungatella hathewayi
MNAVIYARYSAGPGQNEQSIEGQLRDCRDYAKKNDITIIDTYIDRHISGTDFENRTEFNRLIKDCERHQFSAVIVWKVDRFGRNREEIAMNKVKMKKHGVKLLYAKEHIPNGPEGIILESLLEGMAEYYSAELSQKVRRGLRESMLKGHALGGNLMLGYKIINKKYVVDPVTSPIVVEIFERYAAGETAKAIATDLNTRGVVNAKGDPFKNNTIYFILRNEKYIGIYRYGDIVVNDVIHPIINMELWGKVQMILEMNSRNRSRSRCTAPEEFLLTGKIFCEYCKRPIIGESGTSRNGASHYYYKCSSRKNKGVKCEKSTVRKTDLENFIISQTIDNVLQPDTIDYLAKKVVEIQNSDAQELQMQSLRKQLSDVQKGLNNLVNAVEMGIITETTKERMMALEERKEELKICIAKAEIKRPKLTEEMVEYWLNKFRDQDVDSTEFKIRLINTFVNSIYLHNDYAIIVYNFCDDESGHRAEIRAQLDDALRAKKEDQTCSSDPTQVPATG

SEQ ID NO: 60837 - DNA, 50 bp, Hungatella hathewayi
  source 1..50: mol_type = genomic DNA
cgtctgatcctactcaagtgccggcgaccggaatacagacgaacatttta

SEQ ID NO: 60838 - DNA, 40 bp, Hungatella hathewayi; identical to SEQ ID NO: 60833
  source 1..40: mol_type = genomic DNA

SEQ ID NO: 60839 - DNA, 50 bp, Hungatella hathewayi
  source 1..50: mol_type = genomic DNA
cgtctgatcctactcaagtgccggcaaccggaatacagacgaacatttta

SEQ ID NO: 60840 - DNA, 40 bp, Hungatella hathewayi; identical to SEQ ID NO: 60835
  source 1..40: mol_type = genomic DNA

SEQ ID NO: 60841 - protein, 557 aa, Nocardia nova
MARPKRKPRTPSLQPARLDSLDHVRVGIYVRRSTDDEHQPYSIEAQDARLESYVDSQPGWHIAMRFADDASGATTDRDNLQRAMRAARTGLIDVLLVYRVDRFSRNLRDMVGLLDDLDQYGVVFRSATEPFDTSTPMGRMLVQMLGMFAQFERDTIIDRVINGMERKAAKGLWKGGRRPVGYLPDPVTHTLIPHPDEAPTVVLIYRLYTRDRLGSRAIAHILNERGHRTTTGGTWSGHQVVRTLSNPVYIGELSFRDITVADCHPPLIDIDSYTEAARLLAERGEDHAHRRANASDYTLTGRMRCPSCGTAMIGTRAHGKTKVYRYYTCHSRSRYDSTRCNGYRLNADEVETAVLHSLATFYRTQHTLITDAVTAAQREHHAGRDAHHAELSAINTKITDTNNKIDRYLTAFENGTMDEQLIGDRLTDLRATGRQLTHRRDELTAALDTAPTGPDPATLTSIADHISELITTGTDHTHKGMIETLIAEVKITSPDTVVPVFRIPQTPTDPHANPGAPHAAVRAPHAMATPNKTAALTSEKPPVRAAEKSVRAMTNLV

SEQ ID NO: 60842 - DNA, 50 bp, Nocardia nova
  source 1..50: mol_type = genomic DNA
tgttcgcgcaatgacaaacttggtgggcctaacgtgccacaacccgaaca

SEQ ID NO: 60843 - DNA, 40 bp, Nocardia nova
  source 1..40: mol_type = genomic DNA
tcctggcccacagatgagtggagctaaggggattcgaacc

SEQ ID NO: 60844 - DNA, 50 bp, Nocardia nova
  source 1..50: mol_type = genomic DNA
tgttcgcgcaatgacaaacttggttcgcctaacgtgccacaacccgaaca

SEQ ID NO: 60845 - DNA, 40 bp, Nocardia nova
  source 1..40: mol_type = genomic DNA
agctgccccactcatgggttcagctgagaggagcccaacc

SEQ ID NO: 60846 - protein, 519 aa, Pseudomonas nitroreducens
MMPTAFSYIRFSSDKQKHGDSYDRQKEKVAEWRAAHPEYSVSDLTFEDLALSGWKGEHLDYGFGRLLAAIKHGDIKEGDAILVEAWDRVGRLETMEMLSELITPILKAGVKIITLSDGQVYDRKAMNGYQAHVLIGHIQAANQYSENLSDRINSAYAKRRAKAKAGSRPVRHTPIWLTKEGELIGDIAVHVAKAFRDYAAGIGERRISRQLRESGHPALASVSATSIKRWIENRTAIGYWGDIKDVYPPVIDATTFYAAQKVKEGKTHNRKSSPSQHILTGLVKCGVCGKNFNVKKRAHSPDVLSCTSRARNGLDGCSNSKSIPKSVLEYIRLRTQDLFIRQALQDSNFRLNSRRLGEIEDDLHNLSQQIKNLVAALALAGEIKEIADKLKGLEEQRTLLENEKGVLLSQSSPSNIQLLANEVDSHNDPMKMNSLLQQVGYQLQCYPDGTITHDAPAGVVLQKKEFKFLGYDRAAKVFKLKLRLKRKEQILMIPLTFDPIGATYTTSENVDVITHSVKS

SEQ ID NO: 60847 - DNA, 50 bp, Pseudomonas nitroreducens
  source 1..50: mol_type = genomic DNA
cgtggtgctttcgtgccgtcattcgagaagagtggtacgattacaccacg

SEQ ID NO: 60848 - DNA, 40 bp, Pseudomonas nitroreducens
  source 1..40: mol_type = genomic DNA
cgtggcgcatgcgcccttcgagcatgtaggtgacggtctc

SEQ ID NO: 60849 - DNA, 50 bp, Pseudomonas nitroreducens
  source 1..50: mol_type = genomic DNA
cgtggtgctttcgtgccgtcattcccgaagagtggtacgattacaccacg

SEQ ID NO: 60850 - DNA, 40 bp, Pseudomonas nitroreducens
  source 1..40: mol_type = genomic DNA
cgtggttcatggtcccttccctctagtagcttacaatctc

SEQ ID NO: 60851 - protein, 478 aa, Brevibacterium casei
MVELVSLRKTNEVAAYVRASMDRKGDRWTVETQLRKIRALAEAKDWEVVEVYDDNAVSATKKRRAGTRWAEMLDDARAGRFSMVVAVDMDRLLRSTKDLNTLIDLGLRVVTVDGEIDLSTADGEFRATMLAALARFEARRKAERQIRSNERRRAEGIPASTWKAFGWTREGELIEEEADAVRRAFDAFLGEPSLSIRRIREDLNSAGHLTARGSEFSVDAVRYLLANPLYAGYIKHYASGELYPVQGEAFPPIVGEQTWRAAVAKLEDNVRRSARQGNQPKYLLSTIGLCGKCGATLVSGTNSRKQPTYRCGEQFHLTRQREPVDAMVTEAVLTRLSSVDVHDLVMPQEDDGPDREELLTERNALVERVKELSPLLLDVRQPVLEITEAIRGGKVRIDEIDAELLDRSVSVAAKLLADVDEPLGTMERREVVESKWKALDMDRRRMLVDELVTVTIEPIAPGHVKFDHALIRIEPRRD

SEQ ID NO: 60852 - DNA, 50 bp, Brevibacterium casei
  source 1..50: mol_type = genomic DNA
cagtgttacaacccagacgtgcgctagcgcatgtcgcggttgcgacaccc

SEQ ID NO: 60853 - DNA, 40 bp, Brevibacterium casei
  source 1..40: mol_type = genomic DNA
gaggtagagggggttctcataccgcatgtcgatgacgccg

SEQ ID NO: 60854 - DNA, 50 bp, Brevibacterium casei
  source 1..50: mol_type = genomic DNA
cagtgttacaacccagacgtgcgcaagcgcatgtcgcggttgcgacaccc

SEQ ID NO: 60855 - DNA, 40 bp, Brevibacterium casei
  source 1..40: mol_type = genomic DNA
gaggtggagggactgcttgaacctcaggacgacgacgctg

SEQ ID NO: 60856 - protein, 481 aa, Paenibacillus riograndensis
MKVDGTTSSGLRVAIYTRVSTDHQAEEGFSMEVQHEKLMEYINRNKLMLFKFYSDPGVSAKNLNRPGIKELLRDFDDDLFDIILVHKLDRLTRNIGDLHNLVEMINDRKKKLISYTEDIDTSTPAGRMFVYFLGVIAQMYRENLGEEVTKGMRKRVEKGMHNISVDLYGYTRDTNGDLMIKEEEAQWVRWAFEHYVSGMGSTEISIQLNNMGIIRNRGGRWEQSNVIKMLENMHYIGKVHCKFKRDDDTTISEGKHEPIITDDLFEKAQRVLQRRRDGMISNNSYEYVFGGIVKCGVCGATYTGRYSINRSPSRKVNRHYVCSNNVKHKTCHQAGISEIKLAKLLFDSIQLIGKNYTRKDMPKKERSEYDEIQKAIKASEDRRERWQLAYGDGNMPYEDFSKRMRAEMERIQELEKKLSTIPQQVVSYLTPESAATQINDLKYNWNYLDQNTKKEIMQSLFQQIVILKTGDSWEISKLTLA

SEQ ID NO: 60857 - DNA, 50 bp, Paenibacillus riograndensis
  source 1..50: mol_type = genomic DNA
gactgtacttacgtagtgatgggccagcccgcataaacgtaggtacggtt

SEQ ID NO: 60858 - DNA, 40 bp, Paenibacillus riograndensis
  source 1..40: mol_type = genomic DNA
gacgcaccccgctgcaattcagccggtcattggcactgta

SEQ ID NO: 60859 - DNA, 50 bp, Paenibacillus riograndensis
  source 1..50: mol_type = genomic DNA
gactgtacttacgtagtgatgggcttgcccgcataaacgtaggtacggtt

SEQ ID NO: 60860 - DNA, 40 bp, Paenibacillus riograndensis
  source 1..40: mol_type = genomic DNA
cacacacccctatgcaattttattggtctttagcaatgca

SEQ ID NO: 60861 - protein, 554 aa, Brevibacterium aurantiacum; identical to SEQ ID NO: 47521

SEQ ID NO: 60862 - DNA, 50 bp, Brevibacterium aurantiacum; identical to SEQ ID NO: 47522
  source 1..50: mol_type = genomic DNA

SEQ ID NO: 60863 - DNA, 40 bp, Brevibacterium aurantiacum
  source 1..40: mol_type = genomic DNA
tatgcgaaaccattctgtggagcttaggggaatcgaaccc

SEQ ID NO: 60864 - DNA, 50 bp, Brevibacterium aurantiacum
  source 1..50: mol_type = genomic DNA
ggtttgaacaacgaccttctggtggtcctccgtagcagcttctcaaaccc

SEQ ID NO: 60865 - DNA, 40 bp, Brevibacterium aurantiacum
  source 1..40: mol_type = genomic DNA
tatgccaaagcatacaatggtgcttcttggaatggagacc

SEQ ID NO: 60866 - protein, 522 aa, Mycobacteroides immunogenum
MTALQVRAIIGARVSIFTDGKESQITQRTKGTAYAESQGWTVVGTFEDLDVSAIKQSPWDRPDLKQWLTDRADDWDALVFAKTDRVFRSAADCVKLSEWCRDHKKILVLVDDGIKLDYFHPDSQQDAFAGAMSKVFLILASVFAEIEGQRFVQRALDRVTQYRHQPRWAYGVPPYGFQVVDRPEGGKTLGHDLEAQQVLQGIATRLLSGDSLTRITADLNDTGVLSPADRLRQRTGKELRGSRWTVITVQTILTNPATQGVKTAKGKPVLDAGGEPVRIGPPSFDSETWGRIHSELAQRSQSGQQRRHSDNPLLGVAKCGACGKNMRHFQRTKGGRHYRYYICGSTPKACPGVLINADNAELAVETSFLDVHTNRRIKERVWRAGSDHSAELEQTTNTIKALWEDRALGLFTTPEDQDMFRQQMAALVAKRDALALTPVIKAGWVDVETEQTYGAVWPDATPVERRKMLTDAGMKLTVYRANEYKTYVDLDKAIGEGAVGEDLHNELEARAADERRRWGIPD

SEQ ID NO: 60867 - DNA, 50 bp, Mycobacteroides immunogenum
  source 1..50: mol_type = genomic DNA
gcactacggagtgtgtataagtacgaatactgctatacactccgcaaata

SEQ ID NO: 60868 - DNA, 40 bp, Mycobacteroides immunogenum
  source 1..40: mol_type = genomic DNA
ggactcggtgtgggtctacgaccactttcacaccgtgccc

SEQ ID NO: 60869 - DNA, 50 bp, Mycobacteroides immunogenum
  source 1..50: mol_type = genomic DNA
gcactacggagtgtgtataagtacgtatactgctatacactccgcaaata

SEQ ID NO: 60870 - DNA, 40 bp, Mycobacteroides immunogenum
  source 1..40: mol_type = genomic DNA
ggcctcacttagggtggccgtccacttttccaccttgccc

SEQ ID NO: 60871 - protein, 538 aa, Streptococcus suis; identical to SEQ ID NO: 47476

SEQ ID NO: 60872 - DNA, 50 bp, Streptococcus suis; identical to SEQ ID NO: 42097
  source 1..50: mol_type = genomic DNA

SEQ ID NO: 60873 - DNA, 40 bp, Streptococcus suis
  source 1..40: mol_type = genomic DNA
tcctcacacagcacggaccgaggcggttgttaaactaaac

SEQ ID NO: 60874 - DNA, 50 bp, Streptococcus suis; identical to SEQ ID NO: 42097
  source 1..50: mol_type = genomic DNA

SEQ ID NO: 60875 - DNA, 40 bp, Streptococcus suis
  source 1..40: mol_type = genomic DNA
tcctcataccacactgagagaggtagattctaaactaaac

SEQ ID NO: 60876 - protein, 536 aa, Streptococcus suis
MQVEGFSLDAQETRIHQYANAFDIEIVKTYQDAGKSGKTMLGRTEFMNMISDIEAEKDKVDYVLVFKLSRFGRNAADTLKSLAIMESHGVNLICVDDGLDSSKDSGKLVITILSAVAEMERENIISQAMEGRRQKARAGQWNGGFAPVGYSLVNGQLQVNHEEAESVKMIFDLFANSDMGTIAIAKHLANLDIKKPIRHNSTLPYFSSSGIARILDNPVYNGKIAFGRRESTRDKISGETKVTQSENYILTDGIHEAIIDDETWKKVRKKREANAHKYKRENPNKGDSIYILSGLIKCPLCNAGLYGNKSIKRNKNKKDEYYKNYYYYACKHRKHVDGHKCTFNKQLKTGNLDHEVLSIISKLVSRPGFAKKLQEKINIQVDTSRIDSEIEQYKSLFRQLNATKMNLIQQIDTLNFEVPHFQQKSIDLDMRLNTIYDKIADVETLIETSESKREVILKDKMTADNIYKILVNFASLMDVMEDIDKKRLCQMLIEKIEIYDEKNEAGRWVKAIHFKLPIIEEDLEISLDNSTPVEAV

SEQ ID NO: 60877 - DNA, 50 bp, Streptococcus suis; identical to SEQ ID NO: 42092
  source 1..50: mol_type = genomic DNA

SEQ ID NO: 60878 - DNA, 40 bp, Streptococcus suis; identical to SEQ ID NO: 60873
  source 1..40: mol_type = genomic DNA

SEQ ID NO: 60879 - DNA, 50 bp, Streptococcus suis; identical to SEQ ID NO: 42092
  source 1..50: mol_type = genomic DNA

SEQ ID NO: 60880 - DNA, 40 bp, Streptococcus suis; identical to SEQ ID NO: 60875
  source 1..40: mol_type = genomic DNA

SEQ ID NO: 60881 - protein, 536 aa, Streptococcus suis
MQVEGFSLDAQETRIHQYANAFDIEIVKTYQDAGKSGKTMLGRTEFMAMISDIEAEKDKVDYVLVFKLSRFGRNAADTLKSLAIMESHGVNLICVDDGLDSSKDSGKLVITILSAVAEMERENIISQAMEGRRQKARAGQWNGGFAPVGYSLVNGQLQVNHEEAESVKMIFDLFANSDMGTIAIAKHLANLDIKKPIRHNSTLPYFSSSGIARILDNPVYNGKIAFGRRESTRDKISGETKVTQSENYILTDGIHEAIIDDETWKKVRKKREANAHKYKRENPSKNDSIYVLSGLIKCPLCNAGLYGNKSIKRNKNKKDEYYKNYYYYACKHRKHVDGHKCTFNKQLKTGNLDHEVLSIISKLVSRPDFARKLQEKINIQVDTSRIDSEIEQYKSLFRQLNATKLNLIQQIDSLNFEDPHFQQKSIDLDIRLNTIYDKLADVEMLIETSESKREVILKDKMTADNIYKILVNFASFMDVMEDIDKKRLCQMLIEKVEIYDDKNKAGCWVKAIHFKLPIIEEDLEISLDNSTPVEAV

SEQ ID NO: 60882 - DNA, 50 bp, Streptococcus suis; identical to SEQ ID NO: 42092
  source 1..50: mol_type = genomic DNA

SEQ ID NO: 60883 - DNA, 40 bp, Streptococcus suis
  source 1..40: mol_type = genomic DNA
tccccatacagcacggaccgaggcggttgttaaactaaac

SEQ ID NO: 60884 - DNA, 50 bp, Streptococcus suis; identical to SEQ ID NO: 42092
  source 1..50: mol_type = genomic DNA

SEQ ID NO: 60885 - DNA, 40 bp, Streptococcus suis; identical to SEQ ID NO: 60875
  source 1..40: mol_type = genomic DNA

SEQ ID NO: 60886 - protein, 539 aa, Clostridium jeddahense
MNDQKRVCCLYRVSTLGQVEKDDIPMQKQSCHEFCERNGWQIVKEFSEKGVSGFKVSAKDRDAIQEIQREALLGSFDILLVFMFDRLGRKDDETPFVVEWFAKNGIEVWSAMEGQQRFDTHVDKLMNYLRYWQASGESEKTSVRTKTRLAQIVQEGRFRGGIAPYGYRLEKQGRMSKKNREVNEILVDEDEAKLVRLIFQKYVNEGYGAQRLSRFLYEEGYRNRKGTNFANTTIIKMLKNIMYTGVLRSGESQSEVFRHLQIIEPELYDRAQALMEGRTQKHNDVPLNSKGSALLSGLVYCAHCGSKLVLTTSGDSRDRKNRRIRARYCCHNKVRHPQDCDGQSGYGVTKLDALIDSMMILLFSQVKNISRSQILTQQRWREMGERNSALSQVQKQLEAKEKELTTYKAEVYKSISGESRFDAELLNELIGTCKVDIEQLTCQRTAIKAELADLEGEANRLQKDYNDMISWAHIYATASREQKKMILYQLIHRVEIGRDYKINVQFNISYRQYQQLFFGAEHADIRDANVPETPQKMLG

SEQ ID NO: 60887 - DNA, 50 bp, Clostridium jeddahense
  source 1..50: mol_type = genomic DNA
gggcataaaaccgaacaccttgcgctcgcgaagtggttggttatatgccc

SEQ ID NO: 60888 - DNA, 40 bp, Clostridium jeddahense
  source 1..40: mol_type = genomic DNA
gcgttgcgaacgcggcgctctcccagctgagctacgagcc

SEQ ID NO: 60889 - DNA, 50 bp, Clostridium jeddahense
  source 1..50: mol_type = genomic DNA
gggcataaaaccgaacaccttgcggccgcgaagtggttggttatatgccc

SEQ ID NO: 60890 - DNA, 40 bp, Clostridium jeddahense
  source 1..40: mol_type = genomic DNA
gcgctgcgggcgcggggctgccccgggagggctctgggcc

SEQ ID NO: 60891 - protein, 618 aa, Emergencia timonensis; identical to SEQ ID NO: 11111

SEQ ID NO: 60892 - DNA, 50 bp, Emergencia timonensis; identical to SEQ ID NO: 11112
  source 1..50: mol_type = genomic DNA

SEQ ID NO: 60893 - DNA, 40 bp, Emergencia timonensis
  source 1..40: mol_type = genomic DNA
ttgtccgtggcgtccgtctgacttagtacagcggcaaggg

SEQ ID NO: 60894 - DNA, 50 bp, Emergencia timonensis; identical to SEQ ID NO: 13229
  source 1..50: mol_type = genomic DNA

SEQ ID NO: 60895 - DNA, 40 bp, Emergencia timonensis
  source 1..40: mol_type = genomic DNA
gtgacattgcagtacgtatggcttaatacagcaacaaggg

SEQ ID NO: 60896 - protein, 472 aa, Mycobacteroides abscessus
MRVLGRVRLSRLTEESTSVDRQRELIEKWSEMNDHTIVGWAEDVDVSGSIDPFEAPQLGPWFQEDKRGDWDILVAWKLDRIGRRAIPLNKVFGWMLEHEKTLVCVSDNIDLSTWVGRLVANVIAGVAEGELEAIRERTKASRKKLLESGRWTGGPVPYWLIPEKLPEGGWVLSLNTETAPILRRAIDEVLDGTAVHTVAERLNDQGVPSPGGKKWTSQTLWRILQHKYLKGHSTDRGKTVRDSSGVPISNCEALLTPSEWDRLQAVLTQWKLPETSNRVKNTSPLLGVVVCYICDKPLYYRSYTRNYGKGLYRSYYCRNHRTPGIKADMLDEYLEENLMREVGDKNVLERYFVPAENHQIELDEAIRATEELTALLGTMTSATMRSSLTAQLAALDSRIASLEKLPTSESRWEYRELPRTYREMWESDDDPQFRRELLLKSGITLAATMTGGQKLHLHIPDDILERMALKGE

SEQ ID NO: 60897 - DNA, 50 bp, Mycobacteroides abscessus
  source 1..50: mol_type = genomic DNA
catctagaatagttactatacgacttctcatgtgggaagcattgtagact

SEQ ID NO: 60898 - DNA, 40 bp, Mycobacteroides abscessus; identical to SEQ ID NO: 54533
  source 1..40: mol_type = genomic DNA

SEQ ID NO: 60899 - DNA, 50 bp, Mycobacteroides abscessus
  source 1..50: mol_type = genomic DNA
catctagaatagttactatacgactactcatgtgggaagcattgtagact

SEQ ID NO: 60900 - DNA, 40 bp, Mycobacteroides abscessus
  source 1..40: mol_type = genomic DNA
cagtgagagcacctacgactagggagcggccgagcagagg

SEQ ID NO: 60901 - protein, 473 aa, Mycobacteroides abscessus
MRVLGRVRLSRLTEESTSVERQRELIKKWSEMNDHTIVGWAEDVDVSGSIDPFEAPELGPWFQEDKRGDWDILVAWKLDRIGRRAIPLNKVFGWMLEHEKTLVCVSDNIDLSTWVGRLVANVIAGVAEGELEAIRERTKASRKKLLESGRWTGGPVPYWLIPEKLPEGGWVLSLNTETAPVLRRAIDEVLDGTAVHTVAERLNDQGVPSPGGKKWTSQTLWRILQHKYLKGHSTDRGKTVRDSSGVPISNCEALLTPSEWDRLQAVLAQWKLPETSNRVKNTSPLLGVVVCYICDKPLYYRSYTRNYGKGLYRSYYCRTHRTPGIDADMLEAFVEERFLEELGDVNVRERLFIPAENHQIELDEAVRAVEELTSLLGTVTSTTMRSSLMAQLTALDSRISVLEKLPTSESRWELRELDRTYGDVWRSNDDPQARRRFLVGSEIVIAATLLGGQQMEIRLPPDLLEILARKGIT

SEQ ID NO: 60902 - DNA, 50 bp, Mycobacteroides abscessus
  source 1..50: mol_type = genomic DNA
cgtctagaatagttactatacgacttatcatgtgggaatcattgtagact

SEQ ID NO: 60903 - DNA, 40 bp, Mycobacteroides abscessus; identical to SEQ ID NO: 54533
  source 1..40: mol_type = genomic DNA

SEQ ID NO: 60904 - DNA, 50 bp, Mycobacteroides abscessus
  source 1..50: mol_type = genomic DNA
cgtctagaatagttactatacgactaatcatgtgggaatcattgtagact

SEQ ID NO: 60905 - DNA, 40 bp, Mycobacteroides abscessus; identical to SEQ ID NO: 60900
  source 1..40: mol_type = genomic DNA

SEQ ID NO: 60906 - protein, 472 aa, Mycobacteroides abscessus
MRVLGRVRLSRLTEESTSVDRQRELIEKWSEMNDHTIVGWAEDVDVSGSIDPFEAPELGPWFQEDKRGDWDILVAWKLDRIGRRAIPLNKVFGWMLEHEKTLVCVSDNIDLSTWVGRLVANVIAGVAEGELEAIRERTKASRKKLLESGRWTGGPVPYWLIPEKLPEGGWVLSLNTETAPILRRAIDEVLDGTAVHTVAERLNDQGVPSPGGKKWTSQTLWRILQHKYLKGHSTDRGKTVRDSSGVPISNCEALLTPSEWDRLQAVLTQWKLPETSNRVKNTSPLLGVVVCYICDKPLYYRSYTRNYGKGLYRSYYCRNHRTPGIKADMLDEYLEENLMREVGDKNVLERYFVPAENHQIELDEAIRATEELTALLGTMTSATMRSSLTAQLAALDSRIASLEKLPTSESRWEYRELPRTYREMWESDDDPQFRRELLLKSGITLAATMTGGQKLHLHIPDDILERMALKGE

SEQ ID NO: 60907 - DNA, 50 bp, Mycobacteroides abscessus; identical to SEQ ID NO: 60897
  source 1..50: mol_type = genomic DNA

SEQ ID NO: 60908 - DNA, 40 bp, Mycobacteroides abscessus; identical to SEQ ID NO: 54533
  source 1..40: mol_type = genomic DNA

SEQ ID NO: 60909 - DNA, 50 bp, Mycobacteroides abscessus; identical to SEQ ID NO: 60899
  source 1..50: mol_type = genomic DNA

SEQ ID NO: 60910 - DNA, 40 bp, Mycobacteroides abscessus; identical to SEQ ID NO: 60900
  source 1..40: mol_type = genomic DNA

SEQ ID NO: 60911 - protein, 472 aa, Mycobacteroides abscessus
MRVLGRVRLSRLTEESTSVERQRELIKKWSEMNDHTIVGWAEDIDVSGSVDPFEAPQLGPWFKEDKRGDWDVLVAWKLDRIGRRAIPLNKVFGWMLEHEKTLVCVSDNIDLSTWVGRLVANVIAGVAEGELEAIRERTKASRKKLLESGRWTGGPVPYWLIPEKLPEGGWVLSLNTETAPVLRRAIDEVLDGTAVHTVAERLNDQGVPSPGGKKWTSQTLWRILQHKYLKGHSTDRGKTVRDSSGVPISNCEALLTPSEWDRLQAVLAQWKLPETSNRVKNTSPLLGVVVCYICDKPLYYRSYTRNYGKGLYRSYYCRNHRTPGIKADMLDEYLEENLMREVGDKNVLERYFVPAENHQIELDEAIRATEELTALLGTMTSATMRSSLTAQLAALDSRIASLEKLPTSESRWEYRELPRTYREMWESDDDPQFRRELLLKSGITLAATMTGGQKLHLHIPDDILERMALKGE

SEQ ID NO: 60912 - DNA, 50 bp, Mycobacteroides abscessus
  source 1..50: mol_type = genomic DNA
cgtctagaatagttactatacgacttctcatgtgggaattattgtagact

SEQ ID NO: 60913 - DNA, 40 bp, Mycobacteroides abscessus; identical to SEQ ID NO: 54533
  source 1..40: mol_type = genomic DNA

SEQ ID NO: 60914 - DNA, 50 bp, Mycobacteroides abscessus
  source 1..50: mol_type = genomic DNA
cgtctagaatagttactatacgactactcatgtgggaattattgtagact

SEQ ID NO: 60915 - DNA, 40 bp, Mycobacteroides abscessus; identical to SEQ ID NO: 60900
  source 1..40: mol_type = genomic DNA

SEQ ID NO: 60916 - protein, 473 aa, Mycobacteroides abscessus
MRVLGRVRLSRLTEESTSVERQRELIKKWSEMNDHTIVGWAEDVDVSGSIDPFEAPQLGPWFQEDKRGDWDILVAWKLDRIGRRAIPLNKVFGWMLEHEKTLVCVSDNIDLSTWVGRLVANVIAGVAEGELEAIRERTKASRKKLLESGRWTGGPVPYWLIPEKLPEGGWVLSLNTETAPILRRAIDEVLDGAAVHTVAERLNDQGVPSPGGKKWTSQTLWRILQHKYLKGHSTDRGKTVRDSSGVPISNCEALLTPSEWDRLQAVLAQWKLPETSNRVKNTSPLLGVVVCYICDKPLYYRSYTRNYGKGLYRSYYCRTHRTPGIDADMLEAFVEERFLEELGDVNVRERLFIPAENHQIELDEAVRAVEELTSLLGTVTSTTMRSSLMAQLTALDSRISVLEKLPTSESRWELRELDRTYGDVWRSNDDPQARRRFLVGSEIVIAATLLGGQQMEIRLPPDLLEILARKGIT

SEQ ID NO: 60917 - DNA, 50 bp, Mycobacteroides abscessus; identical to SEQ ID NO: 60897
  source 1..50: mol_type = genomic DNA

SEQ ID NO: 60918 - DNA, 40 bp, Mycobacteroides abscessus; identical to SEQ ID NO: 54533
  source 1..40: mol_type = genomic DNA

SEQ ID NO: 60919 - DNA, 50 bp, Mycobacteroides abscessus; identical to SEQ ID NO: 60899
  source 1..50: mol_type = genomic DNA

SEQ ID NO: 60920 - DNA, 40 bp, Mycobacteroides abscessus; identical to SEQ ID NO: 60900
  source 1..40: mol_type = genomic DNA

SEQ ID NO: 60921 - protein, 532 aa, Vibrio fluvialis
MKAGAKIYLYFRYSDMKQENGDSIRRQRECAQRVADKYKLEIDEESVITDRGVSAFYGNNAKKGNLAGFLKSVEQGEIEKDSILIVESFDRLSRDAPRDAHKLFDKLIDNDITIITENDGLEYNKETLAREPSRLFMMIGTMLRAHEESLTKQKRAIESIKGKVKEFRESGNVKSIGTVPHWLDYIDGSYVLNSRAENVKLIIDMYLNNEGLKSISRKLAEKGIKSPTGKDRWGITTIRTILDNKALYGFKEFEISYLVNGRKVKENFELESFYPPLISKVDYLVIQEKKNARSNSRESYGEVTYLLSSYGKGKSVCAKCGYATGTQTQKQINRKGKYMQSVMRLHCKKHSESGDCCKSFKCAELEKHFIYSIYHELDPDFLMNYKSKKINKEGLKAEISEIDRQIKLLVNSMIELNNADLTSVFQEKLHDLNKKKIELSNELNKTNDIKNDSDFKELKTLALKCLDVKNSVERKKFKNLIIQVLDKIVIDFETKSLSIKFINGNVMNVYFDEKSKSYCTSLFRSKIIRRKS

SEQ ID NO: 60922 - DNA, 50 bp, Vibrio fluvialis
  source 1..50: mol_type = genomic DNA
gcagtagacattgtagattggtgttcgcaccaatttacaatcttaactgc

SEQ ID NO: 60923 - DNA, 40 bp, Vibrio fluvialis; identical to SEQ ID NO: 28608
  source 1..40: mol_type = genomic DNA

SEQ ID NO: 60924 - DNA, 50 bp, Vibrio fluvialis
  source 1..50: mol_type = genomic DNA
gcagtagacattgtagattggtgtttgcaccaatttacaatcttaactgc

SEQ ID NO: 60925 - DNA, 40 bp, Vibrio fluvialis
  source 1..40: mol_type = genomic DNA
gaagttgcaaatacatttgtttgttcaatgaatgtcctga

SEQ ID NO: 60926 - protein, 619 aa, Hungatella hathewayi; identical to SEQ ID NO: 40101

SEQ ID NO: 60927 - DNA, 50 bp, Hungatella hathewayi; identical to SEQ ID NO: 11112
  source 1..50: mol_type = genomic DNA

SEQ ID NO: 60928 - DNA, 40 bp, Hungatella hathewayi
  source 1..40: mol_type = genomic DNA
ttgtccgtggcgtccgggagaccttgcccagcgcaagggg

SEQ ID NO: 60929 - DNA, 50 bp, Hungatella hathewayi; identical to SEQ ID NO: 11114
  source 1..50: mol_type = genomic DNA

SEQ ID NO: 60930 - DNA, 40 bp, Hungatella hathewayi
  source 1..40: mol_type = genomic DNA
ctgtccttggtgtcaggaaagcatggcccagggcctggtg

SEQ ID NO: 60931 - protein, 500 aa, Bacillus safensis
MKAIYVRVSTEEQAIKGSSIDSQIEACVKKAGTTNVLKYADEGFSGELLERPALNRLREDARKGLITELICYDPDRLSRKLMNQLIIDDELRKKGIVLTFVNGDYADSPEGQLFFSMRGAISEFEKAKIKERTSTGRLQKIKKGIIIKDPSLLGYRMNKEKRTLEIIEEEAKVVRMIFDLFTDHSSHFFNRVNGIALHLTKLGIPTKRGAKVWHRQVVRQILMNPSYKGKYEQYKYDTEGSYVSKQAGGPAIMKLRPEEERYVTEIPSVVSDEQWEYAQELLGKSRRKQLQYGTHPYLLSGLVRCGICGNTMTGKKRKSHGEDFYVYECRKNYAGAKSRGCGKSMSENKLNRIVWDEIYKFITNPEKYRVYKEEEKATHKADELELIQKEIEKAKKGRQRLITLISLSEEDDLDIEEVKTQIVELQKKQNHLMIQHDKIEKEIKESEGSAAGENAMKRALDYLSSVNADNLKLEDKKAIINFIVEEIFIVDSETIHIKTH

SEQ ID NO: 60932 - DNA, 50 bp, Bacillus safensis; identical to SEQ ID NO: 43682
  source 1..50: mol_type = genomic DNA

SEQ ID NO: 60933 - DNA, 40 bp, Bacillus safensis
  source 1..40: mol_type = genomic DNA
gcgtaaatgcatgagaatttcattttcaatacaccgcgcc

SEQ ID NO: 60934 - DNA, 50 bp, Bacillus safensis
  source 1..50: mol_type = genomic DNA
caccccccttttgtcattaatatcaaattattaatgtcaaaaggggggtg

SEQ ID NO: 60935 - DNA, 40 bp, Bacillus safensis
  source 1..40: mol_type = genomic DNA
tcattcatccattagaattaaatttttaaaacacagagac

SEQ ID NO: 60936 - protein, 543 aa, Pseudomonas aeruginosa; identical to SEQ ID NO: 58166

SEQ ID NO: 60937 - DNA, 50 bp, Pseudomonas aeruginosa
  source 1..50: mol_type = genomic DNA
ggtttacttttctattcgttggggcaccctaacgaaacccatcctatact

SEQ ID NO: 60938 - DNA, 40 bp, Pseudomonas aeruginosa; identical to SEQ ID NO: 54108
  source 1..40: mol_type = genomic DNA

SEQ ID NO: 60939 - DNA, 50 bp, Pseudomonas aeruginosa
  source 1..50: mol_type = genomic DNA
ggtttacttttctattcgttggggatccctaacgaaacccatcctatact

SEQ ID NO: 60940 - DNA, 40 bp, Pseudomonas aeruginosa; identical to SEQ ID NO: 10480
  source 1..40: mol_type = genomic DNA

SEQ ID NO: 60941 - protein, 543 aa, Pseudomonas aeruginosa; identical to SEQ ID NO: 58141

SEQ ID NO: 60942 - DNA, 50 bp, Pseudomonas aeruginosa
  source 1..50: mol_type = genomic DNA
agtttacttttgcaatcattggggcaccctaacgaaacccatcctatact

SEQ ID NO: 60943 - DNA, 40 bp, Pseudomonas aeruginosa; identical to SEQ ID NO: 54108
  source 1..40: mol_type = genomic DNA

SEQ ID NO: 60944 - DNA, 50 bp, Pseudomonas aeruginosa
  source 1..50: mol_type = genomic DNA
agtttacttttgcaatcattggggatccctaacgaaacccatcctatact

SEQ ID NO: 60945 - DNA, 40 bp, Pseudomonas aeruginosa; identical to SEQ ID NO: 10480
  source 1..40: mol_type = genomic DNA

SEQ ID NO: 60946 - protein, 541 aa, Pseudomonas aeruginosa
MGKNGARVYSYLRFSDPRQATGSSADRQLAYASAWASKHGMELDATLTLRDEGLSAYHETHVKQGALGAFLRAVDEGRIPAGSVLIVEGLDRLSRAEPLLAQAQLGQIVNAGITVVTASDGREYNREGLKAEPMNLVYSLLVMIRAHEESDTKSKRVKAAVRRQCEAWVAGSYRGRIVSGKDPQWLAWDGDSWQFIPERVEAVRFALDAYRSGIGAARLVRLMHEKGMVLSDWGIAAQQVYRLVRLPALRGAKRISIDGEDFMLEDYYPRLLSDEEFSELETLVGQRYRRRGKDEIVGIVTGIGITRCGYCGTALVAQNLMQRVKADGSLEDGHRRLHCVSYSKNGGCNGGSCSSVPIERAVLAYCSDQMNLQRLLEPSSAGEDLRPRLVEAQKGVTEIERQLERVTDALLADDSGAAPMAFVRKARELEEDLERRRSAVRALEQELVTKSASTPAAGASKWAELAERAKSMTDVEAREQARQLVMDTFETLVVYMRGVMPTPKGRYIDLMMRSRAGQTRWLRVDRRSGVWRESGDYSRRL

SEQ ID NO: 60947 - DNA, 50 bp, Pseudomonas aeruginosa; identical to SEQ ID NO: 60937
  source 1..50: mol_type = genomic DNA

SEQ ID NO: 60948 - DNA, 40 bp, Pseudomonas aeruginosa; identical to SEQ ID NO: 54108
  source 1..40: mol_type = genomic DNA

SEQ ID NO: 60949 - DNA, 50 bp, Pseudomonas aeruginosa; identical to SEQ ID NO: 60939
  source 1..50: mol_type = genomic DNA

SEQ ID NO: 60950 - DNA, 40 bp, Pseudomonas aeruginosa; identical to SEQ ID NO: 10480
  source 1..40: mol_type = genomic DNA

SEQ ID NO: 60951 - protein, 543 aa, Pseudomonas aeruginosa
MGKNGARVYSYLRFSDPRQATGSSADRQLAYASAWASKHGMELDATLTLRDEGLSAYHETHVKQGALGAFLRAVDEGRIPAGSVLIVEGLDRLSRAEPLLAQAQLGQIVNAGITVVTASDGREYNREGLKAEPMNLVYSLLVMIRAHEESDTKSKRVKAAVRRQCEAWVAGSYRGRIVSGKDPQWLTWDGDSWQFIPERVEAVRFALDAYRSGIGAARLVRLMHEKGMVLSDWGIAAQQVYRLVRLPALRGAKRISIDDEDFMLEDYYPRLLSDEEFSELETLVGQRYRRRGKDEIVGIVTGIGITRCGYCGTALVAQNLMQRVKADGSLEDGHRRLHCVSYSKNGGCNGGSCSSVPIERAVLAYCSDQMNLQRLLEPSSAGEDLRPRLVEAQKGVAEIERQLERVTDALLADDSGAAPLAFVRKARELEEDLERRRSAVRALEQELVAKSASAPAAGASKWAELAERAKSMADVDAREQARQLVMDTFETLVVYMRGVIPNPKGRYIDVMMKSRAGQTRWIRVDRRTGVWKEGADRPTTRRP

SEQ ID NO: 60952 - DNA, 50 bp, Pseudomonas aeruginosa; identical to SEQ ID NO: 60937
  source 1..50: mol_type = genomic DNA

SEQ ID NO: 60953 - DNA, 40 bp, Pseudomonas aeruginosa; identical to SEQ ID NO: 54108
  source 1..40: mol_type = genomic DNA

SEQ ID NO: 60954 - DNA, 50 bp, Pseudomonas aeruginosa; identical to SEQ ID NO: 60939
  source 1..50: mol_type = genomic DNA

SEQ ID NO: 60955 - DNA, 40 bp, Pseudomonas aeruginosa; identical to SEQ ID NO: 10480
  source 1..40: mol_type = genomic DNA

SEQ ID NO: 60956 - protein, 543 aa, Pseudomonas aeruginosa
MGKNGARVYSYLRFSDPRQATGSSADRQLAYASAWAAKHGMELDATLTLRDEGLSAYHETHVKQGALGAFLRAVDEGRIPAGSVLIVEGLDRLSRAEPLLAQAQLGQIVNAGITVVTASDGREYNREGLKAEPMNLVYSLLVMIRAHEESDTKSKRVKAAVRRQCEAWVAGSYRGRIVSGKDPQWLAWDGDSWQFIPERVEAVRFALDAYRSGIGAARLVRLMHEKGMVLSDWGIAAQQVYRLVRLPALRGAKRISIDGEDFMLEDYYPRLLSDEEFSELETLVGQRYRRRGKDEIVGIVTGIGITRCGYCGTALVAQNLMQRVKADGSLEDGHRRLHCVSYSKNGGCNGGSCSSVPIERAVLAYCSDQMNLQRLLEPSSAGEDLRPRLVEAQKGVAEIERQLERVTDALLADDSGAAPLAFVRKARELEEDLERRRSAVRALEQELVAKSASAPAAGASKWAELAERAKSMVDVDAREQARQLVMDTFETLVVYMRGVIPNPKGRYIDVMMKSRAGQTRWIRVDRRTGVWKEGADRPTTRRP

SEQ ID NO: 60957 - DNA, 50 bp, Pseudomonas aeruginosa; identical to SEQ ID NO: 60937
  source 1..50: mol_type = genomic DNA

SEQ ID NO: 60958 - DNA, 40 bp, Pseudomonas aeruginosa; identical to SEQ ID NO: 54108
  source 1..40: mol_type = genomic DNA

SEQ ID NO: 60959 - DNA, 50 bp, Pseudomonas aeruginosa; identical to SEQ ID NO: 60939
  source 1..50: mol_type = genomic DNA

SEQ ID NO: 60960 - DNA, 40 bp, Pseudomonas aeruginosa; identical to SEQ ID NO: 10480
  source 1..40: mol_type = genomic DNA

SEQ ID NO: 60961 - protein, 543 aa, Pseudomonas aeruginosa
MGKNGARVYSYLRFSDPRQATGSSADRQLAYASAWASKHGMELDATLTLRDEGLSAYHETHVKQGALGAFLRAVDEGRIPAGSVLIVEGLDRLSRAEPLLAQAQLGQIVNAGITVVTASDGREYNREGLKAEPMNLVYSLLVMIRAHEESDTKSKRVKAAVRRQCEAWVAGSYRGRIVSGKDPQWLAWDGDSWQLIPERVEAVRFALDAYRSGIGAARLVRLMHEKGMVLSDWGIAAQQVYRLVRLPALRGAKRISIDGEDFMLEDYYPRLLSDEEFSELETLVGQRYRRRGKDEIVGIVTGIGITRCGYCGTALVAQNLMQRVKADGSLEDGHRRLHCVSYSKNGGCNGGSCSSVPIERAVLAYCSDQMNLQRLLEPSSAGEDLRPRLVEAQKGVAEIERQLERVTDALLADDSGAAPLAFVRKARELEEDLERRRSAVRALEQELVAKSASAPAAGASKWAELAERAKSMADVDAREQARQLVMDTFETLVVYMRGVIPNPKGRYIDVMMKSCAGQTRWIRVDRRTGVWKEGADRPTTRRP

SEQ ID NO: 60962 - DNA, 50 bp, Pseudomonas aeruginosa; identical to SEQ ID NO: 60937
  source 1..50: mol_type = genomic DNA

SEQ ID NO: 60963 - DNA, 40 bp, Pseudomonas aeruginosa; identical to SEQ ID NO: 54108
  source 1..40: mol_type = genomic DNA

SEQ ID NO: 60964 - DNA, 50 bp, Pseudomonas aeruginosa; identical to SEQ ID NO: 60939
  source 1..50: mol_type = genomic DNA

SEQ ID NO: 60965 - DNA, 40 bp, Pseudomonas aeruginosa; identical to SEQ ID NO: 10480
  source 1..40: mol_type = genomic DNA

SEQ ID NO: 60966 - protein, 543 aa, Pseudomonas aeruginosa; identical to SEQ ID NO: 55806

SEQ ID NO: 60967 - DNA, 50 bp, Pseudomonas aeruginosa; identical to SEQ ID NO: 60942
  source 1..50: mol_type = genomic DNA

SEQ ID NO: 60968 - DNA, 40 bp, Pseudomonas aeruginosa; identical to SEQ ID NO: 54108
  source 1..40: mol_type = genomic DNA

SEQ ID NO: 60969 - DNA, 50 bp, Pseudomonas aeruginosa; identical to SEQ ID NO: 60944
  source 1..50: mol_type = genomic DNA

SEQ ID NO: 60970 - DNA, 40 bp, Pseudomonas aeruginosa; identical to SEQ ID NO: 10480
  source 1..40: mol_type = genomic DNA

SEQ ID NO: 60971 - protein, 543 aa, Pseudomonas aeruginosa; identical to SEQ ID NO: 55831

SEQ ID NO: 60972 - DNA, 50 bp, Pseudomonas aeruginosa; identical to SEQ ID NO: 60937
  source 1..50: mol_type = genomic DNA

SEQ ID NO: 60973 - DNA, 40 bp, Pseudomonas aeruginosa; identical to SEQ ID NO: 54108
  source 1..40: mol_type = genomic DNA

SEQ ID NO: 60974 - DNA, 50 bp, Pseudomonas aeruginosa; identical to SEQ ID NO: 60939
  source 1..50: mol_type = genomic DNA

SEQ ID NO: 60975 - DNA, 40 bp, Pseudomonas aeruginosa; identical to SEQ ID NO: 10480
  source 1..40: mol_type = genomic DNA

SEQ ID NO: 60976 - protein, 543 aa, Pseudomonas aeruginosa
MGKNGARVYSYLRFSDPRQATGSSADRQLAYASAWASKHGMELDATLTLRDEGLSAYHEAHVKQGALGAFLRAVDEGRIPAGSVLIVEGLDRLSRAEPLLAQAQLGQIVNAGITVVTASDGREYNREGLKAEPMNLVYSLLVMIRAHEESDTKSKRVKAAVRRQCEAWVAGSYRGRIVSGKDPQWLAWDGDSWQFIPERVEAVRFALDAYRSGIGAARLVRLMHEKGMVLSDWGIAAQQVYRLVRLPALRGAKRISIDGENFMLEDYYPRLLSDEEFSELETLVGQRYRRRGKDEIVGIVTGIGITRCGYCGTALVAQNLMQRVKADGSLEDGHRRLHCVSCSKNGGCNGGSCSSVPIERAVLAYCSDQMNLQRLLEPSSAGEDLRPRLVEAQKGVAEIERQLERVTDALLADDSGAAPLAFVRKARELEEDLERRRSAVQALEQELVAKSASAPAAGASKWAELAERAKSMADVDAREQARQLVMDTFETLVVYMRGVIPNPKGRYIDVMMKSRAGQTRWIRVDRRTGVWKKGADRPTTRRP

SEQ ID NO: 60977 - DNA, 50 bp, Pseudomonas aeruginosa; identical to SEQ ID NO: 60937
  source 1..50: mol_type = genomic DNA

SEQ ID NO: 60978 - DNA, 40 bp, Pseudomonas aeruginosa; identical to SEQ ID NO: 54108
  source 1..40: mol_type = genomic DNA

SEQ ID NO: 60979 - DNA, 50 bp, Pseudomonas aeruginosa; identical to SEQ ID NO: 60939
  source 1..50: mol_type = genomic DNA

SEQ ID NO: 60980 - DNA, 40 bp, Pseudomonas aeruginosa; identical to SEQ ID NO: 10480
  source 1..40: mol_type = genomic DNA

SEQ ID NO: 60981 - protein, 543 aa, Pseudomonas aeruginosa
MGKNGARVYSYLRFSDPRQATGSSADRQLAYASAWASKHGMELDATLTLRDEGLSAYHETHVKQGALGAFLRAVDEGRIPAGSVLIVEGLDRLSRAEPLLAQAQLGQIVNAGITVVTASDGREYNREGLKAEPMNLVYSLLVMIRAHEESDTKSKRVKAAVRRQCEAWVAGSYRGRIVSGKDPQWLAWDGDSWQFIPERVEAVRFALDAYRSGIGAARLVRLMHEKGMVLSDWGIAAQQVYRLVRLPALRGAKRISIDGEDFMLEDYYPRLLSDEEFSELETLVGQRYRRRGKDEIVGIVTGIGITRCGYCGTALVAQNLMQRVKADGSLEDGHRRLHCVSYSKNGGCNGGSCSSVPIERAVLAYCSDQMNLQRLLEPSSAGEDLRPRLVEAQKVVAEIERQLERVTDALLADDSGAAPLAFVRKARELEEDLERRRSAVRALEQELVAKSASAPAAGASKWAELAERAKSMVDVDAREQARQLVMDTFETLVVYMRGVIPNPKGRYIDVMMKSRAGQTRWIRVDRRTGVWKEGADRPTTRRS

SEQ ID NO: 60982 - DNA, 50 bp, Pseudomonas aeruginosa; identical to SEQ ID NO: 60937
  source 1..50: mol_type = genomic DNA

SEQ ID NO: 60983 - DNA, 40 bp, Pseudomonas aeruginosa; identical to SEQ ID NO: 54108
  source 1..40: mol_type = genomic DNA

SEQ ID NO: 60984 - DNA, 50 bp, Pseudomonas aeruginosa; identical to SEQ ID NO: 60939
  source 1..50: mol_type = genomic DNA

SEQ ID NO: 60985 - DNA, 40 bp, Pseudomonas aeruginosa; identical to SEQ ID NO: 10480
  source 1..40: mol_type = genomic DNA

SEQ ID NO: 60986 - protein, 490 aa, Bacillus pseudomycoides
MIANENIKNVAIYLRLSRDEENKGIESILENHRNKLTELCQQNKWKYEIFQEIASSRTIELREQLTDMLERVKQNLYDAVVVMDVDRLSRNEFDASQIFKILSDSNTVIVTPTKIYDWSRDEDNLLLGIQSLVAAQEYKQIKKRMTAGKRSASEKGLWVHGIPPLGYDKDLATRKLVPNEDAKHVQFIFNSIVNHGKTVSDVYHELNMMKVKTRTNSTFAFNSVVRIVNNEVYKGTIVSNKYLDKNAMRPKEEWHYVENVHPAIVDEATWEKANKIVNTYSFSAPRSRNKIYPTTKLIFCGNCGRVQGAQMAGTGKMYLKVCQRCKNRTFLYEPILRIIKDRVASHVPHILKEITAIEQNDNSADIEYKKQQIQKQMKAIERAIEKIKEAYELDEYTIAEFKDRKAKRENELKQLKAEFDHVEQQDPKDKIADLNEIKQRIEYLLQNWQCLDGEGLTDEDVNRNLHFIIERIEWTYGKSDEQPTVKIKYK

SEQ ID NO: 60987 - DNA, 50 bp, Bacillus pseudomycoides
  source 1..50: mol_type = genomic DNA
aaataatccctaaattcgtaaccaactggttgagaacttagggactacgt

SEQ ID NO: 60988 - DNA, 40 bp, Bacillus pseudomycoides
  source 1..40: mol_type = genomic DNA
actcgtgtttactgggccgacaggatctgggaaaacaacg

SEQ ID NO: 60989 - DNA, 50 bp, Bacillus pseudomycoides; identical to SEQ ID NO: 60987
  source 1..50: mol_type = genomic DNA

SEQ ID NO: 60990 - DNA, 40 bp, Bacillus pseudomycoides
  source 1..40: mol_type = genomic DNA
acacatgtttcctgcgcagacagggcctgggacaacacga

SEQ ID NO: 60991 - protein, 469 aa, Collinsella aerofaciens
MPKTAVIYARFSCNKQREASIDDQLRVCRDWCKREGYAIAAEYCDYAISGRTDDRPEFQRMIANAGESDIVLVYMMDRFSRGEYDAPIYKRELAKKGVKLVSALEAIPDSPEGIIYEKLLEGLAACESKKTAIRTKRGMEGNALRCKTNGVRVFGYRKSEDDEYEIDEHDAAFVREAFKRRINRETVNSIARDFAQRGVKTSNGNPCGYSMVYQMLHNRRYTGRYEWGGIVKEGGMPAIIDEVTFMDAQQVQGTKKRSSEDWGDFALAGKAICAGCGRNLQGVSGRGRHNVKYEYYSCVDGCMRNVRREELEGAIVGALRELLSDREEALRIARMVADRADGAEIATRRKQAAESLSAAERGLKNILNAIEQGIIAPGVKERIAELEQQKARANYDLQVIQEQKIDPERFADFLQCGAKLDDATLLKAFVWQVSVSDEDVLVTLNYDTESNEPARLDIQRVRGKLEWCP

SEQ ID NO: 60992 - DNA, 50 bp, Collinsella aerofaciens
  source 1..50: mol_type = genomic DNA
gggttcgaggaaaattggaatggtgccccgtccgaacaacttctcgaacc

SEQ ID NO: 60993 - DNA, 40 bp, Collinsella aerofaciens
  source 1..40: mol_type = genomic DNA
gctcttcaattcaaatggtgcccccagcgggattcgaacc

SEQ ID NO: 60994 - DNA, 50 bp, Collinsella aerofaciens
  source 1..50: mol_type = genomic DNA
gggttcgaggaaaattggaatggtctcccgtccgaacaacttctcgaacc

SEQ ID NO: 60995 - DNA, 40 bp, Collinsella aerofaciens
  source 1..40: mol_type = genomic DNA
tctcttcaactcaaatggtctcacgagaggggtgatttcc

SEQ ID NO: 60996 - protein, 503 aa, Bacillus siamensis; identical to SEQ ID NO: 25896

SEQ ID NO: 60997 - DNA, 50 bp, Bacillus siamensis
  source 1..50: mol_type = genomic DNA
cgggtagcttagcgaacatgtcactgatgccatgtccactaaactaacca

SEQ ID NO: 60998 - DNA, 40 bp, Bacillus siamensis
  source 1..40: mol_type = genomic DNA
cggctattcgacttgtcattggtgtcacgtcatggctcac

SEQ ID NO: 60999 - DNA, 50 bp, Bacillus siamensis
  source 1..50: mol_type = genomic DNA
cgggtagcttagcgaacatgtcacgtatgccatgtccactaaactaacca

SEQ ID NO: 61000 - DNA, 40 bp, Bacillus siamensis
  source 1..40: mol_type = genomic DNA
ccactgtgggacttgccctgtgtgtagcctcatggctccc

SEQ ID NO: 61001 - protein, 493 aa, Clostridium tetani
MRAVAYARFSSDNQREESIEAQIMDIKKYALKNNITVLREYVDEAISGRTFERKSFKRMIEDAKKNMFDLILVHKVDRFARNRYDAAIYKSILKKHNIKIKYVMQPIDDSPEGNLMEGILESFAEYYSENLANEVMKGLKINAKKAQFNGGYPPLGYDIAEDKTYIINEREARIVREIFDLYLDGIGYKKIADILNNKGYKNKRGKPFVFNSIPTILKNDKYCGIYTYNKTSRKYKNGRRNLKKYNKDEDIIRVEDGIPKIISKEKFNTAQQEIKKRTKSRGKKIAVREYILSGLIKCECERKMSGYAQKRSKESNRYFYYRCTGCNNSIRAEKIETIATNFIKEQVFRDIDNLIIKIHKYIADQEAESPSELKYLKNELSNSNNQINNIVKMISNGVTSMHLAKKLEELETYIDGIQQRIGEINRMSVIPEDEIKNWLLELKNSFDNGKNIKKIISVFIKNIEITKEDINIDFFVKAPYKGANSLSVAPSAP

SEQ ID NO: 61002 - DNA, 50 bp, Clostridium tetani
  source 1..50: mol_type = genomic DNA
ggtgcgaacagtctaagtgtcgctccttcggcaccagaactgttcgcaca

SEQ ID NO: 61003 - DNA, 40 bp, Clostridium tetani
  source 1..40: mol_type = genomic DNA
cgtgcgggttcgattcccgccttcggcaccatattgaaaa

SEQ ID NO: 61004 - DNA, 50 bp, Clostridium tetani
  source 1..50: mol_type = genomic DNA
ggtgcgaacagtctaagtgtcgctttttcggcaccagaactgttcgcaca

SEQ ID NO: 61005 - DNA, 40 bp, Clostridium tetani
  source 1..40: mol_type = genomic DNA
catgcctgtttgactgctgttttcagcaccatctttaaga

SEQ ID NO: 61006 - protein, 563 aa, Ruminococcus gnavus
MKTQINGKIAIYSRKSKFTGKGESIGNQIEECKKHIAYKYQITDMNQIVVYEDEGFSGKNTKRPQFQQMLKACRNHEISMIVCYRLDRISRNTIDFALLYQELERLDINFISVTENFDTTTPLGRAMLSISSAFAQLERDTIAERIRDNMLALAKTGRWLGGTTPLGYISTAKTSVDIEGKIRTAYRLKTDSDNFSLTRLIFDKFLEFRSLTKVETYLLNYHYKTRNGKNFSRTGIRDILKNPVYAAADEDTLCYFNEIGTPIFNESSEFNGTHGLMVYNKSNQASEIPHKQHNYSEWIVAIGKHKPLLTGKEWLQVQELLEQNKSKSYRKPKDNTALLSGILICADCGSYMRPKANRSLDENGNKRFSYLCETKEKSHGQLCSMNRPDGNLLDKMVCDKIKEIAQGEDVDKFHEQLKYAKKQLLSKEVSNTTEIDHLQKVLHDTDRKIENLVIALSAANNTPAFSHINKQINNFHEEKMKIEKQIHTLNELLQNQNILLANFDVLIEKLSSFSDSFDMMSIEEKRTTLRILVDKVVWDGTHVHLYLVGQNNQKTKPQQAGCK

SEQ ID NO: 61007 - DNA, 50 bp, Ruminococcus gnavus; identical to SEQ ID NO: 49157
  source 1..50: mol_type = genomic DNA

SEQ ID NO: 61008 - DNA, 40 bp, Ruminococcus gnavus; identical to SEQ ID NO: 34253
  source 1..40: mol_type = genomic DNA

SEQ ID NO: 61009 - DNA, 50 bp, Ruminococcus gnavus
  source 1..50: mol_type = genomic DNA
cgaagccacaacaagcgggttgcacgagcgaccccaccgctttggcttca

SEQ ID NO: 61010 - DNA, 40 bp, Ruminococcus gnavus
  source 1..40: mol_type = genomic DNA
aggctgcaggtgtttaaaacgcacagtgctgatgcatttg

SEQ ID NO: 61011 - protein, 547 aa, Roseitalea sp
MTRVSLYARYSSDNQSVSSIEDQFRICRDQAAREKWKVVGVYKDAAISGASVTLRPGIQALLQDAQAGKFEIVLAEALDRISRDQADVAILYKHFKFAGVTLVTLAEGEISELHVGLKGTMNALFLKDLAAKTHRGLRGRVEKGKAGGGLCYGYDVVKRLNGDGEQVRGERKINEAEAEIVRRIFREFAAGKSPKAIAADLNRDGIPGPNGKAWGDTTIRGHVCRGTGIVNNELYAGVLVWNRLRYIKNPATGKRVSRVNPEAEWIRTEVQELRIVDEDLWQAARRRQEEISRQFENVTKGVRAYRAKHVNELRRPAFLFSGLLKCGCCGGNYGIITRDRYGCLNRYRRGTCDNGHTIRRDDIEQRILSGLTERLVSAERVAKAVRAYAEALNSQNRERRAQVELDRKALEKIERGIAGIMAAIEDGMYQPAMKDRMEELERQKADVLARMEQAPEDVPDIHPNIAEIYKAKVTQLSEALADPELRDQAAEAFRALVDEVVLEPGDKRGEVNATLRGEAMNILDIVSGRKSRNRPQVITKDVAGPRN

SEQ ID NO: 61012 - DNA, 50 bp, Roseitalea sp
  source 1..50: mol_type = genomic DNA
agttataacaaaagacgttgcgggcccccgcaaccactttcgttataact

SEQ ID NO: 61013 - DNA, 40 bp, Roseitalea sp
  source 1..40: mol_type = genomic DNA
tgatatcgttggttgcgtgcccccgcaaccaaacaagtca

SEQ ID NO: 61014 - DNA, 50 bp, Roseitalea sp
  source 1..50: mol_type = genomic DNA
agttataacaaaagacgttgcggggacccgcaaccactttcgttataact

SEQ ID NO: 61015 - DNA, 40 bp, Roseitalea sp
  source 1..40: mol_type = genomic DNA
tgttatctttgattgcctggacacacctccacacaaatct

SEQ ID NO: 61016 - protein, 486 aa, Enterocloster clostridioformis
MPATPLEIGAAYVRVSTDDQTELSPDAQIRVITDAAKADGFIIPKEYIFIEKKGISGRKADNRPEFQRMIAIAKSQKPAPFKRLYLWKFSRFARNQEESTFYKGILRKKCDVEIKSVSEPIMEGMFGRLIETIIEWFDEYYSINLSGEVLRGMTEKALREGYQATPCLGYRAVGEGKPFAVEEKSYAIVEYIFQTYHSGKDMTATARAANARGYRTRRGNLFDRRGINRILANRFYIGEVIWNGYSFQGTHEVRSSVTSLFDDVQRRIEKEYRPQKRREVSNNVHWLSGLLKCSICGGSLGYNRSNDQKKRPDFFQCWKYAKGMHPGSCCLAVHLAEKAVIESLEEVLETNELEYEYIQQTDDAVNAEEIAIQEALARLEVKERRIREAYENEIDTLEEYKQNKLRLRAEREELMADAERLRRQAEQSPAKVPSKEDIMRQIAHVHEILADPNISYEIKGNALRKIVKEIVFDRGKGHLHIHFYIS

SEQ ID NO: 61017 - DNA, 50 bp, Enterocloster clostridioformis
  source 1..50: mol_type = genomic DNA
tatcataggttattgcagtccggcccaccggatgtcaataacatatgatt

SEQ ID NO: 61018 - DNA, 40 bp, Enterocloster clostridioformis
  source 1..40: mol_type = genomic DNA
gcccatttcgccgtccggccctccatattggctcattata

SEQ ID NO: 61019 - DNA, 50 bp, Enterocloster clostridioformis
  source 1..50: mol_type = genomic DNA
tatcataggttattgcagtccggctgaccggatgtcaataacatatgatt

SEQ ID NO: 61020 - DNA, 40 bp, Enterocloster clostridioformis
  source 1..40: mol_type = genomic DNA
gccctgctcgccctccagctgtccatgtaacctcattctt

SEQ ID NO: 61021 - protein, 486 aa, Enterocloster clostridioformis
MPATPLEIGAAYVRVSTDDQTELSPDAQIRVIMDAAKADGFIIPKEYIFIEKKGISGRKADNRPEFQRMIAIAKSQKPAPFKRLYLWKFSRFARNQEESTFYKGILRKKCDVEIKSVSEPIMEGMFGRLIETIIEWFDEYYSINLSGEVLRGMTEKALREGYQATPCLGYRAVGEGKPFVVEEKSYAIVEYIFQTYHSGKDMTATARAANARGYRTRRGNLFDRRGINRILANRFYIGEVIWNGYSFQGTHEVRSSVTSLFDDVQKRIEKEYRPQKRREVSNNVHWLSGLLKCSICGGSLGYNRSNDQKKRPDFFQCWKYAKGMHPGSCCLAVHLAEKAVIESLEEVLETNELEYEYIQKTDDAVNAEEVAIQEALARLEVKERRIREAYENEIDTLEEYKQNKLRLKAEREELMADAERLRRQAEQSPAKVPSKEDIMRQIAHVHEILADPNISYEIKGNALRKIVKEIVFDRSQGHLHIHFYIS

SEQ ID NO: 61022 - DNA, 50 bp, Enterocloster clostridioformis
  source 1..50: mol_type = genomic DNA
tatcataggttattacagtccggcccgccggatgtcaataacatatgatt

SEQ ID NO: 61023 - DNA, 40 bp, Enterocloster clostridioformis; identical to SEQ ID NO: 61018
  source 1..40: mol_type = genomic DNA

SEQ ID NO: 61024 - DNA, 50 bp, Enterocloster clostridioformis
  source 1..50: mol_type = genomic DNA
tatcataggttattacagtccggctggccggatgtcaataacatatgatt

SEQ ID NO: 61025 - DNA, 40 bp, Enterocloster clostridioformis; identical to SEQ ID NO: 61020
  source 1..40: mol_type = genomic DNA

SEQ ID NO: 61026 - protein, 458 aa, Schaedlerella arabinosiphila
MKNKELPPLVRVALYIRVSGEEQKIKGLSLEAQQERLEAYAREKGWIVTGVYIDAAKTARKNIHKRAEFQKMIESVKRDEVDLLLFCRLDRWFRSVADYYKVMEILQAHGCDWKTIDEEYDTTSANGRLYINVKLSIAQNEADICGERIDVVFDSKIAHGTVVSGSCPFGYRVNEEKRLEVVPEEAGIVQDAFSFFESKVSQLSTVKHIRETYGVNWCTATFRRMLSETLYTGIYDRGGRRNEDFCPAIISQEQFDRVQALLKRNARSAPSGRVYIFTSILKCAECNHNMVGRIAYKGSGLYYYRCNQHFQRGRCSHKSEAREDVIEKWLFDNLESELNRVRLEWEVKAAEKKKAALRTDKAALKRKLTKLKELYVNELIDIEDYKKDYEIYTAALRQLPEPVAEAPPDFEAVEKLLQSDFKNIYESLTREEKRTLWRSAISEIRIDSENNITGISFG

SEQ ID NO: 61027 - DNA, 50 bp, Schaedlerella arabinosiphila
  source 1..50: mol_type = genomic DNA
tgttgtactaacttgacactacccgtcggcactgttcagttagtacaaca

SEQ ID NO: 61028 - DNA, 40 bp, Schaedlerella arabinosiphila
  source 1..40: mol_type = genomic DNA
ttccgagtccaggttcccggtaggctcgtccgcaagtaaa

SEQ ID NO: 61029 - DNA, 50 bp, Schaedlerella arabinosiphila
  source 1..50: mol_type = genomic DNA
tgttgtactaacttgacactacccgccggcactgttcagttagtacaaca

SEQ ID NO: 61030 - DNA, 40 bp, Schaedlerella arabinosiphila
  source 1..40: mol_type = genomic DNA
ttctgagtcccagtgcccagcaagcaagttggcaagtaag

SEQ ID NO: 61031 - protein, 523 aa, Enterobacter hormaechei
MRQVITYLRFSSKPQERGDSIRRQKGLFERWLKDNPDAKVVDEFSDEGASAYHGHHLKGDFGRMLQKIQDGGYLSGQTVLLVESETRLNRQKARNTENLVDLITGKGVDVICLESGKIYTSTNIDDLDTSIQLKIAAHIAHQQSKEKSIKVSAAWEHRAQLALEGKQQLTKNVPGWIDPDTRKLNEHSSTVVTIFELLLSGESLHNIARYLQANNIKSFSRREKANGFSVHSVRTILRSESTVGTLAASKRNDRPAIPNYYEPAIDVATFNKAQEILSKNRVGRAPASDNPITINLFKGIIRCQCGASVHPTGVKATYQGVYRCNNVPDGRCNVPTIKRKPFDKWMLDNIIGFLERSDGNHTDKRKAEIEYQISLVTSKLKKATILLLELDDVTELKEQVKELNIQRSNMQSELDELNQRETLSDKPLHHLSEIDLTTKAGRVEAQLILSKFVQSIELQREMIIITLRNGTVIGKSRDLSPVLSRDLMKQVVSSPSPTDIDMFSVITSDEEFRKSGKQVTKRS

SEQ ID NO: 61032 - DNA, 50 bp, Enterobacter hormaechei; identical to SEQ ID NO: 38382
  source 1..50: mol_type = genomic DNA

SEQ ID NO: 61033 - DNA, 40 bp, Enterobacter hormaechei; identical to SEQ ID NO: 52513
  source 1..40: mol_type = genomic DNA

SEQ ID NO: 61034 - DNA, 50 bp, Enterobacter hormaechei; identical to SEQ ID NO: 38384
  source 1..50: mol_type = genomic DNA

SEQ ID NO: 61035 - DNA, 40 bp, Enterobacter hormaechei; identical to SEQ ID NO: 38385
  source 1..40: mol_type = genomic DNA

SEQ ID NO: 61036 - protein, 523 aa, Enterobacter hormaechei; identical to SEQ ID NO: 38381

SEQ ID NO: 61037 - DNA, 50 bp, Enterobacter hormaechei; identical to SEQ ID NO: 38382
  source 1..50: mol_type = genomic DNA

SEQ ID NO: 61038 - DNA, 40 bp, Enterobacter hormaechei; identical to SEQ ID NO: 52513
  source 1..40: mol_type = genomic DNA

SEQ ID NO: 61039 - DNA, 50 bp, Enterobacter hormaechei; identical to SEQ ID NO: 38384
  source 1..50: mol_type = genomic DNA

SEQ ID NO: 61040 - DNA, 40 bp, Enterobacter hormaechei; identical to SEQ ID NO: 38385
  source 1..40: mol_type = genomic DNA

SEQ ID NO: 61041 - protein, 523 aa, Enterobacter cloacae
MRQVITYLRFSSKPQERGDSIRRQKGLFERWLKDNPDAKVVDEFSDEGASAYHGHHLKGDFGRMLQNIQDGKYLSGQTVLLVESETRLNRQKARNTESLVDLITGKGVDVICLESGKIYTSTNIDDLDTSIQLKIAAHIAHQQSKEKSIKVSAAWEHRAQLALEGKQQLTKNVPGWIDPDTRKLNEHSSTIVTIFDLLLSGESLHNIARYLQAHNIKSFSRREKANGFSVHSVRTILRSESTVGTLAASKRNDRPAIPNYYEPAIDIATFNKAQEILSKNRVGRAPASDNPITINLFKGIIRCQCGASVHPTGVKATYQGVYRCNNVPDGRCNVPTIKRKPFDKWMLDNIVGFLERSDGNNTDKRKAEIEYQISLVTSKLKKATPLLLELDDVTELKEQVKELNIQRSNMQSELDELNQRETLSDKPLHHLSEIDLTTKAGRVEAQLILSKFVQSIELQREMIIITLRNGTVIGKSRDLSPVLSQDLMKRVVSSPSPKDIDMFSVITSDEEFRKSGKQVTKRS

SEQ ID NO: 61042 - DNA, 50 bp, Enterobacter cloacae
  source 1..50: mol_type = genomic DNA
aacccgaatagcctacattcaagggtcattgtatttgagctattcggcga

SEQ ID NO: 61043 - DNA, 40 bp, Enterobacter cloacae; identical to SEQ ID NO: 52513
  source 1..40: mol_type = genomic DNA

SEQ ID NO: 61044 - DNA, 50 bp, Enterobacter cloacae
  source 1..50: mol_type = genomic DNA
aacccgaatagcctacattcaaggaacattgtatttgagctattcggcga

SEQ ID NO: 61045 - DNA, 40 bp, Enterobacter cloacae; identical to SEQ ID NO: 38385
  source 1..40: mol_type = genomic DNA

SEQ ID NO: 61046 - protein, 513 aa, Ruminococcus bicirculans
MARAAKQDSNSEIIDGVIYARYSEGPNQTEASIEGQVRECKEYAKRNGIRIINVYSDSKHTGTNDNRAEFQKMLRDSRRGGFSVVVVWKIDRFGRNRAEMAQNKALLKLQGVKVVSAKEYIPDSPEGIILESVLEGMAEYYSANLSQNIKRGMKENALHCKSNGSGKSLGYIVDKDGYFEIEPNEATIVKTIFQKYDEGMKIADIWREIVASGAKTKRGKDFTQYGISRVLSNRAYIGEYRYGDIVTPGGMPRIIDDDLFNRVQERRALSKKTPASRRSNSDVDFLLTGKVFCGHCKGTMRGMSGTSKTGRKFYYYACHDKIFKHNKCTKKNVKKEWLETEVTRITRDDILNKETIEFIADRVVEIQRQEQEDKSMLRYYEQQLRDTQSAINNIMKAIEAGIITSSTKSRLFELEEQKSIIEGEIEREKIITPVIEKEQVIFSLERFFGGDINNKEYQRNIIDMFVNKVILYDNKIIITYNISSQNEISVDVVEQAAFAALDECSSKLSLAPP

SEQ ID NO: 61047 - DNA, 50 bp, Ruminococcus bicirculans
  source 1..50: mol_type = genomic DNA
agtgttcgtctaagctctcgttagctccaccaaatgttgaaaagacgaac

SEQ ID NO: 61048 - DNA, 40 bp, Ruminococcus bicirculans
  source 1..40: mol_type = genomic DNA
ggagttcgattctcctcacctccaccagcaggggcgtgcc

SEQ ID NO: 61049 - DNA, 50 bp, Ruminococcus bicirculans
  source 1..50: mol_type = genomic DNA
agtgttcgtctaagctctcgttagagccaccaaatgttgaaaagacgaac

SEQ ID NO: 61050 - DNA, 40 bp, Ruminococcus bicirculans
  source 1..40: mol_type = genomic DNA
ggtcaccgaccctcctcacagcaaccagccggtgcgcggc

SEQ ID NO: 61051 - protein, 474 aa, Rhodococcus aetherivorans
MASMTQRVAVYLRQSQDRDGTEYGIQRQREDVLRLVQGRGWTVAAEYVDNDTSATSRKPRPGFEAMMEAVDRGEVDVIAARHVDRLVRRLVDLEGVLERCHAHGTTVVTASDGVDTATDGGRLVVRILGSVAQGEMERKSARQKSAMAQAAAQGRYVGGRRAFGYEQDGVTIRPDEAALIVTGYEAVLAGESLAAVARMWNESGIGTTQGGTEWERSAVKDVLINARNAGLRRHRPEGTHATYRQDPTSFVVGRAVWEPIVPEDTWRAVVAILTDPSRRKPSQRGRNLLTSVALCGVCEEGNRPTVHAGGARRHYRIYRCRDHHHLQRMAEPVDEYVEALMVARLSRPDALAVFAPRVEEDTRDLSAEADVLRRRLEDLAADYMHMTREQFRIANESVRSRLAEVEAEIAAAGAADVIAPLVTSGDVAAAWSELSTARKRSVIDTLVTVTLYSPGRGRRAFDPETVGIDWKTTE

SEQ ID NO: 61052 - DNA, 50 bp, Rhodococcus aetherivorans
  source 1..50: mol_type = genomic DNA
gtccgctacaaggcggcgttcggtgtcacgtggacgccactatagcggaa

SEQ ID NO: 61053 - DNA, 40 bp, Rhodococcus aetherivorans; identical to SEQ ID NO: 30083
  source 1..40: mol_type = genomic DNA

SEQ ID NO: 61054 - DNA, 50 bp, Rhodococcus aetherivorans
  source 1..50: mol_type = genomic DNA
gtccgctacaaggcggcgttcggtcacacgtggacgccactatagcggaa

SEQ ID NO: 61055 - DNA, 40 bp, Rhodococcus aetherivorans
  source 1..40: mol_type = genomic DNA
ggccggccgggcgtggggccaggcggcgacggcggcgggc

SEQ ID NO: 61056 - protein, 486 aa, Enterocloster bolteae
MPATPLEIGAAYVRVSTDDQTELSPDAQIRVIMDAAKADGFIIPKEYIFIEKKGISGRKADNRPEFQRMIAIAKSQKPAPFKRLYLWKFSRFARNQEESTFYKGILRKKCDVEIKSVSEPIMEGMFGRLIETIIEWFDEYYSINLSGEVLRGMTEKALREGYQATPCLGYRAVGEGKPFAVEEKSYAIVEYIFQTYHSGKDMTATARAANARGYRTRRGNLFDRRGINRILANRFYIGEVIWNGYSFQGTHEVRSSVTSLFDDVQKRIEKQYRPQKRREVSNNVHWLSGLLKCSICGGSLGYNRSNDQKKRPDFFQCWKYAKGMHPGSCCLAVHLAEKAVIESLEEVLETNELEYEYIQKTDDAVNAEEIAIQEALARLEVKERRIREAYENEIDTLEEYKQNKLRLKAEREELMADAERLRRQAEQSPAKVPSKEDIMRQIAHVHEILADPNISYEIKGNALRKIVKEIVFDRGKGHLHIHFYIS

SEQ ID NO: 61057 - DNA, 50 bp, Enterocloster bolteae; identical to SEQ ID NO: 61017
  source 1..50: mol_type = genomic DNA

SEQ ID NO: 61058 - DNA, 40 bp, Enterocloster bolteae
  source 1..40: mol_type = genomic DNA
acccatttcgccatccggcccgccatactgactcattata

SEQ ID NO: 61059 - DNA, 50 bp, Enterocloster bolteae
  source 1..50: mol_type = genomic DNA
tatcataggttattgcagtccggcctaccggatgtcaataacatatgatt

SEQ ID NO: 61060 - DNA, 40 bp, Enterocloster bolteae
  source 1..40: mol_type = genomic DNA
atctagttggccatcaggcctgccctccactctcatttta

SEQ ID NO: 61061 - protein, 537 aa, Tsukamurella tyrosinosolvens
MRALIVVRLSRVTDATTSPERQLAACQELCQARGYDVVGVAEDLDVSAGKTSPFDRPQLGRWLRDPAQYDVIVFFRVDRIVRRLFDLADLIRWARQHGVTLVSATEAHFDLSTDFGDIIALLVAKVAEMELNAISERNASASRHNIRAGKYRGGIPPWGYLPEKTDDGEWRLVQDPEQVDVIHEVVERVLKGEPLRAIAHDLTKRGIPTPRDRFAQLRGRPTSDYEWHSAPLKRSLTSPTLLGRIVARDPVLDAEGRIQRDDKGHRVLGPETVVVGDDGSPVVRAEPILSRDMFERVGVELEGRENRKEPTKRSSGLLLRVIYCGVCGRPAYRLKGGKGRKPRYRCASAQYKDQCDNRTVSLEWADDEVERRILEHMGPLERRQRVWFAGNDHTSELDEVNELLADLTDQLGTGAFKRGTPQRARLDQRIVSLTERQTELSATPSEPAGWVWEPTGELFADWWERQDTEARNVWLRQMDFKVTWTSHTEGSRTILDSFKLDGELTLNLDADQMFGPIFEMIEAYNEGARLDAIARRD

SEQ ID NO: 61062 - DNA, 50 bp, Tsukamurella tyrosinosolvens
  source 1..50: mol_type = genomic DNA
cgggtgtaaaagcatacgttgggatagtcgattatggtggtttacacccc

SEQ ID NO: 61063 - DNA, 40 bp, Tsukamurella tyrosinosolvens
  source 1..40: mol_type = genomic DNA
cgctatggtgccgatcgcgtactccaccgtcgacatgccg

SEQ ID NO: 61064 - DNA, 50 bp, Tsukamurella tyrosinosolvens
  source 1..50: mol_type = genomic DNA
cgggtgtaaaagcatacgttgggattgtcgattatggtggtttacacccc

SEQ ID NO: 61065 - DNA, 40 bp, Tsukamurella tyrosinosolvens
  source 1..40: mol_type = genomic DNA
cgctatcgtggctttcctgttccccaccccccacacgccg

SEQ ID NO: 61066 - protein, 523 aa, Butyricicoccus pullicaecorum
MYFDNPSAYHAALYIRLSKEDEHEGPSQSVQNQQSMLQTFTQQHGLSVYDTYVDDGWSGTNFDRPSFQRMIADIEAGKVNLVITKDLSRLGRDYILTGHYMERYFPEHRVRYISLLDGIDTGVDSTANDITPFRAIMNDMYAKDISKKIKSVKRDKQRKGLFIGGKPVYGYKMHPTEKNKIVIDENVAPVVRRIFALALSGMSCRQIAALLNQDGVPTPSAYAHLFIAKPGAYSGLWSGERISEMLQNETYIGNMVQGRRVKISYKSKKCLNQSPEHWVIVEGTHEPIIAPETFEKVQALLDSRRHTRSRTYDFALKGLIFCHECGHLLSVINRKNAKGDDVLYFICRTYQRNTRAGVCTSHSIQERTVTRAVFTKIQELCASALQPDALFSIAYEAVQKSQSNPSHLSELEGIHSKLDTLTANLDRIYDDRLSGLLSAEDFARIYQRVSRDRRALEEGKHELSQQASCPVSTQDRAHALVQQFLQTLDSNRALLVSLIARAELTQDKEIILYFRFHASEAIF

SEQ ID NO: 61067 - DNA, 50 bp, Butyricicoccus pullicaecorum
  source 1..50: mol_type = genomic DNA
cactgacactaagcgcggcgcgatgtatcgcgccgcgcttactgtaagtg

SEQ ID NO: 61068 - DNA, 40 bp, Butyricicoccus pullicaecorum; identical to SEQ ID NO: 57773
  source 1..40: mol_type = genomic DNA

SEQ ID NO: 61069 - DNA, 50 bp, Butyricicoccus pullicaecorum
  source 1..50: mol_type = genomic DNA
cactgacactaagcgcggcgcgataaatcgcgccgcgcttactgtaagtg

SEQ ID NO: 61070 - DNA, 40 bp, Butyricicoccus pullicaecorum
  source 1..40: mol_type = genomic DNA
gggttactcaagctcatgtaaaacccacgtaaagaaaaaa

SEQ ID NO: 61071 - protein, 583 aa, Burkholderia insecticola
MAKRKNVEAPAAIEQPAGPPRLFIYGRFSSKKQASGNSYERQIKFAHAWASDHGYEIDDKKTMFDYATSAFRGKHRTAGALAAFFKAMKAGDVRPGDVLLVESLDRLSREEEFKAFDQFSQIVQAGVTIMSMQDGEFSITKVRETHGGILHQALGVMTRAHNESLSKSDRVQKAAHAICRAWRDDDWGKKKHRKPIPIGKDPSWVRWNEATESFDAIPAQVDAIRALIGFFRLGYSPMRCFDKMRAAGIALPDGISDHSRVHRVLQDRALVGEKFIQFDLAKKRPDIVETEYTIPGYYPAILSEDEFSALQHIRAQRGRRAGKAEVVSIMTGMRLTKCAKCGQSMAIQNVLTRVRREDGLPHDGHRRLKCIGARSAKNRCTETSCSVVPVERALMEFCSDQMNLAALFTDSDERAKLLATEHVRARRLAEEARAALDTFMQVGALASGDSAAIIATRIAQLTNEHREWSEKAARFEHDLATMNRHSTPEVAHEWAKLRDGVARLDNEARTKARQLVADTFVRIEIGLAHADLIELRLVSKRDVVRVLTIDRKTGERRDQMTVENTRHAALARRTKKQKLVKAA

SEQ ID NO: 61072 - DNA, 50 bp, Burkholderia insecticola
  source 1..50: mol_type = genomic DNA
tggttataccgagtgttctacggcgtgacgtagaactctccgtgtaaacc

SEQ ID NO: 61073 - DNA, 40 bp, Burkholderia insecticola
  source 1..40: mol_type = genomic DNA
cggctatgtggtcttcgaagtgccgagcaacatcatcctg

SEQ ID NO: 61074 - DNA, 50 bp, Burkholderia insecticola
  source 1..50: mol_type = genomic DNA
tggttataccgagtgttctacggccagacgtagaactctccgtgtaaacc

SEQ ID NO: 61075 - DNA, 40 bp, Burkholderia insecticola
  source 1..40: mol_type = genomic DNA
cagcccagtgttctgctaacagcccagtaagagcatcctg

SEQ ID NO: 61076 - protein, 590 aa, Streptococcus pyogenes
MKKDVKVIKGDTTLKRTASGCVERSIKRVAAYCRVSTDTEDQINSYNSQVEHYTEFIQKNKEWTLAGIYADEAITGTQVDRRIDFQRLINDCMNGDIDMIITKSISRFARNTLDTLKYVRKLKEFNVAVFFEEENINTLTMDGELLLTILSSVAQQEVENISANVKKGLRMKMERGEMVGFQGCLGYDYDPETKSISINEKEAEIVRYIFRRYIEGVGGMVISRELEEQGYLSPRGNKRWTGTTVLGIIKNEKYKGDLMMGKTYTVDPISKRRLDNFGEQDKFYIENHHEPIISEEDFEKAQGIRLRRSKNRNTVANNGGKREKYSRKYAFSSMLECGFCGHNLSRRNWHSSSEYTKVIWQCVNATKNGKKYCPHSKGIEEEAIEKAFMESYRQVCHNNVEITNEFLKTVEEELKDNSLAKDLKKITNQLDKILKKEKDLVELRLNESISMDIYQDKYNEIAISKEKLLAEKRTLEVTLTDEKALKKRLEGFKKLLESNKYLEEFDRAVFESIVDKIIIGGTNDEGEIDPAMITIIYKTGNKDSQDGRLFKSRRKNAKEVNEETDNKLYPHSSDEVNNLCSYPMDSTRRV

SEQ ID NO: 61077 - DNA, 50 bp, Streptococcus pyogenes
  source 1..50: mol_type = genomic DNA
gtgttcctatcctatggacagcacatgtcgagtgcatagcgttgatacaa

SEQ ID NO: 61078 - DNA, 40 bp, Streptococcus pyogenes; identical to SEQ ID NO: 23723
  source 1..40: mol_type = genomic DNA

SEQ ID NO: 61079 - DNA, 50 bp, Streptococcus pyogenes
  source 1..50: mol_type = genomic DNA
gtgttcctatcctatggacagcacgagtcgagtgcatagcgttgatacaa

SEQ ID NO: 61080 - DNA, 40 bp, Streptococcus pyogenes
  source 1..40: mol_type = genomic DNA
gtgtttcagggatggcatggaggccagagtgtagggttgc

SEQ ID NO: 61081 - protein, 618 aa, Megasphaera hexanoica; identical to SEQ ID NO: 11111

SEQ ID NO: 61082 - DNA, 50 bp, Megasphaera hexanoica; identical to SEQ ID NO: 11112
  source 1..50: mol_type = genomic DNA

SEQ ID NO: 61083 - DNA, 40 bp, Megasphaera hexanoica
  source 1..40: mol_type = genomic DNA
tcatactgccatgctgtcagatttcctaccacgaggaggg

SEQ ID NO: 61084 - DNA, 50 bp, Megasphaera hexanoica; identical to SEQ ID NO: 42609
  source 1..50: mol_type = genomic DNA

SEQ ID NO: 61085 - DNA, 40 bp, Megasphaera hexanoica
  source 1..40: mol_type = genomic DNA
acacactgccctgcagtcattgtccctaaccagaagaggc

SEQ ID NO: 61086 - protein, 469 aa, Clostridium symbiosum; identical to SEQ ID NO: 18881

SEQ ID NO: 61087 - DNA, 50 bp, Clostridium symbiosum
  source 1..50: mol_type = genomic DNA
cggtgtaacaacctgtactggaagcacatacagtacaggttgttacatta

SEQ ID NO: 61088 - DNA, 40 bp, Clostridium symbiosum
  source 1..40: mol_type = genomic DNA
taatgccggcacctgaaagcataaagattttccggcgccg

SEQ ID NO: 61089 - DNA, 50 bp, Clostridium symbiosum
  source 1..50: mol_type = genomic DNA
cggtgtaacaacctgtactggaagcccatacagtacaggttgttacatta

SEQ ID NO: 61090 - DNA, 40 bp, Clostridium symbiosum
  source 1..40: mol_type = genomic DNA
gaaggacggcaccagaaagcctagatacttcccagctctg

SEQ ID NO: 61091 - protein, 618 aa, Fusicatenibacter saccharivorans
MVGIKEEKKIYLVGIYCRLSKDDGTDNESASIATQKSILTDYVKKQGWHIAKTYVDDGYSGTNFQRPSFQNMIKDIESGLINCVITKDLSRLGRNYLDCGLYLEVFFPEHNVRYIAVNDGVDTLNKSAMDITPFRNILNEMYAADISVKIKSAYRARFQQGKFMGTTAPYGYIKDPADHNHLLIDDKVAHVVKEIFDLALKGNGVAKICRHLNKQHILRPAAYAAERGETGFERHFEGNEDKRYIWSGNSVRSILRSPIYAGNLVGYKRIAANMKSKKRSSKLPEEWEVIPNTHEGIVTQEEFDIVQQLITSRRLPQNKGGFVNIFAGVIKCVDCGCALRAMNVHRRKRPEIIDCVQYSCNNYARNGRSECSAHNIEARDLFNAVLADINCFADMAVNDEKAVRAIEKRLTETDQSRAKALEKERKKLNKRLAELDRLFSSLYEDKVMERITERNFEMMSGKYQKEQLEIEARLKEVTETLNESYEKSRGIRDFLALIRNYQGLKELDATVINALIDKILVSEREKMADGTVKQEIKIYYKFIGFVDELHIIPTKRWAAMSAKNCTVCGVEYVPGSGASRYCSACAKKIRREKSNESKRRSREQKRIACMNCPQKMTD

SEQ ID NO: 61092 - DNA, 50 bp, Fusicatenibacter saccharivorans; identical to SEQ ID NO: 11112
  source 1..50: mol_type = genomic DNA

SEQ ID NO: 61093 - DNA, 40 bp, Fusicatenibacter saccharivorans
  source 1..40: mol_type = genomic DNA
cgtctccagatgtcccacagaataccgtttcccctatcgc

SEQ ID NO: 61094 - DNA, 50 bp, Fusicatenibacter saccharivorans; identical to SEQ ID NO: 42609
  source 1..50: mol_type = genomic DNA

SEQ ID NO: 61095 - DNA, 40 bp, Fusicatenibacter saccharivorans
  source 1..40: mol_type = genomic DNA
tggttccagatgtcccagcttaaaccttttccccaaaagt

SEQ ID NO: 61096 - protein, 510 aa, Tritonibacter mobilis
MAGVINKPTKAVIYARVSGAKQVREGDGLASQENRCREYATYKDYDVVEVFKDDMSGKFERRPAMDRMLAFLRLHPKNSVVVIIDDISRFARNVQAHIALREMLSDAGGILESPSIEFGEDSDSRLVEHMLASVAQHQREKNAEQTSNRMKGRMMNGYAVFSAPIGYTYKKTGSHGRLLTRDEPLASIIKEALEGYASGRFSSQADMKRFLESQPVFPKDLPSGAIRQQKVTDMLNRVIYAGYIEHEPWGITRRKGHHEALISLETYEVIQERRNSRGVAAKRPDIHQDFPLRGAVNCACCDKPMTAYFARSSTGKRYPYYNCQTRDCSEYRKGIRAEKIDSGFEEILRSLTPTKSLMDIAVSMLKDAWDQRGDQAKLAKTEIKRQHKELDKQQDALVERMIETSNPKVMAALESKIAKLEEEKLLLSDKLSQTVKPKSTLGEVIELLREFLSNPWSIYEKGTLEVRKTILKTAFRGPLAFDRENGYRTPQLSVIFEFLSDFTSKCKMVR

SEQ ID NO: 61097 - DNA, 50 bp, Tritonibacter mobilis
  source 1..50: mol_type = genomic DNA
ttacatcgaaatgtaaaatggtgcggtcagaaggagtttgttcgaacgac

SEQ ID NO: 61098 - DNA, 40 bp, Tritonibacter mobilis
  source 1..40: mol_type = genomic DNA
cttggaaagcaaatggtgcggtcgagaagactcgaacttc

SEQ ID NO: 61099 - DNA, 50 bp, Tritonibacter mobilis
  source 1..50: mol_type = genomic DNA
ttacatcgaaatgtaaaatggtgcaatcagaaggagtttgttcgaacgac

SEQ ID NO: 61100 - DNA, 40 bp, Tritonibacter mobilis
  source 1..40: mol_type = genomic DNA
cttggagggaagaagcagcaaggcagaagacttgaacttc

SEQ ID NO: 61101 - protein, 462 aa, Gordonia rubripertincta
MRAIIYCRVSSDPKMRERSVQEQEIDCRAVASANGWDVGEVLIDNDRGASRYSRGDRPAYRRLAEILQPGDVLVTWEASRAQRDLGAYLQLRTLCEQRGVPWSYAGKLHDLTRGDDRFVTGLDALLSEKEVEQTRERVLRSVRANAAAGRPHGKLPFGYMIVRDPDTGQPVDRVPNPDTAPIVREIVTRVLAGDSLYSLCRELNERGVPGPRPKRDGSKSQWIPVTMRKIIESPTYAGLRTHQGQIVGPATWEPLVTMDEHERVKGLLADPRRLTQRGSEPRWLLSGIVRCGVCGSKMNRLKNRGCDSYVCKNGSHTSRKIEAIDAYVTEAVIRRLEGQELVGQIDDDDAEYAAAVEAVRALQQRLDAFADSAADGELSPAALARVESRLRPQLEAAEGRMRALVQSPVVAQMAGDGARERWERLDLHSRRELIRALVDIRIHQVGIGRRGLIGEGVEFTWL

SEQ ID NO: 61102 - DNA, 50 bp, Gordonia rubripertincta
  source 1..50: mol_type = genomic DNA
gtatatcccttttcgacggtatgacctgaaactgtcggatagcgattgta

SEQ ID NO: 61103 - DNA, 40 bp, Gordonia rubripertincta
  source 1..40: mol_type = genomic DNA
gacgatcgcgaagttcgctcccgacaccgccgtcaggtgg

SEQ ID NO: 61104 - DNA, 50 bp, Gordonia rubripertincta
  source 1..50: mol_type = genomic DNA
gtatatcccttttcgacggtatgacgtgaaactgtcggatagcgattgta

SEQ ID NO: 61105 - DNA, 40 bp, Gordonia rubripertincta
  source 1..40: mol_type = genomic DNA
gtccaaccggcagtgtagacgcgacaccgccgtcaggtgg

SEQ ID NO: 61106 - protein, 523 aa, Sinorhizobium fredii; identical to SEQ ID NO: 42041

SEQ ID NO: 61107 - DNA, 50 bp, Sinorhizobium fredii
  source 1..50: mol_type = genomic DNA
gtcggtgataaagctggtagcggaggcccgttctggtctctatcaccgac

SEQ ID NO: 61108 - DNA, 40 bp, Sinorhizobium fredii
  source 1..40: mol_type = genomic DNA
ctgttctaatggtagcggaggagggattcgaacccccgac

SEQ ID NO: 61109 - DNA, 50 bp, Sinorhizobium fredii
  source 1..50: mol_type = genomic DNA
gtcggtgataaagctggtagcggagacccgttctggtctctatcaccgac

SEQ ID NO: 61110 - DNA, 40 bp, Sinorhizobium fredii
  source 1..40: mol_type = genomic DNA
ctgtcctcatggaagaggagacaggatttgaacctgggcc

SEQ ID NO: 61111 - protein, 536 aa, Streptococcus suis
MQVEGFSLDAQEAKIQQYANAFDIEIVKTYQDAGKSGKTILGRTEFMNMISDIEAEKDKVDYVLVFKLSRFGRNAADTLKSLAIMESHGVNLICVDDGLDSSKDSGKLVITILSAVAEMERENIISQAMEGRRQKARAGQWNGGFAPVGYSLVNGQLQVNHEEAESVKMIFDLFANSDMGTIAIAKHLANLDIKKPIRHNSTLPYFSSSGIARILDNPVYNGKIAFGRRESTRDKISGETKVTQSENYILTDGIHEAIIDDETWKKVRKKREANAHKYKRENPNKGDSIYILSGLIKCPLCHAGLYGNKSIKRNKNKKDEYYKNYYYYACKHRKHVDGHKCTFNKQLKTGNLDHEVLSIISKLVSRPDFARKLQEKINIQVDTSRIDSEIEQYKSLFRQLSATKMNLIQQIDSLNFEDPHFQQKSIDLDMRLNTIYDKLADVERLIETSESKREVILKDKMTADNIYKILVNFASFMDVMEDIDKKRLCQMLIEKVEIYDDKNKAGRWVKAIHFKLPIIEEDLEISLDNSTPVEAV

SEQ ID NO: 61112 - DNA, 50 bp, Streptococcus suis; identical to SEQ ID NO: 42092
  source 1..50: mol_type = genomic DNA

SEQ ID NO: 61113 - DNA, 40 bp, Streptococcus suis
  source 1..40: mol_type = genomic DNA
tcctcacacagcacggaccgaggcggttgttaaactaagc

SEQ ID NO: 61114 - DNA, 50 bp, Streptococcus suis
  source 1..50: mol_type = genomic DNA
agtttggacaatagtacaccggttctggcggttgtgaaattgtccaaacg

SEQ ID NO: 61115 - DNA, 40 bp, Streptococcus suis
  source 1..40: mol_type = genomic DNA
tcctcccacaactaggacactggtggttcttattctaggt

SEQ ID NO: 61116 - protein, 536 aa, Streptococcus suis; identical to SEQ ID NO: 47486

SEQ ID NO: 61117 - DNA, 50 bp, Streptococcus suis; identical to SEQ ID NO: 42092
  source 1..50: mol_type = genomic DNA

SEQ ID NO: 61118 - DNA, 40 bp, Streptococcus suis; identical to SEQ ID NO: 61113
  source 1..40: mol_type = genomic DNA

SEQ ID NO: 61119 - DNA, 50 bp, Streptococcus suis; identical to SEQ ID NO: 61114
  source 1..50: mol_type = genomic DNA

SEQ ID NO: 61120 - DNA, 40 bp, Streptococcus suis; identical to SEQ ID NO: 61115
  source 1..40: mol_type = genomic DNA

SEQ ID NO: 61121 - protein, 536 aa, Streptococcus suis; identical to SEQ ID NO: 47486

SEQ ID NO: 61122 - DNA, 50 bp, Streptococcus suis; identical to SEQ ID NO: 42092
  source 1..50: mol_type = genomic DNA

SEQ ID NO: 61123 - DNA, 40 bp, Streptococcus suis
  source 1..40: mol_type = genomic DNA
tccccacacagcacggacagaggcggttgttaaactaagc

SEQ ID NO: 61124 - DNA, 50 bp, Streptococcus suis; identical to SEQ ID NO: 61114
  source 1..50: mol_type = genomic DNA

SEQ ID NO: 61125 - DNA, 40 bp, Streptococcus suis; identical to SEQ ID NO: 61115
  source 1..40: mol_type = genomic DNA

SEQ ID NO: 61126 - protein, 551 aa, Streptococcus suis
MKRKKAYIYTRVSTTMQVEGFSLDAQEAKIQQYANAFDIEIVKTYQDAGKSGKTMLGRTEFMNMISDIEAEKDKVDYVLVFKLSRFGRNAADTLKSLAIMESHGVNLICVDDGLDSSKDSGKLVITILSAVAEMERENIISQAMEGRRQKARAGQWNGGFAPVGYSLVNGQLQVNHEEAESVKMIFDLFANSDMGTIAIAKHLANLDIKKPIRHNSTLPYFSSSGIARILDNPVYNGKIAFGRRESTRDKISGETKVTQSENYILTDGIHEAIIDDETWKKVRKKREANAHKYKRENPNKGDSIYILSGLIKCPLCNAGLYGNKSIKRNKNKKDEYYKNYYYYACKHRKHVDGHKCTFNKQLKTGNLDHEVLSIISKLVSRPDFARKLQEKINIQVDTSRIDSEIEQYKSLFRQLSATKMNLIQQIDSLNFEDPHFQQKSIDLDMRLNTIYDKLADVEMLIETSESKREVILKDKMTADNIYKILVNFASFMDVMEDIDKKRLCQMLIEKVEIYDDKNKAGRWVKAIHFKLPIIEEDLEISLDNSTPVEAV

SEQ ID NO: 61127 - DNA, 50 bp, Streptococcus suis; identical to SEQ ID NO: 42092
  source 1..50: mol_type = genomic DNA

SEQ ID NO: 61128 - DNA, 40 bp, Streptococcus suis; identical to SEQ ID NO: 61113
  source 1..40: mol_type = genomic DNA

SEQ ID NO: 61129 - DNA, 50 bp, Streptococcus suis; identical to SEQ ID NO: 61114
  source 1..50: mol_type = genomic DNA

SEQ ID NO: 61130 - DNA, 40 bp, Streptococcus suis; identical to SEQ ID NO: 61115
  source 1..40: mol_type = genomic DNA

SEQ ID NO: 61131 - protein, 536 aa, Streptococcus suis
MQVEGFSLDAQEAKIQQYANAFDIEIVKTYQDAGKSGKTMLGRTEFMNMISDIEAEKDKVDYVLVFKLSRFGRNAADTLKSLAIMESHGVNLICVDDGLDSSKDSGKLVITILSAVAEMERENIISQAMEGRRQKARAGQWNGGFAPVGYSLVNGQLQVNHEEAESVKMIFDLFANSDMGTIAIAKHLANLDIKKPIRHNSTLPYFSSSGIARILDNPVYNGKIAFGRRESTRDKISGETKVTQSENYILTDGIHEAIIDDETWKKVRKKREANAHKYKRENPNKGDSIYILSGLIKCPLCNAGLYGNKSIKRNKNKKDEYYKNYYYYACKHRKHVDGHKCTFNKQLKTGNLDHEVLSIISKLVSRPGFAKKLQEKINIQVDTSRIDSEIEQYKSLFRQLNATKMNLIQQIDTLNFEVPHFQQKSIDLDMRLNTIYDKIADVETLIERSESKREVILKDKMTADNIYKILVNFASLMDVMEDIDKKRLCQMLIEKIEIYDEKNEAGRWVKAIHFKLPIIEEDLEISLDNSTPVEAV

SEQ ID NO: 61132 - DNA, 50 bp, Streptococcus suis; identical to SEQ ID NO: 42092
  source 1..50: mol_type = genomic DNA

SEQ ID NO: 61133 - DNA, 40 bp, Streptococcus suis; identical to SEQ ID NO: 61113
  source 1..40: mol_type = genomic DNA

SEQ ID NO: 61134 - DNA, 50 bp, Streptococcus suis; identical to SEQ ID NO: 61114
  source 1..50: mol_type = genomic DNA

SEQ ID NO: 61135 - DNA, 40 bp, Streptococcus suis; identical to SEQ ID NO: 61115
  source 1..40: mol_type = genomic DNA

SEQ ID NO: 61136 - protein, 585 aa, Streptococcus dysgalactiae
MNTKVKLIKASNTGARNRNALHLDLKRVAAYCRVSTDSKDQLESYKSQVDYYTNLIKNNKNWTLAGIYADEATTGTTATKRADFMRLISDCQNGDIDMIITKSISRFARNTLDTLKYVRLLKENNVGVVFEEENIDTLTMDGELLLTILSSVAQQEVENTSAHVKKGLKMKMEKGELIGFQGCLGYDYDPITKSISINEEEAKIVRYIFKRYLEGNGGSVIGRELEEQGYLTPRGKTKWSDTTVLGIIKNEKYIGDILMGKTFTVDPITKRRLANFGESDKYHIENHHEPIISKEDFEKAQEIRLRRAQNRNTIANKDRKREKLSRQYAFSSMLECGFCGEILSRRTWHTSSIYKKINWQCVKSTKKGKKYCPHSKGIQEAAIEKAFVESYRQLCHADSTVIDDFLKIVEEEINDNTLVKDLKKIENQLNRIISQERKLVDLHLEDSIDEEVYAKKYKKLTKQKEELLDEKKILELTIKDENSIKERLKQFKKVLENREIIEEFNRTVFESIVDKVVVGRIDKDGTVHPYDLTFYFKTGVKDSQDSNNFKDKRKNAKDNDIKKLCSYKNDEDKKLCSQSKDNARG

SEQ ID NO: 61137 - DNA, 50 bp, Streptococcus dysgalactiae
  source 1..50: mol_type = genomic DNA
ttcccaatcaaaagacaacgcacgtggagacggtagcacttttgtccaaa

SEQ ID NO: 61138 - DNA, 40 bp, Streptococcus dysgalactiae
  source 1..40: mol_type = genomic DNA
tttccacagacgcatcatgtggagtgcgtagtgttgctac

SEQ ID NO: 61139 - DNA, 50 bp, Streptococcus dysgalactiae
  source 1..50: mol_type = genomic DNA
ttcccaatcaaaagacaacgcacgctgagacggtagcacttttgtccaaa

SEQ ID NO: 61140 - DNA, 40 bp, Streptococcus dysgalactiae
  source 1..40: mol_type = genomic DNA
tttccagagactgatgatgctcagagcttgttggtgctaa

SEQ ID NO: 61141 - protein, 573 aa, Mycobacteroides abscessus; identical to SEQ ID NO: 50511

SEQ ID NO: 61142 - DNA, 50 bp, Mycobacteroides abscessus
  source 1..50: mol_type = genomic DNA
tgtcggttcgagtaagaacgttctggtgcacacgctgggccggtactcga

SEQ ID NO: 61143 - DNA, 40 bp, Mycobacteroides abscessus
  source 1..40: mol_type = genomic DNA
tggttgcctgctctgagctggtgccctcggtgagattcga

SEQ ID NO: 61144 - DNA, 50 bp, Mycobacteroides abscessus
  source 1..50: mol_type = genomic DNA
tgtcggttcgagtaagaacgttctcttgcacacgctgggccggtactcga

SEQ ID NO: 61145 - DNA, 40 bp, Mycobacteroides abscessus
  source 1..40: mol_type = genomic DNA
cccttccctgctctgtgctcttgtccccagggagataaga

SEQ ID NO: 61146 - protein, 530 aa, Bacillus velezensis; identical to SEQ ID NO: 26991

SEQ ID NO: 61147 - DNA, 50 bp, Bacillus velezensis
  source 1..50: mol_type = genomic DNA
ctatagtgtttaacaaggaacgccttgtataacactatagaaccttgata

SEQ ID NO: 61148 - DNA, 40 bp, Bacillus velezensis
  source 1..40: mol_type = genomic DNA
cggccattaccggcacgccttgctctgtatagacttcagg

SEQ ID NO: 61149 - DNA, 50 bp, Bacillus velezensis; identical to SEQ ID NO: 61147
  source 1..50: mol_type = genomic DNA

SEQ ID NO: 61150 - DNA, 40 bp, Bacillus velezensis
  source 1..40: mol_type = genomic DNA
aagcctttacccccatgtcttgctcagtgtagaagtcagg

SEQ ID NO: 61151 - protein, 478 aa, Acidipropionibacterium acidipropionici
MVELVSLRKTNEVAAYVRASMDRKGDRWTVETQLRKIRALAEAKDWEVVEVYDDNAVSATKKRRAGTRWAEMLDDARAGRFSMVVAVDMDRLLRSTKDLNTLIDLGLRVVTVDGEIDLSTADGEFRATMLAALARFEARRKAERQIRSNERRRAEGIPASSWKAFGWTREGELIEAEADAVRRAFDAFLGEPSLSIRRIREDLNSAGHLTARGSAFSVDAVRYLLANPLYAGYIKHYASGELYPVQGDAFPPIVGEQTWRAAVAKLEDNVRRSARQGNQPKYLLSTIGLCGKCGATLVSGTNSRKQPTYRCGEQFHLTRQREPVDAMVTEAVLTRLSSVDVHDLVMPQEDDGPDREALLTERNALVERVKELSPLLLDVRQPVLEITEAIRGGKARIDQIDAEILDRSVSVAAKLLGDVDESLGTMERREVVESKWKALDMDRRRMLVDELVTVTIEPIAPGHVKFDPDLIRIEPRRD

SEQ ID NO: 61152 - DNA, 50 bp, Acidipropionibacterium acidipropionici
  source 1..50: mol_type = genomic DNA
gagtgttgcaaccgcgacatgcgctagcttatatcgcggttgcaacactc

SEQ ID NO: 61153 - DNA, 40 bp, Acidipropionibacterium acidipropionici
  source 1..40: mol_type = genomic DNA
cggcgtcatcgacatgcgctacgagaacccgctgtacttg

SEQ ID NO: 61154 - DNA, 50 bp, Acidipropionibacterium acidipropionici
  source 1..50: mol_type = genomic DNA
gagtgttgcaaccgcgacatgcgctcgcttatatcgcggttgcaacactc

SEQ ID NO: 61155 - DNA, 40 bp, Acidipropionibacterium acidipropionici
  source 1..40: mol_type = genomic DNA
ccgcatcatagctctgctctccaagagcccgctgtaagtg

SEQ ID NO: 61156 - protein, 462 aa, Corynebacterium stationis
MDFFIYTRISSDRSGEGAGVQRQKAECLELAKANDLNVLEVFTDNDISAHSGVPRPAFNEMIRRLEAGEGDGIIVWHLDRLYRRNRDLELIVNIVESRKIEIKTVTAGEIDLNTSSGLLMARVIGSMANYEVDHQRERIKASHVDRAKRGTWRGGPIPLGFRSGGKGTLVIDEEEAKDVRFILDSILNGDSLHLISRRMNEPHRVKRRNGARWTNTAVRHLVKSPALGGLSKVSEGEYVPAQWEGIVPPEKWFAVQAILSDPARRTNQGTERRWQGSGVYLCGVCGKALRAKISNGVNYYTCIACHKVSRNQQKLDGLVDDLLIAYLSVPENRLPLVVKQESTTDLNELLSVQAGLIERRNQLGGLFAQGVISSGQLTRGNAEFEKQLKAIERKIDDARESSPVLEMLLSSDDLRERWGSMSADKRAEAIRRLVEVRVNPAGRGTKIFDPSKVEFTWKLCCG

SEQ ID NO: 61157 - DNA, 50 bp, Corynebacterium stationis
  source 1..50: mol_type = genomic DNA
tacagccccacttaaacacacgagaacccgtattgtcaagtgatgcggta

SEQ ID NO: 61158 - DNA, 40 bp, Corynebacterium stationis
  source 1..40: mol_type = genomic DNA
tattgatatgcgttatgaaaatcctctgtacctcgcggaa

SEQ ID NO: 61159 - DNA, 50 bp, Corynebacterium stationis
  source 1..50: mol_type = genomic DNA
tacagccccacttaaacacacgagggcccgtattgtcaagtgatgcggta

SEQ ID NO: 61160 - DNA, 40 bp, Corynebacterium stationis
  source 1..40: mol_type = genomic DNA
tgttgaagagagtggggaaggtcctctgtacatcctggaa

SEQ ID NO: 61161 - protein, 529 aa, Mycobacterium intracellulare
MRALIVVRLSRVTDATTSPERQLKACKDLCAQRGYEVVGIAEDLEISAGKTTPFNRPQLGKWLKRPNEFDVLVVFRVDRIVRRLFDLADLIRYCQDNSVALVSATEAFLDLTAPFGDIVALLVAKVAEMELAAISERNRSAAQHNLRAGKYRGGPPPWGYLPQKDEDGMWKFVQDPVQVGVIHEVVERVLKGEPLRTIAHELSERGVPTPRDRFAEVRGRPVKGYAFHPGGLKRALTSPTLLGRVVISDTTKDAHGRTEALLVGDDGAPVVRADPIISRDVFDRLGVELTGRENRKEPTKRTTSLLLGVIFCDVCGRPAYKLKGGKGRKPRYRCASAQYKNPCSNRSIPLEWAEEELERRILKNLGPMERRQRVWFPGEDHSSELQEVNELLSDLTDQIGVGQFKRGTPQRARLDQRIAALNTRQGELSASPTEPAGWRYEPTGELFSEWWEANETEARNVWLRQMGFRVVWRSHSEGTRTVVDEFRLEGDLTMDLDADWLFGPMADIVSVLSDPDNIDAYNALPPDDV

SEQ ID NO: 61162 - DNA, 50 bp, Mycobacterium intracellulare
  source 1..50: mol_type = genomic DNA
cgggtgtaaagcgctgcattcgcgtacgcgaaaagttgactttgatcgca

SEQ ID NO: 61163 - DNA, 40 bp, Mycobacterium intracellulare
  source 1..40: mol_type = genomic DNA
gggcatgtcgacggtcgagtacgccatcggcaccatcgcg

SEQ ID NO: 61164 - DNA, 50 bp, Mycobacterium intracellulare
  source 1..50: mol_type = genomic DNA
cgggtgtaaagcgctgcattcgcgggcgcgaaaagttgactttgatcgca

SEQ ID NO: 61165 - DNA, 40 bp, Mycobacterium intracellulare
  source 1..40: mol_type = genomic DNA
ggccatgtcggcggccgtgggcggctgcggcgcggccgcg

SEQ ID NO: 61166 - protein, 538 aa, Mycobacterium intracellulare
MRALIAIRLSRVTDATTSPERQLEACRTLCDQRGYEVVGIAEDLDVSGAVDPFNQKHRPNLARWLAGEHVDDSGNVVPFDVIVAWRVDRLTRSVRHLRRLVDWAEDHGKLVVSATEAHFDMSSPFAAVLIALLGTVAEMELTAMRERNRSAAQHNIRAGKYRGGLPPWGYIPDNSTGEWRLVQDDEQVAIIKEVVRRVLKHEPLRAIAHDLTDRGVPTPRDSFAKHKGRPAKGRGWSSGRLKQSLTSESLLGYAMSGGAVVRAEDGSPVVRAEPILTRDKFDRLVKELAGRENRKEPYARSTALLLRVIFCSCGRQMYALKGGQGRQYRYRCASAQYKNNCGGPSCLAPDADQLVEGAVLGLLKDSERLEKVWDPGDDRSAELATIDAELADLAGQLGTAAFLPGTPQRQRLNDRIEKLAHRQAVLSRDVTRPAGWAWKPTGELFGAWWKSQDVVGRNVWLRDAGVRLTFDHGQYRLDLGDVGTMTKQLKPAGAVAQWQQNFATMTESGIAGIEILTNGEMIFHHKSGATVSSSELDN

SEQ ID NO: 61167 - DNA, 50 bp, Mycobacterium intracellulare; identical to SEQ ID NO: 44047
  source 1..50: mol_type = genomic DNA

SEQ ID NO: 61168 - DNA, 40 bp, Mycobacterium intracellulare; identical to SEQ ID NO: 61163
  source 1..40: mol_type = genomic DNA

SEQ ID NO: 61169 - DNA, 50 bp, Mycobacterium intracellulare
  source 1..50: mol_type = genomic DNA
ccgttgtaattctgaatagtcgacggcgcggcgatgtgaatttagcatcg

SEQ ID NO: 61170 - DNA, 40 bp, Mycobacterium intracellulare; identical to SEQ ID NO: 61165
  source 1..40: mol_type = genomic DNA

SEQ ID NO: 61171 - protein, 549 aa, Flavonifractor plautii
MKKEKIKVYTYTRVSTAMQIDGYSLDAQKSRMKAFAEFNDYEIAHEYEDAGKSGKSIEGRTQFNQMMEDIKTGKDGVSFVLVFKLSRFGRNAADVLSTLQVMQDFGVNLICVEDGIDSSKDAGKLMISVLSAVAEIERENIRVQTMEGRIQKAREGKWNGGFAPYGYKLVDGKLEINEEEAPAIRTIYEQYVTTDSGANGIAKYLENHGISKVQRQNGKNPLFDARLIRMILKNPVYCGKIAYGRRKTEKVHGTRNEYRLVEQENFLLVDGLHEAIIPEDVWQAAQVKLAAQAKRYEHVNKGKNECTHLLSGIVKCPICGVGMYGNKCVKRKADGSKYKDFYYYGCKHRSMTRGHKCDYKKQIRKELLDDAVAEVICKLVSNPKFAAMMQEKINMKVDTTAIEQEISNYEKRLRQAYSTKSKLIEEIDSLDPDDRHYSRRKSDLDDRLYGMYDKIEELESLLIAARAKKQAIEAEKLTGDNIYKVLIYFDQLYGKMNDREKRQLIEELISEIQIYPERQPNGQWLKSIKFRLPIIEEDMNISLDNEQQV

SEQ ID NO: 61172 - DNA, 50 bp, Flavonifractor plautii; identical to SEQ ID NO: 45362
  source 1..50: mol_type = genomic DNA

SEQ ID NO: 61173 - DNA, 40 bp, Flavonifractor plautii; identical to SEQ ID NO: 33938
  source 1..40: mol_type = genomic DNA

SEQ ID NO: 61174 - DNA, 50 bp, Flavonifractor plautii; identical to SEQ ID NO: 45362
  source 1..50: mol_type = genomic DNA

SEQ ID NO: 61175 - DNA, 40 bp, Flavonifractor plautii
  source 1..40: mol_type = genomic DNA
cagccgcacctgggatgtggaaaccttggcgggggtgagc

SEQ ID NO: 61176 - protein, 479 aa, Mycobacterium avium
MAKMKSAGQRTGVRSVANNARVAADVEGTGWAVARKVEDCPKLSADRGWPVGDEYVDNDVSAFSGKPRRQYARMLADLASGARDAVIVYNLDRLHRRPVELEEFVALCESVGVRDVATVTADIDLGNDDGLFMARIFAAFAAKESGRKSARIRRKMLQNAEQGLPHGSVRPFGYEDDKITLRTSEAAVVREMVDRYLAGQSLLSLTVWLNDSGVSPAVAKSWQTSAVRQILCSGRIAGLREHRGEVIGPAKWPAIITPAERDRILARIAARSVTKTRAARTYVLSGMLRCGRCGNRLYSQARHSNPDHRVRRYVCLKGPDHGGCGRLTVVAEPVEALLTDAVLTRLDSRDLAKVLAGKASPNHDVAALAAAVEADQTRLDELAGLYADGAISAREWIAARDPITSRIQQARRDIAEATDTSEVYELAGTGGALRGQWPDLDVERQRSIVKSILDHAVIAPGTPGSRSLDINRVQPHWRI

SEQ ID NO: 61177 - DNA, 50 bp, Mycobacterium avium
  source 1..50: mol_type = genomic DNA
agggtagattcccgacttgtcacaaaggttagatgctgctaatatacccc

SEQ ID NO: 61178 - DNA, 40 bp, Mycobacterium avium
  source 1..40: mol_type = genomic DNA
cgggtggacggtgctggagaacctcaaatgcctgtgccgc

SEQ ID NO: 61179 - DNA, 50 bp, Mycobacterium avium
  source 1..50: mol_type = genomic DNA
agggtagattcccgacttgtcacattggttagatgctgctaatatacccc

SEQ ID NO: 61180 - DNA, 40 bp, Mycobacterium avium
  source 1..40: mol_type = genomic DNA
cagctgggcgctgctgaggttcctgaactgcctgttcctg

SEQ ID NO: 61181 - protein, 524 aa, Blautia coccoides
MKRCACYTRKSIFSDKSESTKNQARMCKDYIDCHYSEPGTYIIYEDEGKTGANTDRPELRRLMDDIRNDSIDTLIVYQLDRLSRDVKDFSNIYAELEEHHVQFVSIKENIDTSTPIGKAMMYIAVVFAQMERETIADRVYDNMVGLSGSGWWVGGNPPVGYRRKRIETPDGKKHVTIEPVPDQIEYIKSMHKTFQKYNFSLNGFQTYLKSNNFLTLNGKFFSSSQLYKILTIPYCVQATQRVYDYFAERGCIMNPQCPRELWDGKHGVMVYGRSTERNHKHELNPPEKWRVCIGKHDAFIDDETWLRTQEKFRKNVFDKKMKYDTPLLKGIVRCKCGTLMSVARKKKTNGISSYYYCVKRTRQGADYCDMSQINIDTLDANVLEIFKEIEIDNSIINKYASMAKKINYTVKKKSITKRIQQENEKIHNLAGTLSEYKSSLAAKYIIEEINEHDAILTQLNRDLLEIQLTERRQEKEQGTLADKIVMISEFVRNINILTAEEKNALAKKCIKSCTWDGKKLFITF

SEQ ID NO: 61182 - DNA, 50 bp, Blautia coccoides
  source 1..50: mol_type = genomic DNA
gttcatgtttttatttcgcgtctatccggccgcagaataataaaatgact

SEQ ID NO: 61183 - DNA, 40 bp, Blautia coccoides
  source 1..40: mol_type = genomic DNA
ctcccctactataattctatccggccgcatcctcaaagca

SEQ ID NO: 61184 - DNA, 50 bp, Blautia coccoides
  source 1..50: mol_type = genomic DNA
gttcatgtttttatttcgcgtctaaacggccgcagaataataaaatgact

SEQ ID NO: 61185 - DNA, 40 bp, Blautia coccoides
  source 1..40: mol_type = genomic DNA
cttccttattttctttctaaacttccccattctcaaagaa

SEQ ID NO: 61186 - protein, 479 aa, Mycobacterium dioxanotrophicus; identical to SEQ ID NO: 35836

SEQ ID NO: 61187 - DNA, 50 bp, Mycobacterium dioxanotrophicus; identical to SEQ ID NO: 35837
  source 1..50: mol_type = genomic DNA

SEQ ID NO: 61188 - DNA, 40 bp, Mycobacterium dioxanotrophicus
  source 1..40: mol_type = genomic DNA
ccgccagaagaacacgagcaacgccagcgcggtcgcgacg

SEQ ID NO: 61189 - DNA, 50 bp, Mycobacterium dioxanotrophicus
  source 1..50: mol_type = genomic DNA
gggacgtattaacgacttgtcaccaggcttaggtgctagtaaactaccct

SEQ ID NO: 61190 - DNA, 40 bp, Mycobacterium dioxanotrophicus
  source 1..40: mol_type = genomic DNA
ccagcacaggagcaggagcagcgccagcccggtcagggcc

SEQ ID NO: 61191 - protein, 547 aa, Burkholderia gladioli
MATKARVYSYLRFSDPKQAAGGSIDRQLEYAARWAAERDLLLDASLSLRDEGLSAYHQRHVKQGALGVFLRAVEDGHVPPGSVLIVEGLDRLSRAEPLQAQAQLAQIVNAGITVVTASDGREYNRERLKAQPMDLVYSLLVMIRAHEESDTKSKRVKAAIRRQCQGWIAGTWRTPIRVGKDPQWVREVEGKFELIPERGAAIRVVVDMYKKGHGAVRMLRDLHNSGMTITNAGLPSAPQLYKLLANRMLIGEKAVELDGEQFRLEGYYPPVLSPAEFADLRNTAGERGRRKGKGEIPGVVTGLGIAYCGYCGAAVVAQNIMGRRRMANGLPYPGHRRLHCVTYSSSAGCKVSGSCSVAPVERALMLYCSDQMNLTRLLEGDSGVTALHAELAHARAAIADMERQISRVTDALLTDEEQAPAALLKRMRDMEADLERERHRCEALELRVHAAASAEAPAAADAWSTLARGVEELDYDARMQARQLVADTFSRIVVYQSGFYPETDDGLIGLMLVAKRGSTRLLHVDRRTGEWRSADDVAVADDLPLPS

SEQ ID NO: 61192 - DNA, 50 bp, Burkholderia gladioli
  source 1..50: mol_type = genomic DNA
gatttatattgagtatcctatgggcagccgagggatactatacctatcct

SEQ ID NO: 61193 - DNA, 40 bp, Burkholderia gladioli; identical to SEQ ID NO: 59518
  source 1..40: mol_type = genomic DNA

SEQ ID NO: 61194 - DNA, 50 bp, Burkholderia gladioli
  source 1..50: mol_type = genomic DNA
gatttatattgagtatcctatgggaggccgagggatactatacctatcct

SEQ ID NO: 61195 - DNA, 40 bp, Burkholderia gladioli; identical to SEQ ID NO: 38845
  source 1..40: mol_type = genomic DNA

SEQ ID NO: 61196 - protein, 547 aa, Burkholderia gladioli; identical to SEQ ID NO: 52316

SEQ ID NO: 61197 - DNA, 50 bp, Burkholderia gladioli; identical to SEQ ID NO: 38847
  source 1..50: mol_type = genomic DNA

SEQ ID NO: 61198 - DNA, 40 bp, Burkholderia gladioli; identical to SEQ ID NO: 59518
  source 1..40: mol_type = genomic DNA

SEQ ID NO: 61199 - DNA, 50 bp, Burkholderia gladioli; identical to SEQ ID NO: 38849
  source 1..50: mol_type = genomic DNA

SEQ ID NO: 61200 - DNA, 40 bp, Burkholderia gladioli; identical to SEQ ID NO: 38845
  source 1..40: mol_type = genomic DNA

SEQ ID NO: 61201 - protein, 551 aa, Burkholderia gladioli
MATKARVYSYLRFSDPKQAAGGSIDRQLEYAARWAAERDLLLDASLSLRDEGLSAYHQRHVKQGALGVFLRAVEDGHVPPGSVLIVEGLDRLSRAEPLQAQAQLAQIVNAGITVVTASDGREYNRERLKAQPMDLVYSLLVMIRAHEESDTKSKRVKAAIRRQCQGWIAGTWRTPIRVGKDPQWVREVDGKFELIPERAAAIRVVVDMYKKGHGAVRTLRDLHNSGMAITNAGLPSAPQLYKLLANRMLIGEKTVELDGEQFRLESYYPPVLSPAEFADLRNAAGERGRRKGKGEIPGVVTGLGITYCGYCGAAVVAQNIMGRRRMANGLPYPGHRRLHCVTYSSSAGCKVSGSCSVAPVECALMLYCSDQMNLTRLLEGDSGVTALHAELAHARAAVADLERQIGRVTDALLTDEGQAPAALLKRMREMETDLERERHRCEALELRVHAIATAEAPAAADAWSTLVRGVEELDYDARMQARQLVADTFSRIVVFQSGFYPKTDDGLIGLMLIAKRGSTRLLHVDRRTGAWRSADDVKTADDIPLPIDAKA

SEQ ID NO: 61202 - DNA, 50 bp, Burkholderia gladioli
  source 1..50: mol_type = genomic DNA
ggtatattttgaatatcctatgggcagccgagcgatactatacctatcct

SEQ ID NO: 61203 - DNA, 40 bp, Burkholderia gladioli; identical to SEQ ID NO: 59518
  source 1..40: mol_type = genomic DNA

SEQ ID NO: 61204 - DNA, 50 bp, Burkholderia gladioli
  source 1..50: mol_type = genomic DNA
ggtatattttgaatatcctatgggaggccgagcgatactatacctatcct

SEQ ID NO: 61205 - DNA, 40 bp, Burkholderia gladioli; identical to SEQ ID NO: 38845
  source 1..40: mol_type = genomic DNA

SEQ ID NO: 61206 - protein, 550 aa, Burkholderia gladioli; identical to SEQ ID NO: 38851

SEQ ID NO: 61207 - DNA, 50 bp, Burkholderia gladioli; identical to SEQ ID NO: 38852
  source 1..50: mol_type = genomic DNA

SEQ ID NO: 61208 - DNA, 40 bp, Burkholderia gladioli; identical to SEQ ID NO: 59518
  source 1..40: mol_type = genomic DNA

SEQ ID NO: 61209 - DNA, 50 bp, Burkholderia gladioli; identical to SEQ ID NO: 38854
  source 1..50: mol_type = genomic DNA

SEQ ID NO: 61210 - DNA, 40 bp, Burkholderia gladioli; identical to SEQ ID NO: 38845
  source 1..40: mol_type = genomic DNA

SEQ ID NO: 61211 - protein, 563 aa, Burkholderia gladioli
MAAKARVYSYLRFSDPKQAAGGSVDRQMEYAARWATDNEMELDASLSLRDEGLSAYHQRHVRQGALGVFLRAVEDGQVPAGSVLIVEGLDRLSRAEPIQAQAQLAQIVNAGITVVTASDGRQYNRERLKAQPMDLVYSLLVMIRAHEESDTKSKRVKAAIRRQCQSWVAGTWRTPIRVGKDPQWVREVGGKFELIQERAAAIRLVVDMYKKGHGAVHTLRHLHGRGLAITDAGLPGASQLYKLLANPMLIGEKTVKLDGEHFRLEGYYPAVLTPAEFGDLRDLAAQRGRRKGKGEIPGVVTGLGVTYCGYCGAAIVAQNIMGRRRMANGLPYPGHRRLHCVTYSSGAGCKVSGSCSVAPVERALMLYCSDQMNLTRLLEGDSGVTALNAKLAHTRTAAADLERQINRVTDALLTDEEQAPITLLKKLRDMEAELERKRHYCDSLEHQVHATAVADAPAAADAWSTLVRGVEILDYDARMQARQLVADTFSRIVVYQSGFYPETDDGLIGLMLVAKRGCTRLLHIDRRSGEWLSADDIILHNNLPLPRDHLNDSVALGPATYDN

SEQ ID NO: 61212 - DNA, 50 bp, Burkholderia gladioli
  source 1..50: mol_type = genomic DNA
ggtttactttgcgctgccctggggcagccaagggagaccatacctatacg

SEQ ID NO: 61213 - DNA, 40 bp, Burkholderia gladioli; identical to SEQ ID NO: 59518
  source 1..40: mol_type = genomic DNA

SEQ ID NO: 61214 - DNA, 50 bp, Burkholderia gladioli
  source 1..50: mol_type = genomic DNA
ggtttactttgcgctgccctggggaggccaagggagaccatacctatacg

SEQ ID NO: 61215 - DNA, 40 bp, Burkholderia gladioli; identical to SEQ ID NO: 38845
  source 1..40: mol_type = genomic DNA

SEQ ID NO: 61216 - protein, 545 aa, Clostridium symbiosum; identical to SEQ ID NO: 50001

SEQ ID NO: 61217 - DNA, 50 bp, Clostridium symbiosum
  source 1..50: mol_type = genomic DNA
gtcacctattccaactatccaacagatgttggatagtgcgtaggggcgac

SEQ ID NO: 61218 - DNA, 40 bp, Clostridium symbiosum
  source 1..40: mol_type = genomic DNA
ggatattatcattgccaccgacgcgggccgtgagggagag

SEQ ID NO: 61219 - DNA, 50 bp, Clostridium symbiosum
  source 1..50: mol_type = genomic DNA
gtcacctattccaactatccaacaagtgttggatagtgcgtaggggcgac

SEQ ID NO: 61220 - DNA, 40 bp, Clostridium symbiosum
  source 1..40: mol_type = genomic DNA
ggaaagaatcatggccaagagagcctgccgccagggagag

SEQ ID NO: 61221 - protein, 544 aa, Agrobacterium tumefaciens; identical to SEQ ID NO: 44156

SEQ ID NO: 61222 - DNA, 50 bp, Agrobacterium tumefaciens
  source 1..50: mol_type = genomic DNA
gtttgcggttcgcagttctgtactgaaatggcgcgccgcgccgggtgaag

SEQ ID NO: 61223 - DNA, 40 bp, Agrobacterium tumefaciens
  source 1..40: mol_type = genomic DNA
agacgatgtcagggtaagataaatggcgcacccggcagga

SEQ ID NO: 61224 - DNA, 50 bp, Agrobacterium tumefaciens
  source 1..50: mol_type = genomic DNA
gtttgcggttcgcagttctgtacttaaatggcgcgccgcgccgggtgaag

SEQ ID NO: 61225 - DNA, 40 bp, Agrobacterium tumefaciens
  source 1..40: mol_type = genomic DNA
agaatatatgagggactgataaatgggccacccggcaagt

SEQ ID NO: 61226 - protein, 511 aa, Clostridium hylemonae
MNIAAYCRVSTDKSDQLNSLEAQKTFFTEYTEKNGHNLVKLYADEGISGTKIRNRKEFLQLMRDAQHGLFDMVVVKDISRFARNTVDLLQSIRTLKALGIETTFLTANMTVLGQSEFVLTIFGALAQEESANTSKRVKFGKKMNAEKGRVPNIVYGYDKTIGDYFNLEINKEESKVVHQIYDWYTKEGYGAAKIANMLNEKGMKTKRNCSFSQNAVCRILTNELYTGKIINGKQEVTDFLTGVRAEKDESEWLVSDRPDLRIIEPEQYEKAQEILAGRHGAFNMKRERQSNKYLFSTLIKCKECGWSFRRSVRTYKNTYVRWVCSGHNGKGADSCPNAVTVDEEELIQALEDYFAGMLKSKKNIINHVVKEFTKTYKAKDENEHYEKELRDNLAKLKRTRQKYMDMYTDDLISREELNEKIGGMKAEVEKLENDLKLVQYNLDKGDQLEEVIKKTFKNIEDITSIRDMTNEQLKQIIQKIEVDKEGNVDIYLRLFGDLGLDESVLISDDHA

SEQ ID NO: 61227 - DNA, 50 bp, Clostridium hylemonae
  source 1..50: mol_type = genomic DNA
gcgttctaattagcgacgaccatgcatatggtagtaacaaaatagaacgg

SEQ ID NO: 61228 - DNA, 40 bp, Clostridium hylemonae
  source 1..40: mol_type = genomic DNA
ggtaagtaaatctaccatacataaggatgtgaccgagcgg

SEQ ID NO: 61229 - DNA, 50 bp, Clostridium hylemonae
  source 1..50: mol_type = genomic DNA
gcgttctaattagcgacgaccatgcttatggtagtaacaaaatagaacgg

SEQ ID NO: 61230 - DNA, 40 bp, Clostridium hylemonae
  source 1..40: mol_type = genomic DNA
gttaaggaaatattccaaactaaaggagcggacggagctg

SEQ ID NO: 61231 - protein, 555 aa, Brevibacterium casei
MSTTSARTPDPVRSLIEPPQGTALAVSYLRVSTKEQAEKGGTDEGFSIPAQREANRRKAEQLGAVIVKEFIDAGESARKADRPELMRMIQYVKRNRVAYCIVHKVDRLARNRADDVTIHLALQEAGVMLVSATENIDETPSGMPPHGIMSTIAEFYSRNLATEVIKGMTQKAATGGTVGKAPIGYLNIRSRDELGREVRTVRLDPDRAPLIEWAYKAYASGNWTVSQIHDELTSRGLVSLPTPKRPSKPLAVSSVHRMLTNPYYKGDVIYRGVAYKGAHQPLVPAEVWYQVQSVLTAHKSASEATQVHDHYLKGTVYCGACGSRLIVSNAKNRHGNVYPYFVCSGRHSKRTDCTRQAILIEDVEHLIENYYQRVQLTPARREALAGMLHHEFDRLMSAEADELAQLTANRDRLEHEQDRLMQAHYADAIPLAVLKREQDRIAGELDQVNRRLDAHHGEYTDARAHLDDALNLLENCADIYARRDDANRRLCNQAFFTKVYIEEDDELRVENNRPFEMLLDPEVNADALTWAENADKARTPALDSSGQGSSLVRWC

SEQ ID NO: 61232 - DNA, 50 bp, Brevibacterium casei
  source 1..50: mol_type = genomic DNA
aaggttcgagccttgtgcgttggtgcacctccgtagagagtttgagaacc

SEQ ID NO: 61233 - DNA, 40 bp, Brevibacterium casei
  source 1..40: mol_type = genomic DNA
tcaattgcctgcgcactgcgcccccggcgggctcgaaccc

SEQ ID NO: 61234 - DNA, 50 bp, Brevibacterium casei
  source 1..50: mol_type = genomic DNA
aaggttcgagccttgtgcgttggtctacctccgtagagagtttgagaacc

SEQ ID NO: 61235 - DNA, 40 bp, Brevibacterium casei
  source 1..40: mol_type = genomic DNA
tcactcacctgtgcactccctcccctgaagggtggaacac

SEQ ID NO: 61236 - protein, 540 aa, Salinispora arenicola; identical to SEQ ID NO: 60191

SEQ ID NO: 61237 - DNA, 50 bp, Salinispora arenicola
  source 1..50: mol_type = genomic DNA
gttcgcgcaatgcttcacgtggtgtgggccggacgatgcaccatgcgaac

SEQ ID NO: 61238 - DNA, 40 bp, Salinispora arenicola
  source 1..40: mol_type = genomic DNA
cacacaatggtgcggtcggtggggcgggcgggacttgaac

SEQ ID NO: 61239 - DNA, 50 bp, Salinispora arenicola
  source 1..50: mol_type = genomic DNA
gttcgcgcaatgcttcacgtggtgcaggccggacgatgcaccatgcgaac

SEQ ID NO: 61240 - DNA, 40 bp, Salinispora arenicola
  source 1..40: mol_type = genomic DNA
cacagtcttgtgctgtcggcaggggtgtggggggttgaac

SEQ ID NO: 61241 - protein, 478 aa, Micrococcus luteus
MVELVSLRKTNEVAAYVRASMDRKGDRWTVETQLRKIRALAEAKDWEVVEVYDDNAVSATKKRRAGTRWAEMLDDARAGRFSMVVAVDMDRLLRSTKDLNTLIDLGLRVVTVDGEIDLSTADGEFRATMLAALARFEARRKAERQIRSNDRRRAEGIPASSWKAFGWTREGELIEAEADAVRRAFDAFLGEPSLSIRRIREDLNSAGHLTARGSAFSVDAVRYLLANPLYAGYIKHYASGELYPVQGDAFPPIVGEQTWRAAVAKLEDNVRRSARQGNQPKYLLSTIGLCGKCGATLVSGTNSRKQPTYRCGEQFHLTRQREPVDAMVTEAVLTRLSSVDVHDLVMPQEDDGPDREALLTERNALVERVKELSPLLLDVRQPVLEITEAIRGGKARIDQIDAEILDRSVSVAAKLLGDVDESLGTMERREVVESKWKALDMDRRRMLVDELVTVTIEPIAPGHVKFDPDLIRIEPRRD

SEQ ID NO: 61242 - DNA, 50 bp, Micrococcus luteus
  source 1..50: mol_type = genomic DNA
gagtgttgcaaccgcgatatacgctagcgtatatcgcggttgcaacactc

SEQ ID NO: 61243 - DNA, 40 bp, Micrococcus luteus
  source 1..40: mol_type = genomic DNA
catgtacagggggttctcgtagcgcaggtcgatcacgccg

SEQ ID NO: 61244 - DNA, 50 bp, Micrococcus luteus
  source 1..50: mol_type = genomic DNA
gagtgttgcaaccgcgatatacgccagcgtatatcgcggttgcaacactc

SEQ ID NO: 61245 - DNA, 40 bp, Micrococcus luteus
  source 1..40: mol_type = genomic DNA
cctgtttggggggtactggcagcccagatccatcaagcca

SEQ ID NO: 61246 - protein, 550 aa, Nocardia puris
MIRFAFAGRVSTEDQQDPEASRNWQLGRANALVGQHGRIVVEFFDIGQSRSIPWKRRPAAGRLLELLKEPERGFDAVVIGEPQRAFYGNQFGLTFPVFVHYGVQLWVPEVGGPIDPDSEAHDLIMSVFGGMSKGERNRIKIRVRAAMAAQTQVEGRYLGGRPPYGYRLADAGPHPNPGKAADGKRLHTLEPDPVTAPVVQRIFSEYLSGIGIFAIAQRLTADNILCPSAYDRRRNSHRSGAAWSKSAVRAILGNPRYTGYEVWNKQRKQEFLIDVDDVALGHHTRLAWNPKNEWVYSDQPAHSALIGRDAFEQTQLRLAARGPQSTGRTTTRRQHPYAFKGLLFHDACGRRMQGNWNHGLPHYRCRYPSEYALANKLDHPTTVYLREDQLSGPIDSWLADIFHPDRIEHSLTMLEDAQADITPAIESARRSLTEHDRKLSRYRAALEAGTDPALVAGWTQQVQRERQATAAQLATLEAEQRGNHPMTREEIHQLVTSLGGLVHILKAADPTDKLEVYRQLGLKLTYDHEKRVVVAETAPQPPVCVVSVSG

SEQ ID NO: 61247 - DNA, 50 bp, Nocardia puris
  source 1..50: mol_type = genomic DNA
cgtgtgcgtagtgtctgtgtccggagagggagttgaccactacgcacacg

SEQ ID NO: 61248 - DNA, 40 bp, Nocardia puris
  source 1..40: mol_type = genomic DNA
catcgagtttcgtgtccggagggggacttgaacccccacg

SEQ ID NO: 61249 - DNA, 50 bp, Nocardia puris
  source 1..50: mol_type = genomic DNA
cgtgtgcgtagtgtctgtgtccggttagggagttgaccactacgcacacg

SEQ ID NO: 61250 - DNA, 40 bp, Nocardia puris
  source 1..40: mol_type = genomic DNA
caacaagttttgtatcaggttgtgcaattcaacctccagg

SEQ ID NO: 61251 - protein, 493 aa, Gemmiger formicilis
MTAVIYARYSSDNQREESIEGQIRECTAYAEKNGIAVVKHYIDRALSAKTDNRPDFQQMIKDSEKRLFDIVLVWKLDRFARNRYDSAHYEYQLERNHVKLVSATEPISDSPAGIMVKSMLTGMAEYYSAELSEKVVRGMTENVLKGKYNGGTIPIGFKVDEEKFFQIDPLKAPFVVEAFQRYNDGATMKELMNWLNDSGVTTNRKQKFTYNSVQTLLTNKRYIGENHFKDIVMPDSIPAIVDKDLFEEVQQKIKKNSRAPARHKAEDDYLLTTKLFCGMCGAMIFGECGTGRNKVVHHYYKCATAKRFKTCKKKIVRKEWLEDLVVAETMKLIQDDAVIDAIVAEVMELQDQENTKLPLLEKQMREVENGIENMLNAIQAGVLTNSTKSRLEKLEAQQKELEVRIAEEKIARPRLSENQVRFWLTRFRKLEPNVKSHRETLINTFVNAVYLYDEKVLITFNYKDGTKTITFDEIAAKDAPESNGSDLGCFAPP

SEQ ID NO: 61252 - DNA, 50 bp, Gemmiger formicilis; identical to SEQ ID NO: 60447
  source 1..50: mol_type = genomic DNA

SEQ ID NO: 61253 - DNA, 40 bp, Gemmiger formicilis
  source 1..40: mol_type = genomic DNA
ggttcgaatcctgcatggcccaccaaaaagagacgtgcaa

SEQ ID NO: 61254 - DNA, 50 bp, Gemmiger formicilis; identical to SEQ ID NO: 60449
  source 1..50: mol_type = genomic DNA

SEQ ID NO: 61255 - DNA, 40 bp, Gemmiger formicilis
  source 1..40: mol_type = genomic DNA
gtttgaaatacggcaagaattaacaaaaagtgacctgcaa

SEQ ID NO: 61256 - protein, 547 aa, Eubacterium callanderi; identical to SEQ ID NO: 11466

SEQ ID NO: 61257 - DNA, 50 bp, Eubacterium callanderi; identical to SEQ ID NO: 11112
  source 1..50: mol_type = genomic DNA

SEQ ID NO: 61258 - DNA, 40 bp, Eubacterium callanderi
  source 1..40: mol_type = genomic DNA
ttgtccgtggcgaccagcggatttggaacagcaggaaggg

SEQ ID NO: 61259 - DNA, 50 bp, Eubacterium callanderi; identical to SEQ ID NO: 19274
  source 1..50: mol_type = genomic DNA

SEQ ID NO: 61260 - DNA, 40 bp, Eubacterium callanderi
  source 1..40: mol_type = genomic DNA
ctgtttgttgctaccagtgaattttgagcagcagcagggc

SEQ ID NO: 61261 - protein, 514 aa, Butyricicoccus faecihominis
MSTEYALYLRKSRADLEAEAHGEGDTLARHEHILMELAKSRALPIGAIYREIVSGERIANRPVMQQLLSEVEDGRWKGVLVTETSRLARGDTIDQGIVAQAFKFSGTLIVTPSKTYDPTQEADEEWMEFGLFMSRQEYRMIRRRMTAGMQAAKREGRYISNVPPYGYERYKLDGRGWSLRPIEPQAKVVRMIFDLYLSGLGYCEIEKRLNALHIPAPKSDKWSARTIPGILRNAHYIGCIPAAFRPGKKVVKDGQVKVTRPRVKSCELYKGLHEPIIDRAVWDQVQARLGKNAAVRTPGNRQQSNPLAGLIVCDCCGKRMQRRPQTGTGSQTQIQCTTRGCATVAHNADELERLVLESLRTFLAQIEVGTPAAPDLSAERHALTEIEKQLTDLDARLRRTFELVEDGTYSREIFLSRQAELTAERERLTADHAAIRQKIDQAQHEYDARTGLAPAVRHVLDTYNTDLPAADRNKLLKQVIDRIDYHKRTRTRWTKEQDLSLTLHPVVFSSSSNR

SEQ ID NO: 61262 - DNA, 50 bp, Butyricicoccus faecihominis
  source 1..50: mol_type = genomic DNA
aaccgataacataaatgcgcgggtgaacccgcccatcaaagttatccata

SEQ ID NO: 61263 - DNA, 40 bp, Butyricicoccus faecihominis
  source 1..40: mol_type = genomic DNA
gacggacatcggcacggaagaacttgcgcacatggagatg

SEQ ID NO: 61264 - DNA, 50 bp, Butyricicoccus faecihominis
  source 1..50: mol_type = genomic DNA
aaccgataacataaatgcgcgggttcacccgcccatcaaagttatccata

SEQ ID NO: 61265 - DNA, 40 bp, Butyricicoccus faecihominis
  source 1..40: mol_type = genomic DNA
gacggacggcaggatggattcacttggcgacatggcgagg

SEQ ID NO: 61266 - protein, 542 aa, Roseburia hominis
MNIAAYCRVSTDKSDQLNSLETQKEFFLEYTKHTGDNLIKLYADEGISGTKIKNRKEFQRMLADAEKGLFDMVVVKDISRFARNTVDLLQSVRKLKSLGIETQFLTANMTSMGNSEFVLTIFGALAQEESANTSKRIKFGKKMNAEKGRVPNIVFGYDKTIGDYFNLSINDNEAMTIRQIFQWYTEEGYGGSKIANMLNERGIKTKRGNNWSQNSVCRILTNEIYTGKIINGKEEIADFLTGQRKEKDESEWLVTLRPELRIIEDEVFDKAQDILKGRHDSFKITHERQSNKYLFSTLIKCKECGWSFRRTVRQYKNTYVRWVCSGHNGKGADSCPNAVTVDEEELIQALQDYFQEILSKKKKVINYVIKEFQRVYKAKDENIEYEKQLNTELNRLRKSREKYMDMYTDDLISREELNEKIGGMRKEIERLENELKMVSYHLTKGEQLEAILNSTFKQLEDITDVHEMTNAQLKRLIQKIEVDKEGNVDIYLRLIGDLGLDEAVLIEGTENSEENNDDSANKLNVNKMSSHIKTAPICHNNT

SEQ ID NO: 61267 - DNA, 50 bp, Roseburia hominis
  source 1..50: mol_type = genomic DNA
ccgctccaatttgtcacaacaatacatatagacgtaacaatgtagaacga

SEQ ID NO: 61268 - DNA, 40 bp, Roseburia hominis
  source 1..40: mol_type = genomic DNA
gattagcaagagcacggtacataaggacgtcaccgagcgc

SEQ ID NO: 61269 - DNA, 50 bp, Roseburia hominis
  source 1..50: mol_type = genomic DNA
ccgctccaatttgtcacaacaatatgtatagacgtaacaatgtagaacga

SEQ ID NO: 61270 - DNA, 40 bp, Roseburia hominis
  source 1..40: mol_type = genomic DNA
gaatcgcttgagcacagtatgtaaaggcttcagtgagctc

SEQ ID NO: 61271 - protein, 585 aa, Bifidobacterium animalis
MARKSPKTLDAAHPLSCVLYIRVSTKLQVEKGESIDAQRFELTRYAENHDMRVLGEYVDAGFSGKNVQGRPQFRQMMDDIIKAQPSKRPAYVLVFKLSRFGRNAADTWNSLQTLQDYGVELCCVKDGIDSGTSMGKAMLSIAAVFAEMERDNIRTQTMSGREEKARKGYWNGGQAPFGYRLVDKGNKFKELEVDEDEAKVVRRIFEMYAYENKGSMAIATWLNNHGIKKKPRGNARMDTFSSGTVQRMITNPVYIGKIAYGRRRTETIEGTRGETHVVKSDGYEMHDGQHDAIIDDATWAAAQALVGTRKPNMKTHDDGHVNMLNGILICPACGRKMSSKPNRGKLKKDGTRGKTTWAYYCPHTSKARGASCTFKSQYPQECVDAEVVQLVSLASRSDAFVDALRRRIDDATDIEQLKEDIERIEGEKAANDKRMRMLMTQIDSLDPADRSYERKFNDLQRRLDDLYDRDAGLSEALDETQAKMTTAEKRTDGERRLLEELDRIPELLEGADEQTRFDLIHEAVSEVHILPDKNPRKERVVANVTFKCPVRFFWEEIPGVAEGYTPMTPDSLGENNFRDDEAHVE

SEQ ID NO: 61272 - DNA, 50 bp, Bifidobacterium animalis
  source 1..50: mol_type = genomic DNA
ttccgagatgacgaggcacacgttgagacggttgctgttctatctcggaa

SEQ ID NO: 61273 - DNA, 40 bp, Bifidobacterium animalis
  source 1..40: mol_type = genomic DNA
cccgcagacccaccatgtggagaccgtcgcagtcttcgtg

SEQ ID NO: 61274 - DNA, 50 bp, Bifidobacterium animalis
  source 1..50: mol_type = genomic DNA
ttccgagatgacgaggcacacgttgggacggttgctgttctatctcggaa

SEQ ID NO: 61275 - DNA, 40 bp, Bifidobacterium animalis
  source 1..40: mol_type = genomic DNA
acaacagacaccccctgtggggaccttcgtaagcttagtg

SEQ ID NO: 61276 - protein, 490 aa, Bacillus toyonensis
MIANENIKNVAIYLRLSRDEENKGIESILENHRNKLTELCQQNKWKYEIFQEIASSRTIELREQLTDMLERVKQNLYDAVVVMDVDRLSRNEFDASQIFKILSDSNTVIVTPTKTYDWSRDEDNLLLGIQSLVAAQEYKQIKKRMTAGKRSASEKGLWVHGIPPLGYDKDLATRKLVPNEDAKHVQFIFNSIVNHGKTVSDVYHELNMMKVKTRTNSTFAFNSVVRIVNNEVYKGTIVSNKYLDKNAMRPKEEWHYVENVHPAIVDEATWEKANKIVNTYSFSAPRSRNKIYPTTKLIFCGNCGRVQGAQMAGTGKMYLKVCQRCKNRTFLYEPILRIIKDRVASHVPHILKEITAIEQNDNSADIEYKKQQIQKQMKAIERAIEKIKEAYELDEYTIAEFKDRKAKRENELKQLKAEFDHVEQQDPKDKIADLNEIKQRIEYLLQNWQCLDGEGLTDEDVNRNLHFIIERIEWTYGKSDEQPTVKIKYK

SEQ ID NO: 61277 - DNA, 50 bp, Bacillus toyonensis; identical to SEQ ID NO: 60987
  source 1..50: mol_type = genomic DNA

SEQ ID NO: 61278 - DNA, 40 bp, Bacillus toyonensis; identical to SEQ ID NO: 21043
  source 1..40: mol_type = genomic DNA

SEQ ID NO: 61279 - DNA, 50 bp, Bacillus toyonensis
  source 1..50: mol_type = genomic DNA
aaataatccctaaattcgtaaccagctggttgagaacttagggactacgt

SEQ ID NO: 61280 - DNA, 40 bp, Bacillus toyonensis; identical to SEQ ID NO: 39485
  source 1..40: mol_type = genomic DNA

SEQ ID NO: 61281 - protein, 515 aa, Bacillus tropicus
MKTAIYLRKSRADLEAEARGEGETLAKHRTTLLKIAKEMNLNVLSVREEIVSGESLVKRPEMLALLEEIEDNEYDVVLCMDMDRLGRGGMKEQGIILETFKRSNTKIMTPRKTYDLNDEWDEEYSEFEAFMARKELKIITRRMQRGRVASVEAGNYLGTHAPFGYDIHRLNKRERTLTINPEEASVVRMIFDWYANEDMGASAIRSKLNDLGYKSKLGNDWNPYSILDILKNNVYIGKVTWQKRKEVKRPDAVKRSCARQDKSDWIIADGKHEPIIPESLFEQVQEKLNSRYHVPYNTNGIKNPLAGIIKCSKCGYSMVQRYPKNRKETMDCKHRGCENKSSYTELIEKRLLEALKEWYINYKADFEKHKQGEKLKETQVIQMNEVALRKLEKELVDVQKQKNNLHDLLERGVYTVDIFLERSNVVSDRINEITSTMENLKKEIKTEIKKEKVKKDTIPQVEHVLDLYFKTDDPKKKNSLLKSVLEKAVYKKEKWQRLDDFELVLYPKLPQDGDI

SEQ ID NO: 61282 - DNA, 50 bp, Bacillus tropicus
  source 1..50: mol_type = genomic DNA
cgtcaccttgttggtgtaattagattgacaccaagaggatgacgacaaat

SEQ ID NO: 61283 - DNA, 40 bp, Bacillus tropicus; identical to SEQ ID NO: 8913
  source 1..40: mol_type = genomic DNA

SEQ ID NO: 61284 - DNA, 50 bp, Bacillus tropicus
  source 1..50: mol_type = genomic DNA
cgtcaccttgttggtgtaattagagagacaccaagaggatgacgacaaat

SEQ ID NO: 61285 - DNA, 40 bp, Bacillus tropicus
  source 1..40: mol_type = genomic DNA
ggctattagacacattagtgataatcactttattcctaaa

SEQ ID NO: 61286 - protein, 502 aa, Microbacterium testaceum
MTAATPLRAVLYVRLSKESARSTSITGQTDDLSVIAERAGWDVVATFTDNGKSGGKERENAQAAYDLWARGDADILAVYAYDRWSRMGIKTLAALIDVVDARAKTPHPATFIAAREGIESTQADWQLRAAFAADMAKRERDLVSSRQTAARGRMRQQGRNAGHGVPPFGYRTGPHPTLPVGRGLHVIPEEADVVRELAERLIAGESTVKLADELNARGVAKARSAARVARLAGMPDEGLDRGAWNGSRVRATMTSDHLLGRVSHNGAPVYGDDGQPLAPFEAILSLETMLALRDRFDANRRGEVKRRASGLLSKLAYCSGCDRPLYPRRTSVTERNPEGHVNYGCSAASSGVTCPRKTYISARKLDGEVVARYLAARGDAPETRYERRVDDQGAGAELADVEARLKELAGRLAAADDEEEADGLTAAMLSLKARRRSLRSVTPTVVEDVVYTGRTYREAWDAARDDDERRRMLLRVMDHIVVNPVGSPERVTIRWNDFPGAV

SEQ ID NO: 61287 - DNA, 50 bp, Microbacterium testaceum
  source 1..50: mol_type = genomic DNA
ttacgcctttagcgtccgccaaagttcttagatgaccactaagagcgtta

SEQ ID NO: 61288 - DNA, 40 bp, Microbacterium testaceum
  source 1..40: mol_type = genomic DNA
ggatcaacgaccgccgaagttcttgaagcgctggttgaac

SEQ ID NO: 61289 - DNA, 50 bp, Microbacterium testaceum
  source 1..50: mol_type = genomic DNA
ttacgcctttagcgtccgccaaagcccttagatgaccactaagagcgtta

SEQ ID NO: 61290 - DNA, 40 bp, Microbacterium testaceum
  source 1..40: mol_type = genomic DNA
ggatcaatgaactccaaatcccttgaagctgttgcagacc

SEQ ID NO: 61291 - protein, 491 aa, Rhodococcus erythropolis; identical to SEQ ID NO: 29826

SEQ ID NO: 61292 - DNA, 50 bp, Rhodococcus erythropolis
  source 1..50: mol_type = genomic DNA
tggggtgtttggctattgacagactcgtcgaaagattgtgaaatgcccca

SEQ ID NO: 61293 - DNA, 40 bp, Rhodococcus erythropolis; identical to SEQ ID NO: 29828
  source 1..40: mol_type = genomic DNA

SEQ ID NO: 61294 - DNA, 50 bp, Rhodococcus erythropolis
  source 1..50: mol_type = genomic DNA
tggggtgtttggctattgacagacgggtcgaaagattgtgaaatgcccca

SEQ ID NO: 61295 - DNA, 40 bp, Rhodococcus erythropolis
  source 1..40: mol_type = genomic DNA
cacctgaatatctgaacatgggtagagaaaaagcacaacc

SEQ ID NO: 61296 - protein, 547 aa, Listeria monocytogenes
MNRSGKRCVLYPRVSTEMQVDGFSLDGQKNSLNRFADREEMEIVNIYEDAGKSGKSIEGRPAFKQMLNDIENGLSIDYVLVYKLSRFGRNAADILNSLEHIQSFGVNLICIEEGIDSSQTSGKLLISVLSAVAEIERENIIEQTMNGRKEKARQGGWNGGFAPYGYYLKDKQLFIQEDEAEAVCIIFDKYVNGNMGFYKIANYLNLQGIQKIKRDNGTLTQWSTHFIRMIIDNPVYYGKIAFGRRTREKVKGTKNEYRQVYQDDYILADGQHDAIISEELWKQAHEKREITGVKSPSKIGRDRAHLLSGILKCPKCGGPMYTNKHAWTNKDGTYKEIYYYVCSKARTARGKSCDYKAMLKKTDIEPLVIEAIRELIKNADFATEIKSKIGKQIDTSTLDRELKNYEGKLREVDLNKTRLENEIDSLPEDTRFRERKLRDMTLRLDGLYDIIVELEEKIEDVKLRRKAVEQDAITLENIYTLLANFEKVYDKISDEEKKSLISSLIKEIEIFPCDESELPLKSILFNFPVYKDGGDVYEFLWDKSTHV

SEQ ID NO: 61297 - DNA, 50 bp, Listeria monocytogenes
  source 1..50: mol_type = genomic DNA
ttgtgggacaaaagtacgcacgtctcaacggtattaccaaagtcccacaa

SEQ ID NO: 61298 - DNA, 40 bp, Listeria monocytogenes
  source 1..40: mol_type = genomic DNA
ctgcaagagtactacggtttccacgtgagctgtttgcggg

SEQ ID NO: 61299 - DNA, 50 bp, Listeria monocytogenes
  source 1..50: mol_type = genomic DNA
ttgtgggacaaaagtacgcacgtcctaacggtattaccaaagtcccacaa

SEQ ID NO: 61300 - DNA, 40 bp, Listeria monocytogenes
  source 1..40: mol_type = genomic DNA
ctccaagagtactacggttctcatgtgatctttagtaaat

SEQ ID NO: 61301 - protein, 479 aa, Mycobacterium intracellulare
MATTAPVPRAALYLRISRDLTGEGLAVERQRELCQQIVSQRGWTQVGEYVDNSISASDARKNRPGYDALVAAYEAGTFDALVCYDMDRLTRQPRQMEDWLDAAEKHGLALVTANGEADLTTDAGRTFVRVRMAFARGEVERKSARQKAAARQRSNLGRPPLGTRLTGYTATGEIVPDEAEVIRRVFKMFDAGESLRSIARTLGTERTTARNGKPWNPSTISGILTNPRYAGRAVYDGKETGVRGGWEPLVSDELFDVVQARMTDPRRKTNRVGTDRRHLGSGLFLCDVCGQPVVSFSGGRYRCKAACVNRAHGPVDHARVRQIIADPGDGQDAPLARGVDEFVTAVISERLSRADAAQLLAAPAADLAPVLAEIERLRSRLGTIDADYDAGVIDGLRHRAASDRVTAELRAVERQLAGHRTGSALGEVLASPDPVGAFLAAGLMSQRSVIDALCEVRLRRGTRGSKTFDPSTIRVEWRS

SEQ ID NO: 61302 - DNA, 50 bp, Mycobacterium intracellulare
  source 1..50: mol_type = genomic DNA
gacgttgtttgaaaccggaactccaccacatcaccggctcaataaacgtt

SEQ ID NO: 61303 - DNA, 40 bp, Mycobacterium intracellulare
  source 1..40: mol_type = genomic DNA
gacgttgaagcggaactccaccacgtcgccgtcggccatg

SEQ ID NO: 61304 - DNA, 50 bp, Mycobacterium intracellulare
  source 1..50: mol_type = genomic DNA
gacgttgtttgaaaccggaactccggcacatcaccggctcaataaacgtt

SEQ ID NO: 61305 - DNA, 40 bp, Mycobacterium intracellulare
  source 1..40: mol_type = genomic DNA
ggagttgaagcggagctgcggcacctccctggcggatctg

SEQ ID NO: 61306 - protein, 557 aa, Blautia wexlerae
MKRVRMLLRVSSNQQLEADGDLSVQRQLVKDYISNQSDWQLDEKEYFEGSNSGYKNAVADRNILQEALQDAKAKEYDILVVYKDDRIGRRMWEIGAYVMSLKSFGVDIYTVKDGCISPESDDIMGQMMLALRYGNAQKSSSDTGMRVKDTAQKLVQKGKFMGGKAPYGYKLVLSGEVSKHGRALHHLVVVPEQAEVVKYIYELSLHKEFGATKISKILNEHEIYKDRAPRDIWKSGTIVSILTNPVYAGYTAYKRRERVDGRYHRLDSKDWIFAEKPDTEIAIIDENMWNQVQDTRKQRADKYIKSLENQNVTVIRRNSGMLALIDVLYCGYCGRKMTNGSKYNYWTIKDTGERRTSKIAIYKCPNAWNGIPHEKTKQYRADQIEPVVFEALAEYIGKLQENEDVFTQIEENQNRQKAVKQSELDKEQSELENIQQKISVMENNIPNAMTGDYPLSLEELVGIIRKHKELEQKHKRIVEERKAELDAMKVSMDDWENIRSKIPTWQDVFWNADTTTKRVLVNKLIERIDITKDSVNIRFKINLNDFFTLPRITDGSG

SEQ ID NO: 61307 - DNA, 50 bp, Blautia wexlerae
  source 1..50: mol_type = genomic DNA
ccccgaattactgatggttccggtacgtcggaatcgatactaattcggta

SEQ ID NO: 61308 - DNA, 40 bp, Blautia wexlerae
  source 1..40: mol_type = genomic DNA
tcataacctttgttccggtaccattccgtataaaccctgt

SEQ ID NO: 61309 - DNA, 50 bp, Blautia wexlerae
  source 1..50: mol_type = genomic DNA
ccccgaattactgatggttccggtaggtcggaatcgatactaattcggta

SEQ ID NO: 61310 - DNA, 40 bp, Blautia wexlerae
  source 1..40: mol_type = genomic DNA
acaaaacctttcttgcggaagcattccaaataatacaagt

SEQ ID NO: 61311 - protein, 457 aa, Nocardia gipuzkoensis
MPMEATVKRAAVYLRQSEDRDDDQLAISRQREDCHMLCAQRGWDPVDYVDNDTSAVGMKRKRPSWDQMLADIDAGIIQAVVCWDLDRLYREPIDLEYLIPLADRMGIALATVTGDVDLSTDNGRMIARIKGAVARAEIDRRSARQKRKMRQLAEAGETWTSRRPFGYNLDDTTVPEELAAVTEAYQMILAGHSLMSIVRAWNALGLKSTLGNEFKSQVSIRKILQNPRYAGLRAYNGEILGKAKWPAAVTEDVYRAVCDILADPTRRSGTSTGRVYLLTGIALCGLCGAAMDVTGTTRTRRPAYRCRGCFKTQRQVDLADDHVTELAVARLSRPDAEDLLVDQNRPDIEKLRREAAAMREKLKTIATKWADDLLTDEQVSAMTKRAKARLDAATSAMEDANRARLFKGVVGKDAGEFRGLLLDRRRAIVDALMVVTFQKASGPGKFDPESIRADLRM

SEQ ID NO: 61312 - DNA, 50 bp, Nocardia gipuzkoensis
  source 1..50: mol_type = genomic DNA
aggcgtgttttgcgtaccacgagcaatctggtggtacgaaaaccactgca

SEQ ID NO: 61313 - DNA, 40 bp, Nocardia gipuzkoensis
  source 1..40: mol_type = genomic DNA
tcacatgcgtaccacgagcaatccggttttcaggaacctg

SEQ ID NO: 61314 - DNA, 50 bp, Nocardia gipuzkoensis
  source 1..50: mol_type = genomic DNA
aggcgtgttttgcgtaccacgagccatctggtggtacgaaaaccactgca

SEQ ID NO: 61315 - DNA, 40 bp, Nocardia gipuzkoensis
  source 1..40: mol_type = genomic DNA
tcagatcagcatcacgagccatcctctgctcagcagcctg

SEQ ID NO: 61316 - protein, 547 aa, Streptococcus pyogenes; identical to SEQ ID NO: 23251

SEQ ID NO: 61317 - DNA, 50 bp, Streptococcus pyogenes
  source 1..50: mol_type = genomic DNA
caatataggtttggacaacgatgaacatgtggagtgcatagcgttgatac

SEQ ID NO: 61318 - DNA, 40 bp, Streptococcus pyogenes
  source 1..40: mol_type = genomic DNA
atttgtttccgcaaacgcatcacgttgagtgcgtagtgtt

SEQ ID NO: 61319 - DNA, 50 bp, Streptococcus pyogenes
  source 1..50: mol_type = genomic DNA
caatataggtttggacaacgatgaatatgtggagtgcatagcgttgatac

SEQ ID NO: 61320 - DNA, 40 bp, Streptococcus pyogenes
  source 1..40: mol_type = genomic DNA
atttgttttagcaaacagaatatgttgagtgagtttgtat

SEQ ID NO: 61321 - protein, 565 aa, Coprococcus comes
MPEKEKIVALYVRVSTGYQVDKDSLPFQKKELKNYCEHVLHIDKKRIEIFEDAGKSGKNTKRPAFERMMEKVKSGQVSHVIVYKIDRISRNLVDFSLMYDDFKYNNVTFISLNEQFDTSSAIGEAILKIILVFAELERKLTSERVTDVMIGRAQNGQWNGARVPYGWDWDEEKQMPVHSKKEAQYGIDMYHRYLNGYSTLRIARYNNEHSIPTKRGGEWSSKTVGDFLRNPINKGDYRYNYRNSARGKKKAKEEVVYIKNVFPPLIDPTIFDEVNRRLDENYKKQNTNYMFPIRKQCNIFSGLIICGKCGAHYQVCRKDERRLDGFRPSNYVCTRKRQKAICDSLNVSEVKIGPFMINYIAAMVDISQKRKKLKDKKELEQLILSHMQFTDLAGIADDSLQETMDLLYGRSTNIWSSSPIEKESQDNENKKNKLKENLQKTDRALERLKKAYLFDDDAMDEKEFLEMKSKLEIDRVKIENEIKDIDNDAIANNVNQIDFIKTASQFLIIHKINSGEFIDYRSLAILDEESMKAFMNSVIDHIVVLNRQISEIVFKNGLSHKLLYR

SEQ ID NO: 61322 - DNA, 50 bp, Coprococcus comes
  source 1..50: mol_type = genomic DNA
acctctactaccgaggtcatctgacacccaaaggttacggtagtcgcggt

SEQ ID NO: 61323 - DNA, 40 bp, Coprococcus comes
  source 1..40: mol_type = genomic DNA
gtcacgagcgttcatctgacaaccgaaagtcgtcacgcaa

SEQ ID NO: 61324 - DNA, 50 bp, Coprococcus comes
  source 1..50: mol_type = genomic DNA
acctctactaccgaggtcatctgaggcccaaaggttacggtagtcgcggt

SEQ ID NO: 61325 - DNA, 40 bp, Coprococcus comes
  source 1..40: mol_type = genomic DNA
ggcactagagttcctcttaggaaggaaagtctttaggaaa

SEQ ID NO: 61326 - protein, 479 aa, Mycobacterium avium
MVAKKTAVQRVGVRSAAIYARISSDAEGTGLGVARQLEDCRRLAADRGWPVGAEYVDNDVSAFSGKLRQQYARMLADLESGARDAVIVYNLDRLHRRPVELEEFVTLCESVGVRDVATVTADIDLGNDDGLFMARIFAAFAAKESGRKSARVQRKMLQNAQAGLPHGSARPFGYEDDKITVRESEAAVVREMVDRYLAGQSLRSLTIWLNETGIAPSVAKSWQTTTVRQVMSSGRIAGLREHRGEVIGAAVWPAIITAAERDRVLARLSARSVTKTRTARTYLLSGMLRCGRCGNRLYSQARHSNPQNRVRRYVCLKGPDHGGCGRLTVVAAPVEELLVESVLTRLDSPQLADVLAGKVSTDHDVAALAAQVEADQERLDELAGLYADGAISAREWIAARDPITERITAARRDIAAATDTTAIFELVGTGGALRAGWADLDLGRQQAIVKAVLDHAVIAPGTPGSRSLDIGRVAPVWRV

SEQ ID NO: 61327 - DNA, 50 bp, Mycobacterium avium
  source 1..50: mol_type = genomic DNA
ggggtagattactgacttgcaagcaaggtcataagttattaaactacccc

SEQ ID NO: 61328 - DNA, 40 bp, Mycobacterium avium
  source 1..40: mol_type = genomic DNA
cggtcgcacccacgcgtcgaacctgaaatgcctctgccga

SEQ ID NO: 61329 - DNA, 50 bp, Mycobacterium avium
  source 1..50: mol_type = genomic DNA
ggggtagattactgacttgcaagcggggtcataagttattaaactacccc

SEQ ID NO: 61330 - DNA, 40 bp, Mycobacterium avium
  source 1..40: mol_type = genomic DNA
cggacggagcgccgcgcccggcccgagatgcctccgccgg

SEQ ID NO: 61331 - protein, 575 aa, Clostridium jeddahense
MANQEQYTILYGRLSQEDEREGESNSIQNQRLMLEKYAEDNGFPNTKFLYDDGYSGTNFNRPAWNEVMRLAENGEVATIIVKDMSRLGRDYLQVGQYTELIFPSMGIRFIAVNDGVDSLYGDNDFAPFKNLFNDFYAKDTSRKIRAVKKAQAERGERLGTRPPYGYRKSEDNPKQIVPDEQTADVVRHIFRLCAEGRGPSQIAKQLKAEQILTPTNYYYQQTGVALVNLDTTRPYAWKDTTIANILSDVSYLGHTISMRYTTVSYKNKKQIERPESEWLKFENTHEPLISQELWDIVQDIRKHKKRPPKKMDTPNLFSGLVFCADCGGTLVLHRAHTMKETQNNFMCSTYKKRGKEECSAHYIRETQLKTIVLDDLKRVTHYARQKEMLFVEHITRKNTAETRQEITRIQREIDAAKRRDGELTALFKRLYEDNVLGRIPNEHFRLLSSEYTTEQAELRGKLPKLEERLEQLRNSLTNVAQFIDKAKRYSDITELTPEILRLFIEKIVVGEKSQKYSRTAEQDIWIYYRDIGLMDTPVEPETVREAGSGDGEAYLTDEAPAAASAAPSASTGPAA

SEQ ID NO: 61332 - DNA, 50 bp, Clostridium jeddahense
  source 1..50: mol_type = genomic DNA
ttttgtccctatgataccccgcctaatggcgggaagtcataaggataaat

SEQ ID NO: 61333 - DNA, 40 bp, Clostridium jeddahense
  source 1..40: mol_type = genomic DNA
acgaaacagccgccgacttaatagtcggcggctgtttcgt

SEQ ID NO: 61334 - DNA, 50 bp, Clostridium jeddahense
  source 1..50: mol_type = genomic DNA
ttttgtccctatgataccccgcctcttggcgggaagtcataaggataaat

SEQ ID NO: 61335 - DNA, 40 bp, Clostridium jeddahense
  source 1..40: mol_type = genomic DNA
acgccacctcggccgtcttctcgggcggcggctctttcct

SEQ ID NO: 61336 - protein, 566 aa, Pseudomonas fragi
MHRSTPVYAYIRMSTVEQAKGDSERRQLGQIERFLQENNGELVEPVFLDRLSSFNGKNIKKGAIKDFLDRVKKGEIEKGSILVIESFDRISRQGGYIAHSVILDIINNGVDIATLSPYKRYSIDSENQFIENIEIQTLLYRAHEESRTKSDRITRQHQNRREKAKDKKVVYGSLPFWLERTPDWIEFREPEASDVKLCLSLLKTYGMYTATAKINEQRKSSKIFSKETVSHLLNRSAVCGDLQTHKIEYDEHGNKIRVQGEVIHDYYPALISRAEFEELRAEIQNRRTTKSTGRVSGFKNIFRNVMTCTYCFAPMRLAHMKWKSGGKKYLVCTKSETNQCIEKGRLWYDYDDVERVFFNEVNLSILKKSLTQKTKIDDAEIEKLRSNFLKAEDQKSNILKAIEMGTVSKALVNRLEELEKESDEIQKRIDELKAESALKRSQNEAEIFDYEQLDAALNDEEQRAIINKILRTNQADISISKGEEGCDFIIEISIDDRLETEISYHKQDDFINRVEHDLPENQTSDLVIHEDHTDPYADEIEGQIFEVFDSASMPIIEINQHNKKPD

SEQ ID NO: 61337 - DNA, 50 bp, Pseudomonas fragi; identical to SEQ ID NO: 49027
  source 1..50: mol_type = genomic DNA

SEQ ID NO: 61338 - DNA, 40 bp, Pseudomonas fragi
  source 1..40: mol_type = genomic DNA
aaccatgccgctggcctgcataaaggcgtagcaaatggtc

SEQ ID NO: 61339 - DNA, 50 bp, Pseudomonas fragi
  source 1..50: mol_type = genomic DNA
aacatacgaattgactacgccagcaggcaggcataacctgttcgtatagc

SEQ ID NO: 61340 - DNA, 40 bp, Pseudomonas fragi
  source 1..40: mol_type = genomic DNA
taatatgcagcaggcctgcagaaaatccgagcaaattgcc

SEQ ID NO: 61341 - protein, 541 aa, Pseudomonas balearica
MMRQGKNGARVYSYLRFSDPRQAAGHSADRQLQYAQRWAAERGLVLDESLSLRDEGLSAYHQRHVKQGALGTFLKAVDEGRIPDGSVLIVEGLDRLSRAEPLQAQAQLAQIINAGITVVTASDGREYNRAQLKAQPMDLVYSLLVMIRAHEESDTKSKRVKAAIRKQCEGWVAGTYRGLVRNGKDPQWLHWDGRAWQLIPERVEAVRYALELYKRGVGATRAVRKLAERGYALSDWGLAGQQLYRLVKLPALRGAKRLSVDGEDYLLEDYYPRVLSDDEFHELQAAAETRHGRRGASDIVGIVTGIGITWCGYCGTAVVAQNLVSRMKADGTLADGHRRLHCTSYGSGQGCKAASCSVVPVERAVLAYCSDQFNLTRLLEPADDGRQLQQRLQACRRQQADVERQLARVTEALLADDGGAAPLAFVRKARELEAELQRLQAEAEQLEREQAVQGRGHAPAAAEQWQQLAADSADIYSPAREQLRQLVLDTFSRIVVYMRGIVPEPKSKTIAVMLVSRSGQRVMLEVDRRSGAWKASRDRHA

SEQ ID NO: 61342 - DNA, 50 bp, Pseudomonas balearica
  source 1..50: mol_type = genomic DNA
ggtatagataacgtgcgctaagggcaccctagcgaaataaatcctatact

SEQ ID NO: 61343 - DNA, 40 bp, Pseudomonas balearica
  source 1..40: mol_type = genomic DNA
gtcgaccgtggccttcgggcagccgagcgagacaaatcct

SEQ ID NO: 61344 - DNA, 50 bp, Pseudomonas balearica
  source 1..50: mol_type = genomic DNA
ggtatagataacgtgcgctaagggctccctagcgaaataaatcctatact

SEQ ID NO: 61345 - DNA, 40 bp, Pseudomonas balearica
  source 1..40: mol_type = genomic DNA
gtcggccctagccctggggctacctgaccagacaaaacct

SEQ ID NO: 61346 - protein, 560 aa, Enterocloster bolteae; identical to SEQ ID NO: 3676

SEQ ID NO: 61347 - DNA, 50 bp, Enterocloster bolteae; identical to SEQ ID NO: 3677
  source 1..50: mol_type = genomic DNA

SEQ ID NO: 61348 - DNA, 40 bp, Enterocloster bolteae
  source 1..40: mol_type = genomic DNA
tctgggtcctattggcccggtcggcccggtggggcctaca

SEQ ID NO: 61349 - DNA, 50 bp, Enterocloster bolteae
  source 1..50: mol_type = genomic DNA
acctttcctaaataaagcgccccgcccggggcgatgttaaaaggaaagtg

SEQ ID NO: 61350 - DNA, 40 bp, Enterocloster bolteae
  source 1..40: mol_type = genomic DNA
tccaggtcctttgggccctccaggtccggcaggtcctact

SEQ ID NO: 61351 - protein, 520 aa, Chromobacterium haemolyticum
MDKSKTAIIYARVSTARQADEGVSIDSQIEQGQRRAQELNATVAKVFRDDGVSGRTANRPAFQDAMKYCEAFEVDYFIVWNTSRFARNKIDAASYKRLLDEVGTRVVYVSVNIDNETDEGWFSESIFEIMDEHYSRQVSRDTRRSMLKNARDGFWNGGFAPYGYEAVTDGKRKRLAILDDEAVVVREMFRMFMAGVGCKSIAMNLNDRGLLYRKGNSWTKGHVTRVLKNPAYAGLIVFNRRDKNGVLERPESEWIMTKAHPAIITDEMAARVREEFRERAPELGKGSPNSGFVFTGILRCGECGAAMQTESATGRNKVYHYYNCSMHQKSGGCRSRRISAGEFDAWMMDMIVEHVLTRERMKEVVTEIQELTSTWESDRDRRMTAVVRKIKEAGRRRQNLFDILELHGKAAPNLGDLTIRLREINDTIKRLERELAAIEDEEIPAMEATASQIEAARRALISIVKKSPDAKKLRLLMGYFIDKIVVNEGDIEMEYRPERIVSAKSRHEPTVHSSEIWLPE

SEQ ID NO: 61352 - DNA, 50 bp, Chromobacterium haemolyticum
  source 1..50: mol_type = genomic DNA
gttcatagcagcgaaatttggctccccgagcgggtcttactacgaaccaa

SEQ ID NO: 61353 - DNA, 40 bp, Chromobacterium haemolyticum
  source 1..40: mol_type = genomic DNA
gcttttggaaacttggctccccgagcagggctcgaacctg

SEQ ID NO: 61354 - DNA, 50 bp, Chromobacterium haemolyticum; identical to SEQ ID NO: 61352
  source 1..50: mol_type = genomic DNA

SEQ ID NO: 61355 - DNA, 40 bp, Chromobacterium haemolyticum
  source 1..40: mol_type = genomic DNA
gctttgggaaatgtgagtcccagagctggactctaacata

SEQ ID NO: 61356 - protein, 598 aa, Vibrio navarrensis
MDEKPRIAHIYSRVSKGTQVKGDGLRRQIEIASKFIEDVNISNSRDGLPVYTLADSPIYDRGLSAYFGLNTDENAGLGAFLKAAENGQVEKGTLLIVEAIDRISRLPVDDARALFARFKKYGIDVAICRFNLIIYHDKSSDLGQDLLITTAIHLAHLESEQKSKRIRARFTHKRLLEKEGGERRTSMSPSWIELSKDKTHFVLIPERARIVRKMVDLKLQGWGAHRITVYLNEQGCPCWNRSNTWYTKIVEKYLKMIQLVGDFQPVEHVHGEKGVRKEPVGDVIKGYYPALITEEEWIRLKASFKRSGGRQTGAFSNLFSYMLYCPTCGSCMSYFKPNRGRIKVRCRKQIDKQGCDQRALNYEEIEPRLIKALAGLDYAKINNNSFASLQKELNTLEAQVAELEASADDIKTQMLEESDPRIISVYVNKLKAIYTEQDKAKARFEKLSTQTSDYDVNTLEQLQLERNEDRERYNGFVRSFVKYVIASDSKLGKPLRIVFKSEAVGEVPVFFNDDKNNKAISDIFTAQKDVNEAAPIRLINMSRVHGNLGKLAAIDTVPVPDDLGDALERIKYLFAVRQAVLQNPEKWQAIADDARLFE

SEQ ID NO: 61357 - DNA, 50 bp, Vibrio navarrensis
  source 1..50: mol_type = genomic DNA
actaatagtaacccaaccaacgaggagtgggtgatagcatcgcaatccgt

SEQ ID NO: 61358 - DNA, 40 bp, Vibrio navarrensis
  source 1..40: mol_type = genomic DNA
ggtggtgccaaccaatgaagaattcgtgatcgcccagcaa

SEQ ID NO: 61359 - DNA, 50 bp, Vibrio navarrensis
  source 1..50: mol_type = genomic DNA
actaatagtaacccaaccaacgagaagtgggtgatagcatcgcaatccgt

SEQ ID NO: 61360 - DNA, 40 bp, Vibrio navarrensis
  source 1..40: mol_type = genomic DNA
ggaggtgcaagccaattaaaaattagagatcatagaggaa

SEQ ID NO: 61361 - protein, 619 aa, Anaerobutyricum hallii; identical to SEQ ID NO: 14616

SEQ ID NO: 61362 - DNA, 50 bp, Anaerobutyricum hallii; identical to SEQ ID NO: 11112
  source 1..50: mol_type = genomic DNA

SEQ ID NO: 61363 - DNA, 40 bp, Anaerobutyricum hallii
  source 1..40: mol_type = genomic DNA
ttgtccttggcgaccggcagacttggagcaacgcagtggt

SEQ ID NO: 61364 - DNA, 50 bp, Anaerobutyricum hallii; identical to SEQ ID NO: 39649
  source 1..50: mol_type = genomic DNA

SEQ ID NO: 61365 - DNA, 40 bp, Anaerobutyricum hallii
  source 1..40: mol_type = genomic DNA
atgtacttttcaaaagccatactgggaccaaggcagtggt

SEQ ID NO: 61366 - protein, 619 aa, Blautia obeum; identical to SEQ ID NO: 40101

SEQ ID NO: 61367 - DNA, 50 bp, Blautia obeum; identical to SEQ ID NO: 11112
  source 1..50: mol_type = genomic DNA

SEQ ID NO: 61368 - DNA, 40 bp, Blautia obeum; identical to SEQ ID NO: 61363
  source 1..40: mol_type = genomic DNA

SEQ ID NO: 61369 - DNA, 50 bp, Blautia obeum; identical to SEQ ID NO: 39649
  source 1..50: mol_type = genomic DNA

SEQ ID NO: 61370 - DNA, 40 bp, Blautia obeum; identical to SEQ ID NO: 61365
  source 1..40: mol_type = genomic DNA

SEQ ID NO: 61371 - protein, 618 aa, Blautia obeum; identical to SEQ ID NO: 11111

SEQ ID NO: 61372 - DNA, 50 bp, Blautia obeum; identical to SEQ ID NO: 11112
  source 1..50: mol_type = genomic DNA

SEQ ID NO: 61373 - DNA, 40 bp, Blautia obeum; identical to SEQ ID NO: 61363
  source 1..40: mol_type = genomic DNA

SEQ ID NO: 61374 - DNA, 50 bp, Blautia obeum; identical to SEQ ID NO: 39649
  source 1..50: mol_type = genomic DNA

SEQ ID NO: 61375 - DNA, 40 bp, Blautia obeum; identical to SEQ ID NO: 61365
  source 1..40: mol_type = genomic DNA

SEQ ID NO: 61376 - protein, 484 aa, Adlercreutzia caecimuris
MQKTRAAIYARFSSHNQRSESIEIQVENSTRYCQENGLDVVRVYTDYAKTGRNADRAEFQRMMDDARLGLFDYVVIYKVTRIMRNRDEMALARIMLRKAGVEILYAGEEIASGSSGVLQLGMLEVLAEWESAIDSERIRDGIQKNAQRCMANGRTLYGWDIVEGRYRVNDREAAWLRKMKNKLFSGSTMAEVVRSVDAMRTRQGKKVNQDTATKLLLREQNGGTYCYAGVRVEGGMPALWPKHEQDMIISMLKSRHKPHRRVDTAEEWPLSGKLWCACCDSTLTGTSGTSATGKTYAYYKCNKCGRTFRRDVLEDAIVDVVCEAVKRPEIRDNIAALMADWSKDNAEETPLESERIKGEIRRIDAAFENIWQAIEAGIAPPGGKDRVQELTERKTSLEAEYQMAKAYESLQPDYDDLRGWLDNMAQNLTPAEILHDFIRAAEIKDDFIELFFAFDYYGNDFTPPKYRHELFSNENSSCNSPMVE

SEQ ID NO: 61377 - DNA, 50 bp, Adlercreutzia caecimuris
  source 1..50: mol_type = genomic DNA
tagttcgtgtaattctcctatggtggagcctaagcgaaagaccacgaacg

SEQ ID NO: 61378 - DNA, 40 bp, Adlercreutzia caecimuris
  source 1..40: mol_type = genomic DNA
ggggccgaacggttctggtggaggcgcggagaatcgaact

SEQ ID NO: 61379 - DNA, 50 bp, Adlercreutzia caecimuris
  source 1..50: mol_type = genomic DNA
tagttcgtgtaattctcctatggtgaagcctaagcgaaagaccacgaacg

SEQ ID NO: 61380 - DNA, 40 bp, Adlercreutzia caecimuris
  source 1..40: mol_type = genomic DNA
ggggcgggagggcactggagaaggtgatgagaaccaaact

SEQ ID NO: 61381 - protein, 551 aa, Streptomyces acidiscabies
MPFAPEYLHLVIPDTVFEAWLYGRNSDDATKSGDSVEDQLTTGRALCVRHNWRMLHEFKDTGLSASRHAKKTREEFEELIDAINNNPAPTGVRRIVVAYNAARYYRDLEAYVRLRKACLTANVLLCYNGQVYDLSRRDDRKATAMHAVDAEDEAEGLYDQNLRTANLQASEGHPHGKMIYGYLREYATVGGRRRCIKQYEDPVRGKYVFKALHRADTGHSIGSIKRWLGSVREAERHDGEEWSNRNVRSMLLNRAYLGERLHKGAYHKASWDPIKGLETPEGKAMFLRVEAKLLDPARVTHRGTEPTHLLSWIGACGVCGDHTTLSAYPHSGRGNYWVVGCKAKRDTAVKEQIADAFVEEAVVSWFSRKDTARAALIPDNTKKAEEAEKAQRLINGYEEQLREARKLALTFDPETGRPQLSVMALAEMEQVIAPKLEAERKKLESPKGVSPLLMRLLTADDPDEVWNGRPATGSEPELLGLSLEQKREVIRSVVTVRLHKASRLGIRGLEPGRITLAFVGEPGFMARRPPAPALALAEEPGQGDVLGEGTG

SEQ ID NO: 61382 - DNA, 50 bp, Streptomyces acidiscabies
  source 1..50: mol_type = genomic DNA
tgagtaacctaagcgactttgtagtcccacaacctacgtaagggtagata

SEQ ID NO: 61383 - DNA, 40 bp, Streptomyces acidiscabies
  source 1..40: mol_type = genomic DNA
cgaatacttgtccgtgtaatcccagatcgtgatgccaaca

SEQ ID NO: 61384 - DNA, 50 bp, Streptomyces acidiscabies
  source 1..50: mol_type = genomic DNA
tgagtaacctaagcgactttgtagtaccacaacctacgtaagggtagata

SEQ ID NO: 61385 - DNA, 40 bp, Streptomyces acidiscabies
  source 1..40: mol_type = genomic DNA
ggaatcatttttcgtgtaatagatgatcttgatgcacaca

SEQ ID NO: 61386 - protein, 538 aa, Streptococcus suis
MQVEGFSLDAQETRIHQYANAFDIEIVKTYQDAGKSGKTMLGRTEFMAMISDIEAEKDKVDYVLVFKLSRFGRNAADTLKSLAIMESHGVNLICVDDGLDSSKDSGKLVITILSAVAEMERENIISQAMEGRRQKARAGQWNGGFAPVGYSLVNGQLQVNQEEAESVKMIFDLFANSDMGTIAIAKHLANLDIKKPIRHNSTLPYFSSSGIARILDNPVYNGKIAFGRRESTRDKVSGETKVKQSENYILTDGIHEAIIDDETWKKVRKKREANAHKYKRENPSKGDSIYILSGLIKCPLCHAGLYGNKSIKRNKNKKDEYYKNYYYYACKHRKHVDGHKCTFNKQLKTGNLDHEVLSIISKLVSRPDFARKLQEKINIQVDTSRIDSEIEQYKSLFRQLNATKLNLIQQIDSLNFEDPHFQQKSIDLDMRLNTIYDKIADVEILIETSESKREVILKDKMTADNIYKILVNFASFMDVMEDIDKKRLCQMLIEKVEIYDDKNKAGRWVKAIHFKLPIIEEDLEISLDNSTPVEAVVK

SEQ ID NO: 61387 - DNA, 50 bp, Streptococcus suis; identical to SEQ ID NO: 42097
  source 1..50: mol_type = genomic DNA

SEQ ID NO: 61388 - DNA, 40 bp, Streptococcus suis
  source 1..40: mol_type = genomic DNA
tccccacacagcacggaccgaggcggttgttaaactaagc

SEQ ID NO: 61389 - DNA, 50 bp, Streptococcus suis
  source 1..50: mol_type = genomic DNA
agtttggacaatagtacaccggttatggcggttgttaaattgtccaaacg

SEQ ID NO: 61390 - DNA, 40 bp, Streptococcus suis
  source 1..40: mol_type = genomic DNA
tctcagcacagcaaagatcatgtctgtggttaaactcaga

SEQ ID NO: 61391 - protein, 538 aa, Streptococcus suis
MQVEGFSLDAQETRIHQYANAFDIEIVKTYQDAGKSGKTMLGRTEFMAMISDIEAEKDKVDYVLVFKLSRFGRNAADTLKSLAIMESHGVNLICVDDGLDSSKDSGKLVITILSAVAEMERENIISQAMEGRRQKARAGQWNGGFAPVGYSLVNGQLQVNHEEAESVKMIFDLFANSDMGTIAIAKHLANLDIKKPIRHNSTLPYFSSSGIARILDNPVYNGKIAFGRRESTRDKVSGETKVKQSENYILTDGIHEAIIDDETWNKVRKKREANAHKYKRENPSKGDSIYVLSGLIKCPLCNAGLYGNKSIKRNKNKKDEYYKNYYYYACKHRKHVDGHKCTFNKQLKTGNLDHEVLSIISKLVSRPDFARKLQEKINIQVDTSRIDSEIEQYKSLFRQLSATKMNLIQQIDSLNFEDHHFQQKSIDLDMRLNTIYDKLADVEMLIETSESKREVILKDKMTADNIYKILVNFASFMDVMEDIDKKRLCQMLIEKVEIYDDKNKAGRWVKAIHFKLPIIEEDLEISLDNSTPVEAVVK

SEQ ID NO: 61392 - DNA, 50 bp, Streptococcus suis; identical to SEQ ID NO: 42097
  source 1..50: mol_type = genomic DNA

SEQ ID NO: 61393 - DNA, 40 bp, Streptococcus suis; identical to SEQ ID NO: 61388
  source 1..40: mol_type = genomic DNA

SEQ ID NO: 61394 - DNA, 50 bp, Streptococcus suis; identical to SEQ ID NO: 61389
  source 1..50: mol_type = genomic DNA

SEQ ID NO: 61395 - DNA, 40 bp, Streptococcus suis; identical to SEQ ID NO: 61390
  source 1..40: mol_type = genomic DNA

SEQ ID NO: 61396 - protein, 538 aa, Streptococcus suis; identical to SEQ ID NO: 47476

SEQ ID NO: 61397 - DNA, 50 bp, Streptococcus suis; identical to SEQ ID NO: 42097
  source 1..50: mol_type = genomic DNA

SEQ ID NO: 61398 - DNA, 40 bp, Streptococcus suis; identical to SEQ ID NO: 61388
  source 1..40: mol_type = genomic DNA

SEQ ID NO: 61399 - DNA, 50 bp, Streptococcus suis; identical to SEQ ID NO: 61389
  source 1..50: mol_type = genomic DNA

SEQ ID NO: 61400 - DNA, 40 bp, Streptococcus suis; identical to SEQ ID NO: 61390
  source 1..40: mol_type = genomic DNA

SEQ ID NO: 61401 - protein, 538 aa, Streptococcus suis
MQVEGFSLDAQEAKIQQYANAFDIEIVKTYQDAGKSGKTMLGRTEFMNMISDIEAEKDKVDYVLVFKLSRFGRNAADTLKSLAIMESHGVNLICVDDGLDSSKDSGKLVITILSAVAEMERENIISQAMEGRRQKARAGQWNGGFAPVGYSLVNGQLQVNHEEAESVKMIFDLFANSDMGTIAIAKHLANLDIKKPIRHNSTLPYFSSSGIARILDNPVYNGKIAFGRRESTRDKISGETKVTQSENYILTDGIHEAIIDDETWKKVRKKREANAHKYKRENPNKGDSIYILSGLIKCPLCHAGLYGNKSIKRNKNKKDEYYKNYYYYACKHRKHVDGHKCTFNKQLKTGNLDHEVLSIISKLVSRPDFARKLQEKINIQVDTSRIDSEIEQYKSLFRQLSATKMNLIQQIDSLNFEDPHFQQKSIDLDMRLNTIYDKLADVEMLIETSESKREVILKDKMTADNIYKILVNFASFMDVMEDIDKKRLCQMLIEKVEIYDDKNKAGRWVKAIHFKLPIIEEDLEISLDNSTPVEAVVK

SEQ ID NO: 61402 - DNA, 50 bp, Streptococcus suis; identical to SEQ ID NO: 42097
  source 1..50: mol_type = genomic DNA

SEQ ID NO: 61403 - DNA, 40 bp, Streptococcus suis; identical to SEQ ID NO: 61388
  source 1..40: mol_type = genomic DNA

SEQ ID NO: 61404 - DNA, 50 bp, Streptococcus suis; identical to SEQ ID NO: 61389
  source 1..50: mol_type = genomic DNA

SEQ ID NO: 61405 - DNA, 40 bp, Streptococcus suis; identical to SEQ ID NO: 61390
  source 1..40: mol_type = genomic DNA

SEQ ID NO: 61406 - protein, 536 aa, Streptococcus suis
MQVEGFSLDAQEAKIQQYANAFDIEIVKTYQDAGKSGKTMLGRTEFMNMISDIEAEKDKVDYVLVFKLSRFGRNAADTLKSLAIMESHGVNLICVDDGLDSSKDSGKLVITILSAVAEMERENIISQAMEGRRQKARAGQWNGGFAPVGYSLVNGQLQVNHEEAESVKMIFDLFANSDMGTIAIAKHLANLDIKKPIRHNSTLPYFSSSGIARILDNPVYNGKIAFGRRESTRDKISGETKVTQSENYILTDGIHEAIIDDETWKKVRKKREANAHKYKRENPNKGDSIYILSGLIKCPLCNAGLYGNKSIKRNKNKKDEYYKNYYYYACKHRKHVDGHKCTFNKQLKTGNLDHEVLSIISKLVSRPGFAKKLQEKINIQVDTSRIDSEIEQYKSLFRQLNATKMNLIQQIDTLNFEVPHFQQKSIDLDMRLNTIYDKIADVETLIETSESKREVILKDKMTADNIYKILVNFASLMDVMEDIDKKRLCQMLIEKIEIYDEKNEAGRWVKAIHFKLPIIEEDLEISLDNSTPVEAV

SEQ ID NO: 61407 - DNA, 50 bp, Streptococcus suis; identical to SEQ ID NO: 42092
  source 1..50: mol_type = genomic DNA

SEQ ID NO: 61408 - DNA, 40 bp, Streptococcus suis; identical to SEQ ID NO: 61388
  source 1..40: mol_type = genomic DNA

SEQ ID NO: 61409 - DNA, 50 bp, Streptococcus suis
  source 1..50: mol_type = genomic DNA
agtttggacaatagtacaccggttatggcggttgtgaaattgtccaaacg

SEQ ID NO: 61410 - DNA, 40 bp, Streptococcus suis; identical to SEQ ID NO: 61390
  source 1..40: mol_type = genomic DNA

SEQ ID NO: 61411 - protein, 536 aa, Streptococcus suis; identical to SEQ ID NO: 47486

SEQ ID NO: 61412 - DNA, 50 bp, Streptococcus suis; identical to SEQ ID NO: 42092
  source 1..50: mol_type = genomic DNA

SEQ ID NO: 61413 - DNA, 40 bp, Streptococcus suis; identical to SEQ ID NO: 61388
  source 1..40: mol_type = genomic DNA

SEQ ID NO: 61414 - DNA, 50 bp, Streptococcus suis; identical to SEQ ID NO: 61409
  source 1..50: mol_type = genomic DNA

SEQ ID NO: 61415 - DNA, 40 bp, Streptococcus suis; identical to SEQ ID NO: 61390
  source 1..40: mol_type = genomic DNA

SEQ ID NO: 61416 - protein, 536 aa, Streptococcus suis; identical to SEQ ID NO: 42091

SEQ ID NO: 61417 - DNA, 50 bp, Streptococcus suis; identical to SEQ ID NO: 42092
  source 1..50: mol_type = genomic DNA

SEQ ID NO: 61418 - DNA, 40 bp, Streptococcus suis; identical to SEQ ID NO: 61388
  source 1..40: mol_type = genomic DNA

SEQ ID NO: 61419 - DNA, 50 bp, Streptococcus suis; identical to SEQ ID NO: 61409
  source 1..50: mol_type = genomic DNA

SEQ ID NO: 61420 - DNA, 40 bp, Streptococcus suis; identical to SEQ ID NO: 61390
  source 1..40: mol_type = genomic DNA

SEQ ID NO: 61421 - protein, 553 aa, Streptococcus suis
MKRKKAYIYTRVSTTMQVEGFSLDAQEAKIQQYANAFDIEIVKTYQDAGKSGKTMLGRTEFMNMISDIEAEKDKVDYVLVFKLSRFGRNAADTLKSLAIMESHGVNLICVDDGLDSSKDSGKLVITILSAVAEMERENIISQAMEGRRQKARAGQWNGGFAPVGYSLVNGQLQVNHEEAESVKMIFDLFANSDMGTIAIAKHLANLDIKKPIRHNSTLPYFSSSGIARILDNPVYNGKIAFGRRESTRDKISGETKVTQSENYILTDGIHEAIIDDETWKKVRKKREANAHKYKRENPNKGDSIYILSGLIKCPLCNAGLYGNKSIKRNKNKKDEYYKNYYYYACKHRKHVDGHKCTFNKQLKTGNLDHEVLSIISKLVSRPDFARKLQEKINIQVDTSRIDSEIEQYKSLFRQLSATKMNLIQQIDSLNFEDPHFQQKSIDLDMRLNTIYDKLADVEMLIETSESKREVILKDKMTADNIYKILVNFASFMDVMEDIDKKRLCQMLIEKVEIYDDKNKAGRWVKAIHFKLPIIEEDLEISLDNSTPVEAVVK

SEQ ID NO: 61422 - DNA, 50 bp, Streptococcus suis; identical to SEQ ID NO: 42097
  source 1..50: mol_type = genomic DNA

SEQ ID NO: 61423 - DNA, 40 bp, Streptococcus suis; identical to SEQ ID NO: 61388
  source 1..40: mol_type = genomic DNA

SEQ ID NO: 61424 - DNA, 50 bp, Streptococcus suis; identical to SEQ ID NO: 61389
  source 1..50: mol_type = genomic DNA

SEQ ID NO: 61425 - DNA, 40 bp, Streptococcus suis; identical to SEQ ID NO: 61390
  source 1..40: mol_type = genomic DNA

SEQ ID NO: 61426 - protein, 490 aa, Streptococcus suis
MISDIEAEKDKVDYVLVFKLSRFGRNAADTLKSLAIMESHGVNLICVDDGLDSSKDSGKLVITILSAVAEMERENIISQAMEGRRQKARAGQWNGGFAPVGYSLVNGQLQVNHEEAESVKMIFDLFANSDMGTIAIAKHLANLDIKKPIRHNSTLPYFSSSGIARILDNPVYNGKIAFGRRESTRDKISGETKVTQSENYILTDGIHEAIIDDETWKKVRKKREANAHKYKRENPNKGDSIYILSGLIKCPLCNAGLYGNKSIKRNKNKKDEYYKNYYYYACKHRKHVDGHKCTFNKQLKTGNLDHEVLSIISKLVSRPDFARKLQEKINIQVDTSRIDSEIEQYKSLFRQLSATKMNLIQQIDSLNFEDPHFQQKSIDLDMRLNTIYDKLADVEMLIETSESKREVILKDKMTADNIYKILVNFASFMDVMEDIDKKRLCQMLIEKVEIYDDKNKAGRWVKAIHFKLPIIEEDLEISLDNSTPVEAVVK

SEQ ID NO: 61427 - DNA, 50 bp, Streptococcus suis; identical to SEQ ID NO: 42097
  source 1..50: mol_type = genomic DNA

SEQ ID NO: 61428 - DNA, 40 bp, Streptococcus suis; identical to SEQ ID NO: 61388
  source 1..40: mol_type = genomic DNA

SEQ ID NO: 61429 - DNA, 50 bp, Streptococcus suis; identical to SEQ ID NO: 61389
  source 1..50: mol_type = genomic DNA

SEQ ID NO: 61430 - DNA, 40 bp, Streptococcus suis; identical to SEQ ID NO: 61390
  source 1..40: mol_type = genomic DNA

SEQ ID NO: 61431 - protein, 553 aa, Streptococcus suis
MKRKKAYIYTRVSTNMQVEGFSLDAQETRIHQYANAFDIEIVKTYQDAGKSGKTMLGRTEFMAMISDIEAEKDKVDYVLVFKLSRFGRNAADTLKSLAIMESHGVNLICVDDGLDSSKDSGKLVITILSAVAEMERENIISQAMEGRRQKARAGQWNGGFAPVGYSLVNGQLQVNQEEAESVKMIFDLFANSDMGTIAIAKHLANLDIKKPIRHNSTLPNFSSSGIARILDNPVYNGKIAFGRRESTRDKISGETKVTQSENYILTDGIHEAIIDDETWNKVRKKREANAHKYKRENPSKNDSIYVLSGLIKCPLCHAGLYGNKSIKRNKNKKDEYYKNYYYYACKHRKHVDGHKCTFNKQLKTGNLDHEVLSIISKLVSRPDFARKLQEKINIQVDTSRIDSEIEQYKSLFRQLNATKLNLIQQIDSLNFEDPHFQQKSIDLDMRLNTIYDKLADVETQIETSESKREVILKDKMTADNIYKILVNFASFMDVMEDIDKKRLCQMLIEKVEIYDDKNKAGRWVKAIHFKLPIIEEDLEISLDNSTPVEAVVK

SEQ ID NO: 61432 - DNA, 50 bp, Streptococcus suis; identical to SEQ ID NO: 42097
  source 1..50: mol_type = genomic DNA

SEQ ID NO: 61433 - DNA, 40 bp, Streptococcus suis; identical to SEQ ID NO: 61388
  source 1..40: mol_type = genomic DNA

SEQ ID NO: 61434 - DNA, 50 bp, Streptococcus suis; identical to SEQ ID NO: 61389
  source 1..50: mol_type = genomic DNA

SEQ ID NO: 61435 - DNA, 40 bp, Streptococcus suis; identical to SEQ ID NO: 61390
  source 1..40: mol_type = genomic DNA

SEQ ID NO: 61436 - protein, 553 aa, Streptococcus suis
MKRKKAYIYTRVSTNMQVEGFSLDAQETRIHQYANAFDIEIVKTYQDAGKSGKTMLGRTEFMAMISDIEAEKDKVDYVLVFKLSRFGRNAADTLKSLAIMESHGVNLICVDDGLDSSKDSGKLVITILSAVAEMERENIISQAMEGRRQKARAGQWNGGFAPVGYSLVNGQLQVNQEEAESVKMIFDLFANSDMGTIAIAKHLANLDIKKPIRHNSTLPYFSSSGIARILDNPVYNGKIAFGRRESTRDKISGETKVTQSENYILTDGIHEAIIDDEIWNKVRKKREANAHKYKRENPSKGDSIYILSGLIKCPLCHAGLYGNKSIKRNKNKKDEYYKNYYYYACKHRKHVDGHKCTFNKQLKTGNLDHEVLSIISKLVSRPDFARKLQEKINIQVDTSRIDSEIEQYKSLFRQLNATKLNLIQQIDSLNFEDPHFQQKSIDLDMRLNTIYDKIADVEILIETSESKREVILKDKMTADNIYKILVNFASFMDVMEDIDKKRLCQMLIEKVEIYDDKNKAGRWVKAIHFKLPIIEEDLEISLDNSTPVEAVVK

SEQ ID NO: 61437 - DNA, 50 bp, Streptococcus suis; identical to SEQ ID NO: 42097
  source 1..50: mol_type = genomic DNA

SEQ ID NO: 61438 - DNA, 40 bp, Streptococcus suis; identical to SEQ ID NO: 61388
  source 1..40: mol_type = genomic DNA

SEQ ID NO: 61439 - DNA, 50 bp, Streptococcus suis; identical to SEQ ID NO: 61389
  source 1..50: mol_type = genomic DNA

SEQ ID NO: 61440 - DNA, 40 bp, Streptococcus suis; identical to SEQ ID NO: 61390
  source 1..40: mol_type = genomic DNA

SEQ ID NO: 61441 - protein, 536 aa, Streptococcus suis
MQVEGFSLDAQETRIHQYANAFDIEIVKTYQDAGKSGKTMLGRTEFMAMISDIEAEKDKVDYVLVFKLSRFGRNAADTLKSLAIMESHGVNLICVDDGLDSSKDSGKLVITILSAVAEMERENIISQAMEGRRQKARAGQWNGGFAPVGYSLVNGQLQVNHEEAESVKMIFDLFANSDMGTIAIAKHLANLDIKKPIRHNSTLPYFSSSGIARILDNPVYNGKIAFGRRESTRDKISGETKVTQSENYILTDGIHEAIIDDETWKKVRKKREANAHKYKRENPNKGDSIYILSGLIKCPLCNAGLYGNKSIKRNKNKKDEYYKNYYYYACKHRKHVDGHKCTFNKQLKTGNLDHEVLSIISKLVSRPDFARKLQEKINIQVDTSRIDSEIEQYKSLFRQLSATKMNLIQQIDSLNFEDPHFQQKSIDLDMRLNTIYDKLADVEMLIETSESKREVILKDKMTADNIYKILVNFASFMDVMEDIDKKRLCQMLIEKVEIYDDKNKAGRWVKAIHFKLPIIEEDLEISLDNSTPVEAV

SEQ ID NO: 61442 - DNA, 50 bp, Streptococcus suis; identical to SEQ ID NO: 42092
  source 1..50: mol_type = genomic DNA

SEQ ID NO: 61443 - DNA, 40 bp, Streptococcus suis; identical to SEQ ID NO: 61388
  source 1..40: mol_type = genomic DNA

SEQ ID NO: 61444 - DNA, 50 bp, Streptococcus suis; identical to SEQ ID NO: 61409
  source 1..50: mol_type = genomic DNA

SEQ ID NO: 61445 - DNA, 40 bp, Streptococcus suis; identical to SEQ ID NO: 61390
  source 1..40: mol_type = genomic DNA

SEQ ID NO: 61446 - protein, 536 aa, Streptococcus suis; identical to SEQ ID NO: 61111

SEQ ID NO: 61447 - DNA, 50 bp, Streptococcus suis
  source 1..50: mol_type = genomic DNA
agtttggacaatagtacaccggttgaggcggttgtcaaattgtccaaacg

SEQ ID NO: 61448 - DNA, 40 bp, Streptococcus suis; identical to SEQ ID NO: 61388
  source 1..40: mol_type = genomic DNA

SEQ ID NO: 61449 - DNA, 50 bp, Streptococcus suis
  source 1..50: mol_type = genomic DNA
agtttggacaatagtacaccggttatggcggttgtcaaattgtccaaacg

SEQ ID NO: 61450 - DNA, 40 bp, Streptococcus suis; identical to SEQ ID NO: 61390
  source 1..40: mol_type = genomic DNA

SEQ ID NO: 61451 - protein, 536 aa, Streptococcus suis
MQVEGFSLDAQEAKIQQYANAFDIEIVKTYQDAGKSGKTMLGRTEFMNMISDIEAEKDKVDYVLVFKLSRFGRNAADTLKSLAIMESHGVNLICVDDGLDSSKDSGKLVITILSAVAEMERENIISQAMEGRRQKARAGQWNGGFAPVGYSLVNGQLQVNHEEAESVKMIFDLFANSDMGTIAIAKHLANLDIKKPIRHNSTLPYFSSSGIARILDNPVYNGKIAFGRRESTRDKISGETKVTQSENYILTDGIHEAIIDDETWKKVRKKREANAHKYKRENPNKGDSIYILSGLIKCPLCHAGLYGNKSIKRNKNKKDEYYKNYYYYACKHRKHVDGHKCTFNKQLKTGNLDHEVLSIISKLVSRPDFARKLQEKINIQVDTSRIDSEIEQYKSLFRQLNATKLNLIQQIDSLNFEDPHFQQKSIDLDMRLNTIYDKLADVEMLIETSESKREVILKDKMTADNIYKILVNFASFMDVMEDIDKKRLCQMLIEKVEIYDDKNKAGRWVKSIHFKLPIIEEDLEISLDNNTSVEAV

SEQ ID NO: 61452 - DNA, 50 bp, Streptococcus suis
  source 1..50: mol_type = genomic DNA
agtttggacaataatacatcggttgaggcggttgtgaaattgtccaaacg

SEQ ID NO: 61453 - DNA, 40 bp, Streptococcus suis; identical to SEQ ID NO: 61388
  source 1..40: mol_type = genomic DNA

SEQ ID NO: 61454 - DNA, 50 bp, Streptococcus suis
  source 1..50: mol_type = genomic DNA
agtttggacaataatacatcggttatggcggttgtgaaattgtccaaacg

SEQ ID NO: 61455 - DNA, 40 bp, Streptococcus suis; identical to SEQ ID NO: 61390
  source 1..40: mol_type = genomic DNA

SEQ ID NO: 61456 - protein, 536 aa, Streptococcus suis
MQVEGFSLDAQETRIHQYANAFDIEIVKTYQDAGKSGKTMLGRTEFMAMISDIEAEKDKVDYVLVFKLSRFGRNVADTLKSLAIMESHGVNLICVDDGLDSSKDSGKLVITILSAVAEMERENIISQAMEGRRQKARAGQWNGGFAPVGYSLVNGQLQVNHEEAESVKMIFDLFANSDMGTIAIAKHLANLDIKKPIRHNSTLPYFSSSGIARILDNPVYNGKIAFGRRESTRDKISGETKVTQSENYILTDGIHEAIIDDETWKKVRKKREANAHKYKRENPNKGDSIYILSGLIKCPLCNAGLYGNKSIKRNKNKKDEYYKNYYYYACKHRKHVDGHKCTFNKQLKTGNLDHEVLSIISKLVSRPDFARKLQEKINIQVDTSRIDSEIEQYKSLFRQLSATKMNLIQQIDSLNFEDPHFQQKSIDLDMRLNTIYDKLADVEMLIETSESKREVILKDKMTADNIYKILVNFASFMDVMEDIDKKRLCQMLIEKVEIYDDKNKAGRWVKAIHFKLPIIEEDLEISLDNSTPVEAV

SEQ ID NO: 61457 - DNA, 50 bp, Streptococcus suis; identical to SEQ ID NO: 42092
  source 1..50: mol_type = genomic DNA

SEQ ID NO: 61458 - DNA, 40 bp, Streptococcus suis; identical to SEQ ID NO: 61388
  source 1..40: mol_type = genomic DNA

SEQ ID NO: 61459 - DNA, 50 bp, Streptococcus suis; identical to SEQ ID NO: 61409
  source 1..50: mol_type = genomic DNA

SEQ ID NO: 61460 - DNA, 40 bp, Streptococcus suis; identical to SEQ ID NO: 61390
  source 1..40: mol_type = genomic DNA

SEQ ID NO: 61461 - protein, 536 aa, Streptococcus suis; identical to SEQ ID NO: 61456

SEQ ID NO: 61462 - DNA, 50 bp, Streptococcus suis; identical to SEQ ID NO: 61447
  source 1..50: mol_type = genomic DNA

SEQ ID NO: 61463 - DNA, 40 bp, Streptococcus suis; identical to SEQ ID NO: 61388
  source 1..40: mol_type = genomic DNA

SEQ ID NO: 61464 - DNA, 50 bp, Streptococcus suis; identical to SEQ ID NO: 61449
  source 1..50: mol_type = genomic DNA

SEQ ID NO: 61465 - DNA, 40 bp, Streptococcus suis; identical to SEQ ID NO: 61390
  source 1..40: mol_type = genomic DNA

SEQ ID NO: 61466 - protein, 536 aa, Streptococcus suis
MQVEGFSLDAQETRIHQYANAFDIEIVKTYQDAGKSGKTMLGRTEFMAMISDIEAEKDKVDYVLVFKLSRFGRNAADTLKSLAIMESHGVNLICVDDGLDSSKDSGKLVITILSAVAEMERENIISQAMEGRRQKARAGQWNGGFAPVGYSLVNGQLQVNYEEAESVKMIFDLFANSDMGTIAIAKHLANLDIKKPIRHNSTLPYFSSSGIARILDNPVYNGKIAFGRRESTRDKVSGETKVKQSENYILTDGIHEAIIDDETWKKVRKKREANAHKYKREKPSKGDSIYVLSGLIKCPLCHAGLYGNKSIKRNKNKKDEYYKNYYYYACKHRKHVDGHKCTFNKQLKTGNLDHEVLSIISKLVSRPDFARKLQEKINIQVDTSRIDSEIEQYKSLFRQLNATKLNLIQQIDSLNFEDPHFQQKSIDLDMRLNTIYDKLADVEMLIETSESKREVILKDKMTADNIYKILVNFASFMDVMEDIDKKRLCQMLIEKVEIYDDKNKAGRWVKAIHFKLPIIEEDLEISLDNSTPVEAV

SEQ ID NO: 61467 - DNA, 50 bp, Streptococcus suis; identical to SEQ ID NO: 42092
  source 1..50: mol_type = genomic DNA

SEQ ID NO: 61468 - DNA, 40 bp, Streptococcus suis; identical to SEQ ID NO: 61388
  source 1..40: mol_type = genomic DNA

SEQ ID NO: 61469 - DNA, 50 bp, Streptococcus suis; identical to SEQ ID NO: 61409
  source 1..50: mol_type = genomic DNA

SEQ ID NO: 61470 - DNA, 40 bp, Streptococcus suis; identical to SEQ ID NO: 61390
  source 1..40: mol_type = genomic DNA

SEQ ID NO: 61471 - protein, 519 aa, Helcococcus kunzii
MESNVFVIPAKKKKGNILNKEEKRKLKVAAYCRVSTDTDEQATSYETQVKHYTSYIKNNPDWDFAGVYADDGISGTYTKKREGFNSMIKSCMKGEIDMIITKSISRFARNTVDCLNYIRKLKEKNIPVFFEKESINTMDSKGEVLLTIMASLAQQESQSLSQNVKLGFQFRFKQGKISVNHNRFLGYTKDEDGNLVIEPDEAKTIKRIFLEFLEGSSLRDIAKGLEKDNILTGAGRKKWIPSSVRRILTNEKYMGDALLQKTYTVDFLNKTRVKNDGIVPQYYVQDSHEAIIPKNIFMKVQEELTRRANINENNKKKRIYSSKYALSSLIRCGKCGEIYRRVIYTNRGVKLPVWRCLTRIEEGPSVCNAETLSEELIQEKVLIAINQIIDSKEKIKNIIESNIEKTLIKNSDEKILSLDQKMLEIQKEVLKKANSKEDYTKLALKLEELRKEKNEIMLKEAENESLKERLKEMKKFLEEKESRIDRFDDVLVRKLIEGIEINGNTLLVEFKSGIKIEVK

SEQ ID NO: 61472 - DNA, 50 bp, Helcococcus kunzii
  source 1..50: mol_type = genomic DNA
tttatccatagtgtcgactcgaggcatgtggagactatagcgttgataca

SEQ ID NO: 61473 - DNA, 40 bp, Helcococcus kunzii
  source 1..40: mol_type = genomic DNA
tcagtttccgaggacgatgcacgtggaggctctagtattg

SEQ ID NO: 61474 - DNA, 50 bp, Helcococcus kunzii
  source 1..50: mol_type = genomic DNA
tttatccatagtgtcgactcgaggtctgtggagactatagcgttgataca

SEQ ID NO: 61475 - DNA, 40 bp, Helcococcus kunzii
  source 1..40: mol_type = genomic DNA
tcagtttctcaggctgatttcagtggatgccttagttgtg

SEQ ID NO: 61476 - protein, 486 aa, Catenibacterium sp co 0103
  SITE 413: note = misc_feature - Xaa can be any naturally occurring amino acid
MKGVIYARYSSDNQREESIEGQLRECKDYAERNGITILGTYIDRALSAKTDNRPEFQKMIKDSAKGLFDVVLVWKLDRFARNRYDSARYKNLLKKNGVKVISARENISEGGEGIILEAMLEGYAEYYSAELSEKVIRGLTDNALKCKYNGGTVPMGYYIDEQQFYQIDPKTAPVVLEMFTKYSEGATMQELVNLLNSRGMRSIRGGKITLNIMNHLLKNRRYMGEYSYRDVVKEDGIPAIVPKELFERVQERLAKNKKAPARHKAEDDYLLTTKLYCGKCGSFMVGESGTSHTMKVHRYYRCVNTKKKKLCDKKAVKKDWIEDLVVNYTMKAIMNDEVMERLIDTLMELQKKESTDLPLLKKQLAETEKGINNMLNAIQAGIFTPSTKQRLDELEETKSQLEVSILQEEMHKXPLLTREQIAFFIYRFRKFDVTKREQRQRLIDSFVNAVYLYEDKIILTFNYKDGSKTITLADVEGSDLSSFGAP

SEQ ID NO: 61477 - DNA, 50 bp, Catenibacterium sp co 0103; identical to SEQ ID NO: 43637
  source 1..50: mol_type = genomic DNA

SEQ ID NO: 61478 - DNA, 40 bp, Catenibacterium sp co 0103
  source 1..40: mol_type = genomic DNA
ggttcaagtcccattccgagcaccaatagtagttaacgtg

SEQ ID NO: 61479 - DNA, 50 bp, Catenibacterium sp co 0103
  source 1..50: mol_type = genomic DNA
ggttcggatttatcctcattcggtttaccagaccatgataatccgaaccc

SEQ ID NO: 61480 - DNA, 40 bp, Catenibacterium sp co 0103
  source 1..40: mol_type = genomic DNA
actgtaaatagctttcctattacaaatagtagttaacatg

SEQ ID NO: 61481 - protein, 529 aa, Brevibacterium aurantiacum; identical to SEQ ID NO: 41181

SEQ ID NO: 61482 - DNA, 50 bp, Brevibacterium aurantiacum; identical to SEQ ID NO: 41182
  source 1..50: mol_type = genomic DNA

SEQ ID NO: 61483 - DNA, 40 bp, Brevibacterium aurantiacum
  source 1..40: mol_type = genomic DNA
gcatatgcgaaaccattctgtggagcttaggggaatcgaa

SEQ ID NO: 61484 - DNA, 50 bp, Brevibacterium aurantiacum; identical to SEQ ID NO: 47824
  source 1..50: mol_type = genomic DNA

SEQ ID NO: 61485 - DNA, 40 bp, Brevibacterium aurantiacum
  source 1..40: mol_type = genomic DNA
ccatatgcaaaacaatactaactattttaggtaaatctaa

SEQ ID NO: 61486 - protein, 516 aa, Burkholderia cenocepacia
MELDASLSLRDEGLSAYHQRHVRQGALGVFLRAVEDGQVPAGSVLIVEGLDRLSRAEPLQAQAQLAQIVNAGITVVTASDGREYNRERLKAQPMDLVYSLLVMIRAHEESDTKSKRVKAAIRRQCQGWMAGTWRAPIRVGKDPHWVRETEAGGFELADDRAAAVRLVIEMFKQGHGAVRIVRELADRGLKITDSGRSASSHIYRLLANRMLIGEKSVEVDGETFRLEGYYPALLTPAEFADLRYLAEQRGRRKGKGEIPGVVTGLGITYCGYCGAAIVAQNIMGRRRAADGRPYPGHRRLHCVTYSQSAGCKVSGSCSVVPVERALMLYCSDQINLTRLLEGDSGTVSLAAQLASARQRVAELEAQVQRVTDALLLDNGEAPVAVLRRVRELESQLVSERRDVDSFEHQLAASAANVAPAAADAWRELVNGVEQLDYDARMLARQLVADTFSKIVVFQSGFRPDDDDGTIGLLLIAKRGTIRMLHVDRKTGEWRAAQEHDLAEDTLPFGLGNAEPA

SEQ ID NO: 61487 - DNA, 50 bp, Burkholderia cenocepacia
  source 1..50: mol_type = genomic DNA
tgtttacttctagtgtcttatgggcacccgagagataccatacctatacg

SEQ ID NO: 61488 - DNA, 40 bp, Burkholderia cenocepacia; identical to SEQ ID NO: 53078
  source 1..40: mol_type = genomic DNA

SEQ ID NO: 61489 - DNA, 50 bp, Burkholderia cenocepacia
  source 1..50: mol_type = genomic DNA
tgtttacttctagtgtcttatggggtcccgagagataccatacctatacg

SEQ ID NO: 61490 - DNA, 40 bp, Burkholderia cenocepacia
  source 1..40: mol_type = genomic DNA
atagttcagccccttagaggtgccgaaggatacagaccct

SEQ ID NO: 61491 - protein, 503 aa, Burkholderia cepacia
MELDASLSLRDEGLSAYHQRHVRQGALGVFLRAVEDGQVPAGSVLIVEGLDRLSRAEPLQAQAQLAQIVNAGITVVTASDGREYNRERLKAQPMDLVYSLLVMIRAHEESDTKSKRVKAAIRRQCQGWIAGTWRAPIRVGKDPHWVTETEAGGFELADDRATAVRLVIEMFKQGHGAVRIVRELADRGLKITDSGRSASSHIYRLLANRMLIGEKSVEVDGETFRLEGYYPALLTPTEFADLRYLAEQRGRRKGKGEIPGVVTGLGITYCGYCGAAIVAQNIMGRRRAADGRPYPGHRRLHCVTYSQSAGCKVSGSCSVVPVERALMLYCSDQINLTRLLEGDSGTVSLAAQLASARQRVAELEAQVQRVTDALLFDDGEAPVAVLRRVRELESQLASERRDVDSFEHQLTASASNVAPAAAEAWRELVHGVEQLDYDARMLARQLVADTFSRIVIYQSGFQPDANDGTIGVVLVAKRGGSRLLNVDRRTGNWRTAEDYTHVD

SEQ ID NO: 61492 - DNA, 50 bp, Burkholderia cepacia
  source 1..50: mol_type = genomic DNA
tgtttatatcaagtgacgttcgggcacccgagagataccatacctatacg

SEQ ID NO: 61493 - DNA, 40 bp, Burkholderia cepacia; identical to SEQ ID NO: 53078
  source 1..40: mol_type = genomic DNA

SEQ ID NO: 61494 - DNA, 50 bp, Burkholderia cepacia
  source 1..50: mol_type = genomic DNA
tgtttatatcaagtgacgttcggggtcccgagagataccatacctatacg

SEQ ID NO: 61495 - DNA, 40 bp, Burkholderia cepacia; identical to SEQ ID NO: 61490
  source 1..40: mol_type = genomic DNA

SEQ ID NO: 61496 - protein, 507 aa, Burkholderia cenocepacia
MELDASLSLRDEGLSAYHQRHVRQGALGVFLRAVEDGQVPAGSVLIVEGLDRLSRAEPLQAQAQLAQIVNAGITVVTASDGREYNRERLKAQPMDLVYSLLVMIRAHEESDTKSKRVKAAIRRQCQGWMAGTWRAPIRVGKDPHWVRETEAGRFELADDRAAAVRLVIEMFKQGHGAVRIVRELADRGLKITDSGRSASSHIYRLLANRMLIGEKSVEVDGETFRLEGYYPALLTPAEFSDLRYLAEQRGRRKGKGEIPGVVTGLGITYCGYCGAAIVAQNIMGRRRAADGRPYPGHRRLHCVTYSQSAGCKVSGSCSVVPVERALMLYCSDQINLTRLLEGDSGTVSLAAQLASARQRVAELETQVQRVTDALLLDNGEAPAAVLRRVRELESQLVSERRDVDSFEHQLAASAANVAPAAADAWRELVNGVEQLDYDARMLARQLVADTFSKIVVFQSGFRPDDDDGTIGLLLIAKRGTIRMLHVDRKTGEWRAAEEIDVNKMLAN

SEQ ID NO: 61497 - DNA, 50 bp, Burkholderia cenocepacia
  source 1..50: mol_type = genomic DNA
ggttaatttctaatgacgttcgggcacccgagagataccatacctatgcg

SEQ ID NO: 61498 - DNA, 40 bp, Burkholderia cenocepacia; identical to SEQ ID NO: 53078
  source 1..40: mol_type = genomic DNA

SEQ ID NO: 61499 - DNA, 50 bp, Burkholderia cenocepacia
  source 1..50: mol_type = genomic DNA
ggttaatttctaatgacgttcggggtcccgagagataccatacctatgcg

SEQ ID NO: 61500 - DNA, 40 bp, Burkholderia cenocepacia; identical to SEQ ID NO: 61490
  source 1..40: mol_type = genomic DNA

SEQ ID NO: 61501 - protein, 474 aa, Bradyrhizobium diazoefficiens
MIDAATVKPTAFDVIVVHSFSRFFRDQFQLEFYVRRLAKNGVRLVSITQELGDDPMSNMIRQIMALFDEYQSKENAKHTLRAMKENARQGFWNGALPPIGYRVVEAAEQRGHRTKKTLEVDPIQAETVRLIYRLAREGNGSSGPMGVKSIAKHLNEAGIRTRDGGRWGVDAVHKVLTRTTYIGRHRFNTKYWKTRERKPEAEVVEMAVPPIIEAAEFEAVQMLLKSRSPALTAPRVVSGPTLLTGICFCAACGGAMTLRTGKSGRYRYYTCCTKARQGETGCKGRTVPMEKLDSVVAEHIEHRLLQPKRLEEVLSAVLHRRKERAERRTTHIAELRKRAAEAEAKLKRLYDAIENGIADVSDPMLKERVTELKSIRDQARTDAERADGALDRAGPSITPQALKTFASQARRRMRTESGGYRRDHLRALAQRVEVDAKEVRIIGSKAVLLRTLVAASSAKTAGFGVPSFVPKWRA

SEQ ID NO: 61502 - DNA, 50 bp, Bradyrhizobium diazoefficiens
  source 1..50: mol_type = genomic DNA
tgcccagttttgtaccgaagtggcgcgccattcagaacaaaaccgcgagc

SEQ ID NO: 61503 - DNA, 40 bp, Bradyrhizobium diazoefficiens
  source 1..40: mol_type = genomic DNA
acttaccaccgcaaatggcgcgcccggaacgattcgaacg

SEQ ID NO: 61504 - DNA, 50 bp, Bradyrhizobium diazoefficiens
  source 1..50: mol_type = genomic DNA
tgcccagttttgtaccgaagtggctggccattcagaacaaaaccgcgagc

SEQ ID NO: 61505 - DNA, 40 bp, Bradyrhizobium diazoefficiens
  source 1..40: mol_type = genomic DNA
tcttacatctgcaaatggctggactggagctgtttgaaca

SEQ ID NO: 61506 - protein, 530 aa, Streptomyces noursei
MATYGINALSAIRLSVRTDETTSPGRQRTANEESARGIGAEIIGEAEDLDVSASKTTPFERPQLGAWLADPASYDAILWWRLDRAVRSMADMHALAKWARDHRKMLVFAEGPGGRLVLDFRNPLDIMSELLVTLLAFAAQMEAQAIKERVTSATAALRLMPLRWRGARPPYGYEPVPMPEGGGYTLAPDPEAVTVIERIIRELVDGTAVSAIAVALNEEGVPSPRDHWALKRGRSTGGKTGGRHYDAGTEVERFRWGASAIKALLTSPTLLGHKVHKGTPVRNAAGQPIVATDQPLLNREEYDYIGSLLNARATRPRTRKDTNALLLRVAFCDSCGGRLYYARASGKRPNIYGCRPFADGRTCSATANIKAEWLEEYVKEEFLARVGSWELVEVKTIPGYDPGPELAEVTTELEAHMSEAERFRSDAGRRIWQSTADALEARLADLEATPARPPQEHVVRTGKTYADEWRRQDVVGRRRMLLDAGARVVVKPGRKGGRHRPDESRFSFALGASRTTAIRLGEIAAEESTA

SEQ ID NO: 61507 - DNA, 50 bp, Streptomyces noursei
  source 1..50: mol_type = genomic DNA
attacaactttgtgcccgtccgggtctccgaaccgaagggaagcagtaat

SEQ ID NO: 61508 - DNA, 40 bp, Streptomyces noursei
  source 1..40: mol_type = genomic DNA
gatccggtgcccgtccgggtcggcgatccacatctcgatc

SEQ ID NO: 61509 - DNA, 50 bp, Streptomyces noursei
  source 1..50: mol_type = genomic DNA
attacaactttgtgcccgtccggggctccgaaccgaagggaagcagtaat

SEQ ID NO: 61510 - DNA, 40 bp, Streptomyces noursei
  source 1..40: mol_type = genomic DNA
gatcctgcacccgtccgaggcgcacatcctcttctccaac

SEQ ID NO: 61511 - protein, 559 aa, Bradyrhizobium japonicum; identical to SEQ ID NO: 48201

SEQ ID NO: 61512 - DNA, 50 bp, Bradyrhizobium japonicum
  source 1..50: mol_type = genomic DNA
cggttcgtaaatctgttcaggaatggtgcgccattcagaacaaagatgcg

SEQ ID NO: 61513 - DNA, 40 bp, Bradyrhizobium japonicum
  source 1..40: mol_type = genomic DNA
ctgcgaagcagcgaaggctggtgcccctggccggaatcga

SEQ ID NO: 61514 - DNA, 50 bp, Bradyrhizobium japonicum
  source 1..50: mol_type = genomic DNA
cggttcgtaaatctgttcaggaattgtgcgccattcagaacaaagatgcg

SEQ ID NO: 61515 - DNA, 40 bp, Bradyrhizobium japonicum
  source 1..40: mol_type = genomic DNA
ctgctatggaccgaatgtttgtgcccctgccccaaattca

SEQ ID NO: 61516 - protein, 403 aa, Bradyrhizobium japonicum
MARKHLQVSEAPDNAARPRPRNVLIYIRVSTEKQSNNQLSLDSQEENLIARCKRDGDHIAGIFREEGETATNMKRPAFEQMIARATDGTRSVDAIMVYSFSRAFRNQVEQELTVQTLRKHKVELISHAEPLANDDTGDMFRKFIGIVNEYQSKETARSTMRTMKANAQLGYSNGGIIPFGYKSVDAEIIGNKQKKKLATEPVEAEVVIRAFDLAKNGDGNSGPLGTKKIAEWLNAHGYRSRNGSLFGTGTVHEMLTRRAYTGVRNFNEFDRKGDGERKAQSEIVEYEIPVIIDQATFEAVQALLVSRRPRSRGPRLASAPSLLGGLVRCDCAKSCALTTATGTSRTGVIYSYYKCIQSIKKGSISTTTAPPAAIARSPGLSSKSSWLRPCWTSSYSPNGSRPS

SEQ ID NO: 61517 - DNA, 50 bp, Bradyrhizobium japonicum; identical to SEQ ID NO: 61512
  source 1..50: mol_type = genomic DNA

SEQ ID NO: 61518 - DNA, 40 bp, Bradyrhizobium japonicum; identical to SEQ ID NO: 61513
  source 1..40: mol_type = genomic DNA

SEQ ID NO: 61519 - DNA, 50 bp, Bradyrhizobium japonicum; identical to SEQ ID NO: 61514
  source 1..50: mol_type = genomic DNA

SEQ ID NO: 61520 - DNA, 40 bp, Bradyrhizobium japonicum; identical to SEQ ID NO: 61515
  source 1..40: mol_type = genomic DNA

SEQ ID NO: 61521 - protein, 506 aa, Nitratireductor aquibiodomus
MTDTKLKNAVFYGRVSDVKQATVRGDALHSQERTCREYAERKGYVIREVFTDTLTGAHTNRPGLQAMLAYIRQHRGTIIIVDHSNRLGRDMLSYLMVRQEIKDAGGILESPVMGFEETSSDQLVEHVIASVNQYQRQHNAEQTKSRMRARVSGGYWALAAPVGYRYERVTGRGKIMVRDEPVASVVQEALEGFASGRFEKQADVQRFLQNNPLFPKDKRGIVRHQRVSVLLKQCLYAGYLEMPRWDISLRPAQHEPLITFKTFKIIQDRLEGGIYAPRKKNVNEDFPLRGYVMCDDCGTPLTSCWSKGSHNKYPYYLCPKRGCASYGKSIRRADIEGQFETLLQSLTPSDSLFRAAKRMFKDLWDHRISQGQARANALAAQLPKIEKQLDQLLDRITDVSVPSVIAALEKRIGKLEQEKIVVQEKMAQAPFAKTSFDRTLRTALAFLANPWILWRSDRLEDRRTVLKLAFAGPLRYQRENGFRTVDLSLPFSMLAGISGDKEGMAR

SEQ ID NO: 61522 - DNA, 50 bp, Nitratireductor aquibiodomus
  source 1..50: mol_type = genomic DNA
ggaatttccggtgataaggaaggtatggcgcgcctggatggcgacacttc

SEQ ID NO: 61523 - DNA, 40 bp, Nitratireductor aquibiodomus
  source 1..40: mol_type = genomic DNA
cggaatggaccgtggtaaaatggcgcgcccgaaaggattc

SEQ ID NO: 61524 - DNA, 50 bp, Nitratireductor aquibiodomus
  source 1..50: mol_type = genomic DNA
ggaatttccggtgataaggaaggtcgggcgcgcctggatggcgacacttc

SEQ ID NO: 61525 - DNA, 40 bp, Nitratireductor aquibiodomus
  source 1..40: mol_type = genomic DNA
ccgcaggggccgtgggaagcgggcgctccggggaggatgc

SEQ ID NO: 61526 - protein, 538 aa, Azotobacter chroococcum
MKNGAKVYSYLRFSDPRQATGSSADRQLQYAQTWAAARGLELDETLSLRDEGLSAYHQKHVKQGALGVFLLAVDEGRIPAGSVLIVEGLDRLSRAEPLQAQAQLAQIINAGITVVTASDGREYNREGLKAQPMDLVYSLLVMIRAHEESDTKSKRVKASIRRQCEGWQAGTYRGLIRNGKDPQWVRWTGEGWELIPERVEAVRAALDLYRSGLGAGRAAKLMHAQGHMLSDWGIAGQQIYRLVRLPALRGAKRISVDGEDYLLEEYYPRVLSDAEFDELQLLAGQRYRRRGAGEIPGIITGVGLAWCGYCGTALVAQNIMNRRREDGTLADGHRRLHCTSYSKNGGCSAGGSCSVVPIERALLAYCADKMNLQRLQQAAVDGQDLRQQLAEARLQVEELDKQLAKITDALLADESGAAPLAFVRRARELEQQQTAAQARVRQLERELSVASVHVEPAQAERWAELAALVEQDDYAAREQVRQLVLDTFERLVIYMRGIAPDGRQGRTIDMVMVPKGGAPRLLQIDRRSGAWVASEDWD

SEQ ID NO: 61527 - DNA, 50 bp, Azotobacter chroococcum
  source 1..50: mol_type = genomic DNA
tgtatatattggaagtcttaagggcacccgagcgatataaaccctatact

SEQ ID NO: 61528 - DNA, 40 bp, Azotobacter chroococcum
  source 1..40: mol_type = genomic DNA
gtcgacggtggccttcgggcacccgagcgacacgaatccg

SEQ ID NO: 61529 - DNA, 50 bp, Azotobacter chroococcum
  source 1..50: mol_type = genomic DNA
tgtatatattggaagtcttaagggtccccgagcgatataaaccctatact

SEQ ID NO: 61530 - DNA, 40 bp, Azotobacter chroococcum
  source 1..40: mol_type = genomic DNA
gtctacgggggccttagggtctcagagtcccacgagtttg

SEQ ID NO: 61531 - protein, 549 aa, Methylorubrum extorquens
MNHQTRKAPFVPVSDRPQRVGCYLRVSTGRQAEGDLSIPDQRKQVHAFCAAKGWPVVGEYVEPGASATDDNRPEFQKMIERAGDDDHPFDVIVVHSYSRFFRDSFGLEMYVRRLARAGVRLISITQELGDDPAQVMMRQVIALFDEYQSKENAKHVLRAMKENARQGFYNGSPVPLGYTVAEIEKRGARVKKRLAVDPVEAETVRLIFRLYRFGDGATGPLGVKAITCHLNERGYRTRAGARFGVATVHGILTNRVYVGEAFFNRRCSKTLAQKPAAEHIPISVPALIELPEFEAVQATLKAHNPRATPARVVTGPILLTGLATCTTCNGPMTLRTGTSKSGKVHRYYSCSTHGRMGRTGCTGRSIPMDTLDTLVTDHLVAELLQPDRLRATLASLWALRAEKAAQVDGRVAALRGEVCEAEEKLKRLYRMVEEGVTDLDDILKGRLAALKEDRDRARTALDRIHVAERAPAEIAPELVEKFGRLMRENVTSGEIPFRKAWLQAIVDRVEVDADVIRIVGEKASLEAAVIDAAPSAAPGVRSSVRKWRA

SEQ ID NO: 61532 - DNA, 50 bp, Methylorubrum extorquens
  source 1..50: mol_type = genomic DNA
gcagttctgtacggaagtggcgcgccggctcgaatataaatgcgaacacg

SEQ ID NO: 61533 - DNA, 40 bp, Methylorubrum extorquens
  source 1..40: mol_type = genomic DNA
cagaagagtagatggcgcgcccgaaaggattcgaacctct

SEQ ID NO: 61534 - DNA, 50 bp, Methylorubrum extorquens
  source 1..50: mol_type = genomic DNA
gcagttctgtacggaagtggcgcgaaggctcgaatataaatgcgaacacg

SEQ ID NO: 61535 - DNA, 40 bp, Methylorubrum extorquens
  source 1..40: mol_type = genomic DNA
cagcaacctagatagagcaaaccaaaggaatagatcctct

SEQ ID NO: 61536 - protein, 511 aa, Burkholderia pseudomallei; identical to SEQ ID NO: 58421

SEQ ID NO: 61537 - DNA, 50 bp, Burkholderia pseudomallei
  source 1..50: mol_type = genomic DNA
atttaccctatccttcaggtacccgagggatactatacctatactatacg

SEQ ID NO: 61538 - DNA, 40 bp, Burkholderia pseudomallei
  source 1..40: mol_type = genomic DNA
cgagggctttcgggcacccgagcgaaaccatacccacctt

SEQ ID NO: 61539 - DNA, 50 bp, Burkholderia pseudomallei
  source 1..50: mol_type = genomic DNA
atttaccctatccttcaggtaccccagggatactatacctatactatacg

SEQ ID NO: 61540 - DNA, 40 bp, Burkholderia pseudomallei
  source 1..40: mol_type = genomic DNA
cgagtggctcctggaaccccagcgagacaaaaccaaccgt

SEQ ID NO: 61541 - protein, 523 aa, Klebsiella quasipneumoniae
MRQVITYLRFSSKPQERGDSIRRQKGLFERWLKDNPDAKVVDEFSDEGASAYHGHHLKGDFGRMLQNIQDGKYLSGQTVLLVESETRLNRQKARNTENLVDLITGKGVDVICLESGKIYTSTNIDDLDTSIQLKIAAHIAHQQSKEKSIKVSAAWEHRAQLALEGKQQLTKNVPGWIDPDTRKLNEHSSTVVTIFDLLLSGESLHNIARYLQANNIKSFSRREKANGFSVHSVRTILRSESTVGTLAASKRNDRPAIPNYYEPAIDVATFNKAQEILSKNRVGRAPASDNPITINLFKGIIRCQCGASVHPTGVKATYQGVYRCNNVPDGRCNVPTIKRKPFDKWMLDNIIGFLERSDGNNTDKRKAEIEYQISLVTSKLKKAATLLLELDDVTELKEQVKELNIQRINMQSELDDLNQRETLSDKPLHHLSEIDLTTKAGRVEAQLILSKFVQSIELQREMIIITLRNGAVIGKSRDLSPALSQDLMKQVVSSSSPRDIDMFSVITSDEEFRKSGKPVTKRS

SEQ ID NO: 61542 - DNA, 50 bp, Klebsiella quasipneumoniae; identical to SEQ ID NO: 38382
  source 1..50: mol_type = genomic DNA

SEQ ID NO: 61543 - DNA, 40 bp, Klebsiella quasipneumoniae; identical to SEQ ID NO: 54543
  source 1..40: mol_type = genomic DNA

SEQ ID NO: 61544 - DNA, 50 bp, Klebsiella quasipneumoniae
  source 1..50: mol_type = genomic DNA
aacccgaatagcctatattcaaggtacattgtatttgagctattcggcga

SEQ ID NO: 61545 - DNA, 40 bp, Klebsiella quasipneumoniae
  source 1..40: mol_type = genomic DNA
gcagagaggaatatcaaggtaaatgtggctcaaagtcatc

SEQ ID NO: 61546 - protein, 523 aa, Klebsiella quasipneumoniae; identical to SEQ ID NO: 40171

SEQ ID NO: 61547 - DNA, 50 bp, Klebsiella quasipneumoniae; identical to SEQ ID NO: 40172
  source 1..50: mol_type = genomic DNA

SEQ ID NO: 61548 - DNA, 40 bp, Klebsiella quasipneumoniae; identical to SEQ ID NO: 54543
  source 1..40: mol_type = genomic DNA

SEQ ID NO: 61549 - DNA, 50 bp, Klebsiella quasipneumoniae
  source 1..50: mol_type = genomic DNA
aacccgaatagcctatactcaaggtacattgtatttgagctattcggcga

SEQ ID NO: 61550 - DNA, 40 bp, Klebsiella quasipneumoniae; identical to SEQ ID NO: 61545
  source 1..40: mol_type = genomic DNA

SEQ ID NO: 61551 - protein, 523 aa, Klebsiella quasipneumoniae; identical to SEQ ID NO: 38381

SEQ ID NO: 61552 - DNA, 50 bp, Klebsiella quasipneumoniae; identical to SEQ ID NO: 38382
  source 1..50: mol_type = genomic DNA

SEQ ID NO: 61553 - DNA, 40 bp, Klebsiella quasipneumoniae; identical to SEQ ID NO: 54543
  source 1..40: mol_type = genomic DNA

SEQ ID NO: 61554 - DNA, 50 bp, Klebsiella quasipneumoniae; identical to SEQ ID NO: 61544
  source 1..50: mol_type = genomic DNA

SEQ ID NO: 61555 - DNA, 40 bp, Klebsiella quasipneumoniae; identical to SEQ ID NO: 61545
  source 1..40: mol_type = genomic DNA

SEQ ID NO: 61556 - protein, 523 aa, Klebsiella variicola
MRQVITYLRFSSKPQERGDSIRRQKGLFERWLKDNPDAKVVDEFSDEGASAYHGHHLKGDFGRMLQNIQDGKYLSGQTVLLVESETRLNRQKARNTENLVDLITGKGVDVICLESGKIYTSTNIDDLDTSIQLKIAAHIAHQQSKEKSIKVSAAWEHRAQLALEGKQQLTKNVPGWIDPDTRKLNEHSSTVVTIFDLLLSGESLHNIARYLQANNIKSFSRREKANGFSVHSVRTILRSESTVGTLAASKRNDRPAIPNYYEPAIDVATFNKAQEILSKNRVGRAPASDNPITINLFKGIIRCQCGASVHPTGVKATYQGVYRCNNVPDGRCNVPTIKRKPFDKWMLDNIVGFLERSDGNNTDKRKAEIEYQISLVTSKLKKATPLLLELDDVTELKEQVKELNIQRSNMQSELDELNQRETLSDKPLHHLSEIDLTTKAGRVEAQLILSKFVQSIELQREMIIITLRNGTVIGKSRDLSPVLSQDLMKQVVSSSSPRDIDMFSVITSDEEFRKSGKPVTKRS

SEQ ID NO: 61557 - DNA, 50 bp, Klebsiella variicola; identical to SEQ ID NO: 38382
  source 1..50: mol_type = genomic DNA

SEQ ID NO: 61558 - DNA, 40 bp, Klebsiella variicola; identical to SEQ ID NO: 54543
  source 1..40: mol_type = genomic DNA

SEQ ID NO: 61559 - DNA, 50 bp, Klebsiella variicola; identical to SEQ ID NO: 61544
  source 1..50: mol_type = genomic DNA

SEQ ID NO: 61560 - DNA, 40 bp, Klebsiella variicola; identical to SEQ ID NO: 61545
  source 1..40: mol_type = genomic DNA

SEQ ID NO: 61561 - protein, 523 aa, Klebsiella variicola
MRQVITYLRFSSKPQERGDSIRRQKGLFERWLKDNPDAKVVDEFSDEGASAYHGHHLKGDFGRMLQNIQDGKYLSGQTVLLVESETRLNRQKARNTENLVDLITGKGVDVICLESGKIYTSTNIDDLDTSIQLKIAAHIAHQQSKEKSIKVSAAWEHRAQLALEGKQQLTKNVPGWIDPDTRKLNEHSSTVVTIFDLLLSGESLHNIARYLQANNIKSFSRREKANGFSVHSVRTILRSESTVGTLAASKRNDRPAIPNYYEPAIDVATFNKAQEILSKNRVGRAPASDNPITINLFKGIIRCQCGASVHPTGVKATYQGVYRCNNVPDGRCNVPTIKRKPFDKWMLDNIVGFLERSDGNNTDKRKAEIEYQISLVTSKLKKATPLLLELDDVTELKEQVKELNIQRSNMQSELDELNQRETLSDKPLHHLSEIDLTTKAGRVEAQLILSKFVQSIELQREMIIITLRNGTVIGKSRDLSPVLSQDLMKQVVSSSSPRDIDMFSVITSDEEFRKSGKQVTKRS

SEQ ID NO: 61562 - DNA, 50 bp, Klebsiella variicola; identical to SEQ ID NO: 38382
  source 1..50: mol_type = genomic DNA

SEQ ID NO: 61563 - DNA, 40 bp, Klebsiella variicola; identical to SEQ ID NO: 54543
  source 1..40: mol_type = genomic DNA

SEQ ID NO: 61564 - DNA, 50 bp, Klebsiella variicola; identical to SEQ ID NO: 61544
  source 1..50: mol_type = genomic DNA

SEQ ID NO: 61565 - DNA, 40 bp, Klebsiella variicola; identical to SEQ ID NO: 61545
  source 1..40: mol_type = genomic DNA

SEQ ID NO: 61566 - protein, 523 aa, Klebsiella variicola
MRQVITYLRFSSKPQERGDSIRRQKGLFERWLKDNPDAKVVDEFSDEGASAYHGHHLKGDFGRMLQNIQDGKYLSGQTVLLVESETRLNRQKARNTENLVDLITGKGVDVICLESGKIYTSTNIDDLDTSIQLKIAAHIAHQQSKEKSIKVSAAWEHRAQLALEGKQQLTKNVPGWIDPDTRKLNEHSSTVVTIFDLLLSGESLHNIARYLQANNIKSFSRREKANGFSVHSVRTILRSESTVGTLAASKRNDRPAIPNYYEPAIDVATFNKAQEILSKNRVGRAPASDNPITINLFKGIIRCQCGASVHPTGVKATYQGVYRCNNVPDGRCNVPTIKRKPFDKWMLDNIIGFLERSDGNHTDKRKAEIEYQISLVTSKLKKATPLLLELDDVTELKEQVKELNIQRSNMQSELDELNQRETLSDKPLHHLSEIDLTTKAGRVEAQLILSKFVQSIELQREMIIITLRNGTVIGKSRDLSPVLSRDLMKQVVSSPSPTDIDMFSVITSDEEFRKSGKQVTKRS

SEQ ID NO: 61567 - DNA, 50 bp, Klebsiella variicola; identical to SEQ ID NO: 38382
  source 1..50: mol_type = genomic DNA

SEQ ID NO: 61568 - DNA, 40 bp, Klebsiella variicola; identical to SEQ ID NO: 54543
  source 1..40: mol_type = genomic DNA

SEQ ID NO: 61569 - DNA, 50 bp, Klebsiella variicola; identical to SEQ ID NO: 61544
  source 1..50: mol_type = genomic DNA

SEQ ID NO: 61570 - DNA, 40 bp, Klebsiella variicola; identical to SEQ ID NO: 61545
  source 1..40: mol_type = genomic DNA

SEQ ID NO: 61571 - protein, 523 aa, Klebsiella variicola
MRQVITYLRFSSKPQERGDSIRRQKGLFERWLKDNPDAKVVDEFSDEGASAYHGHHLKGDFGRMLQNIQDGKYLSGQTVLLVESETRLNRQKARNTENLVDLITGKGVDVICLESGKIYTSTNIDDLDTSIQLKIAAHIAHQQSKEKSIKVSAAWEHRAQLALEGKQQLTKNVPGWIDPDTRKLNEHSSTVVTIFDLLLSGESLHNIARYLQVNNIKSFSRREKANGFSVHSVRTILRSESTVGTLAASKRNDRPAIPNYYEPAIDVATFNKAQEILSKNRVGRAPASDNPITINLFKGIIRCQCGASVHPTGVKATYQGVYRCNNVPDGRCNVPTIKRKPFDKWMLDNIVGFLERSDGNNTDKRKAEIEYQISLVTSKLKKATPLLLELDDVTELKEQVKELNIQRSNMQSELDELNQRETLSDKPLHHLSEIDLTTKAGRVEAQLILSKFVQSIELQREMIIITLRNGTVIGKSRDLSPVLSQDLMKQVVSSSSPRDIDMFSVITSDEEFRKSGKQVTKRS

SEQ ID NO: 61572 - DNA, 50 bp, Klebsiella variicola; identical to SEQ ID NO: 38382
  source 1..50: mol_type = genomic DNA

SEQ ID NO: 61573 - DNA, 40 bp, Klebsiella variicola; identical to SEQ ID NO: 54543
  source 1..40: mol_type = genomic DNA

SEQ ID NO: 61574 - DNA, 50 bp, Klebsiella variicola; identical to SEQ ID NO: 61544
  source 1..50: mol_type = genomic DNA

SEQ ID NO: 61575 - DNA, 40 bp, Klebsiella variicola; identical to SEQ ID NO: 61545
  source 1..40: mol_type = genomic DNA

SEQ ID NO: 61576 - protein, 523 aa, Klebsiella variicola
MRQVITYLRFSSKPQERGDSIRRQKGLFERWLKDNPDAKVVDEFSDEGASAYHGHHLKGDFGRMLQNIQDGKYLSGQTVLLVESETRLNRQKARNTENLVDLITGKGVDVICLESGKIYTSTNIDDLDTSIQLKIAAHIAHQQSKEKSIKVSAAWEHRAQLALEGKQQLTKNVPSWIDPDTRKLNEHSSTVVTIFDLLLSGESLHNIARYLQANNIKSFSRREKANGFSVHSVRTILRSESTVGTLAASKRNDRPAIPNYYEPAIDVATFNKAQEILSKNRVGRAPASDNPITINLFKGIIRCQCGASVHPTGVKATYQGVYRCNNVPDGRCNVPTIKRKPFDKWMLDNIIGFLERSDGNNTDKRKAEIEYQISLVTSKLKKAATLLLELDDVTELKEQVKELNIQRINMQSELDDLNQRETLSDKPLHHLSEIDLTTKAGRVEAQLILSKFVQSIELQREMIIITLRNGAVIGKSRDLSPALSQDLMKQVVSSSSPRDIDMFSVITSDEEFRKSGKPVTKRS

SEQ ID NO: 61577 - DNA, 50 bp, Klebsiella variicola; identical to SEQ ID NO: 38382
  source 1..50: mol_type = genomic DNA

SEQ ID NO: 61578 - DNA, 40 bp, Klebsiella variicola; identical to SEQ ID NO: 54543
  source 1..40: mol_type = genomic DNA

SEQ ID NO: 61579 - DNA, 50 bp, Klebsiella variicola; identical to SEQ ID NO: 61544
  source 1..50: mol_type = genomic DNA

SEQ ID NO: 61580 - DNA, 40 bp, Klebsiella variicola; identical to SEQ ID NO: 61545
  source 1..40: mol_type = genomic DNA

SEQ ID NO: 61581 - protein, 523 aa, Klebsiella variicola
MRQVITYLRFSSKPQERGDSIRRQKGLFERWLKDNPDAKVVDEFSDEGASAYHGHHLKGDFGRMLQNIQDGKYLSGQTVLLVESETRLNRQKARNTENLVDLITGKGVDVICLESGKIYTSTNIDDLDTSIQLKIAAHIAHQQSKEKSIKVSAAWENRAQLALEGKQQLTKNVPGWIDPDTRKLNEHSSTVVTIFDLLLSGESLHNIARYLQANNIKSFSRREKANGFSVHSVRTILRSESTVGTLAASKRNDRPAIPNYYEPAIDVATFNKAQEILSKNRVGRAPASDNPITINLFKGIIRCQCGASVHPTGVKATYQGVYRCNNVPDGRCNVPTIKRKPFDKWMLDNIVGFLERDDGNNTDKRKAEIEYQISLVTSKLKKATTLLLELDDVTELKEQVKELNIQRSNLQSELDELNQRETLSDKPLHHLSEIDLTTKAGRVEAQLILSKFVQSIELQREMIIITLRNGTVIGKSRDLSPVLSQDLMKQVVSSPSPTDIDMFSVITSDEEFRKSGKQVTKRS

SEQ ID NO: 61582 - DNA, 50 bp, Klebsiella variicola; identical to SEQ ID NO: 38382
  source 1..50: mol_type = genomic DNA

SEQ ID NO: 61583 - DNA, 40 bp, Klebsiella variicola; identical to SEQ ID NO: 54543
  source 1..40: mol_type = genomic DNA

SEQ ID NO: 61584 - DNA, 50 bp, Klebsiella variicola; identical to SEQ ID NO: 61544
  source 1..50: mol_type = genomic DNA

SEQ ID NO: 61585 - DNA, 40 bp, Klebsiella variicola; identical to SEQ ID NO: 61545
  source 1..40: mol_type = genomic DNA

SEQ ID NO: 61586 - protein, 523 aa, Klebsiella variicola
MRQVITYLRFSSKPQERGDSIRRQKGLFERWLKDNPDAKVVDEFSDEGASAYHGHHLKGDFGRMLQNIQDGKYLSGQTVLLVESETRLNRQKARNTENLVDLITGKGVDVICLESGKIYTSTNIDDLDTSIQLKIAAHIAHQQSKEKSIKVSAAWEHRAQLALEGKQQLTKNVPGWIDPDTRKLNEHSSTVVTIFDLLLSGESLHNIARYLQANNIKSFSRREKANGFSVHSVRTILRSESTVGTLAASKRNDRPAIPNYYEPAIDVATFNKAQEILSKNRVGRAPASDNPITINLFKGIIRCQCGASVHPTGVKATYQGVYRCNNVPDGRCNVPTIKRKPFDKWMLDNIVGFLERDDGNNTDKRKAEIEYQISLVTSKLKKATTLLLELDDVTELKEQVKELNIQRSNLQSELDELTQRETLSDKPLHHLSEIDLATKAGRVEAQLILSKFVQSIELQREMIIITLRNGTVIGKSRDLSPVLSQDLMKQVVSSPSPTDIDMFSVITSDEEFRKSGKQVTKRS

SEQ ID NO: 61587 - DNA, 50 bp, Klebsiella variicola; identical to SEQ ID NO: 38382
  source 1..50: mol_type = genomic DNA

SEQ ID NO: 61588 - DNA, 40 bp, Klebsiella variicola; identical to SEQ ID NO: 54543
  source 1..40: mol_type = genomic DNA

SEQ ID NO: 61589 - DNA, 50 bp, Klebsiella variicola; identical to SEQ ID NO: 61544
  source 1..50: mol_type = genomic DNA

SEQ ID NO: 61590 - DNA, 40 bp, Klebsiella variicola; identical to SEQ ID NO: 61545
  source 1..40: mol_type = genomic DNA

SEQ ID NO: 61591 - protein, 523 aa, Klebsiella variicola
MRQVITYLRFSSKPQERGDSIRRQKGLFERWLKDNPDAKVVDEFSDEGASAYHGHHLKGDFGRMLQNIQDGRYLSGQTVLLVESETRLNRQKARNTENLVDLITGKGVDVICLESGKIYTSTNIDDLDTSIQLKIAAHIAHQQSKEKSIKVSAAWEHRAQLALEGKQQLTKNVPGWIDPDTRKLNEHSSTVVTIFDLLLSGESLHNIARYLQANNIKSFSRREKANGFSVHSVRTILRSESTVGTLAASKRNDRPAIPNYYEPAIDVATFNKAQEILSKNRVGRAPASDNPITINLFKGIIRCQCGASVHPTGVKATYQGVYRCNNVPDGRCNVPTIKRKPFDKWMLDNIIGFLERSDGNNTDKRKAEIEYQISLVTSKLKKATPLLLELDDVTELKEQVKELNIQRSNMQSELDELNQRETLSDKPLHHLSEIDLTTKAGRVEAQLILSKFVQSIELQREMIIITLRNGTVIGKSRDLSPVLSRDLMKQVVSSPSPTDIDMFSVITSDEEFRKSGKQVTKRS

SEQ ID NO: 61592 - DNA, 50 bp, Klebsiella variicola; identical to SEQ ID NO: 38382
  source 1..50: mol_type = genomic DNA

SEQ ID NO: 61593 - DNA, 40 bp, Klebsiella variicola; identical to SEQ ID NO: 54543
  source 1..40: mol_type = genomic DNA

SEQ ID NO: 61594 - DNA, 50 bp, Klebsiella variicola; identical to SEQ ID NO: 61544
  source 1..50: mol_type = genomic DNA

SEQ ID NO: 61595 - DNA, 40 bp, Klebsiella variicola; identical to SEQ ID NO: 61545
  source 1..40: mol_type = genomic DNA

SEQ ID NO: 61596 - protein, 523 aa, Klebsiella variicola
MRQVITYLRFSSKPQERGDSIRRQKGLFERWLKDNPDAKVVDEFSDEGASAYHGHHLKGDFGRMLQKIQDGKYLSGQTVLLVESETRLNRQKARNTENLVDLITGKGVDVICLESGKIYTSTNIDDLDTSIQLKIAAHIAHQQSKEKSIKVSAAWEHRAQLALEGKQQLTKNVPGWIDPDTRKLNEHSSTVVTIFDLLLSGESLHNIARYLQANNIKSFSRREKANGFSVHSVRTILRSESTVGTLAASKRNDRPAIPNYYEPAIDIATFNKAQEILSKNRVGRAPASDNPITINLFKGIIRCQCGASVHPTGVKATYQGVYRCNNVPDGRCNVATIKRKPFDKWMLDNIVGFLERSDGNNTDKRKAEIEYQISLVTSKLKKATTLLLELDDVTELKEQVKELNIQRSNMQSELDELNQRETLSDKPLHHLSEIDLTTKAGRVEAQLILSKFVQSIELQREMIIITLRNGTVIGKSRDLSPVLSRDLMKQVVSSPSPTDIDMFSVITSDEEFRKSGKQVTKRS

SEQ ID NO: 61597 - DNA, 50 bp, Klebsiella variicola; identical to SEQ ID NO: 38382
  source 1..50: mol_type = genomic DNA

SEQ ID NO: 61598 - DNA, 40 bp, Klebsiella variicola; identical to SEQ ID NO: 54543
  source 1..40: mol_type = genomic DNA

SEQ ID NO: 61599 - DNA, 50 bp, Klebsiella variicola; identical to SEQ ID NO: 61544
  source 1..50: mol_type = genomic DNA

SEQ ID NO: 61600 - DNA, 40 bp, Klebsiella variicola; identical to SEQ ID NO: 61545
  source 1..40: mol_type = genomic DNA

SEQ ID NO: 61601 - protein, 523 aa, Klebsiella variicola
MRQVITYLRFSSKPQERGDSIRRQKGLFERWLKDNPDAKVVDEFSDEGASAYHGHHLKGDFGRMLQNIQDGKYLSGQTVLLVESETRLNRQKARNTESLVDLITGKGVDVICLESGKIYTSTNIDDLDTSIQLKIAAHIAHQQSKEKSIKVSAAWEHRAQLALEGKQQLTKNVPGWIDPDTRKLNEHSSTVVTIFDLLLSGESLHNIARYLQANNIKSFSRREKANGFSVHSVRTILRSESTVGTLAASKRNDRPAIPNYYEPAIDIATFNKAQEILSKNRVGRAPASDNPITINLFKGIIRCQCGASVHPTGVKATYQGVYRCNNVPDGRCNVATIKRKPFDKWMLDNIVGFLERSDGNNTDKRKAEIEYQISLVTSKLKKATTLLLELDDVTELKEQVKELNIQRSNMQSELDELNQRETLSDKPLHHLSEIDLTTKAGRVEAQLILSKFVQSIELQREMIIITLRNGTVIGKSRDLSPVLSQDLMKQVVSSSSPRDIDMFSVITSDEEFRKSGRPVTKRS

SEQ ID NO: 61602 - DNA, 50 bp, Klebsiella variicola; identical to SEQ ID NO: 61042
  source 1..50: mol_type = genomic DNA

SEQ ID NO: 61603 - DNA, 40 bp, Klebsiella variicola; identical to SEQ ID NO: 54543
  source 1..40: mol_type = genomic DNA

SEQ ID NO: 61604 - DNA, 50 bp, Klebsiella variicola
  source 1..50: mol_type = genomic DNA
aacccgaatagcctacattcaaggtacattgtatttgagctattcggcga

SEQ ID NO: 61605 - DNA, 40 bp, Klebsiella variicola; identical to SEQ ID NO: 61545
  source 1..40: mol_type = genomic DNA

SEQ ID NO: 61606 - protein, 523 aa, Klebsiella variicola
MRQVITYLRFSSKPQERGDSIRRQKGLFERWLKDNPDAKVVDEFSDEGASAYHGHHLKGDFGRMLQNIQDGKYLSGQTVLLVESETRLNRQKARNTENLVDLITGKGVDVICLESGKIYTSTNIDDLDTSIQLKIAAHIAHQQSKEKSIKVSAAWEHRAQLALEGKQQLTKNVPGWIDPDTRKLNEHSSTVVTIFDLLLSGESLHNIARYLQANNIKSFSRREKANGFSVHSVRTILRSESTVGTLAASKRNDRPAIPNYYEPAIDVATFNKAQEILSKNRVGRAPASDNPITINLFKGIIRCQCGASVHPTGVKATYQGVYRCNNVPDGRCNVPTIKRKPFDKWMLDNIIGFLERDDGNNTDKRKAEIEYQISLVTSKLKKATTLLLELDDVTELKEQVKELNIQRSNLQSELDELNQRETLSDKPLHHLSEIDLTTKAGRVEAQLILSKFVQSIELQREMIIITLRNGAVIGKSRDLSPALSQDLMKQVVSSSSPRDIDMFSVITSDEEFRKSGKPVTKRS

SEQ ID NO: 61607 - DNA, 50 bp, Klebsiella variicola; identical to SEQ ID NO: 38382
  source 1..50: mol_type = genomic DNA

SEQ ID NO: 61608 - DNA, 40 bp, Klebsiella variicola; identical to SEQ ID NO: 54543
  source 1..40: mol_type = genomic DNA

SEQ ID NO: 61609 - DNA, 50 bp, Klebsiella variicola; identical to SEQ ID NO: 61544
  source 1..50: mol_type = genomic DNA

SEQ ID NO: 61610 - DNA, 40 bp, Klebsiella variicola; identical to SEQ ID NO: 61545
  source 1..40: mol_type = genomic DNA

SEQ ID NO: 61611 - protein, 523 aa, Klebsiella pneumoniae
MRQVITYLRFSSKPQERGDSIRRQKGLFERWLKDNPDAKVVDEFSDEGASAYHGHHLKGDFGRMLQNIQDGKYLSGQTVLLVESETRLNRQKARNTENLVDLITGKGVDVICLESGKIYTSTNIDDLDTSIQLKIAAHIAHQQSKEKSIKVSAAWEHRAQLALEGKQQLTKNVPGWIDPDTRKLNEHSSTVVTIFDLLLSGESLHNIARYLQANNIKSFSRREKANGFSVHSVRTILRSESTVGTLAASKRNDRPAIPNYYEPAIDVATFNKAQEILSKNRVGRAPASDNPITINLFKGIIRCQCGASVHPTVVKATYQGVYRCNNVPDGRCNVPTIKRKPFDKWMLDNIIGFLERSDGNNTDKRKAEIEYQISLVTSKLKKAATLLLELDDVTELKEQVKELNIQRINMQSELDDLNQRETLSDKPLHHLSEIDLTTKAGRVEAQLILSKFVQSIELQREMIIITLRNGAVIGKSRDLSPALSQDLMKQVVSSSSPRDIDMFSVITSDEEFRKSGKPVTKRS

SEQ ID NO: 61612 - DNA, 50 bp, Klebsiella pneumoniae; identical to SEQ ID NO: 38382
  source 1..50: mol_type = genomic DNA

SEQ ID NO: 61613 - DNA, 40 bp, Klebsiella pneumoniae; identical to SEQ ID NO: 54543
  source 1..40: mol_type = genomic DNA

SEQ ID NO: 61614 - DNA, 50 bp, Klebsiella pneumoniae; identical to SEQ ID NO: 61544
  source 1..50: mol_type = genomic DNA

SEQ ID NO: 61615 - DNA, 40 bp, Klebsiella pneumoniae; identical to SEQ ID NO: 61545
  source 1..40: mol_type = genomic DNA

SEQ ID NO: 61616 - protein, 523 aa, Klebsiella pneumoniae
MRQVITYLRFSSKPQERGDSIRRQKGLFERWLKDNPDAKVVDEFSDEGASAYHGHHLKGDFGRMLQKIQDGKYLSGQTVLLVESETRLNRQKARNTENLVDLITGKGVDVICLESGKIYTSTNIDDLDTSIQLKIAAHIAHQQSKEKSIKVSAAWEHRAQLALEGKQQLTKNVPGWIDPDTRKLNEHSSTVVTIFDLLLSGESLHNIARYLQANNIKSFSRREKANGFSVHSVRTILRSESTVGTLAASKRNDRPAIPNYYEPAIDVATFNKAQEILSKNRVGRAPASDNPITINLFKGIIRCQCGASVHPTGVKATYQGVYRCNNVPDGRCNVPTIKRKPFDKWMLDNIIGFLERSDGNNTDKRKAEIEYQISLVTSKLKKATTLLLELDDVTELKEQVKELNIQRSNLQNELDELNQRETLSDKPLHHLSEIDLTTKAGRVEAQLILSKFVQSIELQREMIIITLRNGTVIGKSRDLSPVLSRDLMKQVVSSPSPTDIDMFSVITSDEEFRKSGKQVTKRS

SEQ ID NO: 61617 - DNA, 50 bp, Klebsiella pneumoniae; identical to SEQ ID NO: 61042
  source 1..50: mol_type = genomic DNA

SEQ ID NO: 61618 - DNA, 40 bp, Klebsiella pneumoniae; identical to SEQ ID NO: 54543
  source 1..40: mol_type = genomic DNA

SEQ ID NO: 61619 - DNA, 50 bp, Klebsiella pneumoniae; identical to SEQ ID NO: 61604
  source 1..50: mol_type = genomic DNA

SEQ ID NO: 61620 - DNA, 40 bp, Klebsiella pneumoniae; identical to SEQ ID NO: 61545
  source 1..40: mol_type = genomic DNA

SEQ ID NO: 61621 - protein, 523 aa, Klebsiella pneumoniae; identical to SEQ ID NO: 54541

SEQ ID NO: 61622 - DNA, 50 bp, Klebsiella pneumoniae; identical to SEQ ID NO: 38382
  source 1..50: mol_type = genomic DNA

SEQ ID NO: 61623 - DNA, 40 bp, Klebsiella pneumoniae; identical to SEQ ID NO: 54543
  source 1..40: mol_type = genomic DNA

SEQ ID NO: 61624 - DNA, 50 bp, Klebsiella pneumoniae; identical to SEQ ID NO: 61544
  source 1..50: mol_type = genomic DNA

SEQ ID NO: 61625 - DNA, 40 bp, Klebsiella pneumoniae; identical to SEQ ID NO: 61545
  source 1..40: mol_type = genomic DNA

SEQ ID NO: 61626 - protein, 523 aa, Klebsiella pneumoniae
MRQVITYLRFSSKPQERGDSIRRQKGLFERWLKDNPDAKVVDEFSDEGASAYHGHHLKGDFGRMLQNIQDGKYLSGQTVLLVESETRLNRQKARNTENLVDLITGKGVDVICLESGKIYTSTNIDDLDTSIQLKIAAHIAHQQSKEKSIKVSAAWEHRAQLALEGKQQLTKNVPGWIDPDTRKLNEHSSTVVTIFDLLLSGESLHNIARYLQANNIKSFSRREKANGFSVHSVRTILRSESTVGTLAASKRNDRPAIPNYYEPAIDVATFNKAQEILSKNRVGRAPASDNPITINLFKGIIRCQCGASVHPTGVKATYQGVYRCNNVPDGRCNVPTIKRKPFDKWMLDNIVGFLERDDGNNTDKRKAEIEYQISLVTSKLKKATTLLLELDDVTELKEQVKELNIQRSNLQSELDELNQRETLSDKPLHHLSEIDLTTKAGRVEAQLILSKFVQSIELQREMIIITLRNGTVIGKSRDLPPVLSQDLMKQVVSSPSPTDIDMFSVITSDEEFRKSGKQVTKRS

SEQ ID NO: 61627 - DNA, 50 bp, Klebsiella pneumoniae; identical to SEQ ID NO: 38382
  source 1..50: mol_type = genomic DNA

SEQ ID NO: 61628 - DNA, 40 bp, Klebsiella pneumoniae; identical to SEQ ID NO: 54543
  source 1..40: mol_type = genomic DNA

SEQ ID NO: 61629 - DNA, 50 bp, Klebsiella pneumoniae; identical to SEQ ID NO: 61544
  source 1..50: mol_type = genomic DNA

SEQ ID NO: 61630 - DNA, 40 bp, Klebsiella pneumoniae; identical to SEQ ID NO: 61545
  source 1..40: mol_type = genomic DNA

SEQ ID NO: 61631 - protein, 517 aa, Klebsiella pneumoniae
MRQVITYLRFSSKPQERGDSIRRQKGLFERWLKDNPDAKVVDEFSDEGASAYHGHHLKGDFGRMLQNIQDGKYLSGQTVLLVESETRLNRQKARNTENLVDLITGKGVDVICLESGKIYTSTNIDDLDTSIQLKIAAHIAHQQSKEKSIKVSAAWEHRAQLALEGKQQLTKNVPGWIDPDTRKLNEHSSTVVTIFDLLLSGESLHNIARYLQANNIKSFSRREKANGFSVHSVRTILRSESTVGTLAASKRNDRPAIPNYYEPAIDVATFNKAQEILSKNRVGRAPASDNPITINLFKGIIRCQCGASVHPTGVKATYQGVYRCNNVPDGRCNVPTIKRKPFDKWMLDNIVGFLERDDGNNTDKRKAEIEYQISLVTSKLKKATTLLLELDDVTELKEQVKELNIQRSNLQSELDELNQRETLSDKPLHHLSEIDLTTKAGRVEAQLILSKFVQSIELQREMIIITLRNGTVIGKSRDLSPVLSRDLMKQVVSSPSPTDIDMFSVITSDEEFRKSGK

SEQ ID NO: 61632 - DNA, 50 bp, Klebsiella pneumoniae; identical to SEQ ID NO: 38382
  source 1..50: mol_type = genomic DNA

SEQ ID NO: 61633 - DNA, 40 bp, Klebsiella pneumoniae; identical to SEQ ID NO: 54543
  source 1..40: mol_type = genomic DNA

SEQ ID NO: 61634 - DNA, 50 bp, Klebsiella pneumoniae; identical to SEQ ID NO: 61544
  source 1..50: mol_type = genomic DNA

SEQ ID NO: 61635 - DNA, 40 bp, Klebsiella pneumoniae; identical to SEQ ID NO: 61545
  source 1..40: mol_type = genomic DNA

SEQ ID NO: 61636 - protein, 523 aa, Klebsiella pneumoniae
MRQVITYLRFSSKPQERGDSIRRQKGLFERWLKDNPDAKVVDEFSDEGASAYHGHHLKGDFGRMLQKIQDGKYLSGQTVLLVESETRLNRQKARNTENLVDLITGKGVDVICLESGKIYTSTNIDDLDTSIQLKIAAHIAHQQSKEKSIKVSAAWEHRAQLALEGKQQLTKNVPGWIDPDTRKLNEHSSTVVTIFDLLLSGESLHNIARYLQANNIKSFSRREKANGFSVHSVRTILRSESTVGTLAASKRNDRPAIPNYYEPAIDVATFNKAQEILSKNRVGRAPASDNPITINLFKGIIRCQCGASVHPTGVKATYQGVYRCNNVPDGRCNVPTIKRKPFDKWMLDNIVGFLERDDGNNTDKRKAEIEYQISLVTSKLKKATTLLLELDDVTELKEQVKELNIQRSNLQSELDELNQRETLSDKPLHHLSEIDLTTKAGRVEAQLILSKFVQSIELQREMIIITLRNGTVIGKSRDLSPVLSQDLMKQVVSSPSPTDIDMFSVITSDEEFRKSGKQVTKRS

SEQ ID NO: 61637 - DNA, 50 bp, Klebsiella pneumoniae; identical to SEQ ID NO: 38382
  source 1..50: mol_type = genomic DNA

SEQ ID NO: 61638 - DNA, 40 bp, Klebsiella pneumoniae; identical to SEQ ID NO: 54543
  source 1..40: mol_type = genomic DNA

SEQ ID NO: 61639 - DNA, 50 bp, Klebsiella pneumoniae; identical to SEQ ID NO: 61544
  source 1..50: mol_type = genomic DNA

SEQ ID NO: 61640 - DNA, 40 bp, Klebsiella pneumoniae; identical to SEQ ID NO: 61545
  source 1..40: mol_type = genomic DNA

SEQ ID NO: 61641 - protein, 523 aa, Klebsiella pneumoniae
MRQVITYLRFSSKPQERGDSIRRQKGLFERWLKDNPDAKVVDEYSDEGASAYHGHHLKGDFGRMLQKIQDGKYLSGQTVLLVESETRLNRQKARNTENLVDLITGKGVDVICLESGKIYTSTNIDDLDTSIQLKIAAHIAHQQSKEKSIKVSAAWEHRAQLALEGKQQLTKNVPGWIDPDTRKLNEHSSTVVTIFDLLLSGESLHNIARYLQANNIKSFSRREKANGFSVHSVRTILRSESTVGTLAASKRNDRPAIPNYYEPAIDVATFNKAQEILSKNRVGRAPASDNPITINLFKGIIRCQCGASVHPTGVKATYQGVYRCNNVPDGRCNVPTIKRKPFDKWMLDNIVGFLERDDGNNTDKRKAEIEYQISLVTSKLKKATTLLLELDDVTELKEQVKELNIQRSNLQSELDELNQRETLSDKPLHHLSEIDLTTKAGRVEAQLILSKFVQSIELQREMIIITLRNGTVIGKSRDLSPVLSQDLMKQVVSSPSPTDIDMFSVITSDEEFRKSGKQVTKRS

SEQ ID NO: 61642 - DNA, 50 bp, Klebsiella pneumoniae; identical to SEQ ID NO: 61042
  source 1..50: mol_type = genomic DNA

SEQ ID NO: 61643 - DNA, 40 bp, Klebsiella pneumoniae; identical to SEQ ID NO: 54543
  source 1..40: mol_type = genomic DNA

SEQ ID NO: 61644 - DNA, 50 bp, Klebsiella pneumoniae; identical to SEQ ID NO: 61604
  source 1..50: mol_type = genomic DNA

SEQ ID NO: 61645 - DNA, 40 bp, Klebsiella pneumoniae; identical to SEQ ID NO: 61545
  source 1..40: mol_type = genomic DNA

SEQ ID NO: 61646 - protein, 523 aa, Klebsiella pneumoniae
MRQVITYLRFSSKPQERGDSIRRQKGLFERWLKDNPDAKVVDEFSDEGASAYHGHHLKGDFGRMLQNIQDGKYLSGQTVLLVESETRLNRQKARNTENLVDLITGKGVDVICLESGKIYTSTNIDDLDTSIQLKIAAHIAHQQSKEKSIKVSAAWEHRAQLALEGKQQLTKNVPGWIDPDTRKLNEHSSTVVTIFDLLLSGESLHNIARYLQANNIKSFSRREKANGFSVHSVRTILRSESTVGTLAASKRNDRPAIPNYYEPAIDVATFNKAQEILSKNRVGRAPASDNPITINLFKGIIRCQCGASVHPTGVKATYQGVYRCNNVPDGRCNVPTIKRKPFDKWMLDNIVGFLERDDGNNTDKRKAEIEYQISLVTSKLKKATTLLLELDDVTELKEQVKELNIQRSNLQSELDELNQRETLSDKPLHHLSEIDLTTKAGRVKAQLILSKFVQSIELQREMIIITLRNGTVIGKSRDLSPVLSQDLMKQVVSSPSPTDIDMFSVITSDEEFRKSGKQVTKRS

SEQ ID NO: 61647 - DNA, 50 bp, Klebsiella pneumoniae; identical to SEQ ID NO: 38382
  source 1..50: mol_type = genomic DNA

SEQ ID NO: 61648 - DNA, 40 bp, Klebsiella pneumoniae; identical to SEQ ID NO: 54543
  source 1..40: mol_type = genomic DNA

SEQ ID NO: 61649 - DNA, 50 bp, Klebsiella pneumoniae; identical to SEQ ID NO: 61544
  source 1..50: mol_type = genomic DNA

SEQ ID NO: 61650 - DNA, 40 bp, Klebsiella pneumoniae; identical to SEQ ID NO: 61545
  source 1..40: mol_type = genomic DNA

SEQ ID NO: 61651 - protein, 517 aa, Klebsiella pneumoniae
MRQVITYLRFSSKPQERGDSIRRQKGLFERWLKDNPDAKVVDEFSDEGASAYHGHHLKGDFGRMLQNIQDGKYLSGQTVLLVESETRLNRQKARNTENLVDLITGKGVDVICLESGKIYTSTNIDDLDTSIQLKIAAHIAHQQSKEKSIKVSAAWEHRAQLALEGKQQLTKNVPGWIDPDTRKLNEHSSTVVTIFDLLLSGESLHNIARYLQANNIKSFSRREKANGFSVHSVRTILRSESTVGTLAASKRNDRPAIPNYYEPAIDVATFNKAQEILSKNRVGRAPASDNPITINLFKGIIRCQCGASVHPTGVKATYQGVYRCNNVPDGRCNVPTIKRKPFDKWMLDNIVGFLERDDGNNTDKRKAEIEYQISLVTSKLKKATTLLLELDDVTELKEQVKELNIQRSNLQSELDELNQRETLSDKPLHHLSEIDLTTKAGRVEAQLILSKFVQSIELQREMIIITLRNGTVIGKSRDLSPVLSRDLMKQVVSSPSPTDIDMFSVITSDEEFRKPGK

SEQ ID NO: 61652 - DNA, 50 bp, Klebsiella pneumoniae; identical to SEQ ID NO: 38382
  source 1..50: mol_type = genomic DNA

SEQ ID NO: 61653 - DNA, 40 bp, Klebsiella pneumoniae; identical to SEQ ID NO: 54543
  source 1..40: mol_type = genomic DNA

SEQ ID NO: 61654 - DNA, 50 bp, Klebsiella pneumoniae; identical to SEQ ID NO: 61544
  source 1..50: mol_type = genomic DNA

SEQ ID NO: 61655 - DNA, 40 bp, Klebsiella pneumoniae; identical to SEQ ID NO: 61545
  source 1..40: mol_type = genomic DNA

SEQ ID NO: 61656 - protein, 523 aa, Klebsiella pneumoniae
MRQVITYLRFSSKPQERGDSIRRQKGLFERWLKDNPDAKVVDEFSDEGASAYHGHHLKGDFGRMLQNIQDGKCLSGQTVLLVESETRLNRQKARNTENLVDLITGKGVDVICLESGKIYTSTNIDDLDTSIQLKIAAHIAHQQSKEKSIKVSAAWEHRAQLALEGKQQLTKNVPGWIDPDTRKLNEHSSTVVTIFDLLLSGESLHNIARYLQANNIKSFSRREKANGFSVHSVRTILRSESTVGTLAASKRNDRPAIPNYYEPAIDVATFNKAQEILSKNRVGRAPASDNPITINLFKGIIRCQCGASVHPTVVKATYQGVYRCNNVPDGRCNVPTIKRKPFDKWMLDNIIGFLERSDGNNTDKRKAEIEYQISLVTSKLKKAATLLLELDDVTELKEQVKELNIQRINMQSELDDLNQRETLSDKPLHHLSEIDLTTKAGRVEAQLILSKFVQSIELQREMIIITLRNGAVIGKSRDLSPALSQDLMKQVVSSSSPRDIDMFSVITSDEEFRKSGKPVTKRS

SEQ ID NO: 61657 - DNA, 50 bp, Klebsiella pneumoniae; identical to SEQ ID NO: 38382
  source 1..50: mol_type = genomic DNA

SEQ ID NO: 61658 - DNA, 40 bp, Klebsiella pneumoniae; identical to SEQ ID NO: 54543
  source 1..40: mol_type = genomic DNA

SEQ ID NO: 61659 - DNA, 50 bp, Klebsiella pneumoniae; identical to SEQ ID NO: 61544
  source 1..50: mol_type = genomic DNA

SEQ ID NO: 61660 - DNA, 40 bp, Klebsiella pneumoniae; identical to SEQ ID NO: 61545
  source 1..40: mol_type = genomic DNA

SEQ ID NO: 61661 - protein, 523 aa, Klebsiella pneumoniae
MRQVITYLRFSSKPQERGDSIRRQKGLFERWLKDNPDAKVVDEFSDEGASAYHGHHLKGDFGRMLQNIQDGKYLSGQTVLLVESETRLNRQKARNTENLVDLITGKGVDVICLESGKIYTSTNIDDLDTSIQLKIAAHIAHQQSKEKSIKVSAAWEHRAQLALEGKQQLTKNVPGWIDPDTRKLNEHSSTVVTIFDLLLSGESLHNIARYLQANNIKSFSRREKANGFSVHSVRTILRSESTVGTLAASKRNDRPAIPNYYEPAIDVATFNKAQEILSKNRVGRAPASDNPITINLFKGIIRCQCGASVHPTGVKATYQGVYRCNNVPDGRCNVPTIKRKPFDKWMLDNIVGFLERDDGNNTDKRKAEIEYQISLVTSKLKKATTLLLELDDVTELKEQVKELNIQRSNMQSELDDLNQRETLSDKPLHHLSEIDLTTKAGRVEAQLILSKFVQSIELQREMIIITLRNGAVIGKSRDLSPALSQDLMKQVVSSSSPRDIDMFSVITSDEEFRKSGKPVTKRS

SEQ ID NO: 61662 - DNA, 50 bp, Klebsiella pneumoniae; identical to SEQ ID NO: 38382
  source 1..50: mol_type = genomic DNA

SEQ ID NO: 61663 - DNA, 40 bp, Klebsiella pneumoniae; identical to SEQ ID NO: 54543
  source 1..40: mol_type = genomic DNA

SEQ ID NO: 61664 - DNA, 50 bp, Klebsiella pneumoniae; identical to SEQ ID NO: 61544
  source 1..50: mol_type = genomic DNA

SEQ ID NO: 61665 - DNA, 40 bp, Klebsiella pneumoniae; identical to SEQ ID NO: 61545
  source 1..40: mol_type = genomic DNA

SEQ ID NO: 61666 - protein, 523 aa, Klebsiella pneumoniae
MRQVITYLRFSSKPQERGDSIRRQKGLFERWLKDNPDAKVVDEFSDEGASAYHGHHLKGDFGRMLQNIQDGKYLSGQTVLLVESETRLNRQKARNTENLVDLITGKGVDVICLESGKIYTSTNIDDLDTSIQLKIAAHIAHQQSKEKSIKVSAAWEHRAQLALEGKQQLTKNVPGWIDPDTRKLNEHSSTVVTIFDLLLSGESLHNIARYLQANNIKSFSRREKANGFSVHSVRTILRSESTVGTLAASKRNDRPAIPNYYEPAIDVATFNKAQEILSKNRVGRAPASDNPITINLFKGIIRCQCGASVHPTGVKATYQGVYRCNNVPDGRCNVPTIKRKPFDKWMLDNIIGFLERSDGNNTDKRKAEIEYQISLVTSKLKKAATLLLELDDVTELKEQVKELNIQGINMQSELDDLNQRETLSDKPLHHLSEIDLTTKAGRVEAQLILSKFVQSIELQREMIIITLRNGAVIGKSRDLSPALSQDLMKQVVSSSSPRDIDMFSVITSDEEFRKSGKPVTKRS

SEQ ID NO: 61667 - DNA, 50 bp, Klebsiella pneumoniae; identical to SEQ ID NO: 38382
  source 1..50: mol_type = genomic DNA

SEQ ID NO: 61668 - DNA, 40 bp, Klebsiella pneumoniae; identical to SEQ ID NO: 54543
  source 1..40: mol_type = genomic DNA

SEQ ID NO: 61669 - DNA, 50 bp, Klebsiella pneumoniae; identical to SEQ ID NO: 61544
  source 1..50: mol_type = genomic DNA

SEQ ID NO: 61670 - DNA, 40 bp, Klebsiella pneumoniae; identical to SEQ ID NO: 61545
  source 1..40: mol_type = genomic DNA

SEQ ID NO: 61671 - protein, 523 aa, Klebsiella pneumoniae; identical to SEQ ID NO: 61541

SEQ ID NO: 61672 - DNA, 50 bp, Klebsiella pneumoniae
  source 1..50: mol_type = genomic DNA
aacccgaatagcctatattcaagcgtcattgtatttgagctattcggcga

SEQ ID NO: 61673 - DNA, 40 bp, Klebsiella pneumoniae; identical to SEQ ID NO: 54543
  source 1..40: mol_type = genomic DNA

SEQ ID NO: 61674 - DNA, 50 bp, Klebsiella pneumoniae
  source 1..50: mol_type = genomic DNA
aacccgaatagcctatattcaagctacattgtatttgagctattcggcga

SEQ ID NO: 61675 - DNA, 40 bp, Klebsiella pneumoniae; identical to SEQ ID NO: 61545
  source 1..40: mol_type = genomic DNA

SEQ ID NO: 61676 - protein, 523 aa, Klebsiella pneumoniae
MRQVITYLRFSSKPQERGDSIRRQKGLFERWLKDNPDAKVVDEFSDEGASAYHGHHLKGDFGRMLQKIQDGKYLSGQTVLLVESETRLNRQKARNTENLVDLITGKGVDVICLESGKIYTSTNIDDLDTSIQLKIAAHIAHQQSKEKSIKVSAAWEHRAQLALEGKQQLTKNVPGWIDPDTRKLNEHSSTVVTIFDLLLSGESLHNIARYLQANNIKSFSRREKANGFSVHSVRTILRSESTVGTLAASKRNDRPAIPNYYEPAIDVATFNKAQEILSKNRVGRAPASDNPITINLFKGIIRCQCGASVHPTGVKATYQGVYRCNNVPDGRCNVPTIKRKPFDKWMLDNIIGFLERSDGNHTDKRKAEIEYQISLVTSKLKKATPLLLELDDVTELKEQVKELNIQRSNMQSELDELKQRETLSDKPLHHLSEIDLTTKAGRVEAQLILSKFVQSIELQREMIIITLRNGTVIGKSRDLSPVLSQDLMKQVVSSPSPTDIDMFSVITSDEEFRKSGKQVTKRS

SEQ ID NO: 61677 - DNA, 50 bp, Klebsiella pneumoniae; identical to SEQ ID NO: 38382
  source 1..50: mol_type = genomic DNA

SEQ ID NO: 61678 - DNA, 40 bp, Klebsiella pneumoniae; identical to SEQ ID NO: 54543
  source 1..40: mol_type = genomic DNA

SEQ ID NO: 61679 - DNA, 50 bp, Klebsiella pneumoniae; identical to SEQ ID NO: 61544
  source 1..50: mol_type = genomic DNA

SEQ ID NO: 61680 - DNA, 40 bp, Klebsiella pneumoniae; identical to SEQ ID NO: 61545
  source 1..40: mol_type = genomic DNA

SEQ ID NO: 61681 - protein, 523 aa, Klebsiella pneumoniae
MRQVITYLRFSSKPQERGDSIRRQKGLFERWLKDNPDAKVVDEFSDEGASAYHGHHLKGDFGRMLQNIQDGRYLSGQTVLLVESETRLNRQKARNTENLVDLITGKGVDVICLESGKIYTSTNIDDLDTSIQLKIAAHIAHQQSKEKSIKVSAAWEHRAQLALEGKQQLTKNVPGWIDPDTRKLNEHSSTVVTIFDLLLSGESLHNIARYLQANNIKSFSRREKANGFSVHSVRTILRSESTVGTLAASKRNDRPAIPNYYEPAIDVATFNKAQEILSKNRVGRAPASDNPITINLFKGIIRCQCGASVHPTGVKATYQGVYRCNNVPDGRCNVPTIKRKPFDKWMVDNIIGFLERSDGNNTDKRKAEIEYQISLVTSKLKKATTLLLELDDVTELKEQVKELNIQRSNLQSELDELNQRETLSDKPLHHLSEIDLTTKAGRVEAQLILSKFVQSIELQREMIIITLRNGTVIGKSRDLSPVLSRDLMKQVVSSPSPTDIDMFSVITSDEEFRKSGKQVTKRS

SEQ ID NO: 61682 - DNA, 50 bp, Klebsiella pneumoniae; identical to SEQ ID NO: 40172
  source 1..50: mol_type = genomic DNA

SEQ ID NO: 61683 - DNA, 40 bp, Klebsiella pneumoniae; identical to SEQ ID NO: 54543
  source 1..40: mol_type = genomic DNA

SEQ ID NO: 61684 - DNA, 50 bp, Klebsiella pneumoniae; identical to SEQ ID NO: 61549
  source 1..50: mol_type = genomic DNA

SEQ ID NO: 61685 - DNA, 40 bp, Klebsiella pneumoniae; identical to SEQ ID NO: 61545
  source 1..40: mol_type = genomic DNA

SEQ ID NO: 61686 - protein, 523 aa, Klebsiella pneumoniae
MRQVITYLRFSSKPQERGDSIRRQKGLFERWLKDNPDAKVVDEFSDEGASAYHGHHLKGDFGRMLQNIQDGKYLSGQTVLLVESETRLNRQKARNTENLVDLITGKGVDVICLESGKIYTSTNIDDLDTSIQLKIAAHIAHQQSKEKSIKVSAAWEHRAQLALVGKQQLTKNVPGWIDPDTRKLNEHSSTVVTIFDLLLSGESLHNIARYLQANNIKSFSRREKANGFSVHSVRTILRSESTVGTLAASKRNDRPAIPNYYEPAIDVATFNKAQEILSKNRVGRAPASDNPITINLFKGIIRCQCGASVHPTGVKATYQGVYRCNNVPDGRCNVPTIKRKPFDKWMLDNIVGFLERDDGNNTDKRKAEIEYQISLVTSKLKKATTLLLELDDVTELKEQVKELNIQRSNLQSELDELTQRETLSDKPLHHLSEIDLTTKAGRVEAQLILSKFVQSIELQREMIIITLRNGTVIGKSRDLSPVLSQDLMKQVVSSPSPTDIDMFSVITSDEEFRKSGKQVTKRS

SEQ ID NO: 61687 - DNA, 50 bp, Klebsiella pneumoniae; identical to SEQ ID NO: 38382
  source 1..50: mol_type = genomic DNA

SEQ ID NO: 61688 - DNA, 40 bp, Klebsiella pneumoniae; identical to SEQ ID NO: 54543
  source 1..40: mol_type = genomic DNA

SEQ ID NO: 61689 - DNA, 50 bp, Klebsiella pneumoniae; identical to SEQ ID NO: 61544
  source 1..50: mol_type = genomic DNA

SEQ ID NO: 61690 - DNA, 40 bp, Klebsiella pneumoniae; identical to SEQ ID NO: 61545
  source 1..40: mol_type = genomic DNA

SEQ ID NO: 61691 - protein, 523 aa, Klebsiella pneumoniae
MRQVITYLRFSSKPQERGDSIRRQKGLFERWLKDNPDAKVVDEFSDEGASAYHGHHLKGDFGRMLQKIQDGKYLSGQTVLLVESETRLNRQKARNTENLVDLITGKGVDVICLESGKIYTSTNIDDLDTSIQLKIAAHIAHQQSKEKSIKVSAAWEHRAQLALEGKQQLTKNVPGWIDPDTRKLNEHSSTVVTIFDLLLSGESLHNIARYLQANNIKSFSRRKKANGFSVHSVRTILRSESTVGTLAASKRNDRPAIPNYYEPAIDVATFNKAQEILSKNRVGRAPASDNPITINLFKGIIRCQCGASVHPTGVKATYQGVYRCNNVPDGRCNVPTIKRKPFDKWMLDNIVGFLERDDGNNTDKRKAEIEYQISLVTSKLKKATTLLLELDDVTELKEQVKELNIQRSNLQSELDELNQRETLSDKPLHHLSEIDLTTKAGRVEAQLILSKFVQSIELQREMIIITLRNGTVIGKSRDLSPVLSRDLMKQVVSSPSPTDIDMFSVITSDEEFRKSGKQVTKRS

SEQ ID NO: 61692 - DNA, 50 bp, Klebsiella pneumoniae; identical to SEQ ID NO: 38382
  source 1..50: mol_type = genomic DNA

SEQ ID NO: 61693 - DNA, 40 bp, Klebsiella pneumoniae; identical to SEQ ID NO: 54543
  source 1..40: mol_type = genomic DNA

SEQ ID NO: 61694 - DNA, 50 bp, Klebsiella pneumoniae; identical to SEQ ID NO: 61544
  source 1..50: mol_type = genomic DNA

SEQ ID NO: 61695 - DNA, 40 bp, Klebsiella pneumoniae; identical to SEQ ID NO: 61545
  source 1..40: mol_type = genomic DNA

SEQ ID NO: 61696 - protein, 523 aa, Klebsiella oxytoca
MRQVITYLRFSSKPQERGDSIRRQKGLFERWLKDNPDAKVVDEFSDEGASAYHGHHLKGDFGRMLQNIQDGKYLSGQTVLLVESETRLNRQKARNTENLVDLITGKGVDVICLESGKIYTSTNIDDLDTSIQLKIAAHIAHQQSKEKSIKVSAAWEHRAQLALEGKQQLTKNVPGWIDPDTRKLNEHSSTVVTIFDLLLSGESLHNIARYLQAHNIKSFSRREKANGFSVHSVRTILRSESTVGTLAASKRNDRPAIHNYYEPAIDIATFNKAQEILSKNRVGRAPASDNPITINLFKGIIRCQCGASVHPTGVKATYQGVYRCNNVPDGRCNVPTIKRKPFDKWMLDNIVGFLERSDGNNTDKRKAEIEYQISLVTSKLKKAATLLLELDDVTELKEQVKELNIQRSNMQSELDGLNQRETLSDKPLHHLSEIDLTTKAGRVEAQLILSKFVQSIELQREMIIITLRNGTVIGKSRDLSPVLSQDLMKQVVSSPSPKDIDMFSVITSDEEFRKSGKQVTKRS

SEQ ID NO: 61697 - DNA, 50 bp, Klebsiella oxytoca; identical to SEQ ID NO: 38382
  source 1..50: mol_type = genomic DNA

SEQ ID NO: 61698 - DNA, 40 bp, Klebsiella oxytoca; identical to SEQ ID NO: 54543
  source 1..40: mol_type = genomic DNA

SEQ ID NO: 61699 - DNA, 50 bp, Klebsiella oxytoca; identical to SEQ ID NO: 61544
  source 1..50: mol_type = genomic DNA

SEQ ID NO: 61700 - DNA, 40 bp, Klebsiella oxytoca; identical to SEQ ID NO: 61545
  source 1..40: mol_type = genomic DNA

SEQ ID NO: 61701 - protein, 523 aa, Klebsiella variicola
MRQVITYLRFSSKPQERGDSIRRQKGLFERWLKDNPDAKVVDEFSDEGASAYHGHHLKGDFGRMLQNIQDGKYLSGQTVLLVESETRLNRQKARNTESLVDLITGKGVDVICLESGKIYTSTNIDDLDTSIQLKIAAHIAHQQSKEKSIKVSAAWEHRAQLALEGKQQLTKNVPGWIDPDTRKLNEHSSTVVTIFDLLLSGESLHNIARYLQANNIKSFSRREKANGFSVHSVRTILRSESTVGTLAASKRNDRPAIPNYYEPAIDIATFNKAQEILSKNRVGRAPASDNPITINLFKGIIRCQCGASVHPTGVKATYQGVYRCNNVPDGRCNVPTIKRKPFDKWMLDNIVGFLERDDGNNTDKRKAEIEYQISLVTSKLKKATTLLLELDDVTELKEQVKELNIQRSNLQSELDELNQRETLSDKPLHHLSEIDLTTKAGRVEAQLILSKFVQSIELQREMIIITLRNGTVIGKSRDLSPVLSQDLMKQVVSSPSPTDIDMFSVITSDEEFRKSGKQVTKRS

SEQ ID NO: 61702 - DNA, 50 bp, Klebsiella variicola; identical to SEQ ID NO: 61042
  source 1..50: mol_type = genomic DNA

SEQ ID NO: 61703 - DNA, 40 bp, Klebsiella variicola; identical to SEQ ID NO: 54543
  source 1..40: mol_type = genomic DNA

SEQ ID NO: 61704 - DNA, 50 bp, Klebsiella variicola; identical to SEQ ID NO: 61604
  source 1..50: mol_type = genomic DNA

SEQ ID NO: 61705 - DNA, 40 bp, Klebsiella variicola; identical to SEQ ID NO: 61545
  source 1..40: mol_type = genomic DNA

SEQ ID NO: 61706 - protein, 523 aa, Klebsiella variicola
MRQVITYLRFSSKPQERGDSIRRQKGLFERWLKDNPDAKVVDEFSDEGASAYHGHHLKGDFGRMLQNIQDGKYLSGQTVLLVESETRLNRQKARNTENLVDLITGKGVDVICLESGKIYTSTNIDDLDTSIQLKIAAHIAHQQSKEKSIKVSAAWEHRAQLALEGKQQLTKNVPGWIDPDTRKLNEHSSTVVTIFDLLLSGESLHNIARYLQANNIKSFSRREKANGFSVHSVRTILRSESTVGTLAASKRNDRPAIPNYYEPAIDVATFNKAQEILSKNRVGRAPASDNPITINLFKGIIRCQCGASVHPTGVKATYQGVYRCNNVPDGRCNVPTIKRKPFDKWMLDNIIGFLERSDGNNTDKRKAEIEYQISLVTSKLKKAATLLLELDDVTELKEQVKELNIQRINLQSELDELNQRETLSDKPLHHLSEIDLTTKAGRVEAQLILSKFVQSIELQREMIIITLRNGAVIGISRDLSPALSQDLMKQVVSSSSPRDIDMFSVITSDEEFRKSGKPVTKRS

SEQ ID NO: 61707 - DNA, 50 bp, Klebsiella variicola; identical to SEQ ID NO: 38382
  source 1..50: mol_type = genomic DNA

SEQ ID NO: 61708 - DNA, 40 bp, Klebsiella variicola; identical to SEQ ID NO: 54543
  source 1..40: mol_type = genomic DNA

SEQ ID NO: 61709 - DNA, 50 bp, Klebsiella variicola; identical to SEQ ID NO: 61544
  source 1..50: mol_type = genomic DNA

SEQ ID NO: 61710 - DNA, 40 bp, Klebsiella variicola; identical to SEQ ID NO: 61545
  source 1..40: mol_type = genomic DNA

SEQ ID NO: 61711 - protein, 523 aa, Klebsiella variicola
MRQVITYLRFSSKPQERGDSIRRQKGLFERWLKDNPDAKVVDEFSDEGASAYHGHHLKGDFGRMLQNIQDGKYLSGQTVLLVESETRLNRQKARNTESLVDLITGKGVDVICLESGKIYTSTNIDDLDTSIQLKIAAHIAHQQSKEKSIKVSAAWEHRAQLALEGKQQLTKNVPGWIDPDTRKLNEHSSTVVTIFDLLLSGESLHNIARYLQANNIKSFSRREKANGFSVHSVRTILRSESTVGTLAASKRNDRPAIPNYYEPAIDIATFNKAQEILSKNRVGRAPASDNPITINLFKGIIRCQCGASVHPTGVKATYQGVYRCNNVPDGRCNVPNIKRKPFDKWMLDNIVGFLERSDGNNTDKRKAEIEYQISLVTSKLKKAATLLLELDDVTELKEQVKELNIQRSNMQSELDELNQRETLSDKPLHHLSEIDLTTKAGRVEAQLILSKFVQSIELQREMIIITLRNGTVIGKSRDLSPVLSQDLMKQVVSSPSPKDIDMFSVITSDEEFRKSGKQVTKRS

SEQ ID NO: 61712 - DNA, 50 bp, Klebsiella variicola; identical to SEQ ID NO: 38382
  source 1..50: mol_type = genomic DNA

SEQ ID NO: 61713 - DNA, 40 bp, Klebsiella variicola
  source 1..40: mol_type = genomic DNA
gctgcgaggtaaatcaagggtcattgcgctcatagtcgtt

SEQ ID NO: 61714 - DNA, 50 bp, Klebsiella variicola; identical to SEQ ID NO: 61544
  source 1..50: mol_type = genomic DNA

SEQ ID NO: 61715 - DNA, 40 bp, Klebsiella variicola; identical to SEQ ID NO: 61545
  source 1..40: mol_type = genomic DNA

SEQ ID NO: 61716 - protein, 523 aa, Klebsiella pneumoniae
MRQVITYLRFSSKPQERGDSIRRQQGLFERWLKDNPDAKVVDEFSDEGASAYHGHHLKGDFGRMLQKIQDGKYLSGQTVLLVESETRLNRQKARNTENLVDLITGKGVDVICLESGKIYTSTNIDDLDTSIQLKIAAHIAHQQSKEKSIKVSAAWEHRAKLALEGKQQLTKNVPGWIDPDTRKLNEHSSTIVTIFDLLLSGESLHNIARYLQAHNIKSFSRREKANGFSVHSVRTILRSESTVGTLAASKRNDRPAIPNYYEPAIDIATFNKAQEILSKNRVGRAPASDNPITINLFKGIIRCQCGASVHPTGVKATYQGVYRCNNVPDGRCNVPTIKRKPFDKWMLDNIVGFLERSDGNNTDKRKAEIEYQISLVTSKLKKATPLLLELDDVTELKEQVKELNIQRSNMQSELDELNQRETLSDKPLHHLSEIDLTTKAGRVEAQLILSKFVQSIELQREMIIITLRNGTVIGKSRDLSPVLSQDLMKQVVSSPSPKDIDMFSVITSDEEFRKSGKQVTKRS

SEQ ID NO: 61717 - DNA, 50 bp, Klebsiella pneumoniae; identical to SEQ ID NO: 61042
  source 1..50: mol_type = genomic DNA

SEQ ID NO: 61718 - DNA, 40 bp, Klebsiella pneumoniae; identical to SEQ ID NO: 54543
  source 1..40: mol_type = genomic DNA

SEQ ID NO: 61719 - DNA, 50 bp, Klebsiella pneumoniae; identical to SEQ ID NO: 61604
  source 1..50: mol_type = genomic DNA

SEQ ID NO: 61720 - DNA, 40 bp, Klebsiella pneumoniae; identical to SEQ ID NO: 61545
  source 1..40: mol_type = genomic DNA

SEQ ID NO: 61721 - protein, 523 aa, Klebsiella pneumoniae; identical to SEQ ID NO: 52041

SEQ ID NO: 61722 - DNA, 50 bp, Klebsiella pneumoniae; identical to SEQ ID NO: 38382
  source 1..50: mol_type = genomic DNA

SEQ ID NO: 61723 - DNA, 40 bp, Klebsiella pneumoniae; identical to SEQ ID NO: 54543
  source 1..40: mol_type = genomic DNA

SEQ ID NO: 61724 - DNA, 50 bp, Klebsiella pneumoniae; identical to SEQ ID NO: 61544
  source 1..50: mol_type = genomic DNA

SEQ ID NO: 61725 - DNA, 40 bp, Klebsiella pneumoniae; identical to SEQ ID NO: 61545
  source 1..40: mol_type = genomic DNA

SEQ ID NO: 61726 - protein, 523 aa, Klebsiella pneumoniae
MRQVITYLRFSSKPQERGDSIRRQKGLFERWLKDNPDAKVVDEFSDEGASAYHGHHLKGDFGRMLQNIQDGKYLSGQTVLLVESETRLNRQKARNTENLVDLITGKGVDVICLESGKIYTSTNIDDLDTSIQLKIAAHIAHQQSKEKSIKVSAAWEHRAQLALEGKQQLTKNVPGWIDPDTRKLNERSSTVVTIFDLLLSGESLHNIARYLQANNIKSFSRREKANGFSVHSVRTILRSESTVGTLAASKRNDRPAIPNYYEPAIDVATFNKAQEILSKNRVGRAPASDNPITINLFKGIIRCQCGASVHPTGVKATYQGVYRCNNVPDGRCNVPTIKRKPFDKWMLDNIIGFLERSDGNNTDKRKAEIEYQISLVTSKLKKAATLLLELDDVTELKEQVKELNIQRINMQSELDDLNQRETLSDKPLHHLSEIDLTTKAGRVEAQLILSKFVQSIELQREMIIITLRNGAVIGKSRDLSPALSQDLMKQVVSSSSPRDIDMFSVITSDEEFRKSGKPVTKRS

SEQ ID NO: 61727 - DNA, 50 bp, Klebsiella pneumoniae; identical to SEQ ID NO: 38382
  source 1..50: mol_type = genomic DNA

SEQ ID NO: 61728 - DNA, 40 bp, Klebsiella pneumoniae; identical to SEQ ID NO: 54543
  source 1..40: mol_type = genomic DNA

SEQ ID NO: 61729 - DNA, 50 bp, Klebsiella pneumoniae; identical to SEQ ID NO: 61544
  source 1..50: mol_type = genomic DNA

SEQ ID NO: 61730 - DNA, 40 bp, Klebsiella pneumoniae; identical to SEQ ID NO: 61545
  source 1..40: mol_type = genomic DNA

SEQ ID NO: 61731 - protein, 517 aa, Klebsiella pneumoniae
MRQVITYLRFSSKPQERGDSIRRQKGLFERWLKDNPDAKVVDEFSDEGASAYHGHHLKGDFGRMLQNIQDGKYLSGQTVLLVESETRLNRQKARNTENLVDLITGKGVDVICLESGKIYTSTNIDDLDTSIQLKIAAHIAHQQSKEKSIKVSSAWEHRAQLALEGKQQLTKNVPGWIDPDTRKLNEHSSTVVTIFDLLLSGESLHNIARYLQANNIKSFSRREKANGFSVHSVRTILRSESTVGTLAASKRNDRPAIPNYYEPAIDVATFNKAQEILSKNRVGRAPASDNPITINLFKGIIRCQCGASVHPTGVKATYQGVYRCNNVPDGRCNVPTIKRKPFDKWMLDNIVGFLERDDGNNTDKRKAEIEYQISLVTSKLKKATTLLLELDDVTELKEQVKELNIQRSNLQSELDELNQRETLSDKPLHHLSEIDLTTKAGRVEAQLILSKFVQSIELQREMIIITLRNGTVIGKSRDLSPVLSRDLMKQVVSSPSPTDIDMFSVITSDEEFRKSGK

SEQ ID NO: 61732 - DNA, 50 bp, Klebsiella pneumoniae; identical to SEQ ID NO: 38382
  source 1..50: mol_type = genomic DNA

SEQ ID NO: 61733 - DNA, 40 bp, Klebsiella pneumoniae; identical to SEQ ID NO: 54543
  source 1..40: mol_type = genomic DNA

SEQ ID NO: 61734 - DNA, 50 bp, Klebsiella pneumoniae; identical to SEQ ID NO: 61544
  source 1..50: mol_type = genomic DNA

SEQ ID NO: 61735 - DNA, 40 bp, Klebsiella pneumoniae; identical to SEQ ID NO: 61545
  source 1..40: mol_type = genomic DNA

SEQ ID NO: 61736 - protein, 523 aa, Klebsiella pneumoniae
MRQVITYLRFSSKPQERGDSIRRQKGLFERWLKDNPDAKVVDEFSDEGASAYHGHHLKGDFGRMLQKIQDGKYLSGQTVLLVESETRLNRQKARNTENLVDLITGKGVDVICLESGKIYTSTNIDDLDTSIQLKIAAHIAHQQSKEKSIKVSAAWEHRAQLALEGKQQLTKNVPGWIDPDTRKLNEHSSTVVTIFDLLLSGESLHNIARYLQANNIKSFSRREKANGFSVHSVRTILRSESTVGTLAASKRNDRPAIPNYYEPAIDIATFNKAQEILSKNRVGRAPASDNPITINLFKGIIRCQCGASVHPTGVKATYQGVYRCNNVPDGRCNVATIKRKPFDKWMLDNIVGFLERSDGNNTDKRKAEIEYQISLVTSKLKKATTLLLELDDVTELKEQVKELNIQRSNMQSELDELNQRETLSDKPLHHLSEIDLTTKAGRVEAQLILSKFVQSIELQREMIIITLRNGTVIGKSRDLSPVLSQDLMKQVVSSPSPTDIDMFSVITSDEEFRKSGKQVTKRS

SEQ ID NO: 61737 - DNA, 50 bp, Klebsiella pneumoniae; identical to SEQ ID NO: 38382
  source 1..50: mol_type = genomic DNA

SEQ ID NO: 61738 - DNA, 40 bp, Klebsiella pneumoniae; identical to SEQ ID NO: 54543
  source 1..40: mol_type = genomic DNA

SEQ ID NO: 61739 - DNA, 50 bp, Klebsiella pneumoniae; identical to SEQ ID NO: 61544
  source 1..50: mol_type = genomic DNA

SEQ ID NO: 61740 - DNA, 40 bp, Klebsiella pneumoniae; identical to SEQ ID NO: 61545
  source 1..40: mol_type = genomic DNA

SEQ ID NO: 61741 - protein, 523 aa, Klebsiella pneumoniae
MRQVITYLRFSSKPQERGDSIRRQKGLFERWLKDNPDAKVVDEFSDEGASAYHGHHLKGDFGRMLQKIQDGKYLSGQTVLLVESETRLNRQKARNTENLVDLITGKGVDVICLESGKIYTSTNIDDLDTSIQLKIAAHIAHQQSKEKSIKVSAAWEHRAQLALEGKQQLTKNVPGWIDPDTRKLNEHSSTVVTIFDLLLSGESLHNIARYLQANNIKSFSRREKANGFSVHSVRTILRSESTVGTLAASKRNDRPAIPNYYEPAIDVATFNKAQEILSKNRVGRAPASDNPITINLFKGIIRCQCGASVHPTGVKATYQGVYRCNNVPDGRCNVPTIKRKPFDKWMLDNIIGFLERSDGNHTDKRKAEIEYQISLVTSKLKKATPLLLELDDVTELKEQVKELNIQRSNMQSELDELNQRETLSDKPLHHLSEIDLTTKAGRVEAQLILSKFVQSIELQREMIIITLRNGTVIGKSRDLSPVLSRDLMKQVVSSPSPTDIDMFSVITSDEEFRKSGKQVTKRS

SEQ ID NO: 61742 - DNA, 50 bp, Klebsiella pneumoniae; identical to SEQ ID NO: 38382
  source 1..50: mol_type = genomic DNA

SEQ ID NO: 61743 - DNA, 40 bp, Klebsiella pneumoniae; identical to SEQ ID NO: 54543
  source 1..40: mol_type = genomic DNA

SEQ ID NO: 61744 - DNA, 50 bp, Klebsiella pneumoniae; identical to SEQ ID NO: 61544
  source 1..50: mol_type = genomic DNA

SEQ ID NO: 61745 - DNA, 40 bp, Klebsiella pneumoniae; identical to SEQ ID NO: 61545
  source 1..40: mol_type = genomic DNA

SEQ ID NO: 61746 - protein, 517 aa, Klebsiella pneumoniae
MRQVITYLRFSSKPQERGDSIRRQKGLFERWLKDNPDAKVVDEFSDEGASAYHGHHLKGDFGRMLQNIQDGKYLSGQTVLLVESETRLNRQKARNTENLVDLITGKGVDVICLESGKIYTSTNIDDLDTSIQLKIAAHIAHQQSKEKSIKVSAAWEHRAQLALEGKQQLTKNVPGWIDPDTRKLNEHSSTVVTIFDLLLSGESLHSIARYLQANNIKSFSRREKANGFSVHSVRTILRSESTVGTLAASKRNDRPAIPNYYEPAIDVATFNKAQEILSKNRVGRAPASDNPITINLFKGIIRCQCGASVHPTGVKATYQGVYRCNNVPDGRCNVPTIKRKPFDKWMLDNIVGFLERDDGNNTDKRKAEIEYQISLVTSKLKKATTLLLELDDVTELKEQVKELNIQRSNLQSELDELNQRETLSDKPLHHLSEIDLTTKAGRVEAQLILSKFVQSIELQREMIIITLRNGTVIGKSRDLSPVLSRDLMKQVVSSPSPTDIDMFSVITSDEEFRKSGK

SEQ ID NO: 61747 - DNA, 50 bp, Klebsiella pneumoniae; identical to SEQ ID NO: 38382
  source 1..50: mol_type = genomic DNA

SEQ ID NO: 61748 - DNA, 40 bp, Klebsiella pneumoniae; identical to SEQ ID NO: 54543
  source 1..40: mol_type = genomic DNA

SEQ ID NO: 61749 - DNA, 50 bp, Klebsiella pneumoniae; identical to SEQ ID NO: 61544
  source 1..50: mol_type = genomic DNA

SEQ ID NO: 61750 - DNA, 40 bp, Klebsiella pneumoniae; identical to SEQ ID NO: 61545
  source 1..40: mol_type = genomic DNA

SEQ ID NO: 61751 - protein, 525 aa, Klebsiella pneumoniae
MRQVITYLRFSSKPQERGDSIRRQKGLFERWLKDNPDAKVVDEFSDEGASAYHGHHLKGDFGRMLQNIQDGKYLSGQTVLLVESETRLNRQKARNTENLVDLITGKGVDVICLESGKIYTSTNIDDLDTSIQLKIAAHIAHQQSKEKSIKVSAAWEHRAQLALEGKQQLTKNVPSWIDPDTRKLNEHSSTVVTIFDLLLSGESLHNIARYLQANNIKSFSRREKANGFSVHSVRTILRSESTVGTLAASKRNDRPAIPNYYEPAIDVATFNKAQEILSKNRVGRAPASDNPITINLFKGIIRCQCGASVHPTGVKATYQGVYRCNNVPDGRCNVPTIKRKPFDKWMLDNITGFLERSDGNNTDKRKAEIEYQISLVTSKLKKATPLLLELDDVTELKEQVKELNIQRSNMQSELDELNQRETLSDKPLHHLSEIDLTTKAGRVEAQLILSKFVQSIELQREMIIITLRNGTVIGKSRDLSPVLSQDLMKQVVSSSSPRDIDMFSVITSDEEFRKSGKALIKRTSY

SEQ ID NO: 61752 - DNA, 50 bp, Klebsiella pneumoniae; identical to SEQ ID NO: 38382
  source 1..50: mol_type = genomic DNA

SEQ ID NO: 61753 - DNA, 40 bp, Klebsiella pneumoniae; identical to SEQ ID NO: 54543
  source 1..40: mol_type = genomic DNA

SEQ ID NO: 61754 - DNA, 50 bp, Klebsiella pneumoniae; identical to SEQ ID NO: 61544
  source 1..50: mol_type = genomic DNA

SEQ ID NO: 61755 - DNA, 40 bp, Klebsiella pneumoniae; identical to SEQ ID NO: 61545
  source 1..40: mol_type = genomic DNA

SEQ ID NO: 61756 - protein, 526 aa, Klebsiella aerogenes
MRQVITYLRFSSKPQERGDSIRRQKGLFERWLKDNPDAKVVDEFSDEGASAYHGHHLKGDFGRMLQNIQDGRYLSGQTVLLVESETRLNRQKARNTESLVDLITGKGVDVICLESGKIYTSTNIDDLDTSIQLKIAAHIAHQQSKEKSIKVSAAWEHRAQLALEGKQQLTKNVPGWIDPDTRKLNEHSSTVVTIFDLLLSGESLHNIARYLQANNIKSFSRREKANGFSVHSVRTILRSESTVGTLAASKRNDRPAIPNYYEPAIDIATFNKAQEILSKNRVGRAPASDNPITINLFKGIIRCQCGASVHPTGVKATYQGVYRCNNVPDGRCNVPTIKRKPFDKWMLDNIVGFLERSDGNNTDKRKAEIEYQISLVTSKLKKAATLLLELDDVTELKEQVKELNIQRSNMQSELDELNQRETLSDKPLHHLSEIDLTTKAGRVEAQLILSKFVQSIELQREMIIITLRNGTVIGKSRDLSPVLSQDLMKQVVSSSSPRDIDMFSVITSDEEFRKSGKALIKRTSYR

SEQ ID NO: 61757 - DNA, 50 bp, Klebsiella aerogenes; identical to SEQ ID NO: 38382
  source 1..50: mol_type = genomic DNA

SEQ ID NO: 61758 - DNA, 40 bp, Klebsiella aerogenes; identical to SEQ ID NO: 54543
  source 1..40: mol_type = genomic DNA

SEQ ID NO: 61759 - DNA, 50 bp, Klebsiella aerogenes; identical to SEQ ID NO: 61544
  source 1..50: mol_type = genomic DNA

SEQ ID NO: 61760 - DNA, 40 bp, Klebsiella aerogenes; identical to SEQ ID NO: 61545
  source 1..40: mol_type = genomic DNA

SEQ ID NO: 61761 - protein, 417 aa, Ruminococcus torques; identical to SEQ ID NO: 43191

SEQ ID NO: 61762 - DNA, 50 bp, Ruminococcus torques; identical to SEQ ID NO: 41527
  source 1..50: mol_type = genomic DNA

SEQ ID NO: 61763 - DNA, 40 bp, Ruminococcus torques
  source 1..40: mol_type = genomic DNA
ggttcgattcccgccaggtccataaggggtattagcgcag

SEQ ID NO: 61764 - DNA, 50 bp, Ruminococcus torques
  source 1..50: mol_type = genomic DNA
agttcggatattgagcgcacagctgaaccaaatagtgcaaatccgaactc

SEQ ID NO: 61765 - DNA, 40 bp, Ruminococcus torques
  source 1..40: mol_type = genomic DNA
ggttacataactgccaggtgactaaggggttttaggctgg

SEQ ID NO: 61766 - protein, 489 aa, Mycobacteroides abscessus
MPETLRALVGARVSVLRGEQKVSHIAQKETGTKWVLDRGHEIVGTFEDLDVSASVSPFNRPDLGPWLTPEREHEWDVLVFSKIDRMFRSTRDCVRFAEWAEDHKKILVFAEDGMTLNYRDKDSSNSLESMMSELFIYIGSFFAQLELNRFKTRTMDSHRVLRGMDRWAGGTAPLGYRVVDHPSGKGNALDTDPESKAVLHDIASKLLDGWSIIRITQWLNDNHVLSNRDKARMAKGKDAKERPWAVSTVTRALTSLKTQGYKMHRQKPLLDGNGEMIRMAPPTFDDDTWRRIQETVALRQATKSRTNSSNPMLGIGYCDECGASLAQKILRKNGKEYRYYRCGRSPMQCSGVNYKADDADKLLEESFLARYGHRNVTRRVFVPGEDNSHELEQVRATIERLRRESDAGLVVTPEDEEIYLQRMRSLIDRRTALESTPVRSAGWVTETLNTTYADAWGDQDHHKLLTERGVKFYLSPGHPRMYVPQLEGE

SEQ ID NO: 61767 - DNA, 50 bp, Mycobacteroides abscessus
  source 1..50: mol_type = genomic DNA
ggtagtcaaagagtggtaatctgtgtacggattgctgtacactgacaacg

SEQ ID NO: 61768 - DNA, 40 bp, Mycobacteroides abscessus; identical to SEQ ID NO: 58058
  source 1..40: mol_type = genomic DNA

SEQ ID NO: 61769 - DNA, 50 bp, Mycobacteroides abscessus
  source 1..50: mol_type = genomic DNA
ggtagtcaaagagtggtaatctgtgcacggattgctgtacactgacaacg

SEQ ID NO: 61770 - DNA, 40 bp, Mycobacteroides abscessus
  source 1..40: mol_type = genomic DNA
ctgtcctatggccttaggtgcacacatctgggtgcccagc

SEQ ID NO: 61771 - protein, 515 aa, Bacillus tropicus
MKTAIYLRKSRADLEAEARGEGETLAKHRSTLLKIAKEMNLNVLSVREEIVSGESLVKRPEMLALLEEIEDNKYDVVLCMDMDRLGRGGMKEQGIILETFKRSNTKIMTPRKTYDLNDEWDEEYSEFEAFMARKELKIITRRMQRGRVASVEAGNYLGTHAPFGYDIHRLNKRERTLTINPEEASIVRMIFDWYANEDMGANAIRSKLNDLGYKSKLGNEWNPYSILDILKNNVYIGKVTWQKRKEVKRPDAVKRSCARQDKSDWIIADGKHEPIIPESLFEQVQEKLNSRYHIPYNTNGIKNPLAGIIKCAKCGYSMVQRYPKNRKETMDCKHRGCENKSSYTELIEKRLLEALKEWYINYKADFEKHKQDDKLKETQVIQMNEAALRKLEKELVDVQKQKNNLHDLLERGVYTVDMFLERSNVVSDRITEITSTMENLKKEIKTEIKKEKVKKDTIPQVEHVLDLYFKTDDPKKKNSLLKSVLEKAVYKKEKWQRLDDFELVLYPKLPQDGDI

SEQ ID NO: 61772 - DNA, 50 bp, Bacillus tropicus; identical to SEQ ID NO: 1612
  source 1..50: mol_type = genomic DNA

SEQ ID NO: 61773 - DNA, 40 bp, Bacillus tropicus
  source 1..40: mol_type = genomic DNA
tgtggccattaggcgcatgaggtttactccattaagccct

SEQ ID NO: 61774 - DNA, 50 bp, Bacillus tropicus
  source 1..50: mol_type = genomic DNA
tgtcgtcaccttgttggtgtaattgagttgacgccaacagggtgataaca

SEQ ID NO: 61775 - DNA, 40 bp, Bacillus tropicus
  source 1..40: mol_type = genomic DNA
tttagccatcagctgcatggagtttaatcccaaagtccct

SEQ ID NO: 61776 - protein, 543 aa, Cohnella xylanilytica
MVVANRKLNGAEMVMPYHKPRAALYVRVSTEEQRKEGFSLGAQEEILRAYCESRGFEVYDLYSDGGYSGKNFDRPAMQQLLRDVDQDKFDIVLTVAVDRISRNNKEALTFIDDELHSRGKKLIVSTCDIDSSTDTGKMFISLLGTFAEYERRLIISRVKKGMEKRASEGKFNGGLMLGYNVINGALVVNEDEAETVREIFELRALGKGYKSIVNILNRKGKKTKGTTHKPSGSFSTCAVKTILDNEKYTGSLDWGKKRDWSIKRRKGVSEPIKVKGEHDAIIDPELWNKVQAVNQLQKKASLSQSNFKGEFILSGLLRCPVCNAGTVMSKSKKRDGSGYHLYYMCQNFHAKGKSVCSSNLVNKELVEGQVLQFIRTVLADESIVEGIMERLRSEETKSTAQLERDLHIQQTSLKKLLEKQRKQDDDYYANVISATVYNRLSEAVEAEIIQQQQIVANIEREIDKVQSTVILNKEIIVEALKNFDELFDAATNEEKRSLLRALIKEIHMESNRKSIKNIVFWFTEDDGLAQTALPEQGTRRTVP

SEQ ID NO: 61777 - DNA, 50 bp, Cohnella xylanilytica
  source 1..50: mol_type = genomic DNA
ctttaccagagcaagggacgcggagaaccgtaccacaaatagtggtaaag

SEQ ID NO: 61778 - DNA, 40 bp, Cohnella xylanilytica
  source 1..40: mol_type = genomic DNA
tccttcagagtggtacggagaaccgtaccataagtaacgg

SEQ ID NO: 61779 - DNA, 50 bp, Cohnella xylanilytica
  source 1..50: mol_type = genomic DNA
ctttaccagagcaagggacgcggaagaccgtaccacaaatagtggtaaag

SEQ ID NO: 61780 - DNA, 40 bp, Cohnella xylanilytica
  source 1..40: mol_type = genomic DNA
gccttgatagtgttatggaaggccattccataaggaagtg

SEQ ID NO: 61781 - protein, 589 aa, Sphingomonas taxi
MTLPATIYARFSNQEQAQGNSKTRQLTLCRDMVARHGWEGSTDRELIDEGLSAYSGANRASGALLYRFEQQAEAGRYRNGHVLVVENLDRISRQGYDAILPFLQKLTASGVTVATVDGDRVYPAYERVTMTSVIEAVVKSELSREESEKKSRRLKAAQNKRVSEAQANAGRHISNTATVPAWIDTKRISKTSERPAYAMSLNEGRVAVLREIFQLTIDGYGTPAIAKMLNGRGEPVWSHLNQRSNNGWTVGYLTKIVVNRAVMGEYHPMNRPRSGPATSKDITVLNHFPQAIDPVTFAKAQAARQGRKGTSGAWQITHNNLFSGIAKCKSCGGRMKQEVVVRKGGNRRNGKNPDAVYQSKQDISYLKCHNALNRVWDEENDRVRCENRNWVRYEKLEKAVVEFAAGWLALNRQSAPTAAIAEVEVQIAEARRFLEDKQKQADNAAVSFTRTSSATMERLMLQLEVEVVDQQREIDALEKRLMAARTTGPSPDLLNEIEHQKRALDSEDDEERNRARVAMKQTLRGIITSMECCTSRDTMIVLGDRAMGLVFNQEGELVQSVVLQETIYGPHGEVDWHPDFPDADYTMAA

SEQ ID NO: 61782 - DNA, 50 bp, Sphingomonas taxi
  source 1..50: mol_type = genomic DNA
gggtttgactcctataacgcacgggtcatactgttataggagttggaagc

SEQ ID NO: 61783 - DNA, 40 bp, Sphingomonas taxi
  source 1..40: mol_type = genomic DNA
cgtcggcacctggcttccggtcagcaaggtatagccgatc

SEQ ID NO: 61784 - DNA, 50 bp, Sphingomonas taxi
  source 1..50: mol_type = genomic DNA
gggtttgactcctataacgcacggctcatactgttataggagttggaagc

SEQ ID NO: 61785 - DNA, 40 bp, Sphingomonas taxi
  source 1..40: mol_type = genomic DNA
agtctgcacatagcatattctcagtaaagtatagcctatc

SEQ ID NO: 61786 - protein, 557 aa, Cytobacillus oceanisediminis
MEIQKVAIYARVSTEEQASEGYSISAQLQTLRQYANLYNWEIVDEYVDEGISGKNITGRPAMQRLVADVEQEKFQAVLVWKISRLSRNMLDTLTLLDKFEDYGVKFISYSENFDTSSPIGRLVVQLMASIAEMERNTLSENVKLGMKQRALEGSWNGGVIFGYDSIEKELVINKEEAEVVKQIFTLYSQGKGLKAIANQLNKNGYRTKRDRHFSINGVATILDNPVYNGKISWLKVENWDKKRRRGRNDNPILVEGQHEAIINDELWSLVQSRRKSKSFKQRQSNEPFLLSSILRCPDCGQGMVPSITTYTLSDGTKRKHRYYVCSDFHNKGSAACKANSVKAYDAENALFQRIESFLSNKQRFDETINSLTKTSIDTIKILKKELEETDSKLEETLALQNRYLEAFEQNLFPVTILQERLQQVAIEKSAIEQKRNNLITEISKSDTKVIPPELVHLLLGKFVEVYKSSTRDKQKQLLQLLVKQITVGRTNDQLRQIDKVELEFDFTEVNLSNTFTLIHMLYLETEKEGLSTPSISESNGKYPPYLQLFLPLFVVRF

SEQ ID NO: 61787 - DNA, 50 bp, Cytobacillus oceanisediminis
  source 1..50: mol_type = genomic DNA
ttttgcctctatttgtggtacggttcaccgtagttatttaagaggcaaaa

SEQ ID NO: 61788 - DNA, 40 bp, Cytobacillus oceanisediminis
  source 1..40: mol_type = genomic DNA
tgcttacttatggtacggttccccccgattaatccgaaac

SEQ ID NO: 61789 - DNA, 50 bp, Cytobacillus oceanisediminis
  source 1..50: mol_type = genomic DNA
ttttgcctctatttgtggtacggttaaccgtagttatttaagaggcaaaa

SEQ ID NO: 61790 - DNA, 40 bp, Cytobacillus oceanisediminis; identical to SEQ ID NO: 40970
  source 1..40: mol_type = genomic DNA

SEQ ID NO: 61791 - protein, 558 aa, Priestia flexa
MEIQKVAIYARVSTEEQASEGYSISAQLQTLRQYANLYNWEIVDEYVDEGISGKNITGRPAMQRLVADVEQEKFQAVLVWKISRLSRNMLDTLTLLDKFEDYGVKFISYSENFDTSSPIGRLVVQLMASIAEMERNTLSENVKLGMKQRALEGSWNGGVIFGYDSIEKELVINKEEAEVVKQIFTLYSQGKGLKAIANQLNKNGYRTKRDRHFSINGVATILDNPVYNGKISWLKVEDWDKKRRRGRNDNPILVEGQHEAIINDELWSLVQSRRKSKSFKQRQSNEPFLLSSILRCPDCGQGMVPSITTYTLSDGTKRKHRYYVCSDFHNKGSAACKANSVKAYDAENALFQRIESFLSNKQKFYETINSLTKTSIESIKILKKELEETDSKLEETLALQNRYLEAFEQNLFPVTVLQERLQQVAIEKSAIEQKRNNLITEISKSDTKVIPPELVHLLLGKFVEVYKSSTRDKQKQLLQLLVKKITVGRTNDHLRQIDKVELEFDFTEVNLSNTFTLIHMLYLETEKEGLSTPSNSESNGKYPPYLQLFLPLFVIRFT

SEQ ID NO: 61792 - DNA, 50 bp, Priestia flexa
  source 1..50: mol_type = genomic DNA
ttttgcctctatttgtgatacggttcaccgtagttatttaagaggcaaaa

SEQ ID NO: 61793 - DNA, 40 bp, Priestia flexa
  source 1..40: mol_type = genomic DNA
tctttacttgtgatacggttcaccacgattaatccgaaac

SEQ ID NO: 61794 - DNA, 50 bp, Priestia flexa
  source 1..50: mol_type = genomic DNA
ttttgcctctatttgtgatacggttaaccgtagttatttaagaggcaaaa

SEQ ID NO: 61795 - DNA, 40 bp, Priestia flexa; identical to SEQ ID NO: 40970
  source 1..40: mol_type = genomic DNA

SEQ ID NO: 61796 - protein, 545 aa, Brucella anthropi; identical to SEQ ID NO: 19531

SEQ ID NO: 61797 - DNA, 50 bp, Brucella anthropi; identical to SEQ ID NO: 19532
  source 1..50: mol_type = genomic DNA

SEQ ID NO: 61798 - DNA, 40 bp, Brucella anthropi
  source 1..40: mol_type = genomic DNA
atttttggagaaaaatggcgcacccgacaggattcgaacc

SEQ ID NO: 61799 - DNA, 50 bp, Brucella anthropi
  source 1..50: mol_type = genomic DNA
ttcatagttctgttctgaaatggcttgccccgccgggtgatgatgagaac

SEQ ID NO: 61800 - DNA, 40 bp, Brucella anthropi
  source 1..40: mol_type = genomic DNA
attattggtgaagaatgggttacagggaaggatcttaacc

SEQ ID NO: 61801 - protein, 546 aa, Brucella anthropi
MKLLNRTTLNAKNTDSLRAALYLRVSTGRQAENDLSIPDQRRQAQEFCKARGWQVVIEFVDAGLSGTDDRRPELQRLLDLAAGGDSPFDVVVVHSFSRFARDHFALEYHVRRLRKNGVKLVSITQNLGDDPMSVMVRQVFALFDEYQSKENAKHVLRAMQENARQGFWNGAAAPYGYAIVAAEQRGAKTKKRLAIDAVEAEVVRLMFRLVDEGNGTSGPLGVKALACYLNERGYRTRRGARWGIGPLHALLTSPTYKGEYRFNRKVWKTKEDKPEADQIMVAVAPIIDPSLFDAVQARLKSRNPKQTPPRVVTGPILLTGLATCASCGGGMTLRTGKSGRYRYYTCATCAQQGKSACPGRSIPMDKLDQIVTDQLNASLFTPERVRAILGGLMARQASRSEDHSQRLSALQNKVADCESRLSRLYEAIENGIADASDPTLKDRLAALKAERDQAKAAKDRAFAELQPETRITEEKISAFAALMRENVANGAIPFRRAYLRSVIDQVEVDDTEIRIHGRRDVLERLVMGGGATPAGVPSFVRKWRTR

SEQ ID NO: 61802 - DNA, 50 bp, Brucella anthropi
  source 1..50: mol_type = genomic DNA
tgcccagttttgttcgtaaatggcgcgcccgacgagatgaaactgggcac

SEQ ID NO: 61803 - DNA, 40 bp, Brucella anthropi; identical to SEQ ID NO: 61798
  source 1..40: mol_type = genomic DNA

SEQ ID NO: 61804 - DNA, 50 bp, Brucella anthropi
  source 1..50: mol_type = genomic DNA
tgcccagttttgttcgtaaatggcttgcccgacgagatgaaactgggcac

SEQ ID NO: 61805 - DNA, 40 bp, Brucella anthropi; identical to SEQ ID NO: 61800
  source 1..40: mol_type = genomic DNA

SEQ ID NO: 61806 - protein, 487 aa, Cutibacterium avidum
MTVAAAYLRVSKSDDTDDESLTLETQRRRIKALCEARGWMYGPEYIDEGVSATKGRGGNTDWARLLGDVGKGKFDVIVARDLDRLLRTLQDLVKLIDLGAKVATVDGEIDLTTADGEFRATMLAAVARFEIRRKSERAIGANETRRRKGLPVTRVKILGYDEDGVTQIDDEAEAVKKAFVDYLAGVTLAQVCRDLNAKGFTSSRGVPWGNANIRSLLTNARYKGVITKWEPDPDRRKISGPLTEETYRGTWEPIVSADVFDAVQAKLRDPSRRRNWGTEPRHLMSGLLLCGACGDGTHMYHSTFYPKARMKKSGEVTKADPVRIYKCLKGNHLSRKAQPIDDLVERIVLRRLQEPDAANMFTLGDDGLAREELRVERVALQTRYEALAGLVADGVLPADQVRQEAPRLIGRINEIDALLSPGPQSVGQVLVEADDIHATWASLDMQHKRVVIRKILTLTVLPGRRSKKVEHLPRQVDDPDIKIEMLM

SEQ ID NO: 61807 - DNA, 50 bp, Cutibacterium avidum
  source 1..50: mol_type = genomic DNA
gaacgtaacaatctgtcgaagtatcccgactacatgactttctcacgctc

SEQ ID NO: 61808 - DNA, 40 bp, Cutibacterium avidum
  source 1..40: mol_type = genomic DNA
cagcgagcggtcgaagtaccccgactcaccattgacatcg

SEQ ID NO: 61809 - DNA, 50 bp, Cutibacterium avidum
  source 1..50: mol_type = genomic DNA
gaacgtaacaatctgtcgaagtatttcgactacatgactttctcacgctc

SEQ ID NO: 61810 - DNA, 40 bp, Cutibacterium avidum
  source 1..40: mol_type = genomic DNA
cagctagagtttgaaatccttccattcatcattgacatgt

SEQ ID NO: 61811 - protein, 500 aa, Bacillus altitudinis
MKAIYVRVSTEEQAIKGSSIDSQIEACVKKAGTTNVLKYADEGFSGELLERPALNRLREDARKGLITELICYDPDRLSRKLMNQLIIDDELRKKGIVLTFVNGDYADSPEGQLFFSMRGAISEFEKAKIKERTSTGRLQKIKKGIIIKDPSLLGYRMNKEKRTLEIIEEEAKVVRMIFDLFTDHSSHFFNRVNGIALHLTKLGIPTKRGAKVWHRQVVRQILMNPSYKGKYEQYKYDTEGSYVSKQAGGPAIMKLRPEEERYITEIPSVVSDEQWEYAQELLGKSRRKQLQYGTHPYLLSGLVRCGICGNTMTGKKRKSHGEDFYVYECRKNYAGAKNRGCGKSMSENKLNRIVWDEIYKFITNPEKYRVYKEEEKATHKADELELIQKEIEKAKKGRQRLITLISLSEEDDLDIEEVKTQIVELQKKQNHLMIQHDKIEKEIKESEGSTAGENAMKRALDYLSSVNADNLKLEDKKAIINFIVEEVLIVDSETIHIRTH

SEQ ID NO: 61812 - DNA, 50 bp, Bacillus altitudinis
  source 1..50: mol_type = genomic DNA
caccccccttttgtcattaatatctcattattaatgtcaagaggggagtg

SEQ ID NO: 61813 - DNA, 40 bp, Bacillus altitudinis
  source 1..40: mol_type = genomic DNA
gcgtaaatgcatgaggatttcgttctcaatacaccgcgcc

SEQ ID NO: 61814 - DNA, 50 bp, Bacillus altitudinis
  source 1..50: mol_type = genomic DNA
caccccccttttgtcattaatatcggattattaatgtcaagaggggagtg

SEQ ID NO: 61815 - DNA, 40 bp, Bacillus altitudinis
  source 1..40: mol_type = genomic DNA
gcttaaaaacatgaggatagggttatacatcaaccccacc

SEQ ID NO: 61816 - protein, 498 aa, Frankia casuarinae
MLDHIIGAADYARISSDPGNDAKGVARQTEDSQGRIEREPSWRHVGSYIDNDLSATKGKERPEFERLMAAVRRDEVKVIVIYMTGRFVRTRRERMETYELLAKHGVRIVCTNGPDLDFSTPAGRMVAGIMGEVDAHEVEQLATRVSDSHLQAAKEGRPIGGRCYGYRPDPHALKHHKRRLIVPEEAAVIREMAPRALRGETLYSIVQDFNERGVPTLHPGRSRTGGLWSVSVLRDILTNPAIAGRSVLLGVDYGEAEWEPIISYADHLKLVGMFSGRTAPEGWTNRHVHLLSGIALCGKCLAQGREITVTCRPGAKPTPSGYQPWPKSRGYICPDKQRGGCRGLRHAADPVDAYVEETVVRLLGEPGVIDNLVAAEAPDAEEVLKVATEIEACQARAAAVGALMAKDDPTDEVTAIARRAALDQIRDDLTRHRQRQTALARSTVAEGLLDVEDIAHHWEHVMTLSQQRATISALVRITLLPIGRGKRGTTDHVVIDRR

SEQ ID NO: 61817 - DNA, 50 bp, Frankia casuarinae; identical to SEQ ID NO: 39087
  source 1..50: mol_type = genomic DNA

SEQ ID NO: 61818 - DNA, 40 bp, Frankia casuarinae
  source 1..40: mol_type = genomic DNA
gtacgccgtcaacgacgcgatttcgtcgaccaccaccacg

SEQ ID NO: 61819 - DNA, 50 bp, Frankia casuarinae
  source 1..50: mol_type = genomic DNA
ttatgacacaagcgccccgacgtcccgacgtctgccccgctgtgtcacaa

SEQ ID NO: 61820 - DNA, 40 bp, Frankia casuarinae
  source 1..40: mol_type = genomic DNA
gaacgcggccgactcggcgccgtcgttcaccacctccacg

SEQ ID NO: 61821 - protein, 542 aa, Mediterraneibacter faecis; identical to SEQ ID NO: 18396

SEQ ID NO: 61822 - DNA, 50 bp, Mediterraneibacter faecis; identical to SEQ ID NO: 18397
  source 1..50: mol_type = genomic DNA

SEQ ID NO: 61823 - DNA, 40 bp, Mediterraneibacter faecis
  source 1..40: mol_type = genomic DNA
tatcatgcttgatgcaggtcatggcggtcgtgaccccgga

SEQ ID NO: 61824 - DNA, 50 bp, Mediterraneibacter faecis
  source 1..50: mol_type = genomic DNA
aatttgcgcaattaacacccagcagtcgggggaacacagttgcgcaagta

SEQ ID NO: 61825 - DNA, 40 bp, Mediterraneibacter faecis
  source 1..40: mol_type = genomic DNA
tagcatacttgattcaggagttggcagtaaagagccccaa

SEQ ID NO: 61826 - protein, 553 aa, Burkholderia vietnamiensis
MHHEEEGGHMAETVELQEKKAVAYSYVRFSTARQELGDSLRRQVAMAEEFCAKYGLDLHPVSYRDLGVSAFKRKNVERGALSAFIDAVKTGKVEKGSYLVIEQFDRLSRAEVDVALKLLLDLVHSGIKLVTLVDEKIWDRESVKDIGNLILAIVFMSRANNESAAKADRLSQAWTQKKKAALESGKIMSRECPRWLTVNADKSAFVVLEDRAESVRRVFAMRINGHGVVSIVNRANREMWPVPGKGDTWHTSLVGRLLSNRALLGEYQPHRSGSEDDKRIPVGELVRDYYPAIIDEQTFLRAQAVRERKGAFPGRRDISYRNWLQGLLKCSCGHSFVRKNKTSSKQPGYARYYCTARNRGVTDCPSMNAREIETAIIHAVSGIAPHFWNGTARLEELNTLLDVQQVDLTAAVSQRDRFAEAIGASKAPIPVLLERLTAAEIEVEKAEKALATTRAEISELQGDSDSVFENIVKAVENVDSLDARAALREDLSRVLVKCVVDVKAGIVNVYIRGEELPLTVPLREDAVIPGAAAGQMTEEEFRGTFGRGPDELE

SEQ ID NO: 61827 - DNA, 50 bp, Burkholderia vietnamiensis
  source 1..50: mol_type = genomic DNA
cggagcatatacttcttgacgatgtccatcgtggagctataattgcacca

SEQ ID NO: 61828 - DNA, 40 bp, Burkholderia vietnamiensis; identical to SEQ ID NO: 59503
  source 1..40: mol_type = genomic DNA

SEQ ID NO: 61829 - DNA, 50 bp, Burkholderia vietnamiensis
  source 1..50: mol_type = genomic DNA
cggagcatatacttcttgacgatgttcatcgtggagctataattgcacca

SEQ ID NO: 61830 - DNA, 40 bp, Burkholderia vietnamiensis
  source 1..40: mol_type = genomic DNA
ccccgggtggccgaggttcttttcccacgccctgcccgac

SEQ ID NO: 61831 - protein, 465 aa, Mycolicibacterium rutilum
MRAAIYLRQSQDRSGDQLGVDRQRDDVRRLIESRGWTVAREFVDNDVSALSRKPRPQFEEMMAGVDRGEFDVIVARHMDRLLRRLAEFESVLERCQKTQTAIVTAADGVDTSTDGGRLVARILSSVAQGEVERKSARQRSAAIQAAKQGRWVGGRRAFGFEADGVTVREDEAALIKQGFADVLAGESLAEIARRWEASGIATTQGASRWSRHAVKDVLTNPRHAGLRRYRAQEDRATIRKNPELGIVGSAEWSAIVDEATWRAAVRILCAPERRRAPIGGKGLLTGVAVCGVCGATVHRGSAANPGGRTYRCKSGAHVARKSDPVDEYVTELVLARLTQPDAAELWTADLPDADALMTEADTLRRRRDDIALDYADGAMTREQFRTANTRVLERLGEIEAQIAAAGSSSPLAIVAAEDVRETWGGLSTAQRRGIISALMTPVLHLPGRGTRTFRPETVEIKWRKA

SEQ ID NO: 61832 - DNA, 50 bp, Mycolicibacterium rutilum
  source 1..50: mol_type = genomic DNA
taatgcgactctgttgggcttcgggtcgcgtgcccaccaaactagcagag

SEQ ID NO: 61833 - DNA, 40 bp, Mycolicibacterium rutilum
  source 1..40: mol_type = genomic DNA
aatggaccgcacgctgcgcgtcgcgtggacgctcgccgac

SEQ ID NO: 61834 - DNA, 50 bp, Mycolicibacterium rutilum
  source 1..50: mol_type = genomic DNA
taatgcgactctgttgggcttcggcccgcgtgcccaccaaactagcagag

SEQ ID NO: 61835 - DNA, 40 bp, Mycolicibacterium rutilum
  source 1..40: mol_type = genomic DNA
cccgctccgcaccccgcgccccgccgggccgctcaccgac

SEQ ID NO: 61836 - protein, 598 aa, Enterobacter hormaechei
MPKIWPYIRFSSEEQKKGDSLRRQQELIERFAARPEIVAEGAEIDTSLDLNDLGVSGFTGKNVLQGRFKTFLDAVASGIVKPGDYLAVEALNRVTRLDPMESLPILMGLMKKGIKIAITADSQIYRHGGDITQLYIALGELQRGYAESEEKGRRVRQAWDKKKERAFQTGEIATSRLPLWLRAVKTDQKGLIVRKVEEIPERVAIVKEIFRLSDSNIGAIATARLLTERGVPTFTRENPRKNPNYGDFWQPSYIKKILDSRAVLGHYQPMTWEKLPDNRRRRINHGPEIENYFPQIITPELFRRVQEKRRGRGKEGQGNKGKKFSNLFLKIARCAKCGATASHVNKGPDPRKGGRYLVCYRARHGDCSYKAWRYDDLETMILKFLAEADIKSIISEENKADELINKKYEIDAEINDIQEMLDAYKADFKRLKGRVSDLDREMAIENEQTLKELKEKAKDLDQEIFKALEQKKADIEKDILDLRGLSNTEDANTVFEVRSKINERLKIIIEDIKIDFQDRHIEVIFKNGTRRHLKNHLAVELRESTEVDQKRQEDYDDFYASLTDEQKAELNQFSIPAEIANDPKRLIEYLAQFNVVED

SEQ ID NO: 61837 - DNA, 50 bp, Enterobacter hormaechei
  source 1..50: mol_type = genomic DNA
tggggtccaatggttgcctaaaagaaggatttagtggaccattagacccc

SEQ ID NO: 61838 - DNA, 40 bp, Enterobacter hormaechei
  source 1..40: mol_type = genomic DNA
gcctggcggacctatcagtaacaggttatgcccacccgcg

SEQ ID NO: 61839 - DNA, 50 bp, Enterobacter hormaechei
  source 1..50: mol_type = genomic DNA
tggggtccaatggttgcctaaaaggtggatttagtggaccattagacccc

SEQ ID NO: 61840 - DNA, 40 bp, Enterobacter hormaechei
  source 1..40: mol_type = genomic DNA
gcctggctggccaacctctgtggggttatgccctccctca

SEQ ID NO: 61841 - protein, 536 aa, Sphingobium yanoikuyae
MRTIIYARYSSDLQNSRSIADQIALCRDRAAQEGWQIIDTFTDEAISGAAGIGEDQRPGLNALLARVERGGVDQVIAESTSRIARHQGDGFAIRERLSYFGVRLFTLSQGEIDEIKGWVQGFLDSQARKDIAFNVKRGQRGTVRAGRSPAGLAYGYRKANRLDERGELVRGLRAIEEDQAEIVRRIFAEYANHRSARQIAGGLNEDGIPGPTGGTWRASTILGDRQRKNGMLQNRIYIGKIVHERTSKVADPRTRKERIRPNPEAEWVEADAPDLRIIDDVTWQTVQQLRNAYSTDRPELMRRPKRLLSGIGRCGVCGGGWIVIGRDQWACGKHRDGRACTNNRTVKTHVYEQKVLDGLRDDMLHPDAVSAYVREFHESRRQRSQEVAQQRAKLERRHREAAAKVERLIKAIADGGDEFVEIRAILTKARTDRDAIAQQMADLEAFPVITLHPGIAQEYRKQVADLTEALAGHGEAQAEAIPKLRALIGTVTVYPAEGRRGVEVEATGQIANMLALATGQQLHASMYVDGGAGSGD

SEQ ID NO: 61842 - DNA, 50 bp, Sphingobium yanoikuyae
  source 1..50: mol_type = genomic DNA
atgtatgttgacggtggagcgggtagcggggatcagccgctaacatacat

SEQ ID NO: 61843 - DNA, 40 bp, Sphingobium yanoikuyae
  source 1..40: mol_type = genomic DNA
atgacggactggagcgggtagcggggatcgaacccgcatc

SEQ ID NO: 61844 - DNA, 50 bp, Sphingobium yanoikuyae
  source 1..50: mol_type = genomic DNA
atgtatgttgacggtggagcgggtttcggggatcagccgctaacatacat

SEQ ID NO: 61845 - DNA, 40 bp, Sphingobium yanoikuyae
  source 1..40: mol_type = genomic DNA
ataatggacagtagggggtttgggggatgctactggcatc

SEQ ID NO: 61846 - protein, 511 aa, Burkholderia pseudomallei
MLLDDSLSLRDEGLSAYHQRHVTQGALGVFLRAVEDGRIPAGSVLIVEGLDRLSRAEPIQAQAQLAQIINAGITVVTASDRREYNRARLKAQPMDLVYSLLVMIRAHEESDTKSKRVKAAIRRQCQGWIAGTWRQPIRVGKDPQWIREVGNQFELIPERAAAIRLIVAMYKQGHGAVRIVRELFERGLSVSDTGRTSSSHIYKILANRMLIGEKTVELDGEEYRLEGYYPAVISSAEFAELRHFTEQRFRRKGKGEIPGVVTGLGLTYCGYCGTAVTAQNIMGRHRDTEGRPQPGHRRLSCFAYRTGSGCPVNGSVSVAPIERALMHYCADQINLSRLLEGDSNSATLSAHLAQTRQRVTDIEAQIQRVTDALLSEADAPPAAVLRRIRELEAQLQRDRHEINSLEGRLAAESSSTPAVAQAWAKLVEGVEGLDYDARMQARQLVADTFSRIVIYHRGFTPRANSNTIGLLVVGKRGVTRLIKIDRKSGKWKAAEEIRLPWVAANELPLPA

SEQ ID NO: 61847 - DNA, 50 bp, Burkholderia pseudomallei
  source 1..50: mol_type = genomic DNA
ggtttatttaccctaacccacgggcacccgagggatactatacctatact

SEQ ID NO: 61848 - DNA, 40 bp, Burkholderia pseudomallei; identical to SEQ ID NO: 58418
  source 1..40: mol_type = genomic DNA

SEQ ID NO: 61849 - DNA, 50 bp, Burkholderia pseudomallei
  source 1..50: mol_type = genomic DNA
ggtttatttaccctaacccacggggtcccgagggatactatacctatact

SEQ ID NO: 61850 - DNA, 40 bp, Burkholderia pseudomallei; identical to SEQ ID NO: 41200
  source 1..40: mol_type = genomic DNA

SEQ ID NO: 61851 - protein, 491 aa, Butyrivibrio proteoclasticus
MNAVIYARYSPGPRQTDQSIEGQVRDCMAYAEQNDIKVLKVYADRHISGTDFEKRAEFNKMLRDSEKGQFEAIIVWKIDRFGRDREEIALNKIKLKRHGIKLLYAKEVIPDGPEGIILESLMEGLAEYYVADLRQKVKRGQRESALKGLAVSGMAAYGYKISDEKKYIENENESWVVKYVFEHYAAGKTATEILDELTRMGVKNRKGSPITKNGIYSMIRNEKYIGKCTYDGIDIPIPALISEELWDAVQSKIIRRPHSSAVYKAPERYLLSLKAFCGECGAMLVGESGYGKQGNKYLYYKCGTRKKKGHSHDCSLKTIRKEQLEDFVVQYTISDVLQDDVIDYIADKVIEINKKHTVNQLLSQLKSALRKAENGRNNLLKAIEDGIYTPSTKERLLELENECEELKVQIAKESIKKPEITKDHVVYWLEMFRKGNIKDEGFKQRLLDVFVHSVYVYNEKVVIAYNYTDNNHDNSIDVPGILEGSDTFVKV

SEQ ID NO: 61852 - DNA, 50 bp, Butyrivibrio proteoclasticus
  source 1..50: mol_type = genomic DNA
gggttcggatacatttgtgaaagtgagggacggagttctatatccgaacc

SEQ ID NO: 61853 - DNA, 40 bp, Butyrivibrio proteoclasticus
  source 1..40: mol_type = genomic DNA
aagtctagggattaacaatgagacacgggggattcgaacc

SEQ ID NO: 61854 - DNA, 50 bp, Butyrivibrio proteoclasticus; identical to SEQ ID NO: 61852
  source 1..50: mol_type = genomic DNA

SEQ ID NO: 61855 - DNA, 40 bp, Butyrivibrio proteoclasticus
  source 1..40: mol_type = genomic DNA
aagtctaggaatgaacaaggacagctgggaggttagaagc

SEQ ID NO: 61856 - protein, 659 aa, Pseudomonas putida
MLMSTFQANESGHMTTPAPRKVIYKYIRFSSIQQAKGTSFARQNERIDKYAKENGFEVNDDLKLQDLGRSGFHGLNKEIDQGLGRFILAIEEGLIPTDGTSYLAVEQFDRLSREDISKAQSTLNSILEKNVNVITLMDGKIYTKESMKDFMQVLYSLFLMEQAHQESKKKSDRIKGSYAIKIKKLKELAEEQKEALAEWEKKKTGEKPEALINQVQFSSQVPFWIDQKIEVIGGRKFRKFVINEEKGKIIQYALSLLNDDNGYMNVASRLNAEGIPRIDFASNRKRSTRKDIWTNRAVNEFVNNDSIFGDLALHHNFFADSEYVIKGEKEIKATKKVVKREHIENIPNYYPAIIDKKTVMGLRARANAKKKGRVAGRTTTNNLFQNLLYCGKCGDSLHLHQTKRETKKGTYQRYYLVCYSKKHKACDAKMISYPEVEKALVNYLVMPAEASTDLSVEAKKIIKSRDDRILELEGEVKILEDKIQQTQNTMLQGNIPMDVVLSVLTQLNGDKEFKLHKIVELNAEKEKLVSAMNSSPAKHDITNDDGRKAFKLAVKQMYAGFFLFTSDQFIITVQNYGGAGWFHFDVRNRWGNKIKPVPTVNSMNAFEEKMKYLKSICGTYREGKLYDIVKGFKMNNLEIFEDDYKNRGLPMPSSYQRGE

SEQ ID NO: 61857 - DNA, 50 bp, Pseudomonas putida
  source 1..50: mol_type = genomic DNA
ggttgtgaaattgtccccagtgggctacaattattggtaattcaacaacc

SEQ ID NO: 61858 - DNA, 40 bp, Pseudomonas putida
  source 1..40: mol_type = genomic DNA
cggcagctatcagagcgaactgcccctgctcgaacagatc

SEQ ID NO: 61859 - DNA, 50 bp, Pseudomonas putida
  source 1..50: mol_type = genomic DNA
ggttgtgaaattgtccccagtgggccacaattattggtaattcaacaacc

SEQ ID NO: 61860 - DNA, 40 bp, Pseudomonas putida
  source 1..40: mol_type = genomic DNA
cagccgggagcagagcgaaccgcaccggcccgagcggagc

SEQ ID NO: 61861 - protein, 698 aa, Actinomyces oris
MKPGTIQAGAMGGSMGVGAMGMGTDPFAAMAAQLTPKRAVSYIRVSTREQAQRGGSEEGFSLPAKREANKRKAQSMGALVVKEFADRGESARSANRPELQKMLAYLKEDGGIDYVIVHKLDRLARNRADDVEINRAFEEAGVRLVSTSENIDQTPGGMLLHGIMSSIAEFYSRNLANEVIKGMGEKARNGGTLGKAPLGYVNVRARDENGREVRTIALDEERAPLVRLAFTEYATGNWTVRQLAEHLNNRGLTIPPTARKPTNPVSVRLLQTLLRNPYYKGVISFQGVEYAGAHEPLVDTATWQTVQDILTAHTNGERQRMHNHHLKSTIVCGLCGARLLVQHATSRASGTYHYFVCARRHRVHDCTFKAVLINEVEARVAELYQRIQLSGDDRREIEHYLRAEFAHIQANRQQDIQRLTTRQQRLEDQRHKLLEAHYAGAIPLDLLKKEQEQLTNGILAIQRELDGYTADAALVEQHLIQALDLLEDCSRLYVAAPAHLKKQLNQVFFERILVNPAVDEDGRPIIPPPALQTSLKAGRRGGTSGQTAATQSGEKTAESATSSRDESAGDQSAGSASQGGHGEAQPDSMHTVRYNTISIIDPASHTNATGELASPFDQLSSQQLRRAAQQAAMGVASQQNATSDQATERREVDNPHGAAPATRTPVHDVDGRRRCNSGNDLAPAPVTQAKGSYTELVV

SEQ ID NO: 61862 - DNA, 50 bp, Actinomyces oris
  source 1..50: mol_type = genomic DNA
ggttcgtatacggagcttgtggtggccctccttacctccgtcaccaagaa

SEQ ID NO: 61863 - DNA, 40 bp, Actinomyces oris
  source 1..40: mol_type = genomic DNA
ccaagtcacgctcatggtggacccggccggactcgaaccg

SEQ ID NO: 61864 - DNA, 50 bp, Actinomyces oris
  source 1..50: mol_type = genomic DNA
ggttcgtatacggagcttgtggtggacctccttacctccgtcaccaagaa

SEQ ID NO: 61865 - DNA, 40 bp, Actinomyces oris
  source 1..40: mol_type = genomic DNA
ccaaggcatgctcatggctgacccggccaaggtcgaggtg

SEQ ID NO: 61866 - protein, 581 aa, Sphingobium indicum
MTQPATIYARFSNAEQGKGSSMDRQLRLCEEMAQQHGWEISPSRILRDEGRSAFSGANRKQGGAFYEFETQAEAGYFQNGHVLIVEHLDRISRQGYDEVLPLLTMLTRNGVTVATVDGNRVYPAFERVPMGPVMEVILKTELAREESKKKADRLAEAWKRKIEKAQASNGSHIAITSTCPAWINVDPTTKLMTLNEDRVRVLREIFQLTIDGYGTPAIAQRLNARNEPVWKHREVKSNNGWTVGYLTKIVLNRAVMGEYQPTKKPRGVAMGTPVGSPILNYYPQAIDPITFGKAAAARLSRAGTSGSWQLTYSNILSGLAKCSHCGGRMSQRATVRRGQMRRDSKGSGRKYAARDDITYLYCFNAWNKVSVEETGQPKCTNTAKIRYEPLERTIVDLITGYAASNPTATDDKRLRELQVEMAELRRQQEGKQAQADNLARSFAESGSAMMERLALEADAEARELLKQMNAKAKQLDSAYADVEADPSQAWFQRINEIKEQLYSDDEQVRKDARVRMKQFLPKVLSHVSCDREKETHIILGDNRVGMFIDSQGEVLATGILQEEIVGPDGERNWHPDAEAAE

SEQ ID NO: 61867 - DNA, 50 bp, Sphingobium indicum
  source 1..50: mol_type = genomic DNA
cgcgttgactcctataacgcactggtcgtagtgtaataggagtagcaacc

SEQ ID NO: 61868 - DNA, 40 bp, Sphingobium indicum
  source 1..40: mol_type = genomic DNA
ggtcggcacttcggccccggtcagcaacgtatagccgatg

SEQ ID NO: 61869 - DNA, 50 bp, Sphingobium indicum
  source 1..50: mol_type = genomic DNA
cgcgttgactcctataacgcactgaacgtagtgtaataggagtagcaacc

SEQ ID NO: 61870 - DNA, 40 bp, Sphingobium indicum
  source 1..40: mol_type = genomic DNA
cgtggacactcaggcccagaacagcaacttatacccgccc

SEQ ID NO: 61871 - protein, 463 aa, Staphylococcus aureus; identical to SEQ ID NO: 36021

SEQ ID NO: 61872 - DNA, 50 bp, Staphylococcus aureus; identical to SEQ ID NO: 36022
  source 1..50: mol_type = genomic DNA

SEQ ID NO: 61873 - DNA, 40 bp, Staphylococcus aureus
  source 1..40: mol_type = genomic DNA
gtgtataggtcctaaatgtaccgtcccgttcccacgcgcc

SEQ ID NO: 61874 - DNA, 50 bp, Staphylococcus aureus
  source 1..50: mol_type = genomic DNA
gatgaatggtgtgttacgcggtagcttgtagttgttacaaaacattcacg

SEQ ID NO: 61875 - DNA, 40 bp, Staphylococcus aureus
  source 1..40: mol_type = genomic DNA
gcctatagggcccaaatgtctaggctcctgcccacctgcc

SEQ ID NO: 61876 - protein, 478 aa, Rothia dentocariosa
MVELVSLRKTNEVAAYVRASMDRKGDRWTVETQLRKIRALAEAKDWKVVEVYDDNAVSATKKRRAGTRWAEMLEDARAGKFSMVVAVDMDRLLRSTKDLNTLIDLGLRVVTVDGEIDLSTADGEFRATMLAALARFEARRKAERQIRSNERRRAEGIPTSAWKAFGWTRDGELIEEEAAAVRRAFDAFLGEPSLSIRRIREDLNSAGHFTARGSEFSVDAVRYLLANPLYCGYIKHYASGELYPVQGEAFPPIVGEQTWRAAVAKLEDNVRRSARQGNQPKYLLSTIGLCGKCGATLVSGTNSRKQPTYRCGEQFHLTRQREPVDAMVTEAVLTRLSSVDVHDLVMPQEDDGPDREELLTERNALVDRVKELSPLLRDIHQPVLEITAAINDVKARIDEIDAELLDRSVSAAAKLLVDVEEPVGTAERREVVEAKWKVLDVDRRRMLVDELVTVTIEPITPGHVKFDPDLIRIEPRRD

SEQ ID NO: 61877 - DNA, 50 bp, Rothia dentocariosa
  source 1..50: mol_type = genomic DNA
gttccgtccaacgccataactcagacatgcgctagcgcatgtagcggttg

SEQ ID NO: 61878 - DNA, 40 bp, Rothia dentocariosa
  source 1..40: mol_type = genomic DNA
cttggtaccggcgtgatcgacatgcgctacgagaacccgc

SEQ ID NO: 61879 - DNA, 50 bp, Rothia dentocariosa
  source 1..50: mol_type = genomic DNA
gttccgtccaacgccataactcagcaatgcgctagcgcatgtagcggttg

SEQ ID NO: 61880 - DNA, 40 bp, Rothia dentocariosa
  source 1..40: mol_type = genomic DNA
cctggtggcggggagagcgcaatgcgcaacgagctgccgg

SEQ ID NO: 61881 - protein, 478 aa, Rothia dentocariosa; identical to SEQ ID NO: 41161

SEQ ID NO: 61882 - DNA, 50 bp, Rothia dentocariosa
  source 1..50: mol_type = genomic DNA
gttccgtccaacgccataactcagacatgcgctagcacatgtagcggttg

SEQ ID NO: 61883 - DNA, 40 bp, Rothia dentocariosa; identical to SEQ ID NO: 61878
  source 1..40: mol_type = genomic DNA

SEQ ID NO: 61884 - DNA, 50 bp, Rothia dentocariosa
  source 1..50: mol_type = genomic DNA
gttccgtccaacgccataactcagcaatgcgctagcacatgtagcggttg

SEQ ID NO: 61885 - DNA, 40 bp, Rothia dentocariosa; identical to SEQ ID NO: 61880
  source 1..40: mol_type = genomic DNA

SEQ ID NO: 61886 - protein, 545 aa, Streptomyces sp NEAU-S7GS2
MANYAQLRGVSVRRLSVLTDETTSPQRQQEANQRVAAELGIDLAGREAEDLDVSASKTNPFQRPKLGEWLRRPMEFDALVWWRFDRAIRSMADMHELAKWAREYRKMLVFAEGIGGGRLVFDFRNPMDPVSELMMMMFAFAAQVEAMSIRERVTGAHAAMRNMHFRYAGGPIPYGYMTVDLDGGGRTLVPDSDPVADPADPAKDLGPAPVAVIERIIRELLGGRSLAGIAEGLNSEGILTPRDYWSKRMKRQTGGKVGGKTHDRYTWNPGSIRRLLLSPVLIGWKTYDGAPVRDSEGRPIPLTVEPILTRQEFDAIGQMLEQRGNRNVTRKDTDALLLGSARCPSCRGPLYLTKRSEQQDGRGEGYGCNAKSRGKACEAPVSVKRSWIEEYAETTFRRRLGPVRVRYTETIPGYDPRPEIEATAAEYEAHQEQQGRQASSAAKAAWQRRADALDKRLAELEAMPVIEPQTIVTESDRTFEDEWDEGDTATRRGLLQEAGVQIFVQRGVKGARKADESRFDFVITEPFYADAAYEIEALRESLENE

SEQ ID NO: 61887 - DNA, 50 bp, Streptomyces sp NEAU-S7GS2
  source 1..50: mol_type = genomic DNA
gaaccgtagttgcgcccgaacggcatgccgttcgactagaaccacggttc

SEQ ID NO: 61888 - DNA, 40 bp, Streptomyces sp NEAU-S7GS2
  source 1..40: mol_type = genomic DNA
ataccggatctcgaacggcatcctgcgcgccatccgctcc

SEQ ID NO: 61889 - DNA, 50 bp, Streptomyces sp NEAU-S7GS2
  source 1..50: mol_type = genomic DNA
gaaccgtagttgcgcccgaacggcaggccgttcgactagaaccacggttc

SEQ ID NO: 61890 - DNA, 40 bp, Streptomyces sp NEAU-S7GS2
  source 1..40: mol_type = genomic DNA
aaaccgtatctccaaaagcagcctgtgtgccatcttctgt

SEQ ID NO: 61891 - protein, 570 aa, Pseudomonas nitroreducens
MIRWYDYPREFLRINAVAKAYAYVRYSRITQESGDSEARQYNALERFTASTGVEIQEVIYDRGKSAFRGDNARSGYFKEILERINNRKIKKDDFLVVESIDRITRQRVIDGVELLQGILKKGIKIYTTTDEKIYSYSDPARDFETLMMIALIAQRANEESETKSKRLNSAWRKRREKAQNGEIIIKSGKAVPYGLRVENGQFVIVEEEQKEIEQLFNFILEYGINTSIVKINKISKKKWNNGTLNKILKAKTVIGCMPMHRIEYDEKGKSKKILTGYIENYYPKIIEPALFYKAVDTMKNRKAKNWTGNRTEQDFNIFKHQIYCAECGSKMYYDHRGSRYKDKIYPFFKCDNARVQKHICTAENVRFEYVLGSLLDSLKSIKKIGNSTSWQKTGFGKRANKFNGSISSVLKIEKDIDNDVSVKIKELNECRLKIENLNAKIEELDFNVPKIFVKKLSELEHQYDEMKKEIEILESQSTEQIDIQDELTVIELFKTESGRLKLNRFFKENSIIFNVSHEKKSRTTRFEIKRKNDVTDERLSLNLKTFQQKNILHEFDLVDLQTMFDLSVKD

SEQ ID NO: 61892 - DNA, 50 bp, Pseudomonas nitroreducens
  source 1..50: mol_type = genomic DNA
ctcggaaaatcaatttaccggatgatgatccggtggtatgattatccgag

SEQ ID NO: 61893 - DNA, 40 bp, Pseudomonas nitroreducens
  source 1..40: mol_type = genomic DNA
cccccggcgcaaccggatcatcagtggcctgtcgttgggc

SEQ ID NO: 61894 - DNA, 50 bp, Pseudomonas nitroreducens
  source 1..50: mol_type = genomic DNA
ctcggaaaatcaatttaccggatgtcgatccggtggtatgattatccgag

SEQ ID NO: 61895 - DNA, 40 bp, Pseudomonas nitroreducens
  source 1..40: mol_type = genomic DNA
cctcccgagtagctggatctccaggggcctgccgctatgc

SEQ ID NO: 61896 - protein, 585 aa, Enterobacter hormaechei
MRKLYSYVRWSTDKQSGNTSLERQTLKAQEFATIHNLEYVQILDAGISAFRGKNTTEGALGGFIEAVKAGVIPSDSYLYVENLDRLTRQDVATALNLFTGLLRLGLTIVTGMDGKIYTNEGLKNVTDLMMSLFLFSRAYEESLTKQKRAHETALRLIERHRAGLPVNIKSAGSAPWWIDASMSTYEAVKPHPVHWPAAKKAVELMLEGWGCFKVASYLNDHPEEFPPPRGNKGKGKKRGECWAVANLKKMRDNRALFGEKVITIGGATHTLTDYYPAICTRAEFAQLHDIACNNRHKVGEERRIITLLSGLRLLRCGHCNGSMSFFSKEGRIRYVCETGKNKTSDCKVWSVSGLLVERCLMLPLIRGYMDFMSGKASASEDLTQKIEDKKAEVLNVDTQIANLTSAIQLGGNIPALVSSIQALEQSKSAALVELERLTQRQALQDAKDQQVETLVDFYELLTPTMLEDTSDERRLKVREVVRAVIESVTLSKASDKALTLTYELPDKTVYTFTGELIESKKGKPTKSYRVEVENRGIRIDGIEDTPAGREAISRANEAEQEYHRIISQILVDFPPLKGSHFFGKR

SEQ ID NO: 61897 - DNA, 50 bp, Enterobacter hormaechei; identical to SEQ ID NO: 43632
  source 1..50: mol_type = genomic DNA

SEQ ID NO: 61898 - DNA, 40 bp, Enterobacter hormaechei; identical to SEQ ID NO: 55453
  source 1..40: mol_type = genomic DNA

SEQ ID NO: 61899 - DNA, 50 bp, Enterobacter hormaechei
  source 1..50: mol_type = genomic DNA
attggcacctaaaaatatttcgggtcgcctaaagtcatttacatgccaat

SEQ ID NO: 61900 - DNA, 40 bp, Enterobacter hormaechei
  source 1..40: mol_type = genomic DNA
atcaaacaggcattagggatcttatgggagggtgaaaatg

SEQ ID NO: 61901 - protein, 564 aa, Streptococcus anginosus
MGEYKDIDKYIEVNAMSKEKIKVYLYTRVSTSIQIDGYSLEAQKTRMKAFALYNDYEIVGEYEDAGKSGKSIEGRAQFTRMMEDIKSGKDGVSFVLVFKLSRFARNAADVLSTLQTMQDFGVNLICVEDGIDSSKDAGKLMISVLSAVAEIERENIRVQTMEGRIQKAREGKWNGGFAPYGYQLVDGKLFINEEEAVAIRTIFEQYVNTTIGANGLSKYLENHGIRKIPRQNGKNPLFDAGLIRKILKNPVYKGKIAFGRRTLEKVHGTRNEYKQVEQDEYLIAEGIHEAIISDELWQAAQVKLKSQAKKYEHVNKGKDVRTHLLSGIVKCPICGVGMFGNKCIKKKKDGTKYKDFYYYGCKHRQMIRGHKCTFNKQIREELLDDAVAELIIKIVSNPKFASIMQEKINMKVDTSEIEKEIDNYQKELRKSHSIKFKLIEEIDNLNVDDKHYMRRKQDLDDRLYRMYDKIEELESLLIDAKAKKQTIEAEKLTGDNIYKVLIYFDKLYNVMNDVERRQLITALISEIQIYEEKQPNGQWLKSITFKLPIIDEDLNISLDNDKQV

SEQ ID NO: 61902 - DNA, 50 bp, Streptococcus anginosus
  source 1..50: mol_type = genomic DNA
agtttggacaatgataagcaagttgagacggtagcgctattgtccaaact

SEQ ID NO: 61903 - DNA, 40 bp, Streptococcus anginosus
  source 1..40: mol_type = genomic DNA
aatcttggataactccaatgatgaatcctaccccaacgac

SEQ ID NO: 61904 - DNA, 50 bp, Streptococcus anginosus
  source 1..50: mol_type = genomic DNA
agtttggacaatgataagcaagttatgacggtagcgctattgtccaaact

SEQ ID NO: 61905 - DNA, 40 bp, Streptococcus anginosus
  source 1..40: mol_type = genomic DNA
aatctcttccaactcaaatatcgaatgatagcccaatgac

SEQ ID NO: 61906 - protein, 547 aa, Mycobacteroides abscessus
MMEEVEKKRALICIRLSRVTDATTSPKRQRQACEELCKARGYDIVGIAEDLDVSAGKTSPFDRPQLGQWLRDPTRYDVIVFMRVDRFVRRLFDLADAIRWSQDHGVALVSATESHFDLSTKLGGVVALLVASIAEMELDAISERNSSAFKHNFTLGKWRGGQAPWGYVPEKIDGEWRLVQDPVQVEVIHEVVTKVLEGQPLRAVAHELTTRGIPTPRDSFAMHQGREVKGYAWHPSRLKAFLTSQTLLGRVVMREQLKDAQGRPQRDAKGRKIFGDDVLVTNDDGSPVVRAEPILTMSVFKRVSAELEGRENRKEPTKRSTGLLLRIIYCGVCGQAAYRLKGGAGRKPRYRCASAQGSSVHQCDNRTISLEWADGEVERQILETMGPLERKRRIWFSGNDHTDELTEVNDMLEDLVDQLGTGVFKRGTPQRERLDQRIAALTERQAELSESPRVEPGWVYEGTGETLADWWADASDQDKNIWLRQYGFRYEWVSHSGDNGRIVVDEFKQVGDLSMDLDADTLLGPVWDIVSAMSDPANIEAYNALPD

SEQ ID NO: 61907 - DNA, 50 bp, Mycobacteroides abscessus
  source 1..50: mol_type = genomic DNA
ggtgtaaagcacaacaatcgaatacgcaattgatcgagtttcataccctc

SEQ ID NO: 61908 - DNA, 40 bp, Mycobacteroides abscessus
  source 1..40: mol_type = genomic DNA
gtatggccacagtcgcatactcgacggacaccattcccgt

SEQ ID NO: 61909 - DNA, 50 bp, Mycobacteroides abscessus
  source 1..50: mol_type = genomic DNA
ggtgtaaagcacaacaatcgaatatgcaattgatcgagtttcataccctc

SEQ ID NO: 61910 - DNA, 40 bp, Mycobacteroides abscessus
  source 1..40: mol_type = genomic DNA
gaatggcaacagacgcatttgcaagggacaggattcacag

SEQ ID NO: 61911 - protein, 550 aa, Streptococcus pyogenes; identical to SEQ ID NO: 51076

SEQ ID NO: 61912 - DNA, 50 bp, Streptococcus pyogenes; identical to SEQ ID NO: 51077
  source 1..50: mol_type = genomic DNA

SEQ ID NO: 61913 - DNA, 40 bp, Streptococcus pyogenes
  source 1..40: mol_type = genomic DNA
tccacaaacgcatcacgtcgagtgcgtagtgttgctaatc

SEQ ID NO: 61914 - DNA, 50 bp, Streptococcus pyogenes
  source 1..50: mol_type = genomic DNA
ggtttggacaacgatgaacacgttttgacggtagcacttttgtccaaact

SEQ ID NO: 61915 - DNA, 40 bp, Streptococcus pyogenes
  source 1..40: mol_type = genomic DNA
gccacagtgtcatgaagtcttgtgcgtattgatgatattc

SEQ ID NO: 61916 - protein, 619 aa, Faecalitalea cylindroides; identical to SEQ ID NO: 14616

SEQ ID NO: 61917 - DNA, 50 bp, Faecalitalea cylindroides; identical to SEQ ID NO: 11112
  source 1..50: mol_type = genomic DNA

SEQ ID NO: 61918 - DNA, 40 bp, Faecalitalea cylindroides
  source 1..40: mol_type = genomic DNA
ttgcccgtggcgaccttcagatttggagcagcgttccggt

SEQ ID NO: 61919 - DNA, 50 bp, Faecalitalea cylindroides; identical to SEQ ID NO: 37649
  source 1..50: mol_type = genomic DNA

SEQ ID NO: 61920 - DNA, 40 bp, Faecalitalea cylindroides
  source 1..40: mol_type = genomic DNA
ttgcccttggtgtccttcagccatggagcaccctgcccca

SEQ ID NO: 61921 - protein, 587 aa, Flavonifractor plautii
MKKGIALRTVKKTAEELLNTIKVAIYIRVSTHWQVDKESLPVQRQDLISYCKLILNTDNYVIFEDPGYSAKNTDRPDFQRMMARVRTGEFTHILVWKIDRISRNLLDFAAMYQELKELGVTFVSKNEQFDTSTAIGEAMLKIILVFAELERHMTSERVTAAMLSRATNGKWNGGKVPFGYKYDKGAQEFVIDEAEARVVKLMYDLYDEQRSLLVVSKELNDRGYRSRKGSLWSPVTVGNLMRSPFYIGVMRYNYRDESGATFTFKPEDEWIMIEEHHPQIVTHEQWNRVVDTMKSQRRGQPGHGKSFNRGNVHIFAGLVTCGYCGSLMRATKDRVRADGSRPSIYNCASKRTGSDCPNKYISDLTIGPFVLNYIANIIRARKSFGVSTSIETLEKKLLRGDTFKDVVHIGRPGLEELYRHFQGTRGVEQNFMASPGATASNTEEERDLLLAEKHRKERALNRLKALYLYSEEEQAMSEAEYIVERKRLLDSLEGIDARLAEIDEALAQQINLSDEEFIQKASYFIMAQQLTEKRQIDYTRFMRKADPQIVKNFIQNVCANFCIKSGRVTSIRFKNGIEHQFFYRDPE

SEQ ID NO: 61922 - DNA, 50 bp, Flavonifractor plautii
  source 1..50: mol_type = genomic DNA
atctggtctccaatgaacatcgcatcccgtatgcttacgggagaccagat

SEQ ID NO: 61923 - DNA, 40 bp, Flavonifractor plautii
  source 1..40: mol_type = genomic DNA
tcagccgatgaacatcgcatctccaaaggagaaaaaccga

SEQ ID NO: 61924 - DNA, 50 bp, Flavonifractor plautii
  source 1..50: mol_type = genomic DNA
atctggtctccaatgaacatcgcagtccgtatgcttacgggagaccagat

SEQ ID NO: 61925 - DNA, 40 bp, Flavonifractor plautii
  source 1..40: mol_type = genomic DNA
taagccgattaaaacaacagttccaatgaaaaaaatctga

SEQ ID NO: 61926 - protein, 558 aa, Salinispora tropica
MPTPQPKPFAFYGRVSTEDNQDPESSRSWQLTRATTIIRPHSGQIVTEYFDVGQSRSLPWQRRIQASRLLAALRDPRRGFSAVVVGEPHRAFYGNQFGLTVPLFTHYGVELWVPEIGGPIDPDNEAHELVMSVFGGMSKGERNRIKLRVRTAMAAQTLLEGRYLGGRPPYGYTLRELGPHPNPAKAANGKQLKGLIPDEQTAPIVRQIFTEFLAGIGLFAIAEGLTANHVPCPSAHDRARNRHRSGIAWSKSAVRVILTNPRYTGRQVWNKQRTDEVLLDVDDVAMGHTGVMRWNPRDKWVVSKEITHEPLIDDTTFEQAQAILRHRGRGTGGQHLRQRTRNPYVFRGIIYCAACDRRMQGQYNHGDAYYRCRFPQEYALANHLPHPRNVYLREDALTDPLDTWLASAFAPQHLEHTITTLADAQPAAHPPATGIPAQTIITECDAKLKRYRAALDAGADPTVVTAWITQTQADRARAEAELHALASTTPHRLTRAEITALVTALGDITAVLRDANPADKAEVYRQLGLRLNYQPETQTVRAEVDLSAHRGEMVCVRG

SEQ ID NO: 61927 - DNA, 50 bp, Salinispora tropica
  source 1..50: mol_type = genomic DNA
cgtggggaaatggtttgtgtccgaggggcaacacgaaccgttaccccacc

SEQ ID NO: 61928 - DNA, 40 bp, Salinispora tropica
  source 1..40: mol_type = genomic DNA
ggtaactgtacgtgtccgaggggggacttgaacccccacg

SEQ ID NO: 61929 - DNA, 50 bp, Salinispora tropica
  source 1..50: mol_type = genomic DNA
cgtggggaaatggtttgtgtccgagcggcaacacgaaccgttaccccacc

SEQ ID NO: 61930 - DNA, 40 bp, Salinispora tropica
  source 1..40: mol_type = genomic DNA
agtaagtgtaaatgtctgagctgggatttgaacccttgcc

SEQ ID NO: 61931 - protein, 549 aa, Amycolatopsis sp AA4
MNDHEITGWAIDLDVSRSVNPFEAPELGPWLTDPLKIDSWDLVASWKLDRVAIGSVYLSKMIEFCNTYRKNLVSVTESFDLSTWIGRMIAQNIAAVAEGEWELIRDRNAGSAAKLRKDGRWRGGRANYWLKPKRRGKGYWLTLDPETSPVMREIIRQYLAHNPIDSIARSLSIDPDNPGGGYLTPAEYLRHRKCRSLDLEDMDYPESRRPITGAVWNPQSIRELLFSPALLGFQEHEGRMVRDENGNPIPVGEALITPSEFEQIMAERDRRAALRDNGVTEREANAGPLLRIAVCPECGTNLHYRTQRKVLADGSETEYLYYKFYCKHGPILRAEELEEEVHALFLMALGPLQQVERVFIPASDNTLEIENSRKALDELYTERAEVKSETAKEAIKAAIRFQDTRLAELEKTPKSEARYEYIPKGRSYFQAWNSMDESERRNLILESGITVAVHPKGSNRNWSFNLDLQVPHDMRERLGLPVNGPIENAFPMLNILKRMPGFHHEGSGPKPTPFTDAEQAVIKAMFSGTEDERAAVRDEFVKLTGWGLR

SEQ ID NO: 61932 - DNA, 50 bp, Amycolatopsis sp AA4
  source 1..50: mol_type = genomic DNA
ggtttactatgagccagatccgcgcacgcgaacctggtggaaggtatatt

SEQ ID NO: 61933 - DNA, 40 bp, Amycolatopsis sp AA4
  source 1..40: mol_type = genomic DNA
cttttaccggcagatcgcacaggccgatcagcggtacacc

SEQ ID NO: 61934 - DNA, 50 bp, Amycolatopsis sp AA4
  source 1..50: mol_type = genomic DNA
ggtttactatgagccagatccgcggacgcgaacctggtggaaggtatatt

SEQ ID NO: 61935 - DNA, 40 bp, Amycolatopsis sp AA4
  source 1..40: mol_type = genomic DNA
cttttccctgcagaccacagagtctggtcggccctacact

SEQ ID NO: 61936 - protein, 527 aa, Faecalibacterium prausnitzii
MILQKYADEHHFFNTRFFVDDGFSGVSFEREGLQAMLHEVEAGNVATVITKDLSRLGRNYLKTGELIEIVFPEYEVRYIAINDGVDTAREDNEFTPLRNWFNEFYARDTSKKIRAVKQAKAQKGERVNGQVPYGYIADPNDRNHLLPDPETAHIVKQIFAMYVRGDRICEIQNWLREHEVLTVAELQYRRTGSHRHPRPHPNCIYNWPDKTLYDILARKEYLGHTITGKSYKVSYKSKKTKKNPEEKRYFFPNTHEPLIDEETFELAQKRIATKHRPTKVDEIDIFSGLLFCGDCGYKMYLQQGAGTLERKHAYTCGKYRNRIRTGELCTTHYIRKSVLKELVLADLQRVLSYVKEHEQEFIETANECSAKAVQKTLTQQRKELDKAQSRISELNILFRKLYEDNALGKLSDEQFAFLTSGYDEEKKTLTRRIAELSQEIDNATERSADVKRFVALVRKYTAITELTYENVHEFIDRILIHELDKETNTRKIEIFYSFVGRVDTGDKPTESISYFRQIGADVKSYAI

SEQ ID NO: 61937 - DNA, 50 bp, Faecalibacterium prausnitzii
  source 1..50: mol_type = genomic DNA
tatcgtcctattagagtgtacccctcggagagcagtttgtcaagacgatt

SEQ ID NO: 61938 - DNA, 40 bp, Faecalibacterium prausnitzii
  source 1..40: mol_type = genomic DNA
ggaacggtagccgttgccctcgggggccagctcaatcgcg

SEQ ID NO: 61939 - DNA, 50 bp, Faecalibacterium prausnitzii
  source 1..50: mol_type = genomic DNA
tatcgtcctattagagtgtaccccttggagagcagtttgtcaagacgatt

SEQ ID NO: 61940 - DNA, 40 bp, Faecalibacterium prausnitzii
  source 1..40: mol_type = genomic DNA
ggcatggtggctcatgcctttgggagccagcacaatccca

SEQ ID NO: 61941 - protein, 519 aa, Enterocloster bolteae
MPTSKNTARKYAAGGSSDNSCGVEPLRAVIYARYSSSGQREESIEGQLRDCYEFAKKHGIIVIGEYIDKAMTGRVDRRPDFQRMMKDSEKGRFNCVLLWKMDRFARNRYDSAMYKYKLKKNGIRIFYAKETIPDGPEGIILESVMEGYAEYYSENLAQNVKRGNYDSALELKTLGKTCLGLKTGPDGRYMIDQAEATIVRRIFEEYAEGERAKDIYERLNSEGYRTSRGGKFNKNSLRRILSNKKYIGVYEYEDIYVENGIPAIITDRDLFERVQKMLKINHDAPARGKAQNFLLTTKLFCGLCGSPMIGDGGTSHTGKAYAYYSCTKRKRGRSCKKESVPKDWIEDLVVGELVKIVHNDELIEQIADRVMEYQKREKDQSGLHALEIRQKENEKAISNMLAAIEAGIITPSTKTRLMELEADRADIEKGIAHELLAEPEFERDQIIYFLERFRSGDINDEAYRIMLVDTFLNSVYLYDDDHLVLVMNYSGENCKVDLKLVEGAVSGDGCKGSAFAPSS

SEQ ID NO: 61942 - DNA, 50 bp, Enterocloster bolteae; identical to SEQ ID NO: 10097
  source 1..50: mol_type = genomic DNA

SEQ ID NO: 61943 - DNA, 40 bp, Enterocloster bolteae
  source 1..40: mol_type = genomic DNA
ggttcaaatcccgtcggccgccctctgcaaaaaaggagga

SEQ ID NO: 61944 - DNA, 50 bp, Enterocloster bolteae
  source 1..50: mol_type = genomic DNA
ggttcagcttttgcgccgtcaagcggactcaatggcgcgaagccgaaccc

SEQ ID NO: 61945 - DNA, 40 bp, Enterocloster bolteae
  source 1..40: mol_type = genomic DNA
gctgccaaccccatggcccggcctttgcaataaagatgga

SEQ ID NO: 61946 - protein, 478 aa, Rothia dentocariosa; identical to SEQ ID NO: 61876

SEQ ID NO: 61947 - DNA, 50 bp, Rothia dentocariosa
  source 1..50: mol_type = genomic DNA
acgccataactcagacatgcgctagcgcatgtagcggttgcaacacccgt

SEQ ID NO: 61948 - DNA, 40 bp, Rothia dentocariosa
  source 1..40: mol_type = genomic DNA
tatacagcgggttctcgtagcgcatgtcgatcacgccggt

SEQ ID NO: 61949 - DNA, 50 bp, Rothia dentocariosa
  source 1..50: mol_type = genomic DNA
acgccataactcagacatgcgctagtgcatgtagcggttgcaacacccgt

SEQ ID NO: 61950 - DNA, 40 bp, Rothia dentocariosa
  source 1..40: mol_type = genomic DNA
taaactccaggtgctcatagtgcatgtagttaaagcaggt

SEQ ID NO: 61951 - protein, 589 aa, Klebsiella oxytoca; identical to SEQ ID NO: 47751

SEQ ID NO: 61952 - DNA, 50 bp, Klebsiella oxytoca; identical to SEQ ID NO: 45382
  source 1..50: mol_type = genomic DNA

SEQ ID NO: 61953 - DNA, 40 bp, Klebsiella oxytoca
  source 1..40: mol_type = genomic DNA
cctcggcgtgactattggcaacaccgacggcaacgttatc

SEQ ID NO: 61954 - DNA, 50 bp, Klebsiella oxytoca
  source 1..50: mol_type = genomic DNA
gattatacctattacacttcagtgggtactaaggtaaactacatcccatt

SEQ ID NO: 61955 - DNA, 40 bp, Klebsiella oxytoca
  source 1..40: mol_type = genomic DNA
cctaggtgtcactattggggggacagccagcatctttagc

SEQ ID NO: 61956 - protein, 493 aa, Faecalibacterium prausnitzii
MTAVIYARYSSDNQREESIEGQIRECTAYAEKNGITVVKHYIDRALSAKTDNRPDFQQMIKDSEKRLFDIVLVWKLDRFARNRYDSAHYEYQLERNHVKLVSATEPISDSPAGIMVKSMLTGMAEYYSAELSEKVVRGMTENVLKGKYNGGTIPIGFKVDEEKFFQVDPLKAPFVVEAFQRYNDGATMKELMNWLNDSGVTTNRNQKFTYNSVQTLLTNKRYIGENHFKDIVMPDSIPAIVDKDLFEEVQQKIKKNSRAPARHKAEDDYLLTTKLFCGMCGAMMFGECGTGRNKVVHHYYKCATAKRFKTCKKKTVRKEWLEDLVVAETMKLIQDDAVIDAIVAEVMELQDQENTTLPLLEKQMREVENGIENMLNAIQAGVLTNSTKSRLEKLEAQQKELEVRIAEEKIARPRLSENQVRFWLTRFRKLDPNMKSHRETLINTFVNAVYLYDEKVLITFNYKDGTKTITFDEIAAKDAPEGNGSDLGCFAPP

SEQ ID NO: 61957 - DNA, 50 bp, Faecalibacterium prausnitzii; identical to SEQ ID NO: 60447
  source 1..50: mol_type = genomic DNA

SEQ ID NO: 61958 - DNA, 40 bp, Faecalibacterium prausnitzii
  source 1..40: mol_type = genomic DNA
ggttcgaatccacccgcgcccaccaaaaagaccagcgtag

SEQ ID NO: 61959 - DNA, 50 bp, Faecalibacterium prausnitzii
  source 1..50: mol_type = genomic DNA
ggttcggatttaggttgcttcgcttaaccaaacaagaaaaatccgaacct

SEQ ID NO: 61960 - DNA, 40 bp, Faecalibacterium prausnitzii
  source 1..40: mol_type = genomic DNA
gtctcaaagccaccctccctaacccaaaagcccattgaag

SEQ ID NO: 61961 - protein, 547 aa, Streptococcus suis; identical to SEQ ID NO: 11466

SEQ ID NO: 61962 - DNA, 50 bp, Streptococcus suis; identical to SEQ ID NO: 11112
  source 1..50: mol_type = genomic DNA

SEQ ID NO: 61963 - DNA, 40 bp, Streptococcus suis
  source 1..40: mol_type = genomic DNA
tgtcgtcgatacttcaacagaagtcggacgtgcaatgtca

SEQ ID NO: 61964 - DNA, 50 bp, Streptococcus suis; identical to SEQ ID NO: 38444
  source 1..50: mol_type = genomic DNA

SEQ ID NO: 61965 - DNA, 40 bp, Streptococcus suis
  source 1..40: mol_type = genomic DNA
tgtcaatgatacttcacagccactcccacctgcattgtca

SEQ ID NO: 61966 - protein, 507 aa, Eikenella corrodens; identical to SEQ ID NO: 46741

SEQ ID NO: 61967 - DNA, 50 bp, Eikenella corrodens; identical to SEQ ID NO: 46737
  source 1..50: mol_type = genomic DNA

SEQ ID NO: 61968 - DNA, 40 bp, Eikenella corrodens
  source 1..40: mol_type = genomic DNA
tattaataatgtggcacgcccagggggaatcgaacccccg

SEQ ID NO: 61969 - DNA, 50 bp, Eikenella corrodens
  source 1..50: mol_type = genomic DNA
tcatagtacggaaagttggcacgctctactttccgtactacgaactcaga

SEQ ID NO: 61970 - DNA, 40 bp, Eikenella corrodens
  source 1..40: mol_type = genomic DNA
tattaataatttggcagtctcatgtggaagtcagccccta

SEQ ID NO: 61971 - protein, 485 aa, Faecalicoccus pleomorphus; identical to SEQ ID NO: 17466

SEQ ID NO: 61972 - DNA, 50 bp, Faecalicoccus pleomorphus; identical to SEQ ID NO: 17467
  source 1..50: mol_type = genomic DNA

SEQ ID NO: 61973 - DNA, 40 bp, Faecalicoccus pleomorphus
  source 1..40: mol_type = genomic DNA
ggttcgagtcccttcgcccgcaccaacaagtagaaaacgg

SEQ ID NO: 61974 - DNA, 50 bp, Faecalicoccus pleomorphus; identical to SEQ ID NO: 60774
  source 1..50: mol_type = genomic DNA

SEQ ID NO: 61975 - DNA, 40 bp, Faecalicoccus pleomorphus
  source 1..40: mol_type = genomic DNA
tgttccattcccttggaccctataagcaattggaaaactg

SEQ ID NO: 61976 - protein, 492 aa, Aeromonas salmonicida; identical to SEQ ID NO: 46671

SEQ ID NO: 61977 - DNA, 50 bp, Aeromonas salmonicida; identical to SEQ ID NO: 46672
  source 1..50: mol_type = genomic DNA

SEQ ID NO: 61978 - DNA, 40 bp, Aeromonas salmonicida
  source 1..40: mol_type = genomic DNA
ctgtggcggcgtgccgaccgacgtgcgcatcaccacccgc

SEQ ID NO: 61979 - DNA, 50 bp, Aeromonas salmonicida; identical to SEQ ID NO: 46672
  source 1..50: mol_type = genomic DNA

SEQ ID NO: 61980 - DNA, 40 bp, Aeromonas salmonicida
  source 1..40: mol_type = genomic DNA
ctgagtagctgtgactacagacgtgcccatcacccccagc

SEQ ID NO: 61981 - protein, 550 aa, Streptococcus pyogenes
MSKEKIKVYLYTRVSTSIQIDGYSLEAQKSRMKAFALYNDYEIVGEYEDAGKSGKSIEGRVQFTRMMEDIKSGKDGVSFVLVFKLSRFARNAADVLSTLQIMQDFGVNLICVEDGIDSSKDAGKLMISVLSAVAEIERENIRVQTMEGRIQKAREGKWNGGFAPYGYQLIDGKLLINEEEAIAIRTIFDQYVNTSIGANGISKYLENHGIRKIPRQNGKNPLFDAGLIRKILKNPVYNGKIAFGRRTLEKVHGTRNEYKQVEQDEYLISEGIHEAIVSDEVWQAAQVKLKSQAKKYEHVNKGKDTRTHLLSGIVKCPICGVGMFGNKCIKKKKDGTKYKDFYYYGCKHRQMIRGHKCTFSKQIREELLDDAVAEVIIKLVSNPKFASMMQEKINMKVDTSEIEKEIDNYQKELRKSHSTKFKLIEEIDNLDVEDKHYKRRKQDLDDRLYRMYDKIEELESLLIDAKAKKQTIEAEKLTGDNIYKILIYFDKLYKVMNDVERRQLITALISEIQIYEEKQPNGQWLKSITFKLPIIDEDLNIGLDNNEQVE

SEQ ID NO: 61982 - DNA, 50 bp, Streptococcus pyogenes
  source 1..50: mol_type = genomic DNA
ggtttggacaataatgagcaagttgagacggtagcgttattgtccaaact

SEQ ID NO: 61983 - DNA, 40 bp, Streptococcus pyogenes; identical to SEQ ID NO: 32898
  source 1..40: mol_type = genomic DNA

SEQ ID NO: 61984 - DNA, 50 bp, Streptococcus pyogenes
  source 1..50: mol_type = genomic DNA
ggtttggacaataatgagcaagtttggacggtagcgttattgtccaaact

SEQ ID NO: 61985 - DNA, 40 bp, Streptococcus pyogenes
  source 1..40: mol_type = genomic DNA
tgctgtaacacgttgcctctggtgagtagtgtagctaatc

SEQ ID NO: 61986 - protein, 550 aa, Streptococcus pyogenes; identical to SEQ ID NO: 51076

SEQ ID NO: 61987 - DNA, 50 bp, Streptococcus pyogenes; identical to SEQ ID NO: 51077
  source 1..50: mol_type = genomic DNA

SEQ ID NO: 61988 - DNA, 40 bp, Streptococcus pyogenes; identical to SEQ ID NO: 32898
  source 1..40: mol_type = genomic DNA

SEQ ID NO: 61989 - DNA, 50 bp, Streptococcus pyogenes
  source 1..50: mol_type = genomic DNA
ggtttggacaacgatgaacacgtttggacggtagcacttttgtccaaact

SEQ ID NO: 61990 - DNA, 40 bp, Streptococcus pyogenes; identical to SEQ ID NO: 61985
  source 1..40: mol_type = genomic DNA

SEQ ID NO: 61991 - protein, 550 aa, Streptococcus pyogenes; identical to SEQ ID NO: 45696

SEQ ID NO: 61992 - DNA, 50 bp, Streptococcus pyogenes; identical to SEQ ID NO: 12327
  source 1..50: mol_type = genomic DNA

SEQ ID NO: 61993 - DNA, 40 bp, Streptococcus pyogenes; identical to SEQ ID NO: 32898
  source 1..40: mol_type = genomic DNA

SEQ ID NO: 61994 - DNA, 50 bp, Streptococcus pyogenes
  source 1..50: mol_type = genomic DNA
ggtttggacaatgatgagcacgtttggacggtagcacttttgtccaaact

SEQ ID NO: 61995 - DNA, 40 bp, Streptococcus pyogenes; identical to SEQ ID NO: 61985
  source 1..40: mol_type = genomic DNA

SEQ ID NO: 61996 - protein, 550 aa, Streptococcus pyogenes; identical to SEQ ID NO: 51076

SEQ ID NO: 61997 - DNA, 50 bp, Streptococcus pyogenes; identical to SEQ ID NO: 51077
  source 1..50: mol_type = genomic DNA

SEQ ID NO: 61998 - DNA, 40 bp, Streptococcus pyogenes; identical to SEQ ID NO: 55338
  source 1..40: mol_type = genomic DNA

SEQ ID NO: 61999 - DNA, 50 bp, Streptococcus pyogenes; identical to SEQ ID NO: 61989
  source 1..50: mol_type = genomic DNA

SEQ ID NO: 62000 - DNA, 40 bp, Streptococcus pyogenes; identical to SEQ ID NO: 61985
  source 1..40: mol_type = genomic DNA

SEQ ID NO: 62001 - protein, 550 aa, Streptococcus pyogenes
MSKEKIKVYLYTRVSTSIQIDGYSLEAQKSRMKAFALYNDYEIVGEYEDAGKSGKSIEGRVQFTRMMEDIKSGKDGVSFVLVFKLSRFARNAADVLSTLQIMQDFGVNLICVEDGIDSSKDAGKLMISVLSAVAEIERENIRVQTMEGRIQKAREGKWNGGFAPYGYQLIDGKLLINEEEAIAIRTIFDQYVNTSIGANGISKYLENHGIRKIPRQNGKNPLFDAGLIRKILKNPVYNGKIAFGRRTLEKVHGTRNEYKQVEQDEYLISEGIHEAIVSDEVWQAAQVKLKSQAKKYEHVNKGKDTRTHLLSGIVKCPICGVGMLGNKCIKKKKDGTKYKDFYYYGCKHRQMIRGHKCTFSKQIREELLDDAVAEVIIKLVSNPKFASMMQEKINMKVDTSEIEKEIDNYQKELRKSHSTKFKLIEEIDNLDVEDKHYKRRKQDLDDRLYRMYDKIEELESLLIDAKAKKQTIEAEKLTGDNIYKVLIYFDKLYKVMNDVERRQLISALISEIQIYEEKQPNGQWLKSITFKLPIIDENINIGLDNDEHVE

SEQ ID NO: 62002 - DNA, 50 bp, Streptococcus pyogenes; identical to SEQ ID NO: 51077
  source 1..50: mol_type = genomic DNA

SEQ ID NO: 62003 - DNA, 40 bp, Streptococcus pyogenes; identical to SEQ ID NO: 32898
  source 1..40: mol_type = genomic DNA

SEQ ID NO: 62004 - DNA, 50 bp, Streptococcus pyogenes; identical to SEQ ID NO: 61989
  source 1..50: mol_type = genomic DNA

SEQ ID NO: 62005 - DNA, 40 bp, Streptococcus pyogenes; identical to SEQ ID NO: 61985
  source 1..40: mol_type = genomic DNA

SEQ ID NO: 62006 - protein, 472 aa, Ruminococcus gnavus
MSARYAYGYVRVSTDKQEELSPDSQEKLLREYAAKNNIIILKVFFEIGISGRKADKRPEFQKMIGLAKSSDHPVDVILVWKFSRFARNQEESIVYKSLLRKQSNVDVVSVSEPLIDGPFGSLIERIIEWMDEYYSIRLSGEVLRGMKEKATKKGYQMSPPFGYRAVGNGDPYKIDQDEMKIVDFICDEFDYHNSDVTKITRKLNDMGVRTRRGNPFESRSVERILKNPFYYGLVAWNGITFMGTHEVHYSKERFEARMKKIQTTYKPLKRRDVSSCKHWLSGILKCGYCGASLAYNGANRHSPGFQCYKYSKGIHTESCSISEKKVIAALEEYFEKLLSGMDFEYSYHSAETGEKISERESLLSELDKISNREKRVRLAYENEVDTLEEYKRNKERLQKDREDILEQLKNLDKNNEDTKTKSDVLKNVQTVYDVIKNDAIDYDTKGIFMRSLVEDIVYDKKNGKLIFHLYIS

SEQ ID NO: 62007 - DNA, 50 bp, Ruminococcus gnavus
  source 1..50: mol_type = genomic DNA
tgttataggttactgcaatccgggccaccaaatagcaataacctataata

SEQ ID NO: 62008 - DNA, 40 bp, Ruminococcus gnavus; identical to SEQ ID NO: 57933
  source 1..40: mol_type = genomic DNA

SEQ ID NO: 62009 - DNA, 50 bp, Ruminococcus gnavus
  source 1..50: mol_type = genomic DNA
tgttataggttactgcaatccgggcaaccaaatagcaataacctataata

SEQ ID NO: 62010 - DNA, 40 bp, Ruminococcus gnavus
  source 1..40: mol_type = genomic DNA
ggagagatccacatccacgcagccaaattgccagatgaac

SEQ ID NO: 62011 - protein, 458 aa, Gordonia polyisoprenivorans
MTKAIIYARISKDRVGAGLGVERQAQDCRELAERLGWSVLRVESDNDISAYSGKPRPAYRRTLAALESGEANAVIAWHTDRLHRRNVELEPFLDVVERTGAQVATVKAGPVDLASPSGRMTARILGAVAQQEVEHNRQRVIAEKRQALAAGKYRGGARPFGYEADGVTVREDEAEAIRRATTALLAGESVGSIVRLWNDTFAPPQRARQWSRPAVTAVLKRARNAGKTESKGEIVGDALWPAIVPLDDVLAVRAMLSDPSRRTAVGAPRRWQGSNVYICAETGEPMTTAKARDSDRREYRPKSRRAGVCVTAELIDEYVSTVICERLSRPDARELLSAPGIDTEALTAKRAGIEARLDESAGLYAAGVLTAAQLTRATADLRAQLDAVDSELASAVNDADLAALVGAEDVRATWDALAVDTRARIIRTLVRVTVSRHGARGKARIFTPDAVTIEWLND

SEQ ID NO: 62012 - DNA, 50 bp, Gordonia polyisoprenivorans
  source 1..50: mol_type = genomic DNA
taccgtcgtaattagcaccgcgccgaggcgagacacgaattaggacggta

SEQ ID NO: 62013 - DNA, 40 bp, Gordonia polyisoprenivorans
  source 1..40: mol_type = genomic DNA
gccgacgatcaggcgcgccgaggcgagattgagaacggga

SEQ ID NO: 62014 - DNA, 50 bp, Gordonia polyisoprenivorans
  source 1..50: mol_type = genomic DNA
taccgtcgtaattagcaccgcgccatggcgagacacgaattaggacggta

SEQ ID NO: 62015 - DNA, 40 bp, Gordonia polyisoprenivorans
  source 1..40: mol_type = genomic DNA
gctgaggatcaggtacaccatgccgaggctgaggaccaga

SEQ ID NO: 62016 - protein, 475 aa, Streptomyces albus
MKEATPGRSWSAADLELLDALKKTEEALPADAPRALLSVRLSVLSSNTTSPVRQELDLRMLAGDRGYRVAGVASDLHVSATKVPPWRRKELGEWLNNRVPEFDALLFWQLDRLIRSSADLSVMIDWCDRHGKNLVSRNDPIDLATESGRELVRLMGSVAEIEGTRGSVRAASLWRYSRSQESWLVGRPAYGFTVVAEGGRSRLAVRPEAAKALHWARRMALRGVSARRMAVCLRRSGLMSDGLTTATLLRRLRNPALLGHRVEEDKTCEGRRSRSVLDASGKPIRVAPAIFTDEEFAGLQEALDRRAKRQPPRRRGGTTQFAGVLVCADCSGNMTVQTTRNKGRVYSYLRCARCRNGGMGAPDPESVYRRLAEDVLKALGELPVQTRRYVPATGSAQGSRSRWEVVGQERNHRQLWEEGGREAMAEDLLRAGVTCAVRRTRARGTRAPSVDLKLRVPADAPARLVVRAEEFPSTP

SEQ ID NO: 62017 - DNA, 50 bp, Streptomyces albus
  source 1..50: mol_type = genomic DNA
gcggggagggtcttctcggcgcaggcggaggccctacgggctgtcgctta

SEQ ID NO: 62018 - DNA, 40 bp, Streptomyces albus
  source 1..40: mol_type = genomic DNA
cgctgcaccgtcggcgcgggccatccagcggtcgtagctg

SEQ ID NO: 62019 - DNA, 50 bp, Streptomyces albus
  source 1..50: mol_type = genomic DNA
gcggggagggtcttctcggcgcaggtggaggccctacgggctgtcgctta

SEQ ID NO: 62020 - DNA, 40 bp, Streptomyces albus
  source 1..40: mol_type = genomic DNA
ggctgtgcggtgggggcaggtcatccaggggtcacggctg

SEQ ID NO: 62021 - protein, 478 aa, Glutamicibacter protophormiae; identical to SEQ ID NO: 56011

SEQ ID NO: 62022 - DNA, 50 bp, Glutamicibacter protophormiae
  source 1..50: mol_type = genomic DNA
gacaacaagtgctacaacccaggcatgcgttagcgcatatcgtggttaca

SEQ ID NO: 62023 - DNA, 40 bp, Glutamicibacter protophormiae
  source 1..40: mol_type = genomic DNA
tggcaccggagtgatcgacatgcgctacgagaacccgctg

SEQ ID NO: 62024 - DNA, 50 bp, Glutamicibacter protophormiae
  source 1..50: mol_type = genomic DNA
gacaacaagtgctacaacccaggcccgcgttagcgcatatcgtggttaca

SEQ ID NO: 62025 - DNA, 40 bp, Glutamicibacter protophormiae
  source 1..40: mol_type = genomic DNA
cggcaccggagctctcggcccggcccacgaggaaccgcgg

SEQ ID NO: 62026 - protein, 533 aa, Geomonas nitrogeniifigens
MPKAYSYLRFSRPEQSQGDSFRRQYEAAKKYADEHGLDLDESLTFHDEGVSAYQGKQIETGRLGDFLHEVKQGRVEEGSFLLVESLDRISRQSARKAQRILEDICEEGITVVTMIDGRKYDKHALDSDPMALIMSLFTFFRAHDESETKATRLKAAWHAKRANIKKKPLTSKAPLWLRLNKDACRFELIEERAKLIRQMFDLYLRGTGPAGIAKQFNRERVPAWGRSGFWFESYITKILNNPAVYGVCIPHRLEHEDGKKNRVPLEPVAGYFPIVIEEETFVLSQDIKASRGLKGRKVSTPLCNIFSRLSRCPVCGSSMIFVNKGATFQYLACHAAKTGVGVCKYRSVPYYRLEASFIEAVRAGLKVPVDADKLLRIEESLLNHELAMNTAIQERRNIVDAVKAGTFSNDTVLYDSFPRTVLSDIVQEEGPIYFQEWGPRVLQDEIETLNTIIEANRKTIVNLKGQLNLIRPTAVEARIKELETVAKEQPLNRARFNAGLRTICDKVVVQYDHAVIDMHFKHTDLVLSVPVSM

SEQ ID NO: 62027 - DNA, 50 bp, Geomonas nitrogeniifigens
  source 1..50: mol_type = genomic DNA
ttgggtcttgctgactacaacgtgagcatgttatattgtactggacctac

SEQ ID NO: 62028 - DNA, 40 bp, Geomonas nitrogeniifigens
  source 1..40: mol_type = genomic DNA
ccccggcgggccgatcatcaggaggttgtgcgagccggcg

SEQ ID NO: 62029 - DNA, 50 bp, Geomonas nitrogeniifigens
  source 1..50: mol_type = genomic DNA
ttgggtcttgctgactacaacgtggccatgttatattgtactggacctac

SEQ ID NO: 62030 - DNA, 40 bp, Geomonas nitrogeniifigens
  source 1..40: mol_type = genomic DNA
cccacgtgggcggagcagcgcgagggtgtgcgtggcaggg

SEQ ID NO: 62031 - protein, 487 aa, Coriobacteriaceae bacterium
MGGRAAIYARFSSHNQRGESIEIQVEKSRAYCAENDLRVVATYCDFAQTGTNTDRAEFQRMMADAKRGLFDFVVIYKVTRIMRNRDEMAMARIMLRRCRVEILYAGEDISDGSAGVLQLGMLEVLAEYESALDGERIRDGIQKNAERCMANGCVRYGWDIVDGRYVVNEEEAAAIRLGVRMVLSGKSVADVVRAWEPYRTKRGGKWRFQTVRRILMRRENGGEYRYAGVVVPGGMPAIVPMDDEERVIRMLEDSHRPRAKTETWDFPLTGRLYDGRDGGLMTGTSGTGKSGRPYHYYRCRSCGRTVRRDVVEKRVADAVREALGSADSRERIARMLADAEEERADEKPLSETVKGELAKIETAFSNIWAAIESGIAPPGGKERIDALKQRQALLKDELRTAEALEAARLDYDRALFWLEGMAAAEVDDAQLLRTFVARVVLGGPDDDDGLRVAFTFDDSAGLGDNPSLPGAIGPGGEVFDRMNASST

SEQ ID NO: 62032 - DNA, 50 bp, Coriobacteriaceae bacterium
  source 1..50: mol_type = genomic DNA
tgttcgaccgaatgaacgccagctccaccaactgttcagtaggcgaacac

SEQ ID NO: 62033 - DNA, 40 bp, Coriobacteriaceae bacterium
  source 1..40: mol_type = genomic DNA
agttcgattctccgcgcctccaccataagtaacaggcagg

SEQ ID NO: 62034 - DNA, 50 bp, Coriobacteriaceae bacterium
  source 1..50: mol_type = genomic DNA
tgttcgaccgaatgaacgccagctggaccaactgttcagtaggcgaacac

SEQ ID NO: 62035 - DNA, 40 bp, Coriobacteriaceae bacterium
  source 1..40: mol_type = genomic DNA
agttctctgctctgaacctggcctgtaaggcacaggcagg

SEQ ID NO: 62036 - protein, 487 aa, Collinsella sp
MGGRAAIYARFSSHNQRGESIEIQVEKSRAYCAENDLRVVATYCDFAQTGTNTDRAEFQRMMADAKRGLFDFVVIYKVTRIMRNRDEMAMARIMLRRCRVEILYAGEDISDGSAGVLQLGMLEVLAEYESALDGERIRDGIQKNAERCMANGCVRYGWDIVDGRYVVNEEEAAAIRLGVRMVLSGKSVADVVRAWEPYRTKRGGKWRFQTVRRILMRRENGGEYRYAGVVVPGGMPAIVPMDDEERVIRMLEDSHRPRAKTEAWDFPLTGKLYDGRDGGLMTGTSGTGKSGRPYHYYRCRSCGRTVRRDVVEKRVADAVREALGSADSRERIARMLADAEEERADEKPLSETIKGELAKIETAFSNIWTAIESGIAPPGGKERIDALKQRQALLKDELRTAEALEAARLDYDRALFWLEGMAAAEVDDAQLLRTFVARVVLGGPDDDDGLRVAFTFDDSAGLGDNPSLPGAIGPGGEVFDRMNASST

SEQ ID NO: 62037 - DNA, 50 bp, Collinsella sp; identical to SEQ ID NO: 62032
  source 1..50: mol_type = genomic DNA

SEQ ID NO: 62038 - DNA, 40 bp, Collinsella sp; identical to SEQ ID NO: 62033
  source 1..40: mol_type = genomic DNA

SEQ ID NO: 62039 - DNA, 50 bp, Collinsella sp; identical to SEQ ID NO: 62034
  source 1..50: mol_type = genomic DNA

SEQ ID NO: 62040 - DNA, 40 bp, Collinsella sp; identical to SEQ ID NO: 62035
  source 1..40: mol_type = genomic DNA

SEQ ID NO: 62041 - protein, 487 aa, Collinsella aerofaciens
MGGRAAIYARFSSHNQRGESIEIQVEKSRAYCAENDLRVVATYCDFAQTGTNTDRAEFQRMMADAKRGLFDFVVIYKVTRIMRNRDEMAMARIMLRRCRVEILYAGEDISDGSAGVLQLGMLEVLAEYESALDGERIRDGIQKNAERCMANGCVRYGWDIVDGRYVVNEEEAAAIRLGVRMVLSGKSVADVVRAWEPYRTKRGGKWRFQTVRRILMRRENGGEYRYAGVVVPGGMPAIVPMDDEERVIRMLEDSHRPRAKTEAWDFPLTGKLYDGRDGGLMTGTSGTGKSGRPYHYYRCRSCGRTVRRDVVEKRVADAVREALGSADSRERIARMLADAEEERADEKPLSETIKGELAKIETAFSNIWAAIESGIAPPGGKERIDALKRRQALLKDELRTAEALEAARLDYDRALFWLEGMAAAEVDDAQLLRTFVARVVLGGPDDDDGLRVAFTFDDSAGLGDNPSLPGAIGPGGEVFDRMNASST

SEQ ID NO: 62042 - DNA, 50 bp, Collinsella aerofaciens; identical to SEQ ID NO: 62032
  source 1..50: mol_type = genomic DNA

SEQ ID NO: 62043 - DNA, 40 bp, Collinsella aerofaciens; identical to SEQ ID NO: 62033
  source 1..40: mol_type = genomic DNA

SEQ ID NO: 62044 - DNA, 50 bp, Collinsella aerofaciens; identical to SEQ ID NO: 62034
  source 1..50: mol_type = genomic DNA

SEQ ID NO: 62045 - DNA, 40 bp, Collinsella aerofaciens; identical to SEQ ID NO: 62035
  source 1..40: mol_type = genomic DNA

SEQ ID NO: 62046 - protein, 487 aa, Collinsella aerofaciens
MGGRAAIYARFSSHNQRGESIEIQVEKSRAYCAENDLRVVATYCDFAQTGTNTDRAEFQRMMADAKRGLFDFVVIYKVTRIMRNRDEMAMARIMLRRCRVEILYAGEDISDGSAGVLQLGMLEVLAEYESALDGERIRDGIQKNAERCMANGCVRYGWDIVDGRYVVNEEEAAAIRLGVRMVLSGKSVADVVRAWEPYRTKRGGKWRFQTVRRILMRRENGGEYRYAGVVVPGGMPAIVPMDDEERVIRMLEDSHRPRAKTEAWDFPLTGKLYDGRDGGLMTGTSGTGKSGRPYHYYRCRSCGRTVRRDVVEKRVADAVREALGSADSRERIARMLADAEEERADEKPLSETIKGELAKIETAFSNIWAAIESGIAPPGGKERIGALKQRQALLKDELRTAEALEAARLDYDRALFWLEGMAAAEVDDAQLLRTFVARVVLGGPDDDDGLRVAFTFDDSAGLGDNPSLPGAIGPGGEVFDRMNASST

SEQ ID NO: 62047 - DNA, 50 bp, Collinsella aerofaciens; identical to SEQ ID NO: 62032
  source 1..50: mol_type = genomic DNA

SEQ ID NO: 62048 - DNA, 40 bp, Collinsella aerofaciens; identical to SEQ ID NO: 62033
  source 1..40: mol_type = genomic DNA

SEQ ID NO: 62049 - DNA, 50 bp, Collinsella aerofaciens; identical to SEQ ID NO: 62034
  source 1..50: mol_type = genomic DNA

SEQ ID NO: 62050 - DNA, 40 bp, Collinsella aerofaciens; identical to SEQ ID NO: 62035
  source 1..40: mol_type = genomic DNA

SEQ ID NO: 62051 - protein, 486 aa, Enterocloster bolteae
MPATPLEIGAAYVRVSTDDQTELSPDAQIRVIMDAAKADGFIIPKEYIFIEKKGISGRKADNRPEFQRMIAIAKSQKPAPFKRLYLWKFSRFARNQEESTFYKGILRKKCDVEIKSVSEPIMEGMFGRLIETIIEWFDEYYSINLSGEVLRGMTEKALREGYQATPCLGYRAVGEGKPFAVEEKSYAIVEYIFQTYHNGKDMTATARAANARGYRTRRGNLFDRRGINRILANRFYIGEVIWNGYSFQGTHEVRSSVTSLFDDVQKRIEKEYRPHKRREVSNNVHWLSGLLKCSICGGSLGYNRSNDQKKRPDFFQCWKYAKGMHPGSCCLAVHLAEKAVIESLEEVLETNELEYEYIQKTDDAVNAEEIAIQEALVRLEVKERRIREAYENEIDTLEEYKQNKLRLRAEREELMADAERLRRQAEQSPAKVPSKEDIMRQIAHVHEILADPNISYEIKGNALRKIVKEIVFDRGKGHLHIHFYIS

SEQ ID NO: 62052 - DNA, 50 bp, Enterocloster bolteae
  source 1..50: mol_type = genomic DNA
tatcataggttattgccgtccggcccaccggatgtcaataacatatgatt

SEQ ID NO: 62053 - DNA, 40 bp, Enterocloster bolteae
  source 1..40: mol_type = genomic DNA
gcccatttcgccgtccggcccaccatactgactcattata

SEQ ID NO: 62054 - DNA, 50 bp, Enterocloster bolteae
  source 1..50: mol_type = genomic DNA
tatcataggttattgccgtccggcctaccggatgtcaataacatatgatt

SEQ ID NO: 62055 - DNA, 40 bp, Enterocloster bolteae
  source 1..40: mol_type = genomic DNA
gcccatttggacttctgacctacaaaactgaaagataata

SEQ ID NO: 62056 - protein, 552 aa, Clostridium innocuum
MAISRNKSKPAKKVFYFSKYLRKSSEEEDSRSIHNQDSVLDAEIQKIIDADVYNDYVYVDTYCDEDYTGTDSERPDFKRLLRDISSGKVNMIVVTDLSRLSRNITESTNYVQVLFVALGVRFISIQLPALDSYLDPNKVYSLEVPMHGMFNENHAAETSFKVRRTFDNEREQGKFIGAFAGYGWKKDPEDRHKLLLDQEPYEVMQMMKEWVFDGASASMVKTKLNELGIPSPAGYKKKQGMKFNVSQERTTFLWSAEMVKRLMLRPENVGDLVQGRYRVISYKVHKKISVPENEWFICEDAIPAIYTREEQRLITDALKKRTRVSPTNKKQEVYLFSGFLKCGDCGKGMTRITSKNHVYYACNTYKKYGPKACASHMMEHEILESTVLLAIQNQIKIAVDMENVLKKVDKAPLLRRKSDGYDKSIREKSRELAKIQLYKTGLYEDWKNGDLTQSEYRQMKSKYIDEEEKLISIIANLEDEKKKLEKVKDKKNPFLTEFRKHQNLKKLSRDILIELVDRITIHKDNNITIHFKFADDYKRIVDCLNDCADLVE

SEQ ID NO: 62057 - DNA, 50 bp, Clostridium innocuum
  source 1..50: mol_type = genomic DNA
ggttttcctaatcagcatgcgggggtcgccccatacggataaggaaaaca

SEQ ID NO: 62058 - DNA, 40 bp, Clostridium innocuum
  source 1..40: mol_type = genomic DNA
ggtgtttcccatagccccggtcggtcccgtagcacctgtt

SEQ ID NO: 62059 - DNA, 50 bp, Clostridium innocuum
  source 1..50: mol_type = genomic DNA
ggttttcctaatcagcatgcggggtacgccccatacggataaggaaaaca

SEQ ID NO: 62060 - DNA, 40 bp, Clostridium innocuum
  source 1..40: mol_type = genomic DNA
ggtgggcaccacagccctttacagtcacttagcacctgct

SEQ ID NO: 62061 - protein, 568 aa, Sorangium cellulosum
MGQVQQMKDATPNTAIRRTLGYPRVSTREQEIAGVSLDAQAEKIGNYCRLHSLPEPILFPEVESGGEENEANRKKVAALLADVRRGDMVIVTDIDRFGRDVVFIVKNVRQIMRKGAVFVAIDKGFDSRSPMAEDTLANWAVGAEQERRRIKERTEGGRKHLRVQGYFVEGRPPFGYERQPKPKGTKMPLPLRVVPEHAVVVRRMFALSLEGRSVFEIAKRLRQEYGNVKAFGRAWVLIALRNRVYTGRIAKTAVRPKATRGAVQLPAEWVPAHEAIVDDETFNNVQLALRDRRRGRKPQAESATANHLLRGICRCAECGGSVAAIPVPRSSRHKVGYYVCRGHVEQKEKGVRCKSSAWLRQPDADAAAGEQFMAFTSSLLTSLTRPPRQIEKPDFAAQRREIKIARQRVVEFVAKRLFTVEDVKVELNRLDDSLAAIEAKEAEFKETVGNDTIETRKHAHAYVQQIADEWSILQVDVQRALIRAFSSKVEATKDKQIRITWRDPSQISAAHGAQELPALRPAPIAVALPVPSTVTSLSTNVAALPAPSMSARDYLGSSESAPAPVRGR

SEQ ID NO: 62062 - DNA, 50 bp, Sorangium cellulosum
  source 1..50: mol_type = genomic DNA
cgtgtagaatttgtttccctcttgcagagctgcggagcttttgttagacg

SEQ ID NO: 62063 - DNA, 40 bp, Sorangium cellulosum
  source 1..40: mol_type = genomic DNA
ggccaggacgccgctcttccagaagcgatccccgaagacg

SEQ ID NO: 62064 - DNA, 50 bp, Sorangium cellulosum
  source 1..50: mol_type = genomic DNA
cgtgtagaatttgtttccctcttgttgagctgcggagcttttgttagacg

SEQ ID NO: 62065 - DNA, 40 bp, Sorangium cellulosum
  source 1..40: mol_type = genomic DNA
ggcgtagtcgcggatcttcttgacgcgctccacgcagccg

SEQ ID NO: 62066 - protein, 515 aa, Bacillus toyonensis
MKTAIYLRKSRADLEAEARGEGETLAKHRTTLLKIAKEMNLNVLSVREEIVSGESLVKRPEMLALLEEIEDNKYDVVLCMDMDRLGRGGMKEQGIILETFKRSNTKIMTPRKTYDLNDEWDEEYSEFEAFMARKELKIITRRMQRGRVASVEAGNYLGTHAPFGYDIHRLNKRERTLTINSEEASVVRMIFDWYANEDMGANAIRSKLNDLGYKSKLGNEWNPYSILDILKNNVYIGKVTWQKRKEVKRPDAVKRSCARQDKSEWIIADGKHEPIIPESLFEQVQEKLNSRYHIPYNTNGIKNPLAGIIKCSKCGYSMVQRYPKNRKETMDCKHRGCENKSSYTELIEKRLIEALKEWYINYKADFEKHKQDDKLKETQVIQMNEAALRKLDKELVDVQKQKNNLHDLLERGVYTVDMFLERSNVVSDRITEITSTMENLKKEIKTEIKKEKVKKDTIPQVEHVLDLYFKTDDPKKKNSLLKSVLEKAVYKKEKWQRLDDFELVLYPKLPQDGDI

SEQ ID NO: 62067 - DNA, 50 bp, Bacillus toyonensis; identical to SEQ ID NO: 1612
  source 1..50: mol_type = genomic DNA

SEQ ID NO: 62068 - DNA, 40 bp, Bacillus toyonensis
  source 1..40: mol_type = genomic DNA
tgtggccattaggcgcatgaggttgactccattaagccct

SEQ ID NO: 62069 - DNA, 50 bp, Bacillus toyonensis; identical to SEQ ID NO: 1612
  source 1..50: mol_type = genomic DNA

SEQ ID NO: 62070 - DNA, 40 bp, Bacillus toyonensis
  source 1..40: mol_type = genomic DNA
tggggctattaggtgcttgagattgtcaacaaaaagccat

SEQ ID NO: 62071 - protein, 576 aa, Pseudomonas juntendi
METLKIDRSKPLAIAYVRWSSTVQGGDDKDSYDRQTSPLEFFTSSTGVPVVETIIDPGQSAFTGENSKKGKLKGILDRIESGEIRKGDFLVVESIDRITRMRVLDGVALIQDGILKKGVKLYTTTDNKTYSYEDPEKDFENLLMISLIAKRANEESEIKSKRRRSAWNKAKTKATDGVPFNAHNPPYGLRYDPEENRFEIVKDEAIEIKKIFEGLKYEGVSNTLKKVNLTSKRKWSRKTVHLMLTSRYPIGTLMSQKRDGKTKVFERYIENYYPAILTHKEFQDALQAMKQRGKVKDYGRNTEGYLNIFKHCVKCAVCGQSLMFEKSINKKGIKYGYFHCWTRKETLSHCDVPRFRFDFAFGTLLQLVKQLTCEEDCDVHPWASEMPADYNSTMADDENDIENFENQFLSLFSKSTATEEVKTDFYKAENELAKAKSIYENLTASFSQFSDGRIPSFFIKQMSDAEQAYENAKADVDALSAQIDNAESSLEIYSYKDIIDLYSSDEGRLKLNHFFKSNGFKFIFNYEAKTRTLFMTVRDKADAEIYRVGKKFTLHNPLKEFGIDNLNEQMNSVLKV

SEQ ID NO: 62072 - DNA, 50 bp, Pseudomonas juntendi
  source 1..50: mol_type = genomic DNA
tgtgttagaaaagactaccccttggagagcggaaagacgtatcatacact

SEQ ID NO: 62073 - DNA, 40 bp, Pseudomonas juntendi; identical to SEQ ID NO: 57543
  source 1..40: mol_type = genomic DNA

SEQ ID NO: 62074 - DNA, 50 bp, Pseudomonas juntendi
  source 1..50: mol_type = genomic DNA
tgtgttagaaaagactaccccttgaagagcggaaagacgtatcatacact

SEQ ID NO: 62075 - DNA, 40 bp, Pseudomonas juntendi
  source 1..40: mol_type = genomic DNA
ggtgttacgggagccaatgaagagttctaaaatggagagt

SEQ ID NO: 62076 - protein, 480 aa, Paenibacillus pabuli
MNNVAAYIRVSTDEQADKGNSLNEQQERLKAYCVAMGWSEPIFYIDDGYSAKDLRRPAIKKLLDDVTKGKIQIVLTSKLDRLCRNLLDLLQTVKLLTQYNCSYVSASESFDTSTAVGRMTLQLLGTFAEFERERTSERVKDNMISLAKNTDRAIVGPCYGYDVIDKKYVINEEEAKNVRYMFELAEQGDGYRMIAKKLNDRGITTKRNKMFDQTNVKRLITNQALTGTMIYNKRSTKDSKTTFRDESEWIVKEGNHTPIIPIEQFEKVQEILRSRSRARKHADNETYLLTGLAICGHCERNMKGSTARVKNKYNEYTYYRYICGSYQLGYGCKHHAVHREDLETLIIEQVRELVAASTKELNINISPKASAIDEIKDLKLQLSKVGNKMQKQIEAFENDLITAEDLKMARKRVEADRDSLTKRISQLLSKRHEAETVQENAALMLPVILGADRLKAKQAIRQIIEQVTITDGVNIEIVWK

SEQ ID NO: 62077 - DNA, 50 bp, Paenibacillus pabuli
  source 1..50: mol_type = genomic DNA
gttatgcctcagtatacaatcggttctcctattgtatactgaggcaaaac

SEQ ID NO: 62078 - DNA, 40 bp, Paenibacillus pabuli
  source 1..40: mol_type = genomic DNA
gtacaaatccgcgataggatctcccttcgaggcaatatag

SEQ ID NO: 62079 - DNA, 50 bp, Paenibacillus pabuli
  source 1..50: mol_type = genomic DNA
gttatgcctcagtatacaatcggtgttcctattgtatactgaggcaaaac

SEQ ID NO: 62080 - DNA, 40 bp, Paenibacillus pabuli
  source 1..40: mol_type = genomic DNA
ttacaaatccctcatacgagttcccttagaggaaaaaata

SEQ ID NO: 62081 - protein, 507 aa, Brevibacterium aurantiacum
MEANTATRPSDTAALIYTRASMDRHYLMRSTDDQETDCRSWCDQQGWKVARVITDANRSASQWRTREREGFEEALQLIASRQYAAFVTWEPSRAGRELAAYIQLRAACQAAGVLYLTKGRVYDFARSDDAFMMGLEFLTAEKDAAVIRERQLRTVRLNAQKGRPHGRLPYGYRRVYDPSTGALLRQEIDPEKAAIITSAVDEILHGVPVNRIVTRLNREGVPTPMKPLSDKSRGWMNATLVQIIRSPTVAGLRKYQGEVIGEADWPAIIPVETWEKVNRVLADKARRTRYVEEDNHSHPKWLLSFVARCGFCGRFLARVLNVIPRKNGKLRNNYVCQHIGCRRISIDVERTDAYVLEALLSWLSTPESLAVLAGPDDNWSDRVREAEEQAATLRDRLDEAAEQYAEGKISLAMLANVEQRLTPQIEQAAREAVPPVADEAVLDLINANDIRAAWDLLDLLEQRRLLKMLLDIRIEKSRLMGGVFDYERIKIAPRFVTPETYQWRRLA

SEQ ID NO: 62082 - DNA, 50 bp, Brevibacterium aurantiacum
  source 1..50: mol_type = genomic DNA
caacccgcctcggacatgctcggttcacccagcattgctgaggcagatat

SEQ ID NO: 62083 - DNA, 40 bp, Brevibacterium aurantiacum
  source 1..40: mol_type = genomic DNA
gtcgacgtcgttggtcggctcatcgaggatgatgacattg

SEQ ID NO: 62084 - DNA, 50 bp, Brevibacterium aurantiacum
  source 1..50: mol_type = genomic DNA
caacccgcctcggacatgctcggtccacccagcattgctgaggcagatat

SEQ ID NO: 62085 - DNA, 40 bp, Brevibacterium aurantiacum
  source 1..40: mol_type = genomic DNA
gctgaattcatcggtcagaccctctaggatgatgtcattg

SEQ ID NO: 62086 - protein, 581 aa, Faecalibacterium prausnitzii
MKDVEVIKARNTLSPRARTNFEKRLRVAAYCRVSTDTEDQLNSYKSQVEYYTELIKSKPEWSLAGIYADEAITGTQVKKREDFQRLINDCMNGDVDMVITKSISRFARNTLDTLKYVRMLKDKGVAVFFEEENINTLTMDGELLLVILSSVAQQEVENISANVKKGLKMKMQRGELVGFQGCLGYDYNPEDKTLTVNEEEAAVVRYIFQRYTEGAGGSVIAKELENLGYKTKRGSPKWADSTVIGIIKNEKYKGDILLGKTFTVDPISKRRLYNFGEEDQFYIREHHEPIISEEVFEAAQEILRRRAKPRSLNVDGKREKFSRKYAFSCMIECGFCGGTLTRRSWHSSSQYNKAIWQCVVSTKKGKKFCPESKGVDERTIERAFIESYRLLCQNNKDVLDEFMKRTEEALSESNAGKRLAKAEKDIHALEVKKNKLVDMRLEDTIDKETYDRKYLDLSSQIEQLQKECESLQDAAETESTMRKRVATFRQTLEQNEVLDTFDRHIFESIVEKVIVGGYDSNGNKDPYMIVFVYKTGFKNSVDGKNFKPLRKNSKENHSPAVLCSHASNEAESMCSDSSDDT

SEQ ID NO: 62087 - DNA, 50 bp, Faecalibacterium prausnitzii
  source 1..50: mol_type = genomic DNA
tgtgttccgattctagcgacgacacacgtcgaagcgatagtttcgctaca

SEQ ID NO: 62088 - DNA, 40 bp, Faecalibacterium prausnitzii; identical to SEQ ID NO: 34378
  source 1..40: mol_type = genomic DNA

SEQ ID NO: 62089 - DNA, 50 bp, Faecalibacterium prausnitzii
  source 1..50: mol_type = genomic DNA
tgtgttccgattctagcgacgacagtcgtcgaagcgatagtttcgctaca

SEQ ID NO: 62090 - DNA, 40 bp, Faecalibacterium prausnitzii
  source 1..40: mol_type = genomic DNA
tatttttccaaataaggatgttattcagactgtatgtaga

SEQ ID NO: 62091 - protein, 549 aa, Streptomyces lydicus
MTTDTPEASIPARALPRARRRKGVPASAPGMRAALYVRLSRETEESTSPERQRAACEALCEARGWKIVAIEEDIDVSGYSRGLDRPGLQRILARLTEFDVIVFFKIDRLARSTVDFAEIMKITQNGGVALASASEPLDLTSSMGRAMAKVIAVFAELESDTIGMRVSNAHEHLRREGRWTGGRVPYGYQVVPNPDGPGRILVVHPEEAQTVRKIVERVLAKDSLMKIATDLSKSDVPSPGHSSRQSTGKRSDSKQWYTSTLKSLLTNPQLLGQVIEDGKPILRTDGLPLVTRPPILDMDMWQALQDELKRRAGAGDQRRHGTSLLRAVLYCGVCHSRMYTYTSKGKLRYRCIGRLKQRQRTGEQGACYGPSVPAEHTEGHVTDLFLEKLGPAEVVRMVEHAGEDFRPQIRQAEEALSDLEKDRYERGLFKGEDGAKRYADQYAKLEDRLASLKDMQRDAKPAGVEAVPTGQTYGELWKAASVEGKRDLLLDAGAYVEVAPAKRGARRMDTSRLAVFFGEEGKLRRADADGKDVGEAVRDAVAAIDLDLA

SEQ ID NO: 62092 - DNA, 50 bp, Streptomyces lydicus
  source 1..50: mol_type = genomic DNA
gtatgtgcatcacacttgatcgcttggacgatcaagcaggacacacatac

SEQ ID NO: 62093 - DNA, 40 bp, Streptomyces lydicus
  source 1..40: mol_type = genomic DNA
gagcagcgtcttgtcgctctggacgatgagaggtccgttc

SEQ ID NO: 62094 - DNA, 50 bp, Streptomyces lydicus
  source 1..50: mol_type = genomic DNA
gtatgtgcatcacacttgatcgcttcgacgatcaagcaggacacacatac

SEQ ID NO: 62095 - DNA, 40 bp, Streptomyces lydicus
  source 1..40: mol_type = genomic DNA
gagcagtgttttgtagttctccttgaagagaggtccttca

SEQ ID NO: 62096 - protein, 580 aa, Methylocystis rosea
MRKHDRPKSSTTFRCAIYTRKSSDEGLEQEFNSLDAQREACEAYIVSQRHTGWIALPDMYDDGGLSGGTMERPALQRLLADIRASKVQIIVVYKVDRLTRSLAGFAKIVDVLDTHGASFVSVTQQFNTTTSMGRLTLNMLLSFAQFEREIAGERIRDKIAASKRKGMWMGGNVPLGYDVKDRKLIINTREAESVRAIFQRYAELGSVSLLKVELDRLGVVSKRRAGAGGCLAGGKPFSRGALYLLLQNRIYRGEITHRDVAYPGQHDAIIDEELWRIAQDRLATNRQERRLAAGAEAPSLLAGLIFDADGAHMTPSHAAKGAKRYRYYVSASLLTGGRAASGIRVPAGDIEGLVLDRLRQLMASRSELGAALAPLDLDAASFDAALNKASDLSRRWLTLTPIDIAALVRRIVERTQVNLNGIALQLNRGEFASALVGDDKATYKHTDPILLSIDATLKRAGKGKRLVIDNEIAPEINQELVAVIVEAFSIQKQLFSGANDSIEAMTQRLGAGKGHLTALVRLSYLAPDIVRALLEGRQPIELTPTRLLKLSKDLPHDWREQRRFLGFVDRPSPTGDRTAL

SEQ ID NO: 62097 - DNA, 50 bp, Methylocystis rosea
  source 1..50: mol_type = genomic DNA
tctctaaaatgaacgggttacgtggctgtgcgcgcagtcccaagcgaacc

SEQ ID NO: 62098 - DNA, 40 bp, Methylocystis rosea
  source 1..40: mol_type = genomic DNA
caacgtcgtgacgtgcgtggctgggggacctggattcgaa

SEQ ID NO: 62099 - DNA, 50 bp, Methylocystis rosea
  source 1..50: mol_type = genomic DNA
tctctaaaatgaacgggttacgtgaatgtgcgcgcagtcccaagcgaacc

SEQ ID NO: 62100 - DNA, 40 bp, Methylocystis rosea
  source 1..40: mol_type = genomic DNA
aaacttcgttaagtgaatgaatgacggagctagatttgaa

SEQ ID NO: 62101 - protein, 466 aa, Salinispora arenicola; identical to SEQ ID NO: 54956

SEQ ID NO: 62102 - DNA, 50 bp, Salinispora arenicola
  source 1..50: mol_type = genomic DNA
gactgtcattgtcttacctttgccctgtcgatagtcaagctatgccatac

SEQ ID NO: 62103 - DNA, 40 bp, Salinispora arenicola; identical to SEQ ID NO: 54958
  source 1..40: mol_type = genomic DNA

SEQ ID NO: 62104 - DNA, 50 bp, Salinispora arenicola
  source 1..50: mol_type = genomic DNA
gactgtcattgtcttacctttgccgcgtcgatagtcaagctatgccatac

SEQ ID NO: 62105 - DNA, 40 bp, Salinispora arenicola
  source 1..40: mol_type = genomic DNA
gtaaagctgtggcttggctgccgcgcacgcagtcgcttta

SEQ ID NO: 62106 - protein, 403 aa, Salinispora arenicola
MMTRAAIYCRISRDREGAGLGVERQYQDCIALVESRSWTIAETYTDNDLSAYRGKPRPGYRKLLNDITTGLIDTVVAWHTDRLHRSPVELEEYIAACDQHGVPTHTVKAGPLDLATPSGRLVARQLGAVARYEVEHSIERQQRAKLQAATDGRWKGGRRPFGYEADGVTVRPTEAQVVQDATTTILAGGSLRGIATNLNLHGVVTSTGRAWSPTELRKMLLRPRNAGLMEHRGEVVGYATWPPLVDEDRWRAAASVLTDPARRTQTSGARRWLLSGIAWCGVCGAPLRCTLQNSNRAGVPSYTCKASKHVARNAVELEAYVYAVVVERLSRPDAIDLLSAPDRATTSALHTDAAALRERLNELATAYAEGAIDAQQLRQGSERLRSRLAELNVQRATWPGDQY

SEQ ID NO: 62107 - DNA, 50 bp, Salinispora arenicola
  source 1..50: mol_type = genomic DNA
gcctgtcactccctcacctttgacctgtcgatagtcaagctatgccatac

SEQ ID NO: 62108 - DNA, 40 bp, Salinispora arenicola; identical to SEQ ID NO: 54958
  source 1..40: mol_type = genomic DNA

SEQ ID NO: 62109 - DNA, 50 bp, Salinispora arenicola
  source 1..50: mol_type = genomic DNA
gcctgtcactccctcacctttgacgcgtcgatagtcaagctatgccatac

SEQ ID NO: 62110 - DNA, 40 bp, Salinispora arenicola; identical to SEQ ID NO: 62105
  source 1..40: mol_type = genomic DNA

SEQ ID NO: 62111 - protein, 481 aa, Paenibacillus xylanexedens
MKAALYIRVSTDRQNEEGFSMEAQHDLLMELLEKKGMELYRVYSDPGISGRTIKKRPGIQRLIEDMKAGKFDAVLIHKLDRLSRNLGDLYDFIAMINKLNKRFVVASLGSEEIDTQSPMGKAFLYFNGIFAEIYSDNLREETLKGLTKKMENGGLHMSKAPLGYDIEVIDEKRQLVVNEYESELIKEVFRLYLAGKGVVSIAKHMNGHSRGKEGGVWDSKYVRIVLQNHTYTGHNHFKPVLWEESKRIIKPGEHEAIISMEDFLKVRKMMERRGENHMSKHSYDYPYGGIVKCGLCGATYIGNASRQTLADKTVRVYRSYRCRNQYSNKTCDAPGISEPHLQQLIFERLQITNKKLQDKKTNAQAKSDQRMLQKEIEVSNRRRKNWMLALGDGKLSPDDYANLIDDEEARMKAITAQYEEKEDYYINELSTEEIKDMMANLKDNWVLIEPETQKLLVQSMFRQIVIKKESDRWNIIQMLTV

SEQ ID NO: 62112 - DNA, 50 bp, Paenibacillus xylanexedens
  source 1..50: mol_type = genomic DNA
ttaagtaccatcttggaggcgaggggcatcgccccccatttggtacttaa

SEQ ID NO: 62113 - DNA, 40 bp, Paenibacillus xylanexedens
  source 1..40: mol_type = genomic DNA
gactctaatggaggcgaggggagtcgaacccctgtccgaa

SEQ ID NO: 62114 - DNA, 50 bp, Paenibacillus xylanexedens
  source 1..50: mol_type = genomic DNA
ttaagtaccatcttggaggcgaggcccatcgccccccatttggtacttaa

SEQ ID NO: 62115 - DNA, 40 bp, Paenibacillus xylanexedens
  source 1..40: mol_type = genomic DNA
aactctgctgatggccaggccaattgaacccctctccata

SEQ ID NO: 62116 - protein, 510 aa, Pseudomonas syringae
  REGION 492..510: note = misc_feature - Xaa can be any naturally occurring amino acid
MPTAYAYIRYSSKGQGETGRDSVDRQMASIQAITRQHQIQLPSENIFSDSGISGFDGSNNKKGKLKELIDMIADMHIKPGDYIFVESIDRLSRQKLLQAKELVNGILEKGVVLITTIDGQRYEKPNEKNGINALQQDILLSVISERAHEESKTKSIRRKSAWNRAKKLAEENSKIFNGHNPPYGIRYNKELDKFEIEESEAQEIRDFFESLKYVGVSLSIKKLNTYSKRKWTNRNIKHLIDTKYVLGAYMAQKRDENKKKVFERYIENYYPQIVSYELFNDAVSAMKLRAHRKSYGNQTVGSLNVFRHSIKCDCCNASLLFEKQTNPKGIVYPYFQCFTRKELKNGCDQPRFRFDLAFGLFLELIYQSTTDEDFDTHPWQQQEPSNAIKREYVHSARGMKISLPTPEAAEEEARNENFKGLLIKLLSTTEMQAQDNKKLLDLNNELLKKISYRENLVRSFSTYTDGVIPKLFLDSISKTESEIKSLEQSIVXXXXXXXXXXXXXXXXXXX

SEQ ID NO: 62117 - DNA, 50 bp, Pseudomonas syringae
  source 1..50: mol_type = genomic DNA
gtgtgagatacacccctaccattcgagaccggggtagggtattctcacac

SEQ ID NO: 62118 - DNA, 40 bp, Pseudomonas syringae
  source 1..40: mol_type = genomic DNA
ggttttacgcgaaccgctggagtccgggcatatcgtgatt

SEQ ID NO: 62119 - DNA, 50 bp, Pseudomonas syringae
  source 1..50: mol_type = genomic DNA
gtgtgagatacacccctaccattctggaccggggtagggtattctcacac

SEQ ID NO: 62120 - DNA, 40 bp, Pseudomonas syringae; identical to SEQ ID NO: 42680
  source 1..40: mol_type = genomic DNA

SEQ ID NO: 62121 - protein, 573 aa, Pedobacter cryoconitis
MTTAYLYVRVSTDEQKRKGYSLPEQEDHLLKYCEFNNIEVVDIYREDFSAKNFNRPEWKKLITTIKKNSGKTKNNILFIKWDRFSRNIEYAYEMIGILRNLNATAMAIDQPIDFTVPESTVMLAVYLSIPEAENTRRALNVSNGIRRAKMLGRCPNKAPLGFLNCTGLDGRKQIVPVQPTADIIKWAFKQLAKNSFKIETVRKMACTKGLKSSRSAFWKLIRNPMYCGLIPLTLKGQASELIKAVHQPLISESLFNEVQAIINTKRRTTSKSDGLNNFFFLKGFLICPVCERKLRGSFSRGSTKTYPYYHCSRGCKTRIKADIINNDYSEKLQELSLSNGATELLRLVLEDLNIRIQKTEYLQDRRLLIKQIEEQQLMLSKARKLFVQEKLKFDDFKELKTECQTICNNVGMELNNNTAKLKLLEKQFKEADRSLTNIFYSYSELDIIDKKHIVSLITPVIKDATKGTISIKFNKVLSSIFSFKRSPETFEELSSNNGMKNFTDRKVPVRRAIAIMAKNNIQINEDEAAVILDLLYRIAKTYNLYKINKSATLSKGRTKKNVVKTTPKRYFRP

SEQ ID NO: 62122 - DNA, 50 bp, Pedobacter cryoconitis
  source 1..50: mol_type = genomic DNA
attagggttgtttccttaagtacccccggacgtaataagatcgaaccaat

SEQ ID NO: 62123 - DNA, 40 bp, Pedobacter cryoconitis
  source 1..40: mol_type = genomic DNA
aaggcttttgagtcgtacccagtgccggagtcgaaccggc

SEQ ID NO: 62124 - DNA, 50 bp, Pedobacter cryoconitis
  source 1..50: mol_type = genomic DNA
attagggttgtttccttaagtacccgcggacgtaataagatcgaaccaat

SEQ ID NO: 62125 - DNA, 40 bp, Pedobacter cryoconitis
  source 1..40: mol_type = genomic DNA
aaagcttctgagtagaaatcgatgcaggaaacgaaccagc

SEQ ID NO: 62126 - protein, 416 aa, Burkholderia cepacia
MDLVYSLLVMIRAHEESDTKSKRVKAAIRRQCHGWIAGTWRAPIRVGKDPHWVQEAEAGGFDLVDDRASAVRLVIEMFKRGHGAVRIIRELAARGLQISQSGRTQASHLYKLLANRMLIGEKSVEIDGEAFRLEGYYPALLTAAEFADLRYLAEQRGRRKGKGEIPGVVTGLGITYCGYCGAAIVAQNLMGRRRAADGRPYPGHRRLHCVTYSKGDGCKVSGSCSVVPVERALMLYCSDQINLTRLLEGDSGTASVAAQLASARQRVAELEAQVQRVTDVLLLDDGEAPAAVLRRVRELEIQLTNERRDVESFEHHLAASVSNVAPAAADAWRDLVSGVEQLDYDTRMTARQLVADTFSKIVVYQSGFCLEQNRGNIGLLLVAKRGTTRMLLVDRKTGEWRGAEDVQLDDIKPSAI

SEQ ID NO: 62127 - DNA, 50 bp, Burkholderia cepacia
  source 1..50: mol_type = genomic DNA
agtatatttttaatgacgttcgggcacccgagggataccatacctatacg

SEQ ID NO: 62128 - DNA, 40 bp, Burkholderia cepacia; identical to SEQ ID NO: 53033
  source 1..40: mol_type = genomic DNA

SEQ ID NO: 62129 - DNA, 50 bp, Burkholderia cepacia
  source 1..50: mol_type = genomic DNA
agtatatttttaatgacgttcgggtccccgagggataccatacctatacg

SEQ ID NO: 62130 - DNA, 40 bp, Burkholderia cepacia
  source 1..40: mol_type = genomic DNA
atcagcaggggtattcgattctcacagggatacgaaccct

SEQ ID NO: 62131 - protein, 467 aa, Cyanobacterium aponinum
MRVGYCRVSTKEQAVNSHALEQQIERIKSQRVEKVYFDIDSGRKSKRVQYQQLLQDIQEGLITEIIITRLDRLTRSLADQIKTFTILEQYGVQLIALDQKTDFSTASGKLTLNMLGAIAQNESDLNSERTRHGYEYFRKQHKVHSVPLGYRVVDNNCVIDDIPFLCNIHDKKEYSKFTIARLVIDYFFDEKSLHGCLTRLNIYFGLQRLSTKQDKYSLSFSKAGLDVFFHNPMIRGHLAYFHRNKTKETVIIYNNHPPILTDLEYQEICDIIAHNRKVRGFGQIANYPLSGLIYCSSCQFSMRALKSFRNHTNPQLGHNYYYQCYNCRTGNCNNKKMIRMDVVESSLIDIFRQKYRELTKLSTTTTKVINPQIIELLQQITTLKSLPKNPAIDEAIDKLEAQIKELEFNQNNQDLSVKENQEYLKSIFSSFGFWDSLLPEQRKEIYHKLVSKIIVKDGKIQDIILKL

SEQ ID NO: 62132 - DNA, 50 bp, Cyanobacterium aponinum
  source 1..50: mol_type = genomic DNA
tatacccccattgttgacaaatccttggataagtgtacaatagcataata

SEQ ID NO: 62133 - DNA, 40 bp, Cyanobacterium aponinum
  source 1..40: mol_type = genomic DNA
tagtcgcaagtaccaatccctgtccctgcgggtactacgg

SEQ ID NO: 62134 - DNA, 50 bp, Cyanobacterium aponinum
  source 1..50: mol_type = genomic DNA
tatacccccattgttgacaaatccaaggataagtgtacaatagcataata

SEQ ID NO: 62135 - DNA, 40 bp, Cyanobacterium aponinum
  source 1..40: mol_type = genomic DNA
tattagcaactattaattcaattccctgaaggcactaagg

SEQ ID NO: 62136 - protein, 549 aa, Agathobaculum butyriciproducens
MNETLNMLQQYIAIAYLRLSKEDARLGESESIENQRSIIREYCQRNNIFLAHEFIDDGCSGLNTDRQGFILAMNALESGQFNMFITKDLSRLSRDHIEADKFIEETFPQLGVRYVAVDDGVDTLKEYDIIVPFKNLFNEMSSRDTSRKVTNAIRVKRDRGEYCTRAPYGYIKDPNDNMHLIPDPRCDWVVKKIFSMYASGERMIDIIRTLDAEGVPTPLELKNWENPGLTRSDRCVSFEKPEDAQKWTRSTIYVMLRNEVYLGHTVLGKTKRVNFKKKKSKRKKREEWHKTLNTHEPLVSQELFDRCQKTKNQSRADGFFKNIFSGFVFCDTCGARMGMARNTTEHNNQPVRGLRCGTNCRYGNKACLSHSIRYDDLCDIVKTRLNYYLSMSFEERKSLADIIKKRFNATSPNADIEKQIADLEQQNSKTTQAISTLIENNISGLINKKTFESLLEKYNKEIESREKRIASLRENMCEELGDDAFDNFLNDLPYDEPIQELTRDALEAFIERIEVSHYTLPEGRRHRTFDGGNYGQTVKIKYKFLPTIE

SEQ ID NO: 62137 - DNA, 50 bp, Agathobaculum butyriciproducens
  source 1..50: mol_type = genomic DNA
cttttgcgcagaatctactactctaccgattagcagaatatgcgcaacat

SEQ ID NO: 62138 - DNA, 40 bp, Agathobaculum butyriciproducens
  source 1..40: mol_type = genomic DNA
tccaacgatggatcagtgcaccgactgtaagtccttccag

SEQ ID NO: 62139 - DNA, 50 bp, Agathobaculum butyriciproducens
  source 1..50: mol_type = genomic DNA
cttttgcgcagaatctactactcttgcgattagcagaatatgcgcaacat

SEQ ID NO: 62140 - DNA, 40 bp, Agathobaculum butyriciproducens
  source 1..40: mol_type = genomic DNA
ccacacaatggaccagtgctgattcagtaagtacttcctg

SEQ ID NO: 62141 - protein, 445 aa, Ruthenibacterium lactatiformans
MNVIRGVGYIRVSTAEQATRGLSLDAQEAEIRAYAKAHGIELFNIYVDAGITARKRLDRREAFGQMMKDVDSGLIDEIIVMRLDRWFRNIYDYHKMMNEHLIPHGVNWSAVKEDYDTKTTNGRLMINLRLAIAEQECDTDGDRIRDIHDNQIANGIWIGGCAPPGYRIENKRLSIDPDMQPAVSYFFERLLSCGSVRRAMLDMNERHNLHFEYGQAIRMARSTTYCGVRRENYNYCPTYISQDEHAQIMAALEHNVRVRSADNARIHIFSGLLVCSCCGRRLAANTVRKKSVTWTAYRCHRAFGDHVCDNRHLVDERKVEAWLLDYLENGLSDYIVSASVADAQPVVVDNTAAIRERQERVKELFINGFIDLQEYKRRAAELEAKIQVPEKQQPRSMEKLKSLLERGVRAIYNDLSRGERQEFWRSIIREIPVNNGAVSGDPIFL

SEQ ID NO: 62142 - DNA, 50 bp, Ruthenibacterium lactatiformans
  source 1..50: mol_type = genomic DNA
cgttgtactttctacgtgcgtgacaccccacgcgcttataaaagaatacc

SEQ ID NO: 62143 - DNA, 40 bp, Ruthenibacterium lactatiformans
  source 1..40: mol_type = genomic DNA
cgtggtgctgatgcacgacaccaacgccacaaagaacacg

SEQ ID NO: 62144 - DNA, 50 bp, Ruthenibacterium lactatiformans
  source 1..50: mol_type = genomic DNA
cgttgtactttctacgtgcgtgactccccacgcgcttataaaagaatacc

SEQ ID NO: 62145 - DNA, 40 bp, Ruthenibacterium lactatiformans
  source 1..40: mol_type = genomic DNA
cctgttgctgagagaccactccaccctcaccaagaacact

SEQ ID NO: 62146 - protein, 548 aa, Neorhizobium galegae
MKTAAKQIHPNPVFPVGAPPLRAALYLRVSTGRQADNDLSIPDQRQQAVRFCAARGWQIVSEFVDAGLSGTDDNRPQLQRMLDIATGGGKPFDVVVVHSFSRFARDHFAMEFNIRRLKKHKVQFVSITQDLGDDPQSDMMRQVFALFDEYQSKENAKHTLRAMQENARQGFWNGAAAPYGYAIVAAEQRGAKTKKRLAIDPVEAEIVRLMFRLLSEGDGTNGPLGVKAATSWMNERGHRTRRGARWGIGQLHKLLTSPTYKGDYRFNRKVWKTKEDKPETEQVAVTVDPIIEPSLFDAVQARLKARSPKTTPPRVVTGPILLTGIATCASCGGGMTLRTGKSGRYRYYTCATCAQQGKSACKGRSIPMDRLDRLVTERLAETLFAPDRVRDILGGLLERQASRTEDHAHRMTALQNKVKDAESRLSRLYGAIESGVADFADPTLKDRVTALKYERDQAKAALDRAFAELRPETRITEEKIDAFASLMRENVTNGPIPFRRAYLRAVIDQVEVDDAEIRIHGRKSVLERLVMGGGAAPAGVPSFVRKWR

SEQ ID NO: 62147 - DNA, 50 bp, Neorhizobium galegae
  source 1..50: mol_type = genomic DNA
tgcccagttttgttcggaaatggcgcgccggacgagatgaaactgggcac

SEQ ID NO: 62148 - DNA, 40 bp, Neorhizobium galegae
  source 1..40: mol_type = genomic DNA
tctagcggaaaaatatggcgcacccggagcgattcgaacg

SEQ ID NO: 62149 - DNA, 50 bp, Neorhizobium galegae
  source 1..50: mol_type = genomic DNA
tgcccagttttgttcggaaatggctcgccggacgagatgaaactgggcac

SEQ ID NO: 62150 - DNA, 40 bp, Neorhizobium galegae
  source 1..40: mol_type = genomic DNA
tctagcaggaaaatagggatcacacggaggtagtcaaaaa

SEQ ID NO: 62151 - protein, 502 aa, Bacillus subtilis
MELKNKIKRVAIYLRKSRNKEGEETEETLAKHRKRLLDIAHKNNWQYEIFQEVGSSMDEMRPEYQRMISKLTDGIFDAVLSVNLARVTRDDAETPKFMNLLRQDDILFVTDSERVYDLEVQEDWQALKFTGFVNNWEYENIKAQLRKGKKDSAKMGRWSNGTPNYGYIYNRLERKLEIDEEKAKAVKLAFQMTIDGIGADNIAVKLNKLGYRTKNGKFFQGQSIVRMIRSEIYKGWIVANRLKGRNKTQGKIRPQDQWIVVKDAVKPCIIDEDTWDKANKALDKRKLLNPRAKMRKHGLSSLIVCGFCGRTHSITIRKDRNNMRVIQSCRKRNPLGEKCTNGGIQYNTMMELIINNIRMKKDQIHLEIEKLKDENETIDKTAIEIQSIEQQIKKVEKALQMLQLQLEEDLISLNDFKERRTIRSIELDNLQKELTKLKETTKEDKIKSKESFIEYLDHFLDNWSELDESQLNNELMSFIKKIIWYHPIGNREYREIKIDWAE

SEQ ID NO: 62152 - DNA, 50 bp, Bacillus subtilis
  source 1..50: mol_type = genomic DNA
cgggtagcttagcgaacttgccattggtgccaagttcgtatagctacaca

SEQ ID NO: 62153 - DNA, 40 bp, Bacillus subtilis
  source 1..40: mol_type = genomic DNA
cggttattcgacttgtcattggtgccacgttatggcccac

SEQ ID NO: 62154 - DNA, 50 bp, Bacillus subtilis
  source 1..50: mol_type = genomic DNA
cgggtagcttagcgaacttgccatatgtgccaagttcgtatagctacaca

SEQ ID NO: 62155 - DNA, 40 bp, Bacillus subtilis
  source 1..40: mol_type = genomic DNA
ttattttttgaaatattgtatgtgccacgatatggcccac

SEQ ID NO: 62156 - protein, 498 aa, Rummeliibacillus suwonensis
MIKHVCIYCRRSRDELDDRLSIENQKKHMIEFVEEKGWTYDIFAENESSMDFTRPKLQTMLDKVRNNEYDAVTCTELSRLSRDELDLTIIQRILYETNTILVTLERAYDLSNPLDRFVQGLDGLLSQLEYGKTKARLQRGMLDSVKQGNYVSSQAPIGYSIHKVDSKHRYLVPNDDKYIVELVFQLYLDGMTMREIVKELHKRGISPKCKQVIMGQDVISEMLRNQKYCGDNVFGKTVTKKLNGKNIVERGNKDVLIIPNTHEPIISREVFEKAQEIRKSRRNKPAGLRRPKHELSGLVYCSKCGTLLTVKRHNGIVRFGSHSKMSAIDGYRVTKKCPCKSCKQQIVLEQVFNKLNEHIEELEQYRDKIKEPSNDLEQSKLEKIKGKRKQIKQTESKIQRVQEGYLQAIFTSGQAKEQVTQLNTLLDTLRNELKQLETMNAQSEYDYVSGIIERMKQFIRGKAMMKANEINTSLASFINKILYDNDGNTITINIIWKS

SEQ ID NO: 62157 - DNA, 50 bp, Rummeliibacillus suwonensis
  source 1..50: mol_type = genomic DNA
gcttgacttttatctgtatgacgtgtaggatgaactcataaaagttagtc

SEQ ID NO: 62158 - DNA, 40 bp, Rummeliibacillus suwonensis
  source 1..40: mol_type = genomic DNA
cattgcggacggtttagctgtggggcggccttcctcgttt

SEQ ID NO: 62159 - DNA, 50 bp, Rummeliibacillus suwonensis
  source 1..50: mol_type = genomic DNA
gcttgacttttatctgtatgacgtcgaggatgaactcataaaagttagtc

SEQ ID NO: 62160 - DNA, 40 bp, Rummeliibacillus suwonensis
  source 1..40: mol_type = genomic DNA
ctttggggaggggttttgtcgggggcagcctccatccttt

SEQ ID NO: 62161 - protein, 513 aa, Arcticibacter tournemirensis
MKIADLYIRVSTDEQADKGYSQRDQEDRLRKHCEHNDIRIQQVIFEDFSAKSFERPEWQKYLISIRKIKGRSNLILFTKWDRFSRNAGDAYQMINILKKAGIQPQAVEQPLDMSIPESKIMLAVYLATPEVENDRRALNVFYGMRRARKEGRWMATAPIGYVNRVNETGKKQIVLREPQASIIKWAFKEISEGKYSTEQIWKRAKELGLQCSKHNFWLAIRNPVYCGKITVPEFEDEPRHLVPGLHEPLISESLFYDVQDVLDGRKKRGNGTKIVSNTMLPLRGFLKCSRCSKTLSGSASKGRYQYYHYYHCDSSCGCRLKAEELNELFVARLKDFVLNPGAEELFKRVIVDAYSSCTHSIRDSRTQFINEITEQNNRITKARELLLKGDIDGADYKIVKNEAEQKIATLEAKLVDKGAEPATISDVERIVEKAISVLVKLDVIYWKSDAEMQRKIIGSIYPEKFTFENLKDRTTILSEVFKIIFLINSELSSKKNGTNDQNLTLSRWVLPKG

SEQ ID NO: 62162 - DNA, 50 bp, Arcticibacter tournemirensis
  source 1..50: mol_type = genomic DNA
aaatttgacgttgtcccgttgggtgcacccgaagggacagttttcgaacc

SEQ ID NO: 62163 - DNA, 40 bp, Arcticibacter tournemirensis
  source 1..40: mol_type = genomic DNA
tcgattaatcgcattcagtgctcccgaagggattcgaacc

SEQ ID NO: 62164 - DNA, 50 bp, Arcticibacter tournemirensis
  source 1..50: mol_type = genomic DNA
aaatttgacgttgtcccgttgggtagacccgaagggacagttttcgaacc

SEQ ID NO: 62165 - DNA, 40 bp, Arcticibacter tournemirensis
  source 1..40: mol_type = genomic DNA
gctatttcttgcaggcagtagacccacagggattcgaaca

SEQ ID NO: 62166 - protein, 514 aa, Burkholderia anthina
MKPIKRRAYSYLRFSTPEQLKGDSYRRQTTMALEYAARHGLALDQDLTFEDLGVSAYRGANAEAGRLGEFLEAVRVGLVPRGSYLLVEALDRLSRLVPRKAVRVLEDIVEEGITVVTLNDGREYTSENLDADPTSLLIAIVLFMRANEESATKSRRLKAAWEGKRQNIDDRPLTAVTPAWVTLNEATGKLELIPDRAAIVRRIFDMYVSGVGYASIAETFNREGIACFGRAQHWHRTYVRKILTNDAVVGTFTPHRIVHEGGKKVRVPLEKVPGYFPAVIPEEVFARAQAQLGPAPKHRGAVVSNIIAGLARCPLCGSTMTRVTKGSGPKGGKPKLICTKAKAGAGCQYHAVPLENVETAIVENASFIAGTVPSGREGLDTDLDMAEVRIAATQDEIENLLQALAAAPSTAIAERVRDLELSLDALRTERDILADQLVAANGPLLGKRVEDLRATLEADPMDRAKSNAALRLLLSSVTVDYERGKLMLEWKHGGETEVVFGMPSEARKVTRLSA

SEQ ID NO: 62167 - DNA, 50 bp, Burkholderia anthina
  source 1..50: mol_type = genomic DNA
aagaggtcttgtgaagacaacatgagcatggtattttcaaaagacccatc

SEQ ID NO: 62168 - DNA, 40 bp, Burkholderia anthina
  source 1..40: mol_type = genomic DNA
cccgggcggcccgaccatcagcatgtgatggccgcccgcg

SEQ ID NO: 62169 - DNA, 50 bp, Burkholderia anthina
  source 1..50: mol_type = genomic DNA
aagaggtcttgtgaagacaacatgcgcatggtattttcaaaagacccatc

SEQ ID NO: 62170 - DNA, 40 bp, Burkholderia anthina
  source 1..40: mol_type = genomic DNA
ccggggctgcccggccctccgcaggagttggctccccaca

SEQ ID NO: 62171 - protein, 499 aa, Mycobacteroides abscessus; identical to SEQ ID NO: 57751

SEQ ID NO: 62172 - DNA, 50 bp, Mycobacteroides abscessus
  source 1..50: mol_type = genomic DNA
acttccggttagtgcctaaccaggcacctataataaccctagagggaagt

SEQ ID NO: 62173 - DNA, 40 bp, Mycobacteroides abscessus; identical to SEQ ID NO: 20213
  source 1..40: mol_type = genomic DNA

SEQ ID NO: 62174 - DNA, 50 bp, Mycobacteroides abscessus
  source 1..50: mol_type = genomic DNA
acttccggttagtgcctaaccaggtgcctataataaccctagagggaagt

SEQ ID NO: 62175 - DNA, 40 bp, Mycobacteroides abscessus
  source 1..40: mol_type = genomic DNA
tagtctggcccaggacaggtgactggtgccaccgggcagc

SEQ ID NO: 62176 - protein, 479 aa, Mycolicibacter terrae
MSARKSAGQRVGVCSAAIYARISSDAEGTGLGVARQLEDCRKLAADRGWPVGAEYVDNDVSAFSGKPRRQYARMLADLASGDRDAVIVYNLDRLHRRPVELEEFVTLCESVGVRDVATVTADIDLGNDDGLFMARIFAAFAAKESGRKSARIRRKMLQNAQAGLPHGSARPFGYEADKITVRESEAAVIRQMVDRYLAGQSLRSLTIWLNESQIAPSVAASWQTSAVRQVLSSGRIAGLREHRGEVIGAAVWPAIITPADRDRVLARMAARSVTKARTARTYLLSGMLRCGRCGNRLYSQARHSNPENRTRRYVCLKGPDHGGCGRLTVVAAPVEELLTEAVLARLDSPQLADVLAGKATADADVTALATQVDACQERLDELAGLYAEGAITAREWIAARDPITDRITAARRDIATATDTTAVYELAGTGSALRTEWDGLDLGRQQAIVKAVLDHAVIAPGTPGARSLDIGRVAPVWRV

SEQ ID NO: 62177 - DNA, 50 bp, Mycolicibacter terrae
  source 1..50: mol_type = genomic DNA
ggggtagtttcccgacttgcaacaaaggtcataagttgttaaactaccct

SEQ ID NO: 62178 - DNA, 40 bp, Mycolicibacter terrae
  source 1..40: mol_type = genomic DNA
cggcccgacacatccggcaaatcttcgttgcctgtgccgg

SEQ ID NO: 62179 - DNA, 50 bp, Mycolicibacter terrae
  source 1..50: mol_type = genomic DNA
ggggtagtttcccgacttgcaacattggtcataagttgttaaactaccct

SEQ ID NO: 62180 - DNA, 40 bp, Mycolicibacter terrae
  source 1..40: mol_type = genomic DNA
gggcccaaaacaaccggcatttgttctttcgcagttctgg

SEQ ID NO: 62181 - protein, 489 aa, Eggerthella lenta
MAKRAKRSAPKKGARAAIYARYSSHNQRGESIEIQLDNDYAYCHEHELEVVKVYIDEAKTGRDTNRADFQQMLEDAKRHLMDYVVIYKVPRIMRNRDEMALARIMLRKCGVEILYAGEQIAEGSSGVLQLGMLEVLAEWESAVDSERITEGIAKNAERCMANGQRLYGWDIVDGFYALNEQQATVMRMMKDMLLSGSMIADIRRACEPYRTQFGNKFTQSAITKMLKRKQNAGIYVYAGYEIPGGMPALWSLEEQQMIWKILEKNARPRKRENTENYALTGKLFCGKCKTPMIGTSGTSKAGTRYYYYRCKKCRRNVRKDIIEANVADAVIAALSDEATREKIADLVAEIEQDTGAKPQSEIIRSELHDIELSFDRIWQAIEGGYAPPGGKERVEELTKRKELLEDELRVAVSIESVTVDRNRILFWLEDIAQEEDPETLIEVFVSKVVLVGDDDLHIAFTFEGGDDDIGQIVDDSGGVRVNGPELHHG

SEQ ID NO: 62182 - DNA, 50 bp, Eggerthella lenta; identical to SEQ ID NO: 43612
  source 1..50: mol_type = genomic DNA

SEQ ID NO: 62183 - DNA, 40 bp, Eggerthella lenta
  source 1..40: mol_type = genomic DNA
ggttcgaatcccatcatctccaccacggaaactagatcgg

SEQ ID NO: 62184 - DNA, 50 bp, Eggerthella lenta
  source 1..50: mol_type = genomic DNA
tgttcgggtaaatggtcctgaactcaaccacggaaccaatatccgaacac

SEQ ID NO: 62185 - DNA, 40 bp, Eggerthella lenta
  source 1..40: mol_type = genomic DNA
ggttcgaatctcttccaatcaacaaaggagactggagcgt

SEQ ID NO: 62186 - protein, 502 aa, Brevibacterium aurantiacum
MTTEPARRAVPRVAIYARQSVEEDQGIAQQIADCEEEVRRRGWLVAGEPYPDNDVSGSTARGSKTNWAKMLKAYDAGEFDTLMVTEVDRLTRSLTDVLDIRPPRRDIRVVTVRGGIDTEHDDYMLKQLVLLAEREVKIKAQRAQRYARERRAVGHPSPGKAPHGYTWVAAASRDKAGTRYVIDTDEAKDVRKIFKEFLSGAPLGQIARDLNTAGRSTRKGARWHTSTVRRILMNPLYAALLPPSQGSQPHDLAAIDLAACTPGAWKELIQRDLLVAARDKLIGVKPNHQGNSRKWLLSGLAVCSVCREPVRSARGKTHPTPRKDGTGTAPSQRYHTYRCVNGHIMRRGEIIDEFASEACIARLSEPDTLDLLAPKPDVVDVRVLNSQRIALGKRRKTVLKQISSGRATEEEAEEALDDLADELRVVDTEIARAVASDPLAELVGVEDARAWWFDEERTLARRRTVVEALMTVVIHPVGSGRRITTFEAAGETVEIDWKRSAT

SEQ ID NO: 62187 - DNA, 50 bp, Brevibacterium aurantiacum
  source 1..50: mol_type = genomic DNA
gtacgcttttcttcgtccacggttgccgctgtggtggcgtaatggcatac

SEQ ID NO: 62188 - DNA, 40 bp, Brevibacterium aurantiacum
  source 1..40: mol_type = genomic DNA
tgcggcgaacccgcaggcggcaagcgtggtgatcgcatac

SEQ ID NO: 62189 - DNA, 50 bp, Brevibacterium aurantiacum
  source 1..50: mol_type = genomic DNA
gtacgcttttcttcgtccacggttcacgctgtggtggcgtaatggcatac

SEQ ID NO: 62190 - DNA, 40 bp, Brevibacterium aurantiacum
  source 1..40: mol_type = genomic DNA
aagggtgaggccgcagctgcaaagcgttgtgatagcattc

SEQ ID NO: 62191 - protein, 484 aa, Tsukamurella tyrosinosolvens
MVKAHDSSDRRVRSAALYARISSDPTGQSLGVQRQLEDCRSLAKSRGWDVGEEYVDNDVSAYSGRSRPAYQRMLDDLSSGARDAVVVYNLDRLHRQPSELEAFVGVCETAGVRDVATVTADIDLGNDDGLFMARIFAAFAAKESGRKSARIRRKALANAQAGLPHGPVRPFGYEDDKITIRRSEATVIRQVVDRFLAGESMRSLSAWLTETRVPTARGAEWRPSSLGAVIRSARIAGLREHKGEIIGPAVWDGIITIEQRNQVLARFATRQASGRRAPRRYLLSGLLRCGRCGTPLYTSTQHVKSTSNGGQVRRSRRYCCMSGPDHNGCGKLTIVAAPVEQIITAAVLARLDSTQLADALAGRVAADEHLAQLQEQVDTDRSKLDELAGLYADGAITAREWMAARVPVETRIKTVSRQIWDQTTVPVLDGLIGNGAQLAQSWETLNLDRQHAIIRAVLDFATILPGRRGAQSVALERVQPQWVL

SEQ ID NO: 62192 - DNA, 50 bp, Tsukamurella tyrosinosolvens
  source 1..50: mol_type = genomic DNA
aaggcgtgttagcaacttgctagtaatgtctaaaattgctatgatacctt

SEQ ID NO: 62193 - DNA, 40 bp, Tsukamurella tyrosinosolvens
  source 1..40: mol_type = genomic DNA
cggcgtcaacagccacggcaacgtgacgacgatggcgtac

SEQ ID NO: 62194 - DNA, 50 bp, Tsukamurella tyrosinosolvens
  source 1..50: mol_type = genomic DNA
aaggcgtgttagcaacttgctagtcatgtctaaaattgctatgatacctt

SEQ ID NO: 62195 - DNA, 40 bp, Tsukamurella tyrosinosolvens
  source 1..40: mol_type = genomic DNA
cagcggcaaggccgacgggcacgtgaagaagctggcgcac

SEQ ID NO: 62196 - protein, 524 aa, Thiobacillus sp
  SITE 74: note = misc_feature - Xaa can be any naturally occurring amino acid
MKAKIERAAIYMRSSKDKAEVGLDIQRRELKAFAKEKGYAVAVEFSDMEISGSLDEAARPGLRQMLAALRDPAXGWTTILALDTSRIARDPMIGIYVKREAEKAGVDIRFSKMDIDGDSAFGEMMLNVARSFDRLHARLSSEKGRSGLEANVGKGFRAGGRAPLGYTLQHHETGAMRAGVAVRKSTLILDKREAVKVKAFLEARAAGIPRTVAATDAGLRGKAVASLVGIERNALTYAGYTVWNQRRKIKPTKEDPRRSMEWRPRAEWVISEEPTHEALITKDEAERLLALHEDRAPKRVRVYNADDFLLAGLLFTPDGRQWTGDAHDKAYRIRKGQRINAPWVESEVLLQVSADLKDKKFLARIVQQARSMADAIQIDPVAIEGDIRKAEKKLANIVDLVAETGDRTLLAKMKELEAEVAKLRESKATWAEQTVLKKRLNTLTEKDINFALAVSGMEIRDGAGSWEGEFGFSDEHRIPAGELRRVLNTLVSRITLDPETRVISLHYRLSVPLGKPTGTKVASP

SEQ ID NO: 62197 - DNA, 50 bp, Thiobacillus sp
  source 1..50: mol_type = genomic DNA
taccggaacgaaggtggcgtccccacagggttgcgcagttgattccggcg

SEQ ID NO: 62198 - DNA, 40 bp, Thiobacillus sp
  source 1..40: mol_type = genomic DNA
gatgtaaggtggcgtccccacggggattcgaaccccggtt

SEQ ID NO: 62199 - DNA, 50 bp, Thiobacillus sp
  source 1..50: mol_type = genomic DNA
taccggaacgaaggtggcgtccccttagggttgcgcagttgattccggcg

SEQ ID NO: 62200 - DNA, 40 bp, Thiobacillus sp
  source 1..40: mol_type = genomic DNA
gatgtaaggagatgtcaggttggggatttgaagtcaggta

SEQ ID NO: 62201 - protein, 515 aa, Clostridium jeddahense
MNLRQIRGTPPVWWVLRKPPMKLRKVVNLMNAVIYARYSSDNQREESIEGQLRECKAYAEKNGITILSTYIDRALSAKTDHRPEFQRMIKDSAKGLFDMVLVWKLDRFSRNRYDSAHYKATLRKNGAKVVSATETIAEDSTGILLESLLEGYAEFYSAELSEKVIRGLTENALKCKYNGGGLPIGYTIDNEQYFQIDPLTAPIVLEAFQRYDKGATVKQLVDFLNSKGIQTYRNKPLRIDCVKRLLKNRRYIGEYKYRDTVTPNGVPAIIPQDLFDRVGERLEKNKKAPARAKAKEEMYLLTTKLFCGCCGAYMCGESGTSRNMTIHQYYKCVTAKYKKACHKKTVKKDWIENLVIEHIVKLLFDDALMNDLTDTLVAFQKRENTTLPMLKKRLVETEKGIENILNAIQQGIFTQSTKQRLDELEEARSSSEVAIIQEEMQKPLLTKEQLLFWLHRFRALDVTNPAHRQRLVDSFVNGIYLYDDKIVLMFNYKEGSKTLNLADIECSSLSAGAAP

SEQ ID NO: 62202 - DNA, 50 bp, Clostridium jeddahense
  source 1..50: mol_type = genomic DNA
tgttcgagtttgagtgcgggtgctgcaccaaacgcacataacccgaacat

SEQ ID NO: 62203 - DNA, 40 bp, Clostridium jeddahense
  source 1..40: mol_type = genomic DNA
ggttcaagtccgatcaccggcaccaaaagactcacaaagc

SEQ ID NO: 62204 - DNA, 50 bp, Clostridium jeddahense
  source 1..50: mol_type = genomic DNA
tgttcgagtttgagtgcgggtgctgaaccaaacgcacataacccgaacat

SEQ ID NO: 62205 - DNA, 40 bp, Clostridium jeddahense
  source 1..40: mol_type = genomic DNA
ggttcatctcataacagctgaacaaaaaaattaacaaagc

SEQ ID NO: 62206 - protein, 545 aa, Butyricicoccus pullicaecorum
MDIHSVRQQLRGRTIYDIPMRVTYYARVSSESDEQLNSLGNQISYYEDFIRRNTAWTFVQGYVDEGLSAATTRKRENFHRMIDDAKRDLFDLVITKEITRFARNTLDSIQYTRELLSAGVGVFFQNDNINTLDEDSELRLTIMSGIAQDELRKLSSRVKFGHQQAIKKSVVLGNSRIFGYIKDGGRLVIDESEAPMVRELFDLYATGRYSMKQLETLFWERGYRNHNGKKIAHTTMSGIISNPKYKGYYVGNKVKVIDLFTKKQKFLPPEEWVMFKDESGEIVPAIVTEDVWDAANAVLKKRSEDVKSRQGICNHANLLTGKLYCTCCGAAYYRRDSKGRDGSKNSKWVCSGKIKNGAASCDSFAIYEDEIKPLLLDVFRETAPLAENMVEEYIKLYQQTVQSEDVSEKCDALRRVIETAEKKKQKLLMFNAMGELSDQDFLSMNRQCTKEIENAQKELAALEAQQASDADFARQIDTIRRVLRDAERDAAQGVVTSEFVGKYIDKIFVTPEDPDTMRLGVKILTGDMAERSLEHLKRRTGHTFL

SEQ ID NO: 62207 - DNA, 50 bp, Butyricicoccus pullicaecorum
  source 1..50: mol_type = genomic DNA
aaacgtcgtacgggtcacacgttcttgaacgtgtgtcccatgcgaagcgt

SEQ ID NO: 62208 - DNA, 40 bp, Butyricicoccus pullicaecorum
  source 1..40: mol_type = genomic DNA
gtaagcctcgatcatcttcttgaccatctgaccgccgatc

SEQ ID NO: 62209 - DNA, 50 bp, Butyricicoccus pullicaecorum
  source 1..50: mol_type = genomic DNA
aaacgtcgtacgggtcacacgttctggaacgtgtgtcccatgcgaagcgt

SEQ ID NO: 62210 - DNA, 40 bp, Butyricicoccus pullicaecorum
  source 1..40: mol_type = genomic DNA
ggaagccttgaacttcatctggaccagctgcccacgattc

SEQ ID NO: 62211 - protein, 528 aa, Citrobacter freundii; identical to SEQ ID NO: 49751

SEQ ID NO: 62212 - DNA, 50 bp, Citrobacter freundii; identical to SEQ ID NO: 47537
  source 1..50: mol_type = genomic DNA

SEQ ID NO: 62213 - DNA, 40 bp, Citrobacter freundii
  source 1..40: mol_type = genomic DNA
cggccccatcagcagcagtgaacagtcggtcgtacccccg

SEQ ID NO: 62214 - DNA, 50 bp, Citrobacter freundii
  source 1..50: mol_type = genomic DNA
gggcgtacttactataccaattgggtacagttgatgtataatgtacgcca

SEQ ID NO: 62215 - DNA, 40 bp, Citrobacter freundii; identical to SEQ ID NO: 13130
  source 1..40: mol_type = genomic DNA

SEQ ID NO: 62216 - protein, 528 aa, Citrobacter freundii; identical to SEQ ID NO: 47536

SEQ ID NO: 62217 - DNA, 50 bp, Citrobacter freundii; identical to SEQ ID NO: 47537
  source 1..50: mol_type = genomic DNA

SEQ ID NO: 62218 - DNA, 40 bp, Citrobacter freundii; identical to SEQ ID NO: 62213
  source 1..40: mol_type = genomic DNA

SEQ ID NO: 62219 - DNA, 50 bp, Citrobacter freundii; identical to SEQ ID NO: 62214
  source 1..50: mol_type = genomic DNA

SEQ ID NO: 62220 - DNA, 40 bp, Citrobacter freundii; identical to SEQ ID NO: 13130
  source 1..40: mol_type = genomic DNA

SEQ ID NO: 62221 - protein, 519 aa, Flavonifractor plautii
MYLEIEGAEKYRAALYIRLSREDETDGPSESVSNQRAMLEDFARQRGVPVAGLYVDDGWSGTSFDRPEFRRMLRDIEAGRVNMVITKDLSRLGRDYIMTGHYMERYFPEHRVRYISLLDGIDTGVDSSANEITPFRAIMNDMYAKDISKKISSVKRDKQRKGLFIGGKPVYGYQMHPAEKNKIVVDEGAASVVRRIFRLALEGLSCRQIAAQLNAEGIPSPGCYAGLYPSGTGQWSGERISEMLQNETYIGNMVQGRRRKVSYKSKKCIRQLPEDWVVVEGTHEPLVTPETFERVGRLLASRRHTRSRTYEFPLKGLLFCHECGHPLAVLNRKNSRGEDVRYLVCRTYQRFTKTGGCTCHCIQEQTVTRAVVAKLREACGACLEPAALLPAARSAVAEAHGGENPTAEIRALRAKIGRLTTVLDRMYLDQLSGLLAEADFARLYRQAREERGALERRVTELERRESPEAGDKAGALVQRFLDEAGDNRELLVSLIERVELTEQRELIIHFRFCPPEALF

SEQ ID NO: 62222 - DNA, 50 bp, Flavonifractor plautii
  source 1..50: mol_type = genomic DNA
tggttacaataaccgcggcgcgaggtatcgcgccgcggctattgcaagcg

SEQ ID NO: 62223 - DNA, 40 bp, Flavonifractor plautii
  source 1..40: mol_type = genomic DNA
cggcatctcccgctcctatgtatcgcgcattgagaaaaaa

SEQ ID NO: 62224 - DNA, 50 bp, Flavonifractor plautii
  source 1..50: mol_type = genomic DNA
tggttacaataaccgcggcgcgaggaatcgcgccgcggctattgcaagcg

SEQ ID NO: 62225 - DNA, 40 bp, Flavonifractor plautii
  source 1..40: mol_type = genomic DNA
tggcatctcccgtgcctatgaatttcacatggaaatacac

SEQ ID NO: 62226 - protein, 609 aa, Clostridium fessum
MRQNEDVIALYSRKSKFTGKGESIGNQVELGKEYVRVHFGDAAVDKIVVYEDEGFSGGNLNRPAFKRMMDAAKKRQFKAIIVYRLDRISRNVSDFSGLIEELARLDISFISIKEQFDTSTPMGRAMMYIASVFSQLERETIAERIRDNMHELAKTGRWLGGTTPTGFESEAIKSITVDGKTKKACKLKLVPEEADIVKTIFDLYVETDSLTLTEAALIKQGFKTKNGKYFTRFSVKAILQNPVYMVADQEAYDFFIKNDTDLFSEHDAFDGVHGMMAYNRTDQEKGRASISLPPSEWIVSVGKHPGLIPGKVWVQVQESLERNKSKSFRKPRSNEALLTGLLFCSCGERMYPKMSKRKTADGKVIYTYVCKMKERSQRTVCNSKNANGNTLDMAIIEQVKMLADDKETFVSQLEQSRKFYTGNRMDYEQRISDMRKEKAETEKKINSLVDSLVEMGDSPAKAHVTKRIEQLNEEYQSLEKRIQELEGLTTQHALSDVEFDLMRQLLTVFKDGIDEMTIEQKRAAIRTIVRKVIWDGVNAHVVLFGVQDDEIEYPEIASAASDNTDDEDDNDELVAFSDVDYEDDDTEDDRLGKTNPLSASKTHWGEDSK

SEQ ID NO: 62227 - DNA, 50 bp, Clostridium fessum
  source 1..50: mol_type = genomic DNA
aaacgcattggggggaggatagcaaatgctatcctctcacggatgcgttt

SEQ ID NO: 62228 - DNA, 40 bp, Clostridium fessum
  source 1..40: mol_type = genomic DNA
tgcggcgaaatgtatcgagaatgagattctgatgaccttc

SEQ ID NO: 62229 - DNA, 50 bp, Clostridium fessum
  source 1..50: mol_type = genomic DNA
aaacgcattggggggaggatagcagctgctatcctctcacggatgcgttt

SEQ ID NO: 62230 - DNA, 40 bp, Clostridium fessum
  source 1..40: mol_type = genomic DNA
ttaaaccaaatgtatacatgctcagagtctgaagaccttc

SEQ ID NO: 62231 - protein, 546 aa, Rhizobium leguminosarum
MTKAYSYIRFSTPEQAHGDSLRRQTARAEAWARERGLTLDNSLRDLGVSAYHGANQETGALRSFLQMVEDGRIERGSYLIVESLDRIDRRQVMDAATRLFDLIRAGIIVVTLSDGQEYSEERLRMDWTPLMFSLIVMARAHEESRTKSERVGEAWRQKKELARIERKPLTPRCPEWLEVRDGKFVERPERVSLVRRIFAETIDGFGRREIMRRLNVEAVPTFRGGEAWHTSSIAKVIQSRAVLGEYQPHRGTHKNRNRTPEGDPILDYYPRIIDDETFWRAQNATEGRRQSAAGRKGQKGAHILQGLARCASCDGPMHILNKGEPPKGGIYLACSSNLRKAGCDNDRRIRVDRLEKDLLKALLHVDVAALASLDDETPQMLRRIAALKAKLADAKARRTRLLSIFVETEDEEVEEQLVKAAAEVKEFTKQLKEHEKAAASKQADPGTTVRLATANELSGQLDEAAIDKRRELRIKLSSLLRGLVERVECRPIGPVMILKPRLEVRMRGIMPFAFRMENNVVSMLLVSSPSKDAVDEFFLGLWDHPD

SEQ ID NO: 62232 - DNA, 50 bp, Rhizobium leguminosarum
  source 1..50: mol_type = genomic DNA
taccgattaatgtagcacaacgtcagcagattgtgctacattaaccgcgt

SEQ ID NO: 62233 - DNA, 40 bp, Rhizobium leguminosarum; identical to SEQ ID NO: 29968
  source 1..40: mol_type = genomic DNA

SEQ ID NO: 62234 - DNA, 50 bp, Rhizobium leguminosarum; identical to SEQ ID NO: 62232
  source 1..50: mol_type = genomic DNA

SEQ ID NO: 62235 - DNA, 40 bp, Rhizobium leguminosarum
  source 1..40: mol_type = genomic DNA
gcccagaggatttaacaacagcagaatatggccaagaacg

SEQ ID NO: 62236 - protein, 618 aa, Coprobacillus cateniformis; identical to SEQ ID NO: 11111

SEQ ID NO: 62237 - DNA, 50 bp, Coprobacillus cateniformis; identical to SEQ ID NO: 11112
  source 1..50: mol_type = genomic DNA

SEQ ID NO: 62238 - DNA, 40 bp, Coprobacillus cateniformis
  source 1..40: mol_type = genomic DNA
ttgtccgtggcgaccttcagatttggagcagcgttccggt

SEQ ID NO: 62239 - DNA, 50 bp, Coprobacillus cateniformis; identical to SEQ ID NO: 38444
  source 1..50: mol_type = genomic DNA

SEQ ID NO: 62240 - DNA, 40 bp, Coprobacillus cateniformis
  source 1..40: mol_type = genomic DNA
atgttcttggctcccttcacccttgcagcagactgctggt

SEQ ID NO: 62241 - protein, 550 aa, Streptococcus pyogenes; identical to SEQ ID NO: 45846

SEQ ID NO: 62242 - DNA, 50 bp, Streptococcus pyogenes
  source 1..50: mol_type = genomic DNA
agtttggacaatgatgagcaagttgagacggtagcacttttgtccaaact

SEQ ID NO: 62243 - DNA, 40 bp, Streptococcus pyogenes
  source 1..40: mol_type = genomic DNA
tccgcaaacgcatcacgtcgagtgcgtagtattgctaatc

SEQ ID NO: 62244 - DNA, 50 bp, Streptococcus pyogenes
  source 1..50: mol_type = genomic DNA
agtttggacaatgatgagcaagttctgacggtagcacttttgtccaaact

SEQ ID NO: 62245 - DNA, 40 bp, Streptococcus pyogenes
  source 1..40: mol_type = genomic DNA
tcatctatgggatcacttcctgtatatagtattgcaaatc

SEQ ID NO: 62246 - protein, 592 aa, Microbacterium aurum
MGSRRPTASEQNSRIISTVGQNLHHRRPAAESNDKAISDEEDIMRTTALDATASEHTEEAPVLLAVSYLRVSTREQAERGGTDEGFSIPAQREANQRKADELGARIVREFADAGESARSADRDGLQDMLAFIAATRVQFCLVHKLDRLARNRADDVKIHEALLAAGVTLVSATESIDQTPSGMLVHGIMSSIAEFYSRNLATEVTKGLTQKVAQGGTPMRAPIGYLNVRRTDEQGREIRTVEVDPERAPLITWAFERYADGETSVTGLLRDLTARGLVTVPTPKRPSKPLGKNTLYKLLTNPYYAGVIRYKGGLYPGAHEPIVEPALFDTVQSLLRARTAKMTRHVQHAHHLKGLLHCGTCGSRMLLDFATNPRGTTYAYFVCSGRAAKKTNCTRRAVPVAVAERLVADSYASITINDQTYRDLAAKVDAAFDKRMSGRDQEIADLMANRARLESESDKLLAAHFADAIDLPTLKRHQDRIRAGLADVNRKLAEHDEHHTGGRTFLHDSLRLLTDAHHAYARSGDADRRLANQAFYTRLDITDDEQLRPRLAEPFSTIVREAHEHSEDEGKGAEHEHDEPTHVACSRKTLSV

SEQ ID NO: 62247 - DNA, 50 bp, Microbacterium aurum
  source 1..50: mol_type = genomic DNA
gtgttcgcgtaagacactttcggtgggcccaatggagcactgcgggaaca

SEQ ID NO: 62248 - DNA, 40 bp, Microbacterium aurum
  source 1..40: mol_type = genomic DNA
agcggggggtttcttcggtggacctgaggggattcgaacc

SEQ ID NO: 62249 - DNA, 50 bp, Microbacterium aurum
  source 1..50: mol_type = genomic DNA
gtgttcgcgtaagacactttcggtgagcccaatggagcactgcgggaaca

SEQ ID NO: 62250 - DNA, 40 bp, Microbacterium aurum
  source 1..40: mol_type = genomic DNA
aaagggtcatttgtgctgtgaacctgtggggatttgagcc

SEQ ID NO: 62251 - protein, 520 aa, Collinsella tanakaei
MARKKKFELNDNNIAIAYYRFSSHSQNEASIDQQRELAHAWADAHGFKIVKEYEDAAISGTTENRPGFQQMLSEVAKIRPRVLIMWKTDRLGRDKYVLAMAKRTIRDSGCEIRLLAENIPTDGPEGVLIEGLMDAMAEYYSRQLSQNIQRGMDYNAQHALYNGHKLFGYGVDKSTKRYIVDPDTAPFVQRMFAEYAEGKAMQTICDELNAQGLRTTRGAKFGVKTMNKMLQNRAYIGEYRHGDIVVEGGMPALVDEETFDKVQRKFAENKRKGSQRARGMDENDAPRYWLTGKVYCGKCGNTLQGVSGTSGTGRTYYYYYCSAQRRKQCTLKKVRKEKLEDAVTMILRSILHDSENLMSLAVDAAAYYEKNYRDTGYLDGLEAKRREVEKSLANLVKVIESGLISETVTERLVQLEEQKRALNEAIEAENIRAALCEDEHTIKAYFEKFLHADFDNPETRDQVLEYFVDKIYLTDDGLVVTSWYSEDRTEVTWDMLYGEDGNPFVKGEAVKFDCFPFGST

SEQ ID NO: 62252 - DNA, 50 bp, Collinsella tanakaei; identical to SEQ ID NO: 19077
  source 1..50: mol_type = genomic DNA

SEQ ID NO: 62253 - DNA, 40 bp, Collinsella tanakaei
  source 1..40: mol_type = genomic DNA
cgattctccgcgcctccaccaaacgcgaactgggctttta

SEQ ID NO: 62254 - DNA, 50 bp, Collinsella tanakaei
  source 1..50: mol_type = genomic DNA
cgactgcttcccctttggctccacccgagtaggaagcgtcgaactattct

SEQ ID NO: 62255 - DNA, 40 bp, Collinsella tanakaei
  source 1..40: mol_type = genomic DNA
tcattctctgcccttccacccatccagacctgggcatcta

SEQ ID NO: 62256 - protein, 410 aa, Gordonia paraffinivorans
MLADIDRGAVDAVISWHPDRLHRRPAELEQFITLCDQHAVEIRTVQAGAMDLSTPSGRLVARMLGAAARHEIEHKSERIRRARVQLAQQGKYGGGRRAFGWESDGLTQRADEAELIRYAASQVLAGVSLRQVVGEFNRRQIPTASGSGRWVGAKLRSILLSPRNAGLAALNGEILGEATWEPIIDRDKFYALQAILNDPDRRWPRGGSAAAWLGSGIYRCGVCGSNSLRVNPTASGRRRYRCYAPRADGDRTRHVGRDQERVDEFVTRVLLARLSMEDAAPLFAAPDRGGVDTNALAGELSQLEDRLNDLADLYGRGGITAAQLESGTASIRQRQDEVTAALAAAAETNPVAALAGADDIEERWRSLSLGVQREILKSLVTVTILPTKPGRKGDGGYFDYDAIHFEWRTR

SEQ ID NO: 62257 - DNA, 50 bp, Gordonia paraffinivorans
  source 1..50: mol_type = genomic DNA
cggtgacaccactagcgggttgttaatgcctcccattaaacatggcataa

SEQ ID NO: 62258 - DNA, 40 bp, Gordonia paraffinivorans
  source 1..40: mol_type = genomic DNA
cggggcgtacaagttcgggaactcgatgggctcggcgctc

SEQ ID NO: 62259 - DNA, 50 bp, Gordonia paraffinivorans
  source 1..50: mol_type = genomic DNA
cggtgacaccactagcgggttgttcatgcctcccattaaacatggcataa

SEQ ID NO: 62260 - DNA, 40 bp, Gordonia paraffinivorans
  source 1..40: mol_type = genomic DNA
cggggctcacaagtgctcgcactccctgcggccggcgcgc

SEQ ID NO: 62261 - protein, 487 aa, Collinsella aerofaciens
MGGRAAIYARFSSHNQRGESIEIQVEKSRAYCAENDLRVVATYCDFAQTGTNTDRAEFQRMMADAKRGLFDFVVIYKVTRIMRNRDEMAMARIMLRRCRVEILYAGEDISDGSAGVLQLGMLEVLAEYESALDGERIRDGIQKNAERCMANGCVRYGWDIVDGRYVVNEEEAAAIRLGVRMVLSGKSVADVVRAWEPYRTKRGGKWRFQTVRRILMRRENGGEYRYAGVVVPGGMPAIVPMDDEERVIRMLEDSHRPRAKTEAWDFPLTGKLYDGRDGGLMTGTSGTGKSGRTYHYYRCRSCGRTVRRDVVEKRVADAVREALGSADSRERIARMLADAEEERADEKPLSETIKGELAKIETAFSNIWAAIESGIAPPGGKERIDALKQRQALLKDELRTAEALEAARLDYDRALFWLEGMAAAEVDDAQLLRTFVARVVLGGPDDDDGLRVAFTFDDSAGLGDNPSLPGAIGPGGEVFDRMNASST

SEQ ID NO: 62262 - DNA, 50 bp, Collinsella aerofaciens; identical to SEQ ID NO: 62032
  source 1..50: mol_type = genomic DNA

SEQ ID NO: 62263 - DNA, 40 bp, Collinsella aerofaciens
  source 1..40: mol_type = genomic DNA
agttcgattctccgcgcctccaccaatatttacaggcagg

SEQ ID NO: 62264 - DNA, 50 bp, Collinsella aerofaciens
  source 1..50: mol_type = genomic DNA
tgttcgaccgaatgaacgccagctctaccaactgttcagtaggcgaacac

SEQ ID NO: 62265 - DNA, 40 bp, Collinsella aerofaciens
  source 1..40: mol_type = genomic DNA
ggttttctttttttctcctctaccaatatttacaagcaga

SEQ ID NO: 62266 - protein, 550 aa, Mycobacterium kansasii; identical to SEQ ID NO: 55121

SEQ ID NO: 62267 - DNA, 50 bp, Mycobacterium kansasii
  source 1..50: mol_type = genomic DNA
gatcgtgatgcgcggcgaatagaacaatatcttgaacacaacacacggta

SEQ ID NO: 62268 - DNA, 40 bp, Mycobacterium kansasii
  source 1..40: mol_type = genomic DNA
ctatgcgcggcgaatagaacagcagccggaacacaactcg

SEQ ID NO: 62269 - DNA, 50 bp, Mycobacterium kansasii
  source 1..50: mol_type = genomic DNA
gatcgtgatgcgcggcgaatagaagaatatcttgaacacaacacacggta

SEQ ID NO: 62270 - DNA, 40 bp, Mycobacterium kansasii
  source 1..40: mol_type = genomic DNA
aaatgtgcagggattagaagagcagcttgcacacagcttg

SEQ ID NO: 62271 - protein, 539 aa, Mycobacterium intracellulare
MPKPLRAVVGARVSHLDDDKDNTRKVSHLAQTEEGERWAKAHGYTIVGRFEDLGISAGKTTPFERPDLGKWLAPERLHEWDVLVFSKIDRAFRSTNDCVEFAKWTKANRKILAFAGDGVVLDYLHPKKDSLDQMMSEFFIYVGSFFAAIELSRFKTRATDRLDYLRTTDRVSHGVPPLGYRTVPHPSGQGKALERDPEGYKLLHEIKTKLVDEHESLTSIARWLNEDGRTTSVAKARGGGKRWSVTTLKRTLTSQRTQGLRVMSVFEPAPTEENPDRKLRTGEKLVLDAEGQPIRMAEPTFSEEDWSRIQAALGDRTTSGKARQMTPNPLAGVGYCVCGYSLALHRRKSSSGKLHTYVRCGRSPDGCRGAIRLDDAELILEENFLEAYGDREMQRLVFVPGEDHSQELAQTEQSLERLRWESDNGLVDDEALYKSRLSALVGRKAELAANTVVPARWEPVGTGKTYRELWSDDATDRRQVLRESGIRLVLHCPPRGTTTQTKVIPWTIETPAGWPMPEAVELPSNPGMDARIKALDARM

SEQ ID NO: 62272 - DNA, 50 bp, Mycobacterium intracellulare
  source 1..50: mol_type = genomic DNA
gttgtcgtatgtgccgccttcacgttgtactgcgctgtactcttgacaac

SEQ ID NO: 62273 - DNA, 40 bp, Mycobacterium intracellulare
  source 1..40: mol_type = genomic DNA
gtggccggtcgctttgacgttgtactgcgcgacggcgatc

SEQ ID NO: 62274 - DNA, 50 bp, Mycobacterium intracellulare
  source 1..50: mol_type = genomic DNA
gttgtcgtatgtgccgccttcacgacgtactgcgctgtactcttgacaac

SEQ ID NO: 62275 - DNA, 40 bp, Mycobacterium intracellulare
  source 1..40: mol_type = genomic DNA
gcggccggccgtgcggaagacgcaccgcgcgccggcgctc

SEQ ID NO: 62276 - protein, 545 aa, Paracoccus denitrificans
MNIHSPTTTARAALYLRVSTARQAEHDISIPDQKRQGEAYCEQRGYQLVETYVEPGATATNDKRPEFQRMIEAGTSKPAPFDIVVVHSFSRFFRDHFEMEFYVRKLAKNGVKLVSITQEMGDDPMHQMMRQIMALFDEYQSKENAKHVLRAMNENARQGFWNGARPPIGYRIVAAEQRGSKIKKKLEIDPLHADTVRLIYRLFLEGDGTSGAMGVKAIATYLNERRFFTRDGGRWGLAQIHAILTRTTYIGEHRFNTRSHKDREKKPESEVAIMAVPPLIERETFDAVQARLKSRNPMVTPARVSSGPTLLTGICFCAKCGGAMTLRTGQGSTGATYRYYTCSTKARQGKTGCKGRTIPMDKLDHTVADYIGDRLLLPKRLETVLASVIDRRQERTERRREHLAELQRRITEADQRLGRLFDAIEAGMVDKDDAMAKERMVSLKALRDQAAADAERTQLALDSSGNQGVTPDMLKGFARKARERIRLNDGGYRRDHLRALAQRVEVADDEVRIMGSKSELLRTLVAASSVETAAFGVHSSVLKWR

SEQ ID NO: 62277 - DNA, 50 bp, Paracoccus denitrificans
  source 1..50: mol_type = genomic DNA
ttcatagttctgttctgaaatggcgcgccccaccgggtgaagatgacaac

SEQ ID NO: 62278 - DNA, 40 bp, Paracoccus denitrificans
  source 1..40: mol_type = genomic DNA
tagcaaagggggaaatggcgcacccgacacgattcgaacg

SEQ ID NO: 62279 - DNA, 50 bp, Paracoccus denitrificans
  source 1..50: mol_type = genomic DNA
ttcatagttctgttctgaaatggcgagccccaccgggtgaagatgacaac

SEQ ID NO: 62280 - DNA, 40 bp, Paracoccus denitrificans
  source 1..40: mol_type = genomic DNA
tagcaaagggggcaaatgtgaacaccacacttctagaaca

SEQ ID NO: 62281 - protein, 591 aa, Kitasatospora griseola
MSPILSPSVLPHQLDVVRVFLYARQSSARADGSEVSTESQLAAGHAVCAARSALGVPWVVVGEFADVGRSGWDPNVIRTDFEKMMTGVRAGEADVVIVNELSRLTRQGAQDALEIDSEFKKHAVRFMSILEPFLDTSTPIGVAIFALIAALAKQDSDIKAERLRGAKDTIAAVGGRHSSSPPYGMRAVREQVGDMVISVLEPDEDHPEHVETVLRMVELSFDGTSDNKIATTLDEEGIPAPGMSEKRATKKRMESIQARRVSGDADSPIRWRAQTVRWILNHPVIGGFASERVKRGAAYVNVIARDKATGKPLTPHRGIISGARWLELQEKRQAKAKPNRKSTTDTTPTLLSGWRFLGCGVCGGAMGQSAGEQGRTNLWVESYNCSNPKGHGGLSIRRDVLDDHVTRRVWARLQAADMDNENDREWLAAAALRYAAQNDLAGVAEEQRETKAHLDHVTRSIAELQADRKAGLYRGRDELATWRATMEQYRTYEDQCRARLAELAAAMAGRIEIPSEWFAELDPLDDGSPWANWGVIQRREFLSFFVDHVTVGRGKDPVTKKFIPTDERVEIHWTPALQEDEEENEEELAMV

SEQ ID NO: 62282 - DNA, 50 bp, Kitasatospora griseola
  source 1..50: mol_type = genomic DNA
gtagtaggtagttgtctatggaaggtggtccatgcgaaactacctactac

SEQ ID NO: 62283 - DNA, 40 bp, Kitasatospora griseola
  source 1..40: mol_type = genomic DNA
ccacagattcttggcgaaggtcgtccagatgaagaccgac

SEQ ID NO: 62284 - DNA, 50 bp, Kitasatospora griseola
  source 1..50: mol_type = genomic DNA
gtagtaggtagttgtctatggaagctggtccatgcgaaactacctactac

SEQ ID NO: 62285 - DNA, 40 bp, Kitasatospora griseola
  source 1..40: mol_type = genomic DNA
cctcagcttcttgctgaaactctgccagttgcagacctaa

SEQ ID NO: 62286 - protein, 556 aa, Pseudomonas viridiflava
MTKAYAYIRYSRALQATGDSENRQLTALELFETSTGTKIVEVVYDKGKSAFRGDNARSGNFKEMLDRMQSGAIRPGDYLVVESIDRITRQRVLDGVELLQGILKKGINIYTTVDKKTYSYNDPSRDFENLLMISLIAKRANEESETKSGRLLSAWKARKAKAENGEVIIKKGKSIPYGLRVEEGQFVIHKEEQEEIKQLFELLLQFGINTAITKINETSLKKWNNGTLNKIIKHKTVIGCMATHRIEYTADGKAKKILTGFIENYYPNLIEPGLFYKAVDVMANRKQKNWTGRRTEQDFNVFKHCIFCAECGGKLYYDHRGSRYKGKIYPFFKCDNARVQKHVCTADNIRFEYVLGSLLESIKIINRIATEFKRDFKGISTQARFINPKINSLLKADNENNNLVLEEKQKQLISRRTKLDNMNTQMVEADYNVPTKFIQEISKTEKEIEVLNKEILLIHSAFADEGTINVQDTKTVIDLFMTDEGRAKLNYFFKTNDIIFIVSHKKSTRETRFSMRRKNDLIDERICNNFIKFPLKDILGVFGLGDLQTMFDLTVN

SEQ ID NO: 62287 - DNA, 50 bp, Pseudomonas viridiflava
  source 1..50: mol_type = genomic DNA
ctcggagaaatggtttacctaatcatggtcaggtgatatgatttaccgag

SEQ ID NO: 62288 - DNA, 40 bp, Pseudomonas viridiflava
  source 1..40: mol_type = genomic DNA
tcctagagacaaaccgctgatgatccggttgcgcctcggg

SEQ ID NO: 62289 - DNA, 50 bp, Pseudomonas viridiflava
  source 1..50: mol_type = genomic DNA
ctcggagaaatggtttacctaatcctggtcaggtgatatgatttaccgag

SEQ ID NO: 62290 - DNA, 40 bp, Pseudomonas viridiflava
  source 1..40: mol_type = genomic DNA
acctacagaaaagcctctgctgcttctgtggtgcctgggg

SEQ ID NO: 62291 - protein, 489 aa, Megamonas rupellensis
MLKTIIYARYSSDKQNEQSIEGQIHECEQFAKTHDMVIIKHYIDRALSGKTDDRPSFLQMIKDSSSGLFDAILVYKTDRFARNRYDSAVYKAKLKKNGIKIFYAKENIPDGPEGIILESMLEGFAEYYSAELSQKVKRGIKENIRKGLSFGGACPFGYKIVNKKYVIDDEQAPYVKKIFEDYAKGRRAIDIFNELNTLPNYAGKGRKWNRSSLNRMLTNKKYIGIYELEDVCVKDAIPSIIDEALFNKVQSRILFNRRHTTRAKVNYLLSGKLFCGLCEHSMTGKTGTSKTKVKYHYYVCSNRHCKQKKYRKELLEDIIIQYTVKDILNPKHFKMIAKKCLEIQQADNKINDILLMLKKQLTATKTKINNLMNAIEAGIITTSTKDRLEQLEQEKYKLELEISTQQLNSNRLLSEKQIIYMLNVFYNKRVDVSFYNQIIDCFIYKIYIYSDKICIVYNLNNSDKDVTYSDINELYKSSHLNSCGSPYDL

SEQ ID NO: 62292 - DNA, 50 bp, Megamonas rupellensis
  source 1..50: mol_type = genomic DNA
agttcgcaccttaactcatgcggttcaccatatgatttaacatgcgaaca

SEQ ID NO: 62293 - DNA, 40 bp, Megamonas rupellensis
  source 1..40: mol_type = genomic DNA
ggttcgagtcccgggtgggtcaccatatgatttataaaat

SEQ ID NO: 62294 - DNA, 50 bp, Megamonas rupellensis
  source 1..50: mol_type = genomic DNA
agttcgcaccttaactcatgcggtgcaccatatgatttaacatgcgaaca

SEQ ID NO: 62295 - DNA, 40 bp, Megamonas rupellensis
  source 1..40: mol_type = genomic DNA
agttcatgcccagggtgtggcatcataggattcataagct

SEQ ID NO: 62296 - protein, 486 aa, Megamonas rupellensis
MLKTIIYARYSSDKQNEQSIEGQIHECEQFAKTHDMVIIKHYIDRALSGKTDDRPSFLQMIKDSSSGLFDAVLVYKTDRFARNRYDSAVYKAKLKKNGIKIFYAKENIPDGPEGIILESMLEGFAEYYSAELSQKVKRGIKENIRKGLSFGGACPFGYKIVNKKYVIDDEQAPYVKKIFEDYAKGRRAIDIFNELNTLPNYAGKGRKWNRSSLNRMLTNKKYIGIYELEDVCVKDAIPPIIDEALFNKVQSRILFNRRHTTRAKVNYLLSGKLFCGLCEHSMTGKTGTSKTKVKYHYYVCSNRHCKQKKYRKELLEDIIIQYTVKDILNPKHFKMIAKKCLEIQQADNKINDILSMLKKQLTATKTKINNLMNAIEAGIITTSTKDRLEQLEQEKYKLEIEISTQQLNSNMLLSEEQIIYMLNEFYKKRADVSFYNQIIDCFIYKIYIYFDKICIVYNLNNSNKDVTYSDINELYKSSHLNSCGSP

SEQ ID NO: 62297 - DNA, 50 bp, Megamonas rupellensis
  source 1..50: mol_type = genomic DNA
agttcgcaccttaactcatgtggttcaccatttacgtcagcttgcgaaca

SEQ ID NO: 62298 - DNA, 40 bp, Megamonas rupellensis; identical to SEQ ID NO: 62293
  source 1..40: mol_type = genomic DNA

SEQ ID NO: 62299 - DNA, 50 bp, Megamonas rupellensis
  source 1..50: mol_type = genomic DNA
agttcgcaccttaactcatgtggtgcaccatttacgtcagcttgcgaaca

SEQ ID NO: 62300 - DNA, 40 bp, Megamonas rupellensis; identical to SEQ ID NO: 62295
  source 1..40: mol_type = genomic DNA

SEQ ID NO: 62301 - protein, 478 aa, Brachybacterium paraconglomeratum
MVELVALRKTNEVAAYVRASMDRKGDRWTVDTQLRKIRALAEAKDWNVVEVYEDNAVSATKKRRAGTRWAEMLDDARAGRFSMVVAVDMDRLLRSTKDLNTLIDLGLRVVTVDGEIDLSTADGEFRATMLAALARFEARRKAERQIRSNERRRAEGIPASTWKAFGWTREGELIEEEAAAVRRAFDAFLGEPSLSIRRIREDLNSAGHLTARGSEFSVDAVRYLLANSLYAGFIRHYKTGELYPVQGEAFPPIVGEQTWRAAVAKLEDNVRRSARQGNQPKYLLSTIGLCGKCGATLVSGTNSRKQPTYRCGEHFHLTRQREPVDAMVTEAVLTRLSSVDVHDLVMPQEAAGPDREELLTERNALVERVKELSPLLRDIHQPVLEITAAINDVKARIDEIDAELLDRSVSVAAKLLAEVDEPVGTAERREVVESKWKALDMDRRRMLVDELVTVTIEPIMPGHVKFDPDLVRIEPRRD

SEQ ID NO: 62302 - DNA, 50 bp, Brachybacterium paraconglomeratum; identical to SEQ ID NO: 40057
  source 1..50: mol_type = genomic DNA

SEQ ID NO: 62303 - DNA, 40 bp, Brachybacterium paraconglomeratum
  source 1..40: mol_type = genomic DNA
gggcgtgatcgacatgcgctacgagaacccgctctacctc

SEQ ID NO: 62304 - DNA, 50 bp, Brachybacterium paraconglomeratum
  source 1..50: mol_type = genomic DNA
caacgccacaagcccgacatgcgcgggcgcatgtcggggttgcaacactc

SEQ ID NO: 62305 - DNA, 40 bp, Brachybacterium paraconglomeratum
  source 1..40: mol_type = genomic DNA
aggcgtgagccacatgcccggccagaagcagcacaatttc

SEQ ID NO: 62306 - protein, 498 aa, Variovorax boronicumulans
MRDEGLSAYHQKHVKSGALGVFLAAVESGKVPPGSVLVVEGLDRLSRAEPIQAQGQLAQIVNAGITVVTASDGKAYSRERLKANPMDLVYSLLVMIRAHEESDTKSKRVTASIVRQCQGWIAGTYRGLIRNGKDPLWVELVDGKWQLIPERVEAVRAALDLYRRGYSATRILDAMADLKLSLTGQGLQTLQIYRLIRQRALLGEKELEVDGQQFHLPGYYPALLTEAEWSELQALAAGRGRRVAKGAVPHIITGMRITICGYCGRALVGQNIGTRNRRPDGGILDGHRRLHCTSYSHEGGCPVPGSCSVAPIERALMAYCSDMINLQALYGGDRAAAPRATLAAARARHAELAVQLERLTDAMLAAADDGGAPATFAKRARALEAEQATVAADIAAAERDLAAVARTDLQGVDEIWRKLAAGVEAQDTDARIQARQLVADTFEKIVIYKKGVDPETAPDKTIDLLLLAKGGTARPLRIDAKGNWVAAEASTETPPLID

SEQ ID NO: 62307 - DNA, 50 bp, Variovorax boronicumulans
  source 1..50: mol_type = genomic DNA
ggtttagaaagagtatccttcgcgcagccgagcgataccattcctatact

SEQ ID NO: 62308 - DNA, 40 bp, Variovorax boronicumulans
  source 1..40: mol_type = genomic DNA
atcggtcaaggccttggggcaaccaaggctgacgaagccg

SEQ ID NO: 62309 - DNA, 50 bp, Variovorax boronicumulans
  source 1..50: mol_type = genomic DNA
ggtttagaaagagtatccttcgcgacgccgagcgataccattcctatact

SEQ ID NO: 62310 - DNA, 40 bp, Variovorax boronicumulans
  source 1..40: mol_type = genomic DNA
cacggtcactgatttggggacaccaaggctgaaaacccag

SEQ ID NO: 62311 - protein, 472 aa, Blautia obeum
MSDRIGALYIRVSTDDQAELSPDAQKRLLLDYAKKNGIIISNDFIFSESVSGRHVQKRPEFQRMIGIAKQPSHPIDVILVWKYSRFARNQEESIVYKSMLKKDHVEVISVSEPLVDGPFGSLIERIIEWMDEYYSIRLSGEVLRGMKEKALRNGYQSSPCLGYEAVGHGKPFQINEAEYAMVSYIMDLYDNQNMDETAIARKCNDLGYKTKRGNPFERRTIDRILQNPFYCGIVSWNGVEFEGAHEVRISKERFDRRQRLITSRKRPMKARNISTCKHWLSGLLKCSVCGATLSYTGNGKCPYFQCWKYAKGFHKTSVALSVKKAEEAVIEYFDQVLAGADFTYVRKEQPAADETAAIEQLQKELSKLSARESRIRDAYESGIDSLEEYKANKERLISNRLQLETGLEKLRKEQEEKEVNKEDVLHEIKSLNDILKNPDVSYEEKGTLIRTIVDQIVYDKESGKMYFDIIVS

SEQ ID NO: 62312 - DNA, 50 bp, Blautia obeum
  source 1..50: mol_type = genomic DNA
tattatagggtactgcactctgggccaccagacttcaataccctataata

SEQ ID NO: 62313 - DNA, 40 bp, Blautia obeum; identical to SEQ ID NO: 51968
  source 1..40: mol_type = genomic DNA

SEQ ID NO: 62314 - DNA, 50 bp, Blautia obeum; identical to SEQ ID NO: 62312
  source 1..50: mol_type = genomic DNA

SEQ ID NO: 62315 - DNA, 40 bp, Blautia obeum
  source 1..40: mol_type = genomic DNA
ttatgtcatgccttccaggccaccatccagactcatgctg

SEQ ID NO: 62316 - protein, 472 aa, Blautia obeum
MSDRIGALYIRVSTDDQAELSPDAQKRLLLDYAKKNGIIISNDFIFSESVSGRHVQKRPEFQRMIGIAKQPSHPIDVILVWKYSRFARNQEESIVYKSMLKKDHVEVISVSEPLIDGPFGSLIERIIEWMDEYYSIRLSGEVLRGMKEKALRNGYQSSPCLGYEAVGHGKPFQINEAEYAMVSYIMDLYDNQNMDETAIARKCNDLGYKTKRGNPFERRTIDRILQNPFYCGIVSWNGVEFEGAHEVRISKERFDRRQRLIASRKRPMKARNISTCKHWLSGLLKCSVCGATLSYTGNGKCPYFQCWKYAKGFHKTSVALSVKKAEEAVIEYFDQVLAGADFTYVRKEQPAADETAAIEQLQKELSKLSARENRIRDAYESGIDSLEEYKANKERLISNRLQLETELEKLRKEQEEKEVNKEDVLHEIKSLNDILKNPDVSYEEKGTLIRTIVDQIIYDKESGKMYFDIIVS

SEQ ID NO: 62317 - DNA, 50 bp, Blautia obeum
  source 1..50: mol_type = genomic DNA
tattatagggtattacagtccgggccaccagacttcaataccctataata

SEQ ID NO: 62318 - DNA, 40 bp, Blautia obeum; identical to SEQ ID NO: 51968
  source 1..40: mol_type = genomic DNA

SEQ ID NO: 62319 - DNA, 50 bp, Blautia obeum; identical to SEQ ID NO: 62317
  source 1..50: mol_type = genomic DNA

SEQ ID NO: 62320 - DNA, 40 bp, Blautia obeum; identical to SEQ ID NO: 62315
  source 1..40: mol_type = genomic DNA

SEQ ID NO: 62321 - protein, 505 aa, Paenibacillus odorifer
MVAKADETPIGKIKVAIYIRVSTDMQVEDGFSIEGQRTRLNSYADSQDWKVFDTYIDDGYSAKDLKRPAMMRMMEDMEEKKFEVILVYKLDRLTRSVGDLHGLLNTFDRYGVKFKSATEIFETTTAMGRFFITLVGAMAEWERGTISERIRFGVEQMVAEGRRPGGILPYGYTQEGVLIPEEAEQIREIRDLYMSGMGYKTIAVRMSREGKLRRESEWTSATVGYTLENPFYAGIIRMGSKTPEGLYVNTRKSERVKCVYGKGSHVPIFTDEEYEETKQFMKRKTHSGYSKIKIYWFSGVLRCGRCGGAMFGHLSTRRTTSRGVVRTPHYICSNKHHSNKCDLPMFRQSHVEHLIMEYINKVQEDTDKLKSASLEMIADEGKKTTEIDKAKRDLLKVSDRREKWQYMFVEGLISKEDIRRKMAEEDVAEQEAKQRIANNQKSLSGIPRVTELAGLAEAWEYIDDEEKKEYIYTIFNKIEVNTDLTRPKGTKDKFFDAYIQDVTFN

SEQ ID NO: 62322 - DNA, 50 bp, Paenibacillus odorifer
  source 1..50: mol_type = genomic DNA
gagtaccactttgtactatatagactcctatcttagtcaatgtggtgttc

SEQ ID NO: 62323 - DNA, 40 bp, Paenibacillus odorifer
  source 1..40: mol_type = genomic DNA
actatggccggaagacaagcttccatcgtgcccggtgttc

SEQ ID NO: 62324 - DNA, 50 bp, Paenibacillus odorifer
  source 1..50: mol_type = genomic DNA
gagtaccactttgtactatatagatccctatcttagtcaatgtggtgttc

SEQ ID NO: 62325 - DNA, 40 bp, Paenibacillus odorifer
  source 1..40: mol_type = genomic DNA
tccatggcaggaagccaggtctcctacctcccagatgttc

SEQ ID NO: 62326 - protein, 505 aa, Paenibacillus odorifer
MVAKADETPIGKIKVAIYIRVSTDMQVEDGFSIEGQRTRLNSYADSQDWKVFDTYIDDGYSAKDLKRPAMMRMMEDMEEKKFEVILVYKLDRLTRSVGDLHGLLNTFDRYGVKFKSATEIFETTTAMGRFFITLVGAMAEWERGTISERIRFGVEQMVAEGRRPGGILPYGYTQEGVLIPEEAEQIREIRDLYMSGMGYKTIAVRMSREGKLRRESEWTSATVGYTLENPFYAGIIRMGSKTPEGLYVNTRKSERVKCVYGKGSHVPIFTDEEYEETKQFMKRKTHSGYSKIKIYWFSGVLRCGRCGGAMFGHLSTRRTTSRGVVRTPHYICSNKHHSNKCDLPMFRQSHVEHLIMEYINKVQEDTDKLKSASLEMIADEGKKTTEIDKAKRDLLKVADRREKWQYMFVEGLISKEDIRRKMAEEDVAEQEARQRIANNQKSLSGIPRVTELAGLAEAWEYIDDEEKKEYIYTIFNKIEVNTDLTKPKGTKDKFFDAYIQDVTFN

SEQ ID NO: 62327 - DNA, 50 bp, Paenibacillus odorifer; identical to SEQ ID NO: 62322
  source 1..50: mol_type = genomic DNA

SEQ ID NO: 62328 - DNA, 40 bp, Paenibacillus odorifer; identical to SEQ ID NO: 62323
  source 1..40: mol_type = genomic DNA

SEQ ID NO: 62329 - DNA, 50 bp, Paenibacillus odorifer; identical to SEQ ID NO: 62324
  source 1..50: mol_type = genomic DNA

SEQ ID NO: 62330 - DNA, 40 bp, Paenibacillus odorifer; identical to SEQ ID NO: 62325
  source 1..40: mol_type = genomic DNA

SEQ ID NO: 62331 - protein, 554 aa, Burkholderia stagnalis; identical to SEQ ID NO: 22481

SEQ ID NO: 62332 - DNA, 50 bp, Burkholderia stagnalis
  source 1..50: mol_type = genomic DNA
tgtatatttctagcatctttcgggcacccgagcgatactatacctatacg

SEQ ID NO: 62333 - DNA, 40 bp, Burkholderia stagnalis
  source 1..40: mol_type = genomic DNA
gtcgacgagggctttcgggcaaccaagcgaaacgaaccct

SEQ ID NO: 62334 - DNA, 50 bp, Burkholderia stagnalis
  source 1..50: mol_type = genomic DNA
tgtatatttctagcatctttcgggaacccgagcgatactatacctatacg

SEQ ID NO: 62335 - DNA, 40 bp, Burkholderia stagnalis
  source 1..40: mol_type = genomic DNA
caagagcaggcctttggggaaactaagagaaacaaacccc

SEQ ID NO: 62336 - protein, 474 aa, Aeromicrobium erythreum
MNTQSRRAAVYVRISKDRSAEGLGVARQEAECRELATRLGLEVGPVYVDNDLSASTGKPRPSYRAMLEAMSAGQLDAVLAWHPDRLYRRPDDLEELIGVADGAGVTFATVKAGELDLATASGRMVARFLGAAARYETERQAERQSSKARELAQAGRNSGGGYRPFGWADDRLALDPVEADALRHLIDMALAGQAVNAMCSWLTASGIKTTAGGTRWSSVAVKRMLTSPRLAGLSVYKGEVVGRGEWEPLIDETTHRRVVEALTYRGPARANRARVALLSSAMLRCGICGYGLLTFRRNESRDKQRAYGCREATIAGRPGYGLACGRVSIRAEALEEDIANRVLARILRNRRAIATSAEGVRRPDSAAGELGELEARLRDLGVDYADGLLGRVEFRAARDRLTELIEAARSRLEAAEAQDGLPVGSAEEVAAWWDAASLSQRQVIVRGQILRILIGAHSGGRAHYDAGRVTIEWR

SEQ ID NO: 62337 - DNA, 50 bp, Aeromicrobium erythreum
  source 1..50: mol_type = genomic DNA
aggagtgtttggataaccgtggagtccgccagggttgcctgaacacgtca

SEQ ID NO: 62338 - DNA, 40 bp, Aeromicrobium erythreum
  source 1..40: mol_type = genomic DNA
gaggtccatcaccgacgagtcggccagggtggtggcgtcg

SEQ ID NO: 62339 - DNA, 50 bp, Aeromicrobium erythreum
  source 1..50: mol_type = genomic DNA
aggagtgtttggataaccgtggaggccgccagggttgcctgaacacgtca

SEQ ID NO: 62340 - DNA, 40 bp, Aeromicrobium erythreum
  source 1..40: mol_type = genomic DNA
gaggcccagcgctgacgaggcggccaggttccagaggtca

SEQ ID NO: 62341 - protein, 511 aa, Flavonifractor plautii
MNIAAYCRVSTDKEDQLNSLEAQKEFFSEYTKRTGDNLVRLYADEGISGTKIKNRKEFLRMMADAEHGLFDMVVVKDISRFARNTVDLLQNVRKLKALGIETQFLTANMTSMGNSEFVLTIFGALAQEESANTSKRVKFGKKMNAEKGRVPNIVYGYDKTIGDYFNLAINEEEAAVVRQIYEWYIKDGYGAAKISIFLNERGLRTKRNCQWSQNGICRILTNELYTGKIINGKQEVTDFLTGQRADKDASEWMVVERPDLRIIDPETFERAQQIMQSRGKAFKVDKERQSNKYLFSTLIKCKECGWSFRRTVRTYKNTYVRWVCSGHNGRGADNCPNAVTVDEDELIEVLQEYFAGLLKAKKNVIRYVVGEFQRVYKAKDENLNYEKELTAQLAKLQKTRQKYMDMYADDLISREELNDKIGGMRKEIERLENELKMVSYHLTKGEQLEGVLQQTFKEIEDITDVRQMTNAQLKRIIQKIEVDKDGNVDIYLRLFGDLGLDETVLIHHDET

SEQ ID NO: 62342 - DNA, 50 bp, Flavonifractor plautii
  source 1..50: mol_type = genomic DNA
ccgttctaattcatcacgacgaaacatacggaagtgataaaatagaacgg

SEQ ID NO: 62343 - DNA, 40 bp, Flavonifractor plautii; identical to SEQ ID NO: 55748
  source 1..40: mol_type = genomic DNA

SEQ ID NO: 62344 - DNA, 50 bp, Flavonifractor plautii
  source 1..50: mol_type = genomic DNA
ccgttctaattcatcacgacgaaatttacggaagtgataaaatagaacgg

SEQ ID NO: 62345 - DNA, 40 bp, Flavonifractor plautii
  source 1..40: mol_type = genomic DNA
cttcagcacagcctctgtcttcaaggagctcagatatagt

SEQ ID NO: 62346 - protein, 529 aa, Salmonella enterica; identical to SEQ ID NO: 52521

SEQ ID NO: 62347 - DNA, 50 bp, Salmonella enterica; identical to SEQ ID NO: 47537
  source 1..50: mol_type = genomic DNA

SEQ ID NO: 62348 - DNA, 40 bp, Salmonella enterica; identical to SEQ ID NO: 59643
  source 1..40: mol_type = genomic DNA

SEQ ID NO: 62349 - DNA, 50 bp, Salmonella enterica; identical to SEQ ID NO: 47537
  source 1..50: mol_type = genomic DNA

SEQ ID NO: 62350 - DNA, 40 bp, Salmonella enterica
  source 1..40: mol_type = genomic DNA
tggccctaatcttagcctggaggggtgggtgaagcagccg

SEQ ID NO: 62351 - protein, 500 aa, Nocardia brasiliensis
MTLARRSAAAKARIITGAVIYARVSKDDAGGRSCREQINGCTEDCKYEEWQVLHVLEDNDRGASRHSKRERPDFQRLPTVLKPGQVLVVWEPSRITRDPVEFGPFCDVLAERDVPLYYDGRLYDMNDDDDRARVWQDILDGAKQAGKTRKRVIRALSANQDARLPHGKKSPGLRIVRDDRTGKPVRREIDPVQARILNEAARLILDENKTPRAVGRLFEDQWRASGGGAFRGPDVKRILTNPTLFGIYAHYGEELGEGQWPAVLDRELYPLLRRRLCSEVVVETRGTEPKYLLTSIARCNSCLELGKQGKIDHKGPTNKQRHGDRYICAEYNHVARNMVRVDAHVEEVLLSLLERPSTRTKLLAQDESETESIESELSAIKNLREEINAYVKNAARTRMSAESVAVYVEELEADIRAANARVDAMTQAADPVLIEAAREDIRELWASDRFTLQRKREIIRRGFDVRIVPVERRGRYSEVGVQVYPARSLAPQQNRAVGSV

SEQ ID NO: 62352 - DNA, 50 bp, Nocardia brasiliensis
  source 1..50: mol_type = genomic DNA
aagtcccgctaaatgaatttctcccagccaacatttatttagccgggggg

SEQ ID NO: 62353 - DNA, 40 bp, Nocardia brasiliensis
  source 1..40: mol_type = genomic DNA
gtaccgcgcgaatttctcccagcagacctgcaccgggccg

SEQ ID NO: 62354 - DNA, 50 bp, Nocardia brasiliensis; identical to SEQ ID NO: 62352
  source 1..50: mol_type = genomic DNA

SEQ ID NO: 62355 - DNA, 40 bp, Nocardia brasiliensis
  source 1..40: mol_type = genomic DNA
gttccgtgcacatttctcacatcaggcctgccctgagctg

SEQ ID NO: 62356 - protein, 528 aa, Klebsiella variicola
MKVPVWSYARVSTLSQIDGFGIQRQVNTINQFIQYLVLDHRLPYTLDVDNITQMVAEGKSAFKGKNWNPKTKLGQYRKMVMDGVVPDSVLIVENIDRLTRLDPFQAVEIISGMINRGTTILEIETGMTYSRYIPESITVLTMQINRANGESKRKSIMMQKSHLNRFGKVSKVRPRWFDVVEIDGVKQYRINDTAKAIQRMFIDYANGIGPAQIVRTYGTSDNGKQWTLVTVLRALSDKRVADDARYPPIVDKSLYEKVQAMKNPLRGSTHQKNMFNIFSGMSRCPLCKQSIIVKRNSHGGLFTVCLGKRTHKTCEARSMAYNAIERPLLNAIKGLDFSEVYNREESNVLTLRDQWIRNERDIAAFRERLSKASRHEKFAILDELEQISKEQDELSIRLKSIDAPHDVQLDFNDDKLDLDVSYRIELNNRMKKLIQSIDMVRVDTGRSTYTVYCSIKYWSDFMTHLVIIDAETKRLGTGGTNMLTTTLRSVSSINSDGTISGNPDMEAIEYWQSVMTQAFERAGVEMPK

SEQ ID NO: 62357 - DNA, 50 bp, Klebsiella variicola
  source 1..50: mol_type = genomic DNA
gggtgtacatacttgactaactaggagcagttatgatagtatgtacaccc

SEQ ID NO: 62358 - DNA, 40 bp, Klebsiella variicola
  source 1..40: mol_type = genomic DNA
cgggcccatcaatagcaaggaacagtcggtggtcccaccg

SEQ ID NO: 62359 - DNA, 50 bp, Klebsiella variicola
  source 1..50: mol_type = genomic DNA
gggtgtacatacttgactaactagccgcagttatgatagtatgtacaccc

SEQ ID NO: 62360 - DNA, 40 bp, Klebsiella variicola
  source 1..40: mol_type = genomic DNA
cagtcccatcaagagaaaaccacagactctgggctcactg

SEQ ID NO: 62361 - protein, 589 aa, Raoultella ornithinolytica
MSAYVTIPRNTLLPAKHNVMNRPRLYSYIRYSSERQGKGNSLERQKSYIAKMAKQIAEEYKLEVFEEYQDLGVSAYKGKNVQEGALSDFIAQVKSGVIPKGSFLLIESLDRFSRQNAMQAVNLFTGLLLNGITVITGIDRQVYKHTDANNDTFQQLMFSVMLFSRANEESSTKSQRTIASALSKIGRHQQRKPGDPVIAIKELGSDKWWTDSSSGYVNPHPVLFPIAKEIIQLKQDGWSNRMILRHLKNSYDGPIIGNKKSKGIWNMQHCSRILEPAIYGRKVITINNAEYILDDYYPAITSKDEYEALKLQVGNKGFAPNRESNPEIPLLSGIGILYCAHCSCYMVKAKSTLKNHPHAYRYQCASRDLHQDCNKWGFRASTLERTILQLIADRVFLPTKSQPSGLEGKIADIQSQIENYVLAIGSAKSPEIINNITSKIDQLEQEKQRLVVAKRLYDESIVQMNTEGWDKFREFDINDALAPLRAKIRASIKTVVMRVDCFRIDKKHNLFTITYRDQQKQRVVIENNSGWRKGKVYVEVQTINNTQLIESEGFILHDHIDILINRDKFMMEVKKRLENPRTLIDELTE

SEQ ID NO: 62362 - DNA, 50 bp, Raoultella ornithinolytica; identical to SEQ ID NO: 45382
  source 1..50: mol_type = genomic DNA

SEQ ID NO: 62363 - DNA, 40 bp, Raoultella ornithinolytica; identical to SEQ ID NO: 52738
  source 1..40: mol_type = genomic DNA

SEQ ID NO: 62364 - DNA, 50 bp, Raoultella ornithinolytica
  source 1..50: mol_type = genomic DNA
gattatacctattacacttcagtgtttactaaggtaaactacatcccatt

SEQ ID NO: 62365 - DNA, 40 bp, Raoultella ornithinolytica
  source 1..40: mol_type = genomic DNA
tcagggcctcactgcagtcttcatccacgtgaatgtcatt

SEQ ID NO: 62366 - protein, 589 aa, Raoultella ornithinolytica; identical to SEQ ID NO: 47751

SEQ ID NO: 62367 - DNA, 50 bp, Raoultella ornithinolytica; identical to SEQ ID NO: 45382
  source 1..50: mol_type = genomic DNA

SEQ ID NO: 62368 - DNA, 40 bp, Raoultella ornithinolytica; identical to SEQ ID NO: 52738
  source 1..40: mol_type = genomic DNA

SEQ ID NO: 62369 - DNA, 50 bp, Raoultella ornithinolytica; identical to SEQ ID NO: 62364
  source 1..50: mol_type = genomic DNA

SEQ ID NO: 62370 - DNA, 40 bp, Raoultella ornithinolytica; identical to SEQ ID NO: 62365
  source 1..40: mol_type = genomic DNA

SEQ ID NO: 62371 - protein, 479 aa, Rhodococcus fascians
MTVRAGIYCRISRDKAGEGLGVERQEKDCRALAERLGWEVAGVYVDNSVSAYSGAPRPGYSKLLQDIASGSVSGVLAWAPDRLHRSPVELEDYIALSERRDATTHTVRSGAWDLSSPSGRAVARTVGAWARYESEHKGDRIRRAREQAARAGKNNGGRRCYGYEPDGVTVRPAEAGVVAGIVADLLAGASLRAVVADLNERGVSTTTGRSAWTSTAVRSLVRSPRIAGLSTHHGEVVGVAQWPALVPVEQWQAIQGLLDDPTRKTNNSGGAVKWLGSGIYRCGVCGSDQVRVYHRDGRTRYRCKNRTRGVATAHVGREQAPLDLFVETLVVERLQQPDFRAAIAPKSVDVDVDVDALTVQRRAVQVRMEQLAGMFADGELTRAQLASGSERCRSQLDELDDQIARAVTDGPFSDLPGPEHIAGVWWGVGEDRAGGLSLDRRRRILDALMTVTILPVPPGRAPGGVYFRPEGVQIDWKVG

SEQ ID NO: 62372 - DNA, 50 bp, Rhodococcus fascians
  source 1..50: mol_type = genomic DNA
tggcgtcacaggcgcgaatccgtaaatgcggattctcgcctacgactact

SEQ ID NO: 62373 - DNA, 40 bp, Rhodococcus fascians
  source 1..40: mol_type = genomic DNA
cggtgcaacgggatcgggaaaatcggagtttctccggaca

SEQ ID NO: 62374 - DNA, 50 bp, Rhodococcus fascians
  source 1..50: mol_type = genomic DNA
tggcgtcacaggcgcgaatccgtatgtgcggattctcgcctacgactact

SEQ ID NO: 62375 - DNA, 40 bp, Rhodococcus fascians
  source 1..40: mol_type = genomic DNA
cgctgcaaagtgggcaggctgattggagtttctcccggga

SEQ ID NO: 62376 - protein, 549 aa, Streptococcus agalactiae; identical to SEQ ID NO: 12611

SEQ ID NO: 62377 - DNA, 50 bp, Streptococcus agalactiae; identical to SEQ ID NO: 12612
  source 1..50: mol_type = genomic DNA

SEQ ID NO: 62378 - DNA, 40 bp, Streptococcus agalactiae; identical to SEQ ID NO: 52303
  source 1..40: mol_type = genomic DNA

SEQ ID NO: 62379 - DNA, 50 bp, Streptococcus agalactiae
  source 1..50: mol_type = genomic DNA
ggtttggacaataaagataatgtcctgacggtagctctgttgtccaaact

SEQ ID NO: 62380 - DNA, 40 bp, Streptococcus agalactiae
  source 1..40: mol_type = genomic DNA
ccaaatgacacatcatttcctgagcacactgtcgcttcca

SEQ ID NO: 62381 - protein, 538 aa, Nocardia abscessus
MAKPQVTAGNDLVLDIYARVSRVGDERQRSTGGQVDDCTVRVQDLGATVGQVHVDDGRSAWNPSVRRPKWDALMARLESGETGGVVVFDMARFSRRPIEGERLILAAERGLVVLDSEGEYDLETANGRKAFRDQLNAAAYESDRLSSRVKRGKRVKVARGESNHSHRPYGYERDGITVRESEAAIVREMVARVLDKHADIQAKAQAADQDTATAVKEDAIGYKTIAADLNRRGITTRTGRAWSGEKVKRVVFNPRYAGFVTHHGEIVTTMTDANPLITPQQWERLCALRDTTPVGRPATADYVCSGLVHCGLCGKGLTGRPQYGRNYPDGEVRRRYICQKRQTGGGCNRVSVDARTLDQEVGALVVAILSDPRHADALIAAADDLAKRRRPIADALAEARETATVMSARLGKGEISLDRYDTVMAGVDARIAKLTAELDALGAEDDIEDSPAVRAESAQAWSQQWADAGTADKRAMIKRALHGSRLVVDPATIAGPTFDRTRIRLVDKNTTAPRAQDGPGARDRDDAGTGAGDGAAVA

SEQ ID NO: 62382 - DNA, 50 bp, Nocardia abscessus
  source 1..50: mol_type = genomic DNA
gtatgcactaataacgcgtcagccggggctagcatgtgattagtagcccc

SEQ ID NO: 62383 - DNA, 40 bp, Nocardia abscessus
  source 1..40: mol_type = genomic DNA
ggaggtcgcgatgctcgccggggtgggcgtgtcctggtac

SEQ ID NO: 62384 - DNA, 50 bp, Nocardia abscessus
  source 1..50: mol_type = genomic DNA
gtatgcactaataacgcgtcagccgcggctagcatgtgattagtagcccc

SEQ ID NO: 62385 - DNA, 40 bp, Nocardia abscessus
  source 1..40: mol_type = genomic DNA
ggcggccgcggtgcaggaagcggtcggcgtgtgctcctac

SEQ ID NO: 62386 - protein, 422 aa, Abiotrophia defectiva
MEDIKKVAIYTRVSTIEQAEGGYSLDEQQSKLKAYCDLRDWHVYKVYTDGGYSGSNLVRPAISALLEDANARKFDTVLVYKLDRLSRSQKDTLYLIEDVFNPLKIDFVSLSENFDTSTPYGKAGLSMVAVFAQLEREQIKERMQLGKLGRAKSGKPMNWAIKAFGYEYKEGALEIVPYEADIIRGMYEDYNAGISLHGLVIKLNEEGHLGKSKPWSFNPVRRILTNPLYAGMVPYKGDTFPGNHEPIIPQALFDSVQAQIAIRQRTNAERFNPRPFQAKYMVSGIARCGICGAPMRLESQNKKKDGTRTQNYLCSCARREKSKHIPVKDYGPCDNIRFKRQDLENFVLGEVQKLKTRPGLLKKLATKKDKRTNFDNLQAQLDKVQSQLDKLIDLYLMDELSRDKLDARRDALLKEKAPCSLS

SEQ ID NO: 62387 - DNA, 50 bp, Abiotrophia defectiva
  source 1..50: mol_type = genomic DNA
agtaatcatttttagttacattgattttgatgctcgttagtatcggcatc

SEQ ID NO: 62388 - DNA, 40 bp, Abiotrophia defectiva
  source 1..40: mol_type = genomic DNA
gtagcggtcttaatcaacattttaatgaccgtagtcctca

SEQ ID NO: 62389 - DNA, 50 bp, Abiotrophia defectiva
  source 1..50: mol_type = genomic DNA
agtaatcatttttagttacattgagtttgatgctcgttagtatcggcatc

SEQ ID NO: 62390 - DNA, 40 bp, Abiotrophia defectiva
  source 1..40: mol_type = genomic DNA
gtagaggtgttaatgaacagtgaaatgaccatatgcttag

SEQ ID NO: 62391 - protein, 489 aa, Collinsella intestinalis
MPRKPKKTETRKGVIYARFSSHAQREESIMDQLRVCSDYAEREGIEIAATYADEARSGTNTAGRPEFLRMVSDAQKSDWDCVIVYKSDRFARNRYDAATYKAKLRKAGVELLSATEGVPDGPEDIILESVLEGMAEYYSANLAQNVLRGMEGNALKCHHNGVRVFGYDCMPDGSYKINEHEAQGVRAVFAMLDSGSTKAAAARHLNKGGWRSKRGGEFGVQSIKQMLGNEKYVGVYSWGEVRVEGGIPAIIERGTWDRAHAKLKMRGTRKVVKNESYLLSGKMFDVDGNLYESCCGTSRNGKRHYYYRVKSTGASMRKENAEERVRRAVARVLDENPELDETIVDIAMQAQSESESMEREAVEAMRKRLPQIDREMDNLIDLAAKTGAGRTIPEKLRALEREREVLALQIQDMESRAPLIEPDMVRYLLFQLRKCSGPDSVVRGFVDRIEVDAEGGMLVIFNLCTPSDLREQQNGEPQRAWFAKLSSGS

SEQ ID NO: 62392 - DNA, 50 bp, Collinsella intestinalis
  source 1..50: mol_type = genomic DNA
tggttcgccaaattaagttctggtagccccccgatcaacttgggcgaaca

SEQ ID NO: 62393 - DNA, 40 bp, Collinsella intestinalis
  source 1..40: mol_type = genomic DNA
ccgggggataactcttggtagcccgtaccggattcgaacc

SEQ ID NO: 62394 - DNA, 50 bp, Collinsella intestinalis
  source 1..50: mol_type = genomic DNA
tggttcgccaaattaagttctggtgaccccccgatcaacttgggcgaaca

SEQ ID NO: 62395 - DNA, 40 bp, Collinsella intestinalis
  source 1..40: mol_type = genomic DNA
ccgggggtgcacagttagtgagcagtgcaggatttgaacc

SEQ ID NO: 62396 - protein, 601 aa, Streptomyces alfalfae
MHVLLEGVSTMAPAPAPIRLRPSVEDNVPDTFKRKKRGIIYVRVSIARQDMISPELQVGHAQQLADANNIDVVLEPIMDLGESGRGFEERKIEDIKQMARNGEFDVLILWIWSRFGRNLKESLQHLDDLMAYGIEVRAAREDFDGKTTIGRFAIAQMLNIAELESNQKSDQWKDAIERRKTKGLPHGSAGRGKFGYYRCDTCPPPEPGKPMDKCPKCKEGILKLDERQRSYRAIYRRLYESYSFQNASTRSLVLWLRKQGIVNWTGREIDAGDLYSILDSGFALGFVRYTLPEELHKVITREDGTTKTVRKSAHRDITAYLYYKGKHEAIYEDEVECEKVWDAYVARRLSGRDNDDKNHDHSAKYSVSGSLTCFGCGEKMHSMLRAKKVQRPWINGFPDPFDVLFRCTRHMKFKDCPGGGVYVTLKVAEDSVKKWLSKQAEADPEGAESVPARAAQAQAQAGDNGYDDDLLRLQGIEHDLAQIRKKEDKLTEAVLDELISKDAARRKRAEYDTQKSALQAEGAQIKKRIADKPRIIARPDASAFTSVLSLWEVADHADRRRMLRTVIRTIRVNRGRNPETKCDVWSLWEAPPAKPDVVKAA

SEQ ID NO: 62397 - DNA, 50 bp, Streptomyces alfalfae
  source 1..50: mol_type = genomic DNA
tagtgatgtactctcggagccacattcgtcgctccgagagtgcactacta

SEQ ID NO: 62398 - DNA, 40 bp, Streptomyces alfalfae
  source 1..40: mol_type = genomic DNA
ggccatgttcggcgcctcgttcgtcgcgcccgtcctgatg

SEQ ID NO: 62399 - DNA, 50 bp, Streptomyces alfalfae
  source 1..50: mol_type = genomic DNA
tagtgatgtactctcggagccacacccgtcgctccgagagtgcactacta

SEQ ID NO: 62400 - DNA, 40 bp, Streptomyces alfalfae
  source 1..40: mol_type = genomic DNA
ggcaatgttctgccactcgcccgtctggctggacctcttg

SEQ ID NO: 62401 - protein, 591 aa, Streptomyces roseoverticillatus
MAPAPPPIRLRPTQDEGIPETFKRKKRGVIYVRVSTARPDMISPELQVDSGRKLADANDIELAMDPIMDLGESGRGFEDREIGRIKEMARNKEFDVLILWIWSRFGRNLKESLQHLDDLLAYGIEVRAAHEDFDGKTTIGRFAIAQMLNIAELESNQKSDMWKATIERRKNRGLPHGAATRGKFGYYRCDSCPPPEAGKPMDKCPKCKEGILKIDPLTGPILAKLYLDYVAGVSVRSMVLWLRRKKIVNWTGREIDAGDLYSILDSGFGLGFVRYTLPEELYTVITREDGTTRTKRKSAHRDITAYLYYRGKHQAVFEDEVECERIWDAYVARRLKGKSSDDKGHSHAAKYEVSGLLTCSGCGFSMHSMLRAKKVQKPWVDGKPHPSDVLFRCTRHMKFKDCPGGGVYVTLETAQQTVLAFLDRVIAGDQAGAESLPVRTAEVQAKGSTEVVVELKRLDEIKVALAAIRQKEDRLTDAVLEELISKESARRKRAEYETQKSALREESAELEKKFKERPKIIAMPEAAAVASAMEVYDVAEPGDQRLILRALIREVRVNRGRDPETKCNVWPLWVAPPLKPGLAAKDLEVAA

SEQ ID NO: 62402 - DNA, 50 bp, Streptomyces roseoverticillatus
  source 1..50: mol_type = genomic DNA
tagtgatgtaatctcggagccgcattcgtcgctccgggagtacatcactg

SEQ ID NO: 62403 - DNA, 40 bp, Streptomyces roseoverticillatus
  source 1..40: mol_type = genomic DNA
cgcgatgttcggcgcctcgttcgtcgccccggtcctcatg

SEQ ID NO: 62404 - DNA, 50 bp, Streptomyces roseoverticillatus
  source 1..50: mol_type = genomic DNA
tagtgatgtaatctcggagccgcacccgtcgctccgggagtacatcactg

SEQ ID NO: 62405 - DNA, 40 bp, Streptomyces roseoverticillatus; identical to SEQ ID NO: 62400
  source 1..40: mol_type = genomic DNA

SEQ ID NO: 62406 - protein, 524 aa, Pseudomonas haemolytica
MPRAISYIRFSSEKQAKGSSLERQQTMLAQWLESNPEYVLSDLRFQDLGVSGFTGAHLENGFGQLLAAVENGSIEPGDVVLIEAIDRVGRLEPMEMLPLLARIVRTGVYIVTLDDGIKYDRESANSNHLFLLVAKVQQAHQYSETLSRRLKASYAARRKNAVEGVVPKRHTPVWLTSEGELIPEIAPLVKQAFEDYASGIGERRIFERIFKGNSNPLLARMAASTVKRWMNNRTAIGEWDSIPNVYPAVVEPELFYRVQKRMKAKFSPRGTPNKHAYTGLVVCSECGKNFNTKYFKASDQTSMECSSRARRGAMGCSNNRSIPEPVIELAYLFTFTGHALKALEGQMLTASQKRAMELEGEIGEVNKKITRIVNAITVLEDDSEELTDKLRSLQAERKLLQAEMNGLTHTSISMRDKIASTTDFNKDMMKANALQQSVGYQLVCHPDGRITFEDETGKQTFHYLGWGRSEDVYKVVLSDGKLVKLGINRPENKLVKKTVKATPVDRATLKGMKLSQIKVRLDKQ

SEQ ID NO: 62407 - DNA, 50 bp, Pseudomonas haemolytica
  source 1..50: mol_type = genomic DNA
cacgtatacattggagctttcttcgtgcagaatgcggcactgtgtacaag

SEQ ID NO: 62408 - DNA, 40 bp, Pseudomonas haemolytica
  source 1..40: mol_type = genomic DNA
ttcgtagtacaccggctgggtgaagatcatgtcgtaaatc

SEQ ID NO: 62409 - DNA, 50 bp, Pseudomonas haemolytica; identical to SEQ ID NO: 62407
  source 1..50: mol_type = genomic DNA

SEQ ID NO: 62410 - DNA, 40 bp, Pseudomonas haemolytica
  source 1..40: mol_type = genomic DNA
tctctagcacaccagctgagtgcagatcctgtcttaacac

SEQ ID NO: 62411 - protein, 532 aa, Mycolicibacter terrae
MRALIVIRLSRVTDATTSPERQLAKCRELIAQRGYVEVGIAEDLDVSAGKTTPFDRPQLGKWLSDPTQYDVIVFFRVDRIVRRLFDLADLIRWSREHGVTLVSATEAHFDLSTDFGDIIALLVAKVAEMELEAISERNASAFRHNFSKGKYRGGVPPWGYIPERDENGEWRLIQDPEQVTVILEVVERVLAGEPLRAIAHDLTGRRVLTPRDRFAESRDRKPHGYAWHSAALKRALTSHTLLGRVVTREQALDAQGRPQRNAKGRKVFGDDVLVTADDGTPVVRAEPIISRDVFDRLGVELAGRENRKEPTKRTSGLLLRIIFCGECGRPAYRLKGGAGRKPRYRCSSAQTADGACGNKTIALEYADSEVERQILQNMGPLERKRRVWFAGHDTTDELAEVNELLADLTDQIGVGMFKRGTPQRAKLDQRIAALTTRQAELSSVPAQPAGWRYEPTGELFSDWWNEQNDEAKNIWLRQSGFRYEWSSHSDERGRVVVDSLKQVGDLEMDLDGDQVFGPILDIAAALSDPGPA

SEQ ID NO: 62412 - DNA, 50 bp, Mycolicibacter terrae
  source 1..50: mol_type = genomic DNA
cgggtgtaaagcgcgactgtcgcgtacgcgcaagttgtcgtttacacccc

SEQ ID NO: 62413 - DNA, 40 bp, Mycolicibacter terrae
  source 1..40: mol_type = genomic DNA
cgggatgtcgacggtcgagtacgcgatcggcacgatcgct

SEQ ID NO: 62414 - DNA, 50 bp, Mycolicibacter terrae
  source 1..50: mol_type = genomic DNA
cgggtgtaaagcgcgactgtcgcgcgcgcgcaagttgtcgtttacacccc

SEQ ID NO: 62415 - DNA, 40 bp, Mycolicibacter terrae
  source 1..40: mol_type = genomic DNA
cgggatgcggaggtctgagcgcgcgaccgggaccagcgca

SEQ ID NO: 62416 - protein, 589 aa, Klebsiella pneumoniae
MSAYVTIPRNTLLPAKHNVMNRPRLYSYIRYSSERQGKGNSLERQKSYIAKMAKQIAEEYKLEVFEEYQDLGVSAYKGKNLQEGALSDFIAQVKSGVIPKGSFLLIESLDRFSRQNAMQAVNLFTGLLLNGITVITGIDRQVYKHTDANNDTFQQLMFSVMLFSRANEESSTKSQRTIASALSKIGRHQQRKPGDPVIAIKELGSDKWWTDSSSGYVNPHPVLFPIAKEIIQLKQDGWSNRMILQHLKNSYDGPIIGNKKSKGIWNMQHCSRILEPAIYGRKVITINNAEYILDDYYPAIISKDEYEALKLQVGNKGFAPNRESNPEIPLLSGIGILYCAHCSCYMVKAKSTLKNHPHAYRYQCASRDLHQDCNKWGFRASTLERTILQLIADRVFLPTKSQPSGLEGKIADIQSQIENYVLAIGSAKSPEIINNITSKIDQLEQEKQRLVVAKRLYDESIVQMNTEGWDKFREFDINDALAPLRAKIRASIKTVVMRVDCFRIDKKHNLFTITYRDQQKQRVVIENNSGWRKGKVYVEVQTINNTQLIESEGFILHDHIDILINRDKFMMEVKKRLENPRTLIDELIE

SEQ ID NO: 62417 - DNA, 50 bp, Klebsiella pneumoniae; identical to SEQ ID NO: 45382
  source 1..50: mol_type = genomic DNA

SEQ ID NO: 62418 - DNA, 40 bp, Klebsiella pneumoniae; identical to SEQ ID NO: 52443
  source 1..40: mol_type = genomic DNA

SEQ ID NO: 62419 - DNA, 50 bp, Klebsiella pneumoniae; identical to SEQ ID NO: 45384
  source 1..50: mol_type = genomic DNA

SEQ ID NO: 62420 - DNA, 40 bp, Klebsiella pneumoniae
  source 1..40: mol_type = genomic DNA
actgggggtccccattgccaccacagatgccaataccagc

SEQ ID NO: 62421 - protein, 589 aa, Klebsiella pneumoniae; identical to SEQ ID NO: 62361

SEQ ID NO: 62422 - DNA, 50 bp, Klebsiella pneumoniae; identical to SEQ ID NO: 45382
  source 1..50: mol_type = genomic DNA

SEQ ID NO: 62423 - DNA, 40 bp, Klebsiella pneumoniae; identical to SEQ ID NO: 52443
  source 1..40: mol_type = genomic DNA

SEQ ID NO: 62424 - DNA, 50 bp, Klebsiella pneumoniae; identical to SEQ ID NO: 45384
  source 1..50: mol_type = genomic DNA

SEQ ID NO: 62425 - DNA, 40 bp, Klebsiella pneumoniae; identical to SEQ ID NO: 62420
  source 1..40: mol_type = genomic DNA

SEQ ID NO: 62426 - protein, 589 aa, Klebsiella pneumoniae; identical to SEQ ID NO: 50026

SEQ ID NO: 62427 - DNA, 50 bp, Klebsiella pneumoniae; identical to SEQ ID NO: 45382
  source 1..50: mol_type = genomic DNA

SEQ ID NO: 62428 - DNA, 40 bp, Klebsiella pneumoniae; identical to SEQ ID NO: 52443
  source 1..40: mol_type = genomic DNA

SEQ ID NO: 62429 - DNA, 50 bp, Klebsiella pneumoniae; identical to SEQ ID NO: 45384
  source 1..50: mol_type = genomic DNA

SEQ ID NO: 62430 - DNA, 40 bp, Klebsiella pneumoniae; identical to SEQ ID NO: 62420
  source 1..40: mol_type = genomic DNA

SEQ ID NO: 62431 - protein, 589 aa, Klebsiella pneumoniae; identical to SEQ ID NO: 47751

SEQ ID NO: 62432 - DNA, 50 bp, Klebsiella pneumoniae; identical to SEQ ID NO: 45382
  source 1..50: mol_type = genomic DNA

SEQ ID NO: 62433 - DNA, 40 bp, Klebsiella pneumoniae; identical to SEQ ID NO: 52443
  source 1..40: mol_type = genomic DNA

SEQ ID NO: 62434 - DNA, 50 bp, Klebsiella pneumoniae; identical to SEQ ID NO: 45384
  source 1..50: mol_type = genomic DNA

SEQ ID NO: 62435 - DNA, 40 bp, Klebsiella pneumoniae; identical to SEQ ID NO: 62420
  source 1..40: mol_type = genomic DNA

SEQ ID NO: 62436 - protein, 589 aa, Klebsiella pneumoniae
MSAYVTIPRNTLLPAKHNVMNRPRLYSYIRYSSERQGKGNSLERQKSYIAKMAKQIAEEYKLEVFEEYQDLGVSAYKGKNLQEGALSDFIAQVKSGVIPKGSFLLIESLDRFSRQNAMQAVNLFTGLLLNGITVITGIDRQVYKHTDANNDTFQQLMFSVMLFSRANEESSTKSQRTIASALSKIGRHQQRKPGDPVIAIKELGSDKWWTDSSSGYVNPHPVLFPIAKEIIQLKQDGWSNRMILQHLKNSYDGPIIGNKKSKGIWNMQHCSRILEPAIYGRKVITINNAEYILDDYYPAIISKDEYEALKLQVGNKGFAPNRESNPEIPLLSGIGILYCAHCSCYMVKAKSTLKNHPHAYRYQCASRDLHQDCNKWGFRASTLERTILQLIADRVFLPTKSQPSGLEGKIADIQSQIENYVLAIGSAKSPEIINNITSKIDQLEQEKQRLVVAKRLYDESIVQMNTEGWDKFREFDINDALAPLRAKIRASIKTVVMRVDCFRIDKKHNLFTITYRDQQKQRVVIENNSGWRKGKVYVEVQTINNTQLIESEGFILHDHIDILINRDKFMMEVKKRLENPRTLIDELTE

SEQ ID NO: 62437 - DNA, 50 bp, Klebsiella pneumoniae; identical to SEQ ID NO: 45382
  source 1..50: mol_type = genomic DNA

SEQ ID NO: 62438 - DNA, 40 bp, Klebsiella pneumoniae; identical to SEQ ID NO: 52443
  source 1..40: mol_type = genomic DNA

SEQ ID NO: 62439 - DNA, 50 bp, Klebsiella pneumoniae; identical to SEQ ID NO: 45384
  source 1..50: mol_type = genomic DNA

SEQ ID NO: 62440 - DNA, 40 bp, Klebsiella pneumoniae; identical to SEQ ID NO: 62420
  source 1..40: mol_type = genomic DNA

SEQ ID NO: 62441 - protein, 589 aa, Klebsiella pneumoniae
MSAYVTIPRNSLLPAKHNVMNRPRLYSYIRYSSERQGKGNSLERQKSYIAKMAKQIAEEYKLEVFEEYQDLGVSAYKGKNVQEGALSDFIAQVKSGVIPKGSFLLIESLDRFSRQNAMQAVNLFTGLLLNGITVITGIDRQVYKHTDANNDTFQQLMFSVMLFSRANEESSTKSQRTIASALSKIGRHQQRKPGDPVIAIKELGSDKWWTDSSSGYVNPHPVLFPIAKEIIQLKQDGWSNRMILQHLKNSYDGPIIGNKKSKGIWNMQHCSRILEPAIYGRKVITINNAEYILDDYYPAITSKDEYEALKLQVGNKGFAPNRESNPEIPLLSGIGILYCAHCSCYMVKAKSTLKNHPHAYRYQCASRDLHQDCNKWGFRASTLERTILQLIADRVFLPTKSQPSGLEGKIADIQSQIENYVLAIGSAKSPEIINNITSKIDQLEQEKQRLVVAKRLYDESIVQMNTEGWDKFREFDINDALAPLRAKIRASIKTVVMRVDCFRIDKKHNLFTITYRDQQKQRVVIENNSGWRKGKVYVEVQTINNTQLIESEGFILHDHIDILINRDKFMMEVKKRLENPRTLIDELTE

SEQ ID NO: 62442 - DNA, 50 bp, Klebsiella pneumoniae; identical to SEQ ID NO: 45382
  source 1..50: mol_type = genomic DNA

SEQ ID NO: 62443 - DNA, 40 bp, Klebsiella pneumoniae; identical to SEQ ID NO: 52443
  source 1..40: mol_type = genomic DNA

SEQ ID NO: 62444 - DNA, 50 bp, Klebsiella pneumoniae; identical to SEQ ID NO: 45384
  source 1..50: mol_type = genomic DNA

SEQ ID NO: 62445 - DNA, 40 bp, Klebsiella pneumoniae; identical to SEQ ID NO: 62420
  source 1..40: mol_type = genomic DNA

SEQ ID NO: 62446 - protein, 478 aa, Brevibacterium aurantiacum
MVELVALRKTNEVAAYVRASIDRKGDRWTVDTQLRKIRALAEAKDWSVVEVYEDNAVSATKKRRAGTRWAEMLDDARAGRFSMVVAVDMDRLLRSTKDLNTLIDLGLRVVTVDGEIDLSTADGEFRATMLAALARFEARRKAERQIRSNERRRVEGIPASTWKAFGWTREGELIPEEAEAVRRAFDAFLGEPSLSIRRIREDLNSAGHLTARGSEFSVDAVRYLLANPLYAGYIKHYASGELYPVQGEVFPPIVGEQTWRAAVSKLEDNVRRSARQGNQPKYLLSTIGLCGKCGATLVSGTNSRKQPTYRCGERFHLTRQREPVDAMVTEAVLTRLSSVDVHDLVTPQEDAGPDREELLTERNALVERVKELSPLLRDVHQPVLEITAAINDVKARIDEIDTELLDRSVSVAAKLLADVDEPVGTAERREVVESKWKALDVDRRRILVDELVTVTIEPIAPGHVKFDPDLIRIEPRRD

SEQ ID NO: 62447 - DNA, 50 bp, Brevibacterium aurantiacum
  source 1..50: mol_type = genomic DNA
cggcgtcatagccacgacatgtgctagcacatgtcgcagttgcaacactc

SEQ ID NO: 62448 - DNA, 40 bp, Brevibacterium aurantiacum; identical to SEQ ID NO: 59678
  source 1..40: mol_type = genomic DNA

SEQ ID NO: 62449 - DNA, 50 bp, Brevibacterium aurantiacum
  source 1..50: mol_type = genomic DNA
cggcgtcatagccacgacatgtgctcgcacatgtcgcagttgcaacactc

SEQ ID NO: 62450 - DNA, 40 bp, Brevibacterium aurantiacum
  source 1..40: mol_type = genomic DNA
agaggtcaccgagaagccctccgcaaacccactcaatctg

SEQ ID NO: 62451 - protein, 491 aa, Corynebacterium diphtheriae
MADTTTQRAAIYARISLDKQEEAGVKRQIHLATKQAEADEAEVVATYVDNNISAFSGEYRPEYDKLIRSIENREIDVVYVYALDRLTRRTKDTLALFELCEKHHVTVKANRGYNIDPSDPASRLTIVILGLIAEQESIDRAARVRAAYEDRARTGRPKTGGRRMFGYEADAVTVIDEEAQAILDAAAMVIAGKTLRETVREIFHARGLTATSGRPMTAPTLRDILLNPRVRGLSTFNPTDPETGYRLIKDRQVVGRGTWPAIIDEATGEKLDAVLRDPSRRRSHSGNAPRYFLASVLTCTCGDPMYARSRRNKAGDPRRYYTCKRSEPGGTHVSIGSEVDDLIEAVILKRMAQPDAVDALRNALTPEDDGLTEQLQELAGERNVLLARREQIEEAIIAADVDMSTFARVSKKIESQIAAIDEKMRELTTSREADPLAVELANGPDFTEWWGSASVEDKRRLTRLLMEIHILPGKAGAKKFDPHRVKIVWRQ

SEQ ID NO: 62452 - DNA, 50 bp, Corynebacterium diphtheriae; identical to SEQ ID NO: 45227
  source 1..50: mol_type = genomic DNA

SEQ ID NO: 62453 - DNA, 40 bp, Corynebacterium diphtheriae
  source 1..40: mol_type = genomic DNA
aggggcgacaggtagcggaaaatctgagctacttaggaca

SEQ ID NO: 62454 - DNA, 50 bp, Corynebacterium diphtheriae
  source 1..50: mol_type = genomic DNA
cgtacccacaagccgtgttcatgttttccagaatgtggctttggggtacg

SEQ ID NO: 62455 - DNA, 40 bp, Corynebacterium diphtheriae
  source 1..40: mol_type = genomic DNA
tgggggggcagctagcagtttatctcaccttcatagggca

SEQ ID NO: 62456 - protein, 441 aa, Anaerobutyricum hallii
MKKRVALYVRVSTQEQKKHGLSVDSQITALKEYCTKKKYTVVDVYSDAGISARKKYTKRPGLLRLLNDCEQKKIDLIIFTKLDRWFRSVADYYEVQSILEKSKVPWQAIWEDYETITSQGIFKVNIMLSVAQAEADRTSERIRAVMEFKRKNREYLGGPVPLGYMVKDKKLVKNPETEHIVNDMFDYYFSTFSKYKTADYILQKYPKVAEMNTRGNMQLLISNPIYAGVAYGIDGYCDAYITQEQRRKMQENSNEKVYLSGVKRTYIFSGLLRCSVCGARMGGTMNHGSKSYRCFNRKMKHYTLVRSEKKLEKYLLENLETILSNKIYVLEQAKKDTQNYKIEKKKLLAERDRVNLMFEKGRITEEYYDSRYDEISEKLKELEKKDGVQSEKSEKLKKYFSGNWKELYKQLDEQGKQAFWKNIIEIIIISRETFIEDIIFF

SEQ ID NO: 62457 - DNA, 50 bp, Anaerobutyricum hallii
  source 1..50: mol_type = genomic DNA
tactgtagtaaccactataacccgtcagctttatagtggttactacagta

SEQ ID NO: 62458 - DNA, 40 bp, Anaerobutyricum hallii
  source 1..40: mol_type = genomic DNA
tgcgtgcgctgccagtccgtcagcttttaatgcactgcct

SEQ ID NO: 62459 - DNA, 50 bp, Anaerobutyricum hallii
  source 1..50: mol_type = genomic DNA
tactgtagtaaccactataacccgccagctttatagtggttactacagta

SEQ ID NO: 62460 - DNA, 40 bp, Anaerobutyricum hallii
  source 1..40: mol_type = genomic DNA
tttttaccatgccactctgccagctttttatgctgtgcct

SEQ ID NO: 62461 - protein, 492 aa, Paenibacillus cineris
MKVAIYIRVSTEDQARDGYSIRGQKKDLTEYCKANELEIANVYIDDGYSAKDTNRPKLKELLSAAEAGEFKAILVYKLDRFTRSVRDLYDLLEKLNKHGIGFISKQEKFDTTSAMGRAMIGILGVFAQFERETIAERVRMGMVQKAREGKKPGGKHPYGYDKQGQSVPEEFSILRKLRELYMDGLSYQAIAAHFTRLGVKRRKNNWTASSVALTLENPFYAGIIRFGGKMANGKYPQRKREERVEVLESDGDHEAVWTKEEFKEHIELMRRRSTGGFGRVNTYWFNGVLRCGRCGAAMYGRLTTKRSLKDGSIVRSSYYWCSNRKANKSCDMPMFRQSHVELLVLDHINQIVADQELAKANQDRIKTKELRTKEEIDEIESDIRKVNSRIDKWQYAFAEEIISAEDLRKRMDEEKKSLELLNSKLEKLKGEKKQQLPDVIMNLHDIWKVADDEEKQNLVCTIFKKITLNTEMTNVKGKKNSFFPATAEIEYR

SEQ ID NO: 62462 - DNA, 50 bp, Paenibacillus cineris
  source 1..50: mol_type = genomic DNA
cttgtacattttatacaataaccacttccgtaatgcataaaatgcatacc

SEQ ID NO: 62463 - DNA, 40 bp, Paenibacillus cineris
  source 1..40: mol_type = genomic DNA
cgcatggccggtcgataagcttccatcatggccggtgttc

SEQ ID NO: 62464 - DNA, 50 bp, Paenibacillus cineris
  source 1..50: mol_type = genomic DNA
cttgtacattttatacaataaccaaatccgtaatgcataaaatgcatacc

SEQ ID NO: 62465 - DNA, 40 bp, Paenibacillus cineris
  source 1..40: mol_type = genomic DNA
ctcatgtgtggtacatgagaagccatcaggggcagtgttc

SEQ ID NO: 62466 - protein, 466 aa, Janibacter terrae
MKTLIYARVSIDREGRSLDEQIAECCQWADREGWEVVDVIRETGSASRYARSTGARRGWDDLTAAVSSGNIDALLTWEASRATRQLTEYAVLADLCAEHSVRWGYSGTLYDLTTRDARFRTGLDALLAQDESARTSERIQRSTRARAVTGRPHGKLPYGYRREYDPQTGALLRQVPDEEQAPIVQEIARRVIAGHSLRTIAADLTERGIAIPRPARNRTRPDAWLPVTVRRIALSPTNAGLRVHRGEVVGDAAWPALISREDHDRISELLNAPGRNRRLTADSTAVHLLSGIAVCGLCGGPMRRLNPKRARPNYTCRDCMKIARAQAPLDQHVTDVTLALLEGIDASTIDAPSPEAEAARAEADALERRLEGFTIAGAEGEVSPAALAKIEARLLPQIRAARAKAKALSTPAGIDPSAVRDPRAWWGAASLEQKRTLLRAAVRVVVHPSPATKSFRPEFVPVTPTW

SEQ ID NO: 62467 - DNA, 50 bp, Janibacter terrae
  source 1..50: mol_type = genomic DNA
tacaacccctgtggaactatcgccccagcaaacgtcacccacggatgagc

SEQ ID NO: 62468 - DNA, 40 bp, Janibacter terrae
  source 1..40: mol_type = genomic DNA
cacgacggcgacattggacccgctgaccgcgctcaggtgc

SEQ ID NO: 62469 - DNA, 50 bp, Janibacter terrae
  source 1..50: mol_type = genomic DNA
tacaacccctgtggaactatcgccctagcaaacgtcacccacggatgagc

SEQ ID NO: 62470 - DNA, 40 bp, Janibacter terrae
  source 1..40: mol_type = genomic DNA
cacgacagcgccattgcagctgcccaccgtgcgcctgcgc

SEQ ID NO: 62471 - protein, 553 aa, Paraburkholderia nemoris
MTAKSRVYSYLRFSDPKQAAGSSADRQMEYANRWAAEHGMQLDESLSLRDEGLSAYHQRHVKQGALGVFLVAVDEGRITSGSVLVVEGLDRLSRAEPIQAQAQLAQIINAGITVVTASDGREYNREKLKAQPMDLVYSLLVMIRAHEESDTKSKRVKAAIRRQCLGWQAGTFRGIIRNGKDPHWTRVVDRTRFELEPERALAVRTMIDMFRQGHGAIRTIRELDERGLSITNGGNQSQHIYKIIRNRALIGEKTLEVDGEVYRLPNYYPALLTEAEFAELQHLAEQRGRRKGKGEIPGIVTGLGITYCGYCGTAVIGQNLMSRKRKENGHPQDGHRRIICVGYSHNAGCRVAGSCSVVPVERAIMNFCADQMNLTRLLEGDDGSTALAGRLAQSRQRAKELEAQITRVTEAMLSDTDAAPVAFIKKARELETQLAAEQKLIDSLEHDLAARANNATPAAAGAWAALVHGVEELDYDARTQARQLVADTFSKIVVFRKGFDLANNPDDTIDVLLLAQHGNTRMLRVDRRSGAWKATEDLVVSGDIPLPTNSTVV

SEQ ID NO: 62472 - DNA, 50 bp, Paraburkholderia nemoris
  source 1..50: mol_type = genomic DNA
gatctatttagactatgctaagggcagccgagagatactatacctatacg

SEQ ID NO: 62473 - DNA, 40 bp, Paraburkholderia nemoris
  source 1..40: mol_type = genomic DNA
atcgacaagcgctttaggacagccgaggctgacgaatccg

SEQ ID NO: 62474 - DNA, 50 bp, Paraburkholderia nemoris
  source 1..50: mol_type = genomic DNA
gatctatttagactatgctaagggacgccgagagatactatacctatacg

SEQ ID NO: 62475 - DNA, 40 bp, Paraburkholderia nemoris
  source 1..40: mol_type = genomic DNA
gtagagaaacgctttcgaaacgctgatgctgacaaatgtg

SEQ ID NO: 62476 - protein, 410 aa, Mycobacteroides chelonae
MDRIVRRLLDLADLIRWCQENSVSLVSATETFLDLDSAFGDIVALLVAKVAEMELTAISERNRSAAQHNMREGKYRGGPPPWGYRAEKIDGDWRFVQDDQQVGVINEVVRRVLDGEPLRQVAADLTNRAVLTPRDRAYQLKGKEIQGYSWHSAKLREMLASKSLLGHAVTANGSIRNDDGSPIIRATPILARDVFERVQVELAGRENRKEPTKRSTSLLLRVIYCGVCGKPAYKLKGGKGRQDRYRCASAQYKTTCGNRTVIVGDAEEILTDAVMSVLGGKYRRDKVWDTGNDHAAELAEIDETLSDLTDQLGTGSFRKGTRQRERLDARIAELARRQAELAVQASKPAGWVWVPTDELFGDWWKSQTVEQLNLWLRSMDIQMSWNHQGIQTDMLHLEKMAEQWDKRPPA

SEQ ID NO: 62477 - DNA, 50 bp, Mycobacteroides chelonae
  source 1..50: mol_type = genomic DNA
cgctagtaataattgacaatggaatattccagaggctatatttacaaccg

SEQ ID NO: 62478 - DNA, 40 bp, Mycobacteroides chelonae
  source 1..40: mol_type = genomic DNA
cgcgatcgtcccgatcgcgtattcgacggtggacatgccg

SEQ ID NO: 62479 - DNA, 50 bp, Mycobacteroides chelonae
  source 1..50: mol_type = genomic DNA
cgctagtaataattgacaatggaactttccagaggctatatttacaaccg

SEQ ID NO: 62480 - DNA, 40 bp, Mycobacteroides chelonae
  source 1..40: mol_type = genomic DNA
ctctatcttattgagcacacttttgacggtggagatgccg

SEQ ID NO: 62481 - protein, 410 aa, Mycobacteroides chelonae; identical to SEQ ID NO: 62476

SEQ ID NO: 62482 - DNA, 50 bp, Mycobacteroides chelonae; identical to SEQ ID NO: 62477
  source 1..50: mol_type = genomic DNA

SEQ ID NO: 62483 - DNA, 40 bp, Mycobacteroides chelonae; identical to SEQ ID NO: 6913
  source 1..40: mol_type = genomic DNA

SEQ ID NO: 62484 - DNA, 50 bp, Mycobacteroides chelonae
  source 1..50: mol_type = genomic DNA
cgctagtaataattgacaatggaaagttccagaggctatatttacaaccg

SEQ ID NO: 62485 - DNA, 40 bp, Mycobacteroides chelonae
  source 1..40: mol_type = genomic DNA
cggcatctccaccgtcaaaagtgtgctcaataagatagag

SEQ ID NO: 62486 - protein, 568 aa, Ruthenibacterium lactatiformans
MKQSSKKISTGTAALYCRLSRDDNMDSESNSIQNQKKILQKAAKDKGYTDTIFFVDDGITGTTMKRPGFQKMIAAIEAGYISAVFVKDLSRLGRNYIEVGKLTEEFFPLHDVRLVAVSDGVDSDEGEDDFTPFKNIMNEYYAKDISKKRRIVNKMKGNAGIPLSPPPYGYMKNPDDPRFWVIDPEAAEVVRCIYRLALEGNGPLQIATALGTMGALNPSAYRTSKGISKGGSKSTLEPTKWNHTTVKKILTLQEYCGDVINFKTYSKSYKMKRRIENPEENRAIFLNVHEPIIDRVTWEKVQSLQTTRRRRPTVTKESSAFCGYLKCPECGGNLTFHFNQGNHDIKFFSCNNHNSGLRKCSSTHYIRLDFLEQVVLYEVHRLACFANEYENDFIKAMVGRSAKVAENDRVRKKRELDGLLARDRELDMLFERLYEDNVSGKIDDARFAKMSKRYEQEQGENAGRIKALRLELKKLEDKRMDVDTFLETVRRYTDATTITKRMVAELIQYIEVYPAVKEDGITNQRVTIHYNCIGAFEVPDCRKIPERDILLETRKGVALSYAPVQIAI

SEQ ID NO: 62487 - DNA, 50 bp, Ruthenibacterium lactatiformans
  source 1..50: mol_type = genomic DNA
cagatcctttaatgatactccgcatggtccgagtgtcattaaaggatctg

SEQ ID NO: 62488 - DNA, 40 bp, Ruthenibacterium lactatiformans
  source 1..40: mol_type = genomic DNA
ccccataaggacttacccgtggtccgagtggcgagagtcg

SEQ ID NO: 62489 - DNA, 50 bp, Ruthenibacterium lactatiformans
  source 1..50: mol_type = genomic DNA
cagatcctttaatgatactccgcagtgtccgagtgtcattaaaggatctg

SEQ ID NO: 62490 - DNA, 40 bp, Ruthenibacterium lactatiformans
  source 1..40: mol_type = genomic DNA
gcccataaggaatttcctggtgggcaagtggtgagggatg

SEQ ID NO: 62491 - protein, 528 aa, Sphaerobacter thermophilus
MTSVTGLTTNRQPRRAAVYPRVSSKQQEDNYSLDTQLAACIAHAERLGYVVEERHVFREVYTGVDYWERPQMTRLREAIRNGEIDAVVFYSVDRFARDPVFHMLGLAEARQFGVKFHIVTDDLDLSDDDDVLMFFLRGYAAKREWRDLAERTQRGRRARAAKGKPIIGPKAPYGLVWNEEEGRYHVNESEAVILRRIVRELLGGATLRQVKNGLNADGIPSPSGKTWQTSTIKYLVSQQRYTGVGVAYQYKTTRKGDRWLRTEVPDGWEVPLPDGVYPQIITPDEFAAIQSRLAANRAQATRNNREPEAFLLRAGFIRCGLCGHVMAASSAGGRRRYRCATRDKVDPPCPQTVIEQHVIDNAVWERVVTVLKNPEIIARELARLQADDPTAQDLDIVERALKDVERQRDNLTRHLALFSDPEAAAPLVRQIEALGAQIAQLKQQREHILERRRGWETAQDRLADLESWCRQVAGRVDTLTYEQRRLALEALGVEVRVFPKGHDPRYCITLALPLEPPGLEPFAYSSTC

SEQ ID NO: 62492 - DNA, 50 bp, Sphaerobacter thermophilus
  source 1..50: mol_type = genomic DNA
cgagccttttgcatacagcagtacttgtcgtgttggacacaatacgctcg

SEQ ID NO: 62493 - DNA, 40 bp, Sphaerobacter thermophilus
  source 1..40: mol_type = genomic DNA
cggtgcgccgtggcagttcttgtacttcttgccgctgccg

SEQ ID NO: 62494 - DNA, 50 bp, Sphaerobacter thermophilus
  source 1..50: mol_type = genomic DNA
cgagccttttgcatacagcagtacccgtcgtgttggacacaatacgctcg

SEQ ID NO: 62495 - DNA, 40 bp, Sphaerobacter thermophilus
  source 1..40: mol_type = genomic DNA
cggttccccgtggccggtccctcccttcccgccgccaccg

SEQ ID NO: 62496 - protein, 529 aa, Coprococcus comes
MKTQDNRDRIAAIYVRLSEEDHDKVHETDDSLSIQNQKSMLLEFASKHGWTVYDIYNDDDYAGADRSRPEFNRLITDAREGKFGIILCKTQARFTREMELVEKYIHGLFPIWGIRFVGMVDGADTSVKGNKKARQINGLVNEWYLEDMSENIKSSLDDLRRKGHHIGAWVRYGYMKDPNQKGHIIPDPVAAAVVERIFKMYLEGNSRADIARILNSEQIPPPGLYKIQQGDKYKNAFMAGEWDSCSISRILKEEMYIGNMVQGRQASESYKTKKLRTLPKEDWIRVIGTHEAIISLETWNQTQALLAVGARSFTRSEEIGLFSRKVYCGHCNKLMRTGRSKRKSGTYYNYVICVRRHPEINPCPVHAVSNALMEKTILDQLDILAAKYKDGSLFSEIMDEESTIGIEIKRLKAELAQHKKKLVEYETGLKCLYLDKASGSISNSDYQFLSRELSAGKELAERKVDLCTENYNKILRSQEILREKAGVLESYSRPKELTRSMVETFIDHIVICSSSDGTSKQEIKIYWNF

SEQ ID NO: 62497 - DNA, 50 bp, Coprococcus comes
  source 1..50: mol_type = genomic DNA
tctcttctcaagtcgagtggagcagaggctacgattgagatgcgtcgacg

SEQ ID NO: 62498 - DNA, 40 bp, Coprococcus comes
  source 1..40: mol_type = genomic DNA
cgatgaataccttgcgtctgacgcaactgccgcgaaaagg

SEQ ID NO: 62499 - DNA, 50 bp, Coprococcus comes
  source 1..50: mol_type = genomic DNA
tctcttctcaagtcgagtggagcacaggctacgattgagatgcgtcgacg

SEQ ID NO: 62500 - DNA, 40 bp, Coprococcus comes
  source 1..40: mol_type = genomic DNA
cactgaataccttgccacacaggtaacagccaggaaaagc

SEQ ID NO: 62501 - protein, 453 aa, Mycobacterium sp EPa45
MDAKRTTRTALYLRISLDQTGEGLAVERQRKATQRLARQRGWQVVSTFEEAVSAAGKKTRPQFAAMLDAIARGEIDAVVAWQLDRLARNARDRLALVEACREHDVIIALVQGSDMDPTTASGRMTIGILGEVAEHEIAVKSERQTAAAHQRAEKGRPPLGTRLTGYTPQGEVVPDEAELVRRVFKMFVAGETLRSISRALTDENVATRTGRPWNPSSIRGILTNPRYAGRAIYQGKTTGQQGNWEPLVSGDVFDVTQARLTDPRRVTNREGTDRKHLGSGLYLCAVCDEPVSSWSQGRYRCRNGAHVNRAQKPVDDWVRTVIAARLRREDAADLLKPAAADLQPLFDQLDRLRERQAATDADYDADLIDGLRYRSKTARTQAEMAEVQRQLASWGTPGALADALAAPDPAAAFLDAGLMTQRAIVDALCTVRLHPGHRYSRVFDESTVQIKPR

SEQ ID NO: 62502 - DNA, 50 bp, Mycobacterium sp EPa45
  source 1..50: mol_type = genomic DNA
gacgttgatccaaatcggaactcgaccacatcacaacgccgtgcaacaat

SEQ ID NO: 62503 - DNA, 40 bp, Mycobacterium sp EPa45
  source 1..40: mol_type = genomic DNA
gacattgaaccggaactcgaccacatcgccgtcggccatg

SEQ ID NO: 62504 - DNA, 50 bp, Mycobacterium sp EPa45
  source 1..50: mol_type = genomic DNA
gacgttgatccaaatcggaactcgcacacatcacaacgccgtgcaacaat

SEQ ID NO: 62505 - DNA, 40 bp, Mycobacterium sp EPa45
  source 1..40: mol_type = genomic DNA
gatatagaactggaactctcatacatcactggtggaaatg

SEQ ID NO: 62506 - protein, 524 aa, Pseudomonas synxantha
MPKAISYIRFSSEKQAKGSSLERQQTMLAQWLDSNPEYVLSDLRFQDLGVSGFTGAHLENGFGQLLAAVENGSIEPGDVVLIEAIDRVGRLEPMEMLPLLARIVRTGVYIVTLDDGIKYDRESANSNHLFLLVAKVQQAHQYSETLSRRLKASYAARRKNAVEGVVPKRHTPVWLTSEGELIPEIAPLVKQAFEDYASGIGERRIFERIFKGNSNPLLARMAPSTVKRWMNNRTAIGEWDSIPNVYPAVVEPELFYRVQKRMEAKFSPRGTPNKHAYTGLVVCSECGKNFNTKYFKASDQTSMECSSRARRGAMGCSNNRSIPEPVIELAYLFTFTGHALKALEGQMLTASQKRAMELEGEIGEVNKKITRIVNAITVLEDDSEELTDKIRSLQAERKLLQAEMDGLTHTTISMRDKIVSTTHFNKDMMKANALLQSVGYQLVCHPDGTITFEDETGKQTFHYLGWGRSEDVHKVVLSDGKLVKLSINRPENKPMKKTVKATPVDRAALKGVKLSQVKVRLDRQ

SEQ ID NO: 62507 - DNA, 50 bp, Pseudomonas synxantha
  source 1..50: mol_type = genomic DNA
cacgtatacattggcgctttcttcgtgcagaatgcggcactgtctatgag

SEQ ID NO: 62508 - DNA, 40 bp, Pseudomonas synxantha
  source 1..40: mol_type = genomic DNA
ctcgtagtagaccggctgggtgaagatcatgtcgtaaatc

SEQ ID NO: 62509 - DNA, 50 bp, Pseudomonas synxantha
  source 1..50: mol_type = genomic DNA
cacgtatacattggcgctttcttcatgcagaatgcggcactgtctatgag

SEQ ID NO: 62510 - DNA, 40 bp, Pseudomonas synxantha
  source 1..40: mol_type = genomic DNA
ctcgttgacgacagactggataaagaaaatgtggtacata

SEQ ID NO: 62511 - protein, 545 aa, Ruminococcus bicirculans
MKKQQHYKAALYCRLSVDDGNFGGSVSIETQKILLEQYCKDHKITDYKFYCDDGCSGTNFDRPSFKKMLSDIDEGKINLVIVKDLSRFGRNYVEAGMYVQRFTDSNIRFIAADDNYDSLVNSDDLLFPIKNVVNEMYARDVSKKTKAAKKAKARDGQFIGSKAPFGYKIDPNDRHHLIVDEPAAQVVKRIFRLASEGVGYNKMAKIFREEKVLTPIAYFNLNNPDYFKSDYWRKEFDWHVTSIRAILNNEVYLGKLVYGKQRNKSMKSKEKVRNPKEDWIVVENCHEPIITQELWDTVHKILNAKHRPAKAGEVQMFAGLLYCSDCGHCLTYSQKQRKDGSYHGAYSCWMYKTHGKEYCASHYITFDTIYELVLIDIQRNLFQYRKNTDKFKSILSRKYQSDSQKQAEQITLEYEQKQKRCEELDKIISRLYEDNVLGRIGDERYESMSQSYELEQVEIKKALPILKSKIDELKRQSDCADNFINVIKKYTIIDKLDAAILNELIDKIVVHHKEQAEDGRTFQQIEIYYRFVGKLGTENELSKAA

SEQ ID NO: 62512 - DNA, 50 bp, Ruminococcus bicirculans
  source 1..50: mol_type = genomic DNA
acgtcgctttatcgacagcccatggtcgcgtgttcaagtcacgtttccag

SEQ ID NO: 62513 - DNA, 40 bp, Ruminococcus bicirculans
  source 1..40: mol_type = genomic DNA
gctcattcgtaatgagcaggtcgtcggttcgagtccgact

SEQ ID NO: 62514 - DNA, 50 bp, Ruminococcus bicirculans
  source 1..50: mol_type = genomic DNA
acgtcgctttatcgacagcccatgctcgcgtgttcaagtcacgtttccag

SEQ ID NO: 62515 - DNA, 40 bp, Ruminococcus bicirculans
  source 1..40: mol_type = genomic DNA
gctcattcataagaagcacctcatccgttcaagtttgatc

SEQ ID NO: 62516 - protein, 468 aa, Mycobacteroides abscessus
MQAVIYTRISKDRAGGELGVDRQREDCQKLADELGWTVVETFSDNDISAFSGKSRPAYEAMLAALEAGKAQAVIAWHTDRLHRRPIELEGFIELCERKKIEVRAVRAGHLDFSTPAGRTNARVLGAMARYEIEHLIERAKSAKKQAALEGKFRGGRRAFGYESDGLRLRELEAEAIRTATQRVLSGVSLRQIARDWNAAGLRTAFGGKEFTSREVRTILLRPRNAGIVLHEGQHVGTGRWDAIIDAETFAAIEALLCDPARSNHISRIRKYQGSGVYLCGKCGARMGSASQVGSRRKADWRKVYTCSKVKHLGRVAEYVDEYVSEHVIARLNCPDARQVILGAEADLTALHAQREGLRARLDELTALFADSSIDGLQLKRGTSELHAKLAVVDAELASVRSSSAVAAILAEEDVRAAWKAAPPEVRGKVIDTLMTVTILPAPPGRQPNGSYFDPTKIQIEWKTAQEAN

SEQ ID NO: 62517 - DNA, 50 bp, Mycobacteroides abscessus; identical to SEQ ID NO: 49712
  source 1..50: mol_type = genomic DNA

SEQ ID NO: 62518 - DNA, 40 bp, Mycobacteroides abscessus
  source 1..40: mol_type = genomic DNA
cacagcggtggcaagcgcaaggtcgtacaccgaccccatc

SEQ ID NO: 62519 - DNA, 50 bp, Mycobacteroides abscessus
  source 1..50: mol_type = genomic DNA
cacagttctagtcaacgtaatgacctgtcatatgggtgtctagtacgctg

SEQ ID NO: 62520 - DNA, 40 bp, Mycobacteroides abscessus
  source 1..40: mol_type = genomic DNA
cagagctgtggcatgggctctgttctacaccaaaccaaac

SEQ ID NO: 62521 - protein, 468 aa, Mycobacteroides abscessus; identical to SEQ ID NO: 49721

SEQ ID NO: 62522 - DNA, 50 bp, Mycobacteroides abscessus; identical to SEQ ID NO: 49712
  source 1..50: mol_type = genomic DNA

SEQ ID NO: 62523 - DNA, 40 bp, Mycobacteroides abscessus; identical to SEQ ID NO: 62518
  source 1..40: mol_type = genomic DNA

SEQ ID NO: 62524 - DNA, 50 bp, Mycobacteroides abscessus; identical to SEQ ID NO: 62519
  source 1..50: mol_type = genomic DNA

SEQ ID NO: 62525 - DNA, 40 bp, Mycobacteroides abscessus; identical to SEQ ID NO: 62520
  source 1..40: mol_type = genomic DNA

SEQ ID NO: 62526 - protein, 468 aa, Mycobacteroides abscessus
MQAVIYTRISKDRAGGELGVDRQREDCQKLADELGWTVVETFSDNDISAFSGKSRPAYEAMLAALEAGKAQAVIAWHTDRLHRRPIELEGFIELCERKKIEVRAVRAGHLDFSTPAGRTNARVLGAMARYEIEHLIERAKSAKKQAALEGKFRGGRRAFGYESDGLRLRELEAEAIRTATQRVLSGVSLRQIARDWNAAGLRTAFGGKEFTSREVRTILLRPRNAGIVLHEGQHVGTGRWDAIIDAETFASIEALLCDPARSNHISRIRKYQGSGVYLCGKCGARMGSASQVGSRRKADWRKVYTCSKVKHLGRVAEYVDEYVSEHVIARLNCPDARQVILGAEADLTALHAQREGLRARLDELTALFADSSIDGLQLKRGTSELHAKLAVVDAELASVRSSSAVAAILAEEDVRAAWKAAPPEVRGKVIDTLMTVTILPAPPGRQPNGSYFDPTKIQIEWKTAQEAN

SEQ ID NO: 62527 - DNA, 50 bp, Mycobacteroides abscessus
  source 1..50: mol_type = genomic DNA
cacagctctaatcaacataatgacaggtcatatgggtgtctagtacgctg

SEQ ID NO: 62528 - DNA, 40 bp, Mycobacteroides abscessus; identical to SEQ ID NO: 62518
  source 1..40: mol_type = genomic DNA

SEQ ID NO: 62529 - DNA, 50 bp, Mycobacteroides abscessus
  source 1..50: mol_type = genomic DNA
cacagctctaatcaacataatgacctgtcatatgggtgtctagtacgctg

SEQ ID NO: 62530 - DNA, 40 bp, Mycobacteroides abscessus; identical to SEQ ID NO: 62520
  source 1..40: mol_type = genomic DNA

SEQ ID NO: 62531 - protein, 488 aa, Rhodococcus fascians
MKSATDTRRVAVYLRQSMDRDGNEYGIDRQRQDVERLVEQRGWTVVETFVDNDVSATSRRPRPAFERMLTAAEAGAFDVIVARHLDRLLRRLVELERVLEVCEGTGVSVVTSNDGIDTSNDGGRTNARILASIAQGEVERKSARQRSAMAQAAAQGRWVGGRRAFGYESDGVTIRPDEAELIRAGYAAVLAGEPVAAVAREWTASGISTTQGTRTGIPSVWHRSGVRDILLNPRNAALRRHRPTGAQGDFRKDPEAFVVGRAEWPAIVDEDTWRAAVRVLVSPDRRRPATNPQALLTSVARCGRCAAEGVESSVHTGGARRHYRTYRCAHTPGHMARQADPVEAFVEAVMVERLSRDDALAVFAPDVEADTRDLGAEADTLRRRLDDLAEDYADGTMTRPQFRTANERVRARLGAIEADMATAGAADLVAPLVTSGDVAAAWAALTTPRKRAVIDALAVVTLNPLGRGRHRFTPETFAATVDIAWRAE

SEQ ID NO: 62532 - DNA, 50 bp, Rhodococcus fascians
  source 1..50: mol_type = genomic DNA
aactgccacccgcgtgcgttcgcggtggctagcgcactacgatagcggtt

SEQ ID NO: 62533 - DNA, 40 bp, Rhodococcus fascians
  source 1..40: mol_type = genomic DNA
cgccgatcgtgcgatacgggtggcgtggactctgaacgat

SEQ ID NO: 62534 - DNA, 50 bp, Rhodococcus fascians
  source 1..50: mol_type = genomic DNA
aactgccacccgcgtgcgttcgcggaggctagcgcactacgatagcggtt

SEQ ID NO: 62535 - DNA, 40 bp, Rhodococcus fascians
  source 1..40: mol_type = genomic DNA
cgccgctcgtggggttcgggaggccgggaccctgcccggg

SEQ ID NO: 62536 - protein, 595 aa, Pseudomonas sp p99-361
MPLCFPYVRFSSQKQADGNSVVRQSERIESFVTRYSLTVDTRLEDHGISSFRGANAKKGQLSGFLQRVRDGEIPHGSYLLIENWDRLSRQVLDASIEIFSDLIRSGIKIAVLDEDTVYDDLTSNSFIRAIVQFERAHSESLRKSDMSKASWRAKHKAMAEGAIATEKCPQWLVVKDGAWCKRDDICLHIEAMFSLAQTYGMAETGRRLNAQFGTSYKTHQIQYLLRNRRLIGEHSPVELSKEHGKNVPTGQVVEDYYPQVIPPATFEEVQTILKSRKPFSGRQDATNLNIFRNLLVCAECGGSTRFMLKSGKEYYYCTASMTGGCVDDQIRSIRGEFLRRVLFKFEHWTAIRDYIAAGSDVLKALKKEETVAVAKLTRLEAKADGLMNKFAAEDDEDKAETYVSLLTETRKGIATANADIDRIKHELASLDGAFSLNDSNVDSFESMLTSDSEQARTDRQRLNRYLRGIFLNIELHFPTRKLVTQPIPALANRISPVVAYVQQPKDKRTGDDYGHHTWISKDQQALILKRIKARLRRAGIPSPTFQQVKPIYDDVVLSLLPKRKPRPQCKNQPKLVELPIELDGVVWKASDPFLK

SEQ ID NO: 62537 - DNA, 50 bp, Pseudomonas sp p99-361
  source 1..50: mol_type = genomic DNA
tcggttcgaattgaatgtcatagctggccgtggtagattaaacgtaccga

SEQ ID NO: 62538 - DNA, 40 bp, Pseudomonas sp p99-361
  source 1..40: mol_type = genomic DNA
ccgcggttgcgagcatggctgtatctactgctatgcccgc

SEQ ID NO: 62539 - DNA, 50 bp, Pseudomonas sp p99-361
  source 1..50: mol_type = genomic DNA
tcggttcgaattgaatgtcatagcgagccgtggtagattaaacgtaccga

SEQ ID NO: 62540 - DNA, 40 bp, Pseudomonas sp p99-361
  source 1..40: mol_type = genomic DNA
cctgggaagtgagaatggcgacctttactgctatgcccca

SEQ ID NO: 62541 - protein, 501 aa, Microbacterium resistens
MEKAYLCQYGCVSYSRTSIPRVAIYARQSVEEDQGIQQQLEDGRKHASERGWSVLLEFSDNDTSGSKERGPKTDWARMLRAFDAGDFDTLVVTETSRLTRSLTDVLDVTPPRRAMRVIVIRQGIDTAVDDFQLKLLVLVAENEVKLKAQRAARYAADRRKVGHPTSGKTPHGYRWVPAGQRDERGTRYVVDEIEAEDVRQIFREFLAGATLGQIARDLTAAGRLTRKGANWHSSTVRRILMNPLYAALLPPAQPTGKHSISAIDLQACTPGAWQPIVTRDDVVAARSRLVGVKPMHNGTARRYLLAGIALCGVCRKPVKSARPVNHPTPRKDGSVAPAQRYHGYRCHFSRNGDIIDEFVSELCIQRLSQPDAAGLLTPPDDEFDLPALHTRREALQAERRNVFTLIGSDVSRLAVAQDRLEELEEQLREVDTVIAKAAERHPLADLIGVEDVRAWWESRTLARQRAIVQLLMTVVIKPVGMGRRPRHPEDVLESLEITPLV

SEQ ID NO: 62542 - DNA, 50 bp, Microbacterium resistens
  source 1..50: mol_type = genomic DNA
atacgctttagccccgccacggtggctgcggtccgatggaaaaagcgtac

SEQ ID NO: 62543 - DNA, 40 bp, Microbacterium resistens
  source 1..40: mol_type = genomic DNA
accggcgaaggccacggccgccatcgtggcgatcgcgtac

SEQ ID NO: 62544 - DNA, 50 bp, Microbacterium resistens; identical to SEQ ID NO: 62542
  source 1..50: mol_type = genomic DNA

SEQ ID NO: 62545 - DNA, 40 bp, Microbacterium resistens
  source 1..40: mol_type = genomic DNA
atgggctcaggccacagccgccatcgtcgccatcaccatc

SEQ ID NO: 62546 - protein, 494 aa, Bacillus megaterium; identical to SEQ ID NO: 55116

SEQ ID NO: 62547 - DNA, 50 bp, Bacillus megaterium
  source 1..50: mol_type = genomic DNA
tttaaagtgagttgcgagacacactccacgtgtgcggtctgcaactggca

SEQ ID NO: 62548 - DNA, 40 bp, Bacillus megaterium
  source 1..40: mol_type = genomic DNA
cgtcaaactcaccacattctccacgtgcgccgtatgcgga

SEQ ID NO: 62549 - DNA, 50 bp, Bacillus megaterium
  source 1..50: mol_type = genomic DNA
tttaaagtgagttgcgagacacacttcacgtgtgcggtctgcaactggca

SEQ ID NO: 62550 - DNA, 40 bp, Bacillus megaterium
  source 1..40: mol_type = genomic DNA
aggcaaacacactatatttttaatgtgcgccgtatcctgg

SEQ ID NO: 62551 - protein, 533 aa, Streptococcus hyointestinalis; identical to SEQ ID NO: 12191

SEQ ID NO: 62552 - DNA, 50 bp, Streptococcus hyointestinalis
  source 1..50: mol_type = genomic DNA
agacttaagaatatcggccgccggtatagcttaaagtaaagcaaaagcct

SEQ ID NO: 62553 - DNA, 40 bp, Streptococcus hyointestinalis
  source 1..40: mol_type = genomic DNA
gttcgaccccggccgccggtatagaattttcccagtaggt

SEQ ID NO: 62554 - DNA, 50 bp, Streptococcus hyointestinalis
  source 1..50: mol_type = genomic DNA
agacttaagaatatcggccgccggactagcttaaagtaaagcaaaagcct

SEQ ID NO: 62555 - DNA, 40 bp, Streptococcus hyointestinalis
  source 1..40: mol_type = genomic DNA
attcaaccggtgccacaggactagagttttcccacaaggg

SEQ ID NO: 62556 - protein, 662 aa, Erysipelotrichaceae bacterium I46
MRKLNTTYYKSNKIALYYRLSVADGDAESESIKNQRKQLRLYMEKHNLTYVDEYIDDGVSGMTFDRPDFNRLMQDIEKGRINTIITKSLERLGRDSNKVGFYVEKYFPEHRIRYLALNDNVDTAIECVSSDLILKIGFNDFYPYHASDNIKAVIYSKRQKGDYLSSFAPYGYIKDPADHHHLIIDDSSSKIIKRIFELYINNNSANAIADILTSEHISTPARYRKTGNLYETDTEVCYKWDKSFILNTIQNKVYLGCVLSNKYIKVSLKSKKSVRLDKKYLLCKENRHEPIIDKCTFDMANTVRLNKKMIAKDVHKAHHRFTLFGYTHDSSDYYSLVIDEKVAYIVHEIFDLYEQGYGYRNIAEICNDRNYITPKCYLKTKGSTTFKDVWTPDKIRCVLKNPSYYGCNVRKINGTKVITPNCHIPLIDKVQFDHVQELMKTKHKQATPLDKPILYKFLYCGSCGRKMQVTKITEKRKKLNIYCPAEKVKHIEPCSISQRFITYLDIEKHVTSRLHKLSKYVQSSEFEKKVEQIYLAPVTSHVEERNRLEKELEIQMHKIDMIYSDRANNMIPDTLFFDKIKEYQRGVISLNKQLDIERNIIFNYKQKSEEILDEAEILKNIFESKNFIERFLDEIISKINVTDTTIEIVYKIKNPLITGESE

SEQ ID NO: 62557 - DNA, 50 bp, Erysipelotrichaceae bacterium I46; identical to SEQ ID NO: 45542
  source 1..50: mol_type = genomic DNA

SEQ ID NO: 62558 - DNA, 40 bp, Erysipelotrichaceae bacterium I46
  source 1..40: mol_type = genomic DNA
gatttttggcggctatccgtggttttaccgggacgagtta

SEQ ID NO: 62559 - DNA, 50 bp, Erysipelotrichaceae bacterium I46; identical to SEQ ID NO: 45544
  source 1..50: mol_type = genomic DNA

SEQ ID NO: 62560 - DNA, 40 bp, Erysipelotrichaceae bacterium I46; identical to SEQ ID NO: 45545
  source 1..40: mol_type = genomic DNA

SEQ ID NO: 62561 - protein, 524 aa, Ruminococcus bromii; identical to SEQ ID NO: 34421

SEQ ID NO: 62562 - DNA, 50 bp, Ruminococcus bromii
  source 1..50: mol_type = genomic DNA
tgtacaaactaataataaccgtcaccatctggtgagttgaacttatggaa

SEQ ID NO: 62563 - DNA, 40 bp, Ruminococcus bromii
  source 1..40: mol_type = genomic DNA
caatgacgcacccaactcaccatccggaccgccgtatggc

SEQ ID NO: 62564 - DNA, 50 bp, Ruminococcus bromii
  source 1..50: mol_type = genomic DNA
tgtacaaactaataataaccgtcatcatctggtgagttgaacttatggaa

SEQ ID NO: 62565 - DNA, 40 bp, Ruminococcus bromii
  source 1..40: mol_type = genomic DNA
caatggagcacccatttcttcatctagaccctcctatgtc

SEQ ID NO: 62566 - protein, 536 aa, Sphingobium xenophagum
MKHGRGSRGDARLRAYMYLRLSVDKEDGKAQSIEAQRTAIHDYARRNSIEIVEEFADTGLSGQSANRPAFNRMIEQATDTPSPVDIVLIYRIARLARNMRLFFNSLDGLADAGVEVISITENFGEGRRTKRLGQTISAMVAEQQAIDASIYTSKSRRENARQGFYNGGPVPFGYETYVARKDGDKERMKLRVVPSEASVLREIFDWADMGRGGRWIVQTLNARGTTLRGAKFSNGNLAGILGRITYTGVYYDKTVDDDGNVPDPEDWIAVSCPVIIEQAQFDRVNALRASRNPRRTAPHIAAGTTMLTGIAKCGMPGCACAMTIRSGKAGQYHYYVCANRVNKGQACAGPSMRREVLDGLVLDAVEKQLLAPERLETLLSDVLNLSDQKRIQREEELLHARAEQTRLRTAIERLLILVETGQMGPRDPIFAKRMDENRSALATATSRIDTLETQLTKGSRKITPTSIKRFGELLSARLRDDDSTLRKAYLRMLVSNVTVSKEQIVISGPKAVLENGVCNGAPRLEGMVPIFDREWC

SEQ ID NO: 62567 - DNA, 50 bp, Sphingobium xenophagum
  source 1..50: mol_type = genomic DNA
tgcccatctttgaccgggaatggtgccccacaaaggacaaagatgggcac

SEQ ID NO: 62568 - DNA, 40 bp, Sphingobium xenophagum
  source 1..40: mol_type = genomic DNA
cgaaaagggcggttctggtgccgcttacaggactcgaacc

SEQ ID NO: 62569 - DNA, 50 bp, Sphingobium xenophagum
  source 1..50: mol_type = genomic DNA
tgcccatctttgaccgggaatggtgacccacaaaggacaaagatgggcac

SEQ ID NO: 62570 - DNA, 40 bp, Sphingobium xenophagum
  source 1..40: mol_type = genomic DNA
tggaaagggcagtgctggtgacgattactgaaatcagact

SEQ ID NO: 62571 - protein, 594 aa, Streptococcus pyogenes
MKKDVKVIKGDTTLKRTASGCVERSIKRVAAYCRVSTDTEDQINSYNSQVEHYTEFIQKNNEWTLAGIYADEAITGTQVDRRIDFQRLINDCINGDIDMIITKSISRFARNTLDTLKYVRKLKEFNVAVFFEEENINTLTMDGELLLTILSSVAQQEVENISANVKKGLRMKMERGEMVGFQGCLGYDYDPETKSISINEKEAEIVRYIFRRYIEGVGGMVISRELEEQGYLSPRGNKRWTETTVLGIIKNEKYKGDLMMGKTYTVDPISKRRLDNYGEQDKFYIENHHEPIISEEDFEKAQGIRLRRSKNRNTVANNGGKREKYSRKYAFSSMLECGFCGHNLSRRNWHSSSEYTKVIWQCVNATKNGKKYCPHSKGIEEEAIEKAFMESYRQVCHNNVEITNEFLKTVEEELKDNSLAKDLKKINNQLDKILKKEKDLVELRLNESISMDIYQDKYNEIAISKEKLLAEKRTLEVTLTDEKALKKRLEGFKKLLESNKYLEEFDRAVFESIVDKIIIGGTNDEGEIDPAMITIIYKTGKKDSQDGRLFKSRRKNAKEVDEKTDNKLYPQSSDEVNNLCSYPMDNTRGVCKFT

SEQ ID NO: 62572 - DNA, 50 bp, Streptococcus pyogenes
  source 1..50: mol_type = genomic DNA
actcccgcagacccatcacgtcgagtgcatagcgttgatacaaagagtga

SEQ ID NO: 62573 - DNA, 40 bp, Streptococcus pyogenes
  source 1..40: mol_type = genomic DNA
cgcagacgcatcacgtcgagtgcgtagtgttgctaatcaa

SEQ ID NO: 62574 - DNA, 50 bp, Streptococcus pyogenes
  source 1..50: mol_type = genomic DNA
actcccgcagacccatcacgtcgactgcatagcgttgatacaaagagtga

SEQ ID NO: 62575 - DNA, 40 bp, Streptococcus pyogenes
  source 1..40: mol_type = genomic DNA
ggcagaagaatcacgtcacctgtgtactggtgataagcca

SEQ ID NO: 62576 - protein, 563 aa, Erythrobacter flavus
MLISVGISVATAGIIFGCVIWIARQSRRIGAINRIVCDVSIHVHAVLVADRVGLHEPAEQWRIDAGLVVIHADLGDPSLASILEPAEIASVGRAPLVVFVALENAARTVCDGYYAAALIAVEEAAGRCGCISAGPLEPDYRIVGARTVDITAQDRSRGVEFGNQLVAGIVTAVMRRNAEDGFWNGSQPPLGYETYTAEMRGKKHKKKIRVVTSEAATVEYVYGAYVGAGGKASMGIGKPSQHLNEKGLSYRGRKYTPALVHTILTRKTYVGRHYYNTKDSRTNTKRPREEWIEVEVPAIIPEKTFDKFQAILKSLNPKMTPARSHSSPVLLSGLGRCGNPGCDGTMMLMNGKGGQYLYYSCSNVRRKKDRTCGNNNIPMQQVDNAVVEVLEQRLLDPARLEKLLAQLLERSAGADAKRKRDIVTLRNERTAADTAIQRLFESIEAGLVDSKDKDLKKRLAGHQSRRAALDEEINLLERQCGSKGDRIDRDTLAAFAAGLKKKLTDPDNPALRKNYVQAFVSEVVMTKEQLTVRGPVASLVQAVSTPGADTAPGRTSMVNWRAR

SEQ ID NO: 62577 - DNA, 50 bp, Erythrobacter flavus
  source 1..50: mol_type = genomic DNA
cttccatggtaaactggcgcgcccggcgtgacgaaaatgggcactcgaaa

SEQ ID NO: 62578 - DNA, 40 bp, Erythrobacter flavus
  source 1..40: mol_type = genomic DNA
tggggaaattggcgcgcccggcaggactcgaacctgcaac

SEQ ID NO: 62579 - DNA, 50 bp, Erythrobacter flavus
  source 1..50: mol_type = genomic DNA
cttccatggtaaactggcgcgccccacgtgacgaaaatgggcactcgaaa

SEQ ID NO: 62580 - DNA, 40 bp, Erythrobacter flavus
  source 1..40: mol_type = genomic DNA
tagggaaatgagatcgcgccacagcactccagcctgggac

SEQ ID NO: 62581 - protein, 523 aa, Klebsiella michiganensis; identical to SEQ ID NO: 61581

SEQ ID NO: 62582 - DNA, 50 bp, Klebsiella michiganensis; identical to SEQ ID NO: 38382
  source 1..50: mol_type = genomic DNA

SEQ ID NO: 62583 - DNA, 40 bp, Klebsiella michiganensis; identical to SEQ ID NO: 52043
  source 1..40: mol_type = genomic DNA

SEQ ID NO: 62584 - DNA, 50 bp, Klebsiella michiganensis
  source 1..50: mol_type = genomic DNA
aacccgaatagcctatattcaaggagcattgtatttgagctattcggcga

SEQ ID NO: 62585 - DNA, 40 bp, Klebsiella michiganensis
  source 1..40: mol_type = genomic DNA
gccgagtggtaaatcaaagaggattgtcctaaatgtggta

SEQ ID NO: 62586 - protein, 523 aa, Klebsiella oxytoca; identical to SEQ ID NO: 61541

SEQ ID NO: 62587 - DNA, 50 bp, Klebsiella oxytoca; identical to SEQ ID NO: 38382
  source 1..50: mol_type = genomic DNA

SEQ ID NO: 62588 - DNA, 40 bp, Klebsiella oxytoca; identical to SEQ ID NO: 52043
  source 1..40: mol_type = genomic DNA

SEQ ID NO: 62589 - DNA, 50 bp, Klebsiella oxytoca; identical to SEQ ID NO: 62584
  source 1..50: mol_type = genomic DNA

SEQ ID NO: 62590 - DNA, 40 bp, Klebsiella oxytoca; identical to SEQ ID NO: 62585
  source 1..40: mol_type = genomic DNA

SEQ ID NO: 62591 - protein, 523 aa, Klebsiella oxytoca; identical to SEQ ID NO: 61741

SEQ ID NO: 62592 - DNA, 50 bp, Klebsiella oxytoca; identical to SEQ ID NO: 38382
  source 1..50: mol_type = genomic DNA

SEQ ID NO: 62593 - DNA, 40 bp, Klebsiella oxytoca; identical to SEQ ID NO: 52043
  source 1..40: mol_type = genomic DNA

SEQ ID NO: 62594 - DNA, 50 bp, Klebsiella oxytoca; identical to SEQ ID NO: 62584
  source 1..50: mol_type = genomic DNA

SEQ ID NO: 62595 - DNA, 40 bp, Klebsiella oxytoca; identical to SEQ ID NO: 62585
  source 1..40: mol_type = genomic DNA

SEQ ID NO: 62596 - protein, 523 aa, Klebsiella michiganensis
MRQVITYLRFSSKPQERGDSIRRQKGLFERWLKDNPDAKVVDEFSDEGASAYHGHHLKGDFGRMLQNIQDGKYLSGQTVLLVESETRLNRQKARNTENLVDLITGKGVDVICLESGKIYTSTNIDDLDTSIQLKIAAHIAHQQSKEKSIKVSAAWEHRAQLALEGKQQLTKNVPGWIDPDTRKLNEHSSTVVTIFDLLLSGESLHNIARYLQANNIKSFSRREKANGFSVHSVRTILRSESTVGTLAASKRNDRPAIPNYYEPAIDVATFNKAQEILSKNRVGRAPASDNPITINLFKGIIRCQCGASVHPTGVKATYQGVYRCNNVPDGRCNVPTIKRKPFDKWMLDNIIGFLERSDGNNTDKRKAEIEFQISLVTSKLKKAATLLLELDDVTELKEQVKELNIQRINMQSELDDLNQRETLSDKPLHHLSEIDLTTKAGRVEAQLILSKFVQSIELQREMIIITLRNGAVIGKSRDLSPALSQDLMKQVVSSSSPRDIDMFSVITSDEEFRKSGKPVTKRS

SEQ ID NO: 62597 - DNA, 50 bp, Klebsiella michiganensis; identical to SEQ ID NO: 38382
  source 1..50: mol_type = genomic DNA

SEQ ID NO: 62598 - DNA, 40 bp, Klebsiella michiganensis; identical to SEQ ID NO: 52043
  source 1..40: mol_type = genomic DNA

SEQ ID NO: 62599 - DNA, 50 bp, Klebsiella michiganensis; identical to SEQ ID NO: 62584
  source 1..50: mol_type = genomic DNA

SEQ ID NO: 62600 - DNA, 40 bp, Klebsiella michiganensis; identical to SEQ ID NO: 62585
  source 1..40: mol_type = genomic DNA

SEQ ID NO: 62601 - protein, 523 aa, Klebsiella michiganensis
MRQVITYLRFSSKPQERGDSIRRQKGLFERWLKDNPDAKVVDEYSDEGASAYHGHHLKGDFGRMLQNIQDGKYLSGQTVLLVESETRLNRQKARNTENLVDLITGKGVDVICLESGKIYTSTNIDDLDTSIQLKIAAHIAHQQSKEKSIKVSAAWEHRAQLALEGKQQLTKNVPGWIDPDTRKLNEHSSTVVTIFDLLLSGESLHNIARYLQAHNIKSFSRREKANGFSVHSVRTILRSESTVGTLAASKRNDRPAIHNYYEPAIDIATFNKAQEILSKNRVGRAPASDNPITINLFKGIIRCQCGASVHPTGVKATYQGVYRCNNVPDGRCNVPTIKRKPFDKWMLDNIVGFLERSDGNNTDKRKAEIEYQISLVTSKLKKATSLLLELDDVTELKEQVKELNIQRINMQSELDELNQRETLSDKPLHHLSEIDLTTKAGRVEAQLILSKFVQSIELQREMIIITLRNGAVIGKSRDLSPVLSQDLMKQVVSSSSPRDIDMFSVITSDEEFRKSGKPVTKRS

SEQ ID NO: 62602 - DNA, 50 bp, Klebsiella michiganensis; identical to SEQ ID NO: 61042
  source 1..50: mol_type = genomic DNA

SEQ ID NO: 62603 - DNA, 40 bp, Klebsiella michiganensis; identical to SEQ ID NO: 52043
  source 1..40: mol_type = genomic DNA

SEQ ID NO: 62604 - DNA, 50 bp, Klebsiella michiganensis
  source 1..50: mol_type = genomic DNA
aacccgaatagcctacattcaaggagcattgtatttgagctattcggcga

SEQ ID NO: 62605 - DNA, 40 bp, Klebsiella michiganensis; identical to SEQ ID NO: 62585
  source 1..40: mol_type = genomic DNA

SEQ ID NO: 62606 - protein, 523 aa, Klebsiella grimontii
MRQVITYLRFSSKPQERGDSIRRQKGLFERWLKDNPDAKVVDEFSDEGASAYHGHHLKGDFGRMLQNIQDGKYLSGQTVLLVESETRLNRQKARNTENLVDLITGKGVDVICLESGKIYTSTNIDDLDTSIQLKIAAHIAHQQSKEKSIKVSAAWEHRAQLALEGKQQLTKNVPGWIDPDTRKLNEHSSTVVTIFDLLLSGESLHNIARYLQANNIKSFSRREKANGFSVHSVRTILRSESTVGTLAASKRNDRPAIPNYYEPAIDVATFNKAQEILSKNRVGRAPASDNPITINLFKGIIRCQCGASVQPTGVKATYQGVYRCNNVPDGRCNVPTIKRKPFDKWMLDNIVGFLERDDGNNTDKRKAEIEYQISLVTSKLKKATTLLLELDDVTELKEKVKELNIQRSNLQSELDELNQRETLSDKPLHHLSEIDLTTKAGRVEAQLILSKFVQSIELQREMIIITLRNGTVIGKSRDLSPVLSRDLMKQVVSSPSPTDIDMFSVITSDEEFRKSGKQVTKRS

SEQ ID NO: 62607 - DNA, 50 bp, Klebsiella grimontii; identical to SEQ ID NO: 38382
  source 1..50: mol_type = genomic DNA

SEQ ID NO: 62608 - DNA, 40 bp, Klebsiella grimontii; identical to SEQ ID NO: 52043
  source 1..40: mol_type = genomic DNA

SEQ ID NO: 62609 - DNA, 50 bp, Klebsiella grimontii; identical to SEQ ID NO: 62584
  source 1..50: mol_type = genomic DNA

SEQ ID NO: 62610 - DNA, 40 bp, Klebsiella grimontii; identical to SEQ ID NO: 62585
  source 1..40: mol_type = genomic DNA

SEQ ID NO: 62611 - protein, 523 aa, Klebsiella pasteurii; identical to SEQ ID NO: 61646

SEQ ID NO: 62612 - DNA, 50 bp, Klebsiella pasteurii; identical to SEQ ID NO: 38382
  source 1..50: mol_type = genomic DNA

SEQ ID NO: 62613 - DNA, 40 bp, Klebsiella pasteurii; identical to SEQ ID NO: 52043
  source 1..40: mol_type = genomic DNA

SEQ ID NO: 62614 - DNA, 50 bp, Klebsiella pasteurii; identical to SEQ ID NO: 62584
  source 1..50: mol_type = genomic DNA

SEQ ID NO: 62615 - DNA, 40 bp, Klebsiella pasteurii; identical to SEQ ID NO: 62585
  source 1..40: mol_type = genomic DNA

SEQ ID NO: 62616 - protein, 523 aa, Klebsiella oxytoca
MRQVITYLRFSSKPQERGDSIRRQKGLFERWLKDNPDAKVVDEFSDEGASAYHGHHLKGDFGRMLQNIQDGKYLSGQTVLLVESETRLNRQKARNTENLVDLITGKGVDVICLESGKIYTSTNIDDLDTSIQLKIAAHIAHQQSKEKSIKVSAAWEHRAQLALEGKQQLTKNVPGWIDPDTRKLNEHSSTVVTIFDLLLSGESLHNIARYLQANNIKSFSRREKANGFSVHSVRTILRSESTVGTLAASKRNDRPAIPNYYEPAIDVATFNKAQEILSKNRVGRAPASDNPITINLFKGIIGCQCGASVHPTGVKATYQGVYRCNNVPDGRCNVPTIKRKPFDKWMLDNIIGFLERSDGNNTDKRKAEIEYQISLVTSKLKKAATLLLELDDVTELKEQVKELNIQRINMQSELDDLNQRETLSDKPLHHLSEIDLTTKAGRVEAQLILSKFVQSIELQREMIIITLRNGAVIGKSRDLSPALSQDLMKQVVSSSSPRDIDMFSVITSDEEFRKSGKPVTKRS

SEQ ID NO: 62617 - DNA, 50 bp, Klebsiella oxytoca; identical to SEQ ID NO: 38382
  source 1..50: mol_type = genomic DNA

SEQ ID NO: 62618 - DNA, 40 bp, Klebsiella oxytoca; identical to SEQ ID NO: 52043
  source 1..40: mol_type = genomic DNA

SEQ ID NO: 62619 - DNA, 50 bp, Klebsiella oxytoca; identical to SEQ ID NO: 62584
  source 1..50: mol_type = genomic DNA

SEQ ID NO: 62620 - DNA, 40 bp, Klebsiella oxytoca; identical to SEQ ID NO: 62585
  source 1..40: mol_type = genomic DNA

SEQ ID NO: 62621 - protein, 464 aa, Mycobacteroides abscessus
MLAVIYTRISKDRAGSELGVDRQREDCQKLADELGWTVVETFSDNDISAFSGKKRPAYEAMLAALEAGRAQAVIAWHTDRLHRRPMELEGFIELCERKKIEVRAVRAGHLDFSTPAGRTNARVLGAMARYEIEHLIERAKSAKKQAALDGKFRGGRRAFGFEADGLRLREPEAEAIRTATQRVLSGVSLRQIARDWNAAGLRTAFGGKEFTSREVRTILLRARNAGIVLHEGQPVGQGQWDAIIDAETFAAIEVLLRDPARSVHISRIRKYQGSGVYLCGKCGARMGSASQVGSKRKSDWRKVYACSQVKHLARVAEYVDEYVSEHVIARLSTPDARQVILGAAPDVSALHAQREGLRARLNDLSDMFTEGSIDGEQMRRSTAGLQAKLAGVDAELAAIRSSSAVAAILAEDDVRAAWTEAPPEVRGKVIDTLMTVTILPVPPGRQPDGSYFDPTKIQIEWKIA

SEQ ID NO: 62622 - DNA, 50 bp, Mycobacteroides abscessus; identical to SEQ ID NO: 49747
  source 1..50: mol_type = genomic DNA

SEQ ID NO: 62623 - DNA, 40 bp, Mycobacteroides abscessus
  source 1..40: mol_type = genomic DNA
cacagcggcggcaagcgccaggtcgtataccgaccccacc

SEQ ID NO: 62624 - DNA, 50 bp, Mycobacteroides abscessus; identical to SEQ ID NO: 49749
  source 1..50: mol_type = genomic DNA

SEQ ID NO: 62625 - DNA, 40 bp, Mycobacteroides abscessus
  source 1..40: mol_type = genomic DNA
cagagctgcgggatgcgcccactcctctgccttccctacc

SEQ ID NO: 62626 - protein, 537 aa, Bradyrhizobium septentrionale
MAATVRAALYLRVSTGRQADSDLSIPDQRRQAKAHCASRGWEIVADYVEPGASATDDRRPEFQRMIDAATVKPPAFDVILVHSFSRFFRDQFQLEFYVRRLAKNGVRLVSITQELGDDPMSNMIRQIMALFDEYQSKENAKHTLRAMKENARQGFWNGALPPIGYRIVEASEQRGHRTKKTLEIDPIQAKTVRLIYRLAREGSGSSGSMGVKSIAKHLNEAGIRTRDGGRWGVDAVHKVLTRTTYIGRHRFNTKFWKTRERKPDAEVVEMAVPPIIDAAEFEAVQMLLKTRCPALTAPRVVSGPTLLTGICFCATCGGAMTLRTGKSGRYRYYTCSTKARQGETGCKGRTVPMEKLDSVVAEHIEHRLLQPKRLEEVLSAVLHRRKERAERRTTHIAELRKRAAEAEAKLKRLYDAIENGIADVSDPMLKERVTELKSIRDQARADAERGEGALDRAGPSITPQALKTFASQARRRMRTEQGGYRRDHLRALAQRIEVDAKEVRIMGSKSVLLRTLVAASGAKSAGFGVPSFVPKWR

SEQ ID NO: 62627 - DNA, 50 bp, Bradyrhizobium septentrionale
  source 1..50: mol_type = genomic DNA
tgcccagttttgtaccgaaatggcgcgccacggccgatgaagatgggcac

SEQ ID NO: 62628 - DNA, 40 bp, Bradyrhizobium septentrionale
  source 1..40: mol_type = genomic DNA
gaacacaggcaaagctggcgcacccgacacgattcgaacg

SEQ ID NO: 62629 - DNA, 50 bp, Bradyrhizobium septentrionale
  source 1..50: mol_type = genomic DNA
tgcccagttttgtaccgaaatggctggccacggccgatgaagatgggcac

SEQ ID NO: 62630 - DNA, 40 bp, Bradyrhizobium septentrionale
  source 1..40: mol_type = genomic DNA
tagcccagggaatgctggctgtcccgacactaccccaaag

SEQ ID NO: 62631 - protein, 451 aa, Mycobacteroides abscessus
MARLKRNAALYLRISLDQTGEGLAIDRQRGECEHIAKQRGWTVVEVFEDKSISATYANKRRPGYDGLVKAYEAGRFDALICYDLDRLTRQPRQLEDWIDAAEGKGLALVTANGEADLTTDAGRLFARVKLAVARSEVDRKSARQTAAARQRASLGRPPLGVRLTGYTVRGETVPEEADIVRRIFQLFQAGESLRSITRLLTDEGITTRHGKAWNPTTIYGTLRNPRYAGRAVYHGKPTGELGNWEPLVSAEVFDLVQAKLDDPRRKTNRIGTDRKHLGSGLYICAVCEQPTTSWSTGRYRCKSAHVNRSMPQVDSYVQDTIATWISEKGGDLLAPVAQNLAPLLAESERLRARLATVGADYDAGHIDGARYASAKARIVAELEQVQRDIGAADTGAALGEILNSEDPVKAFINAELMTKRSVINAVCTVRLHRGTRGSRTFDPDTVVIDWR

SEQ ID NO: 62632 - DNA, 50 bp, Mycobacteroides abscessus
  source 1..50: mol_type = genomic DNA
gacgttaatccggtacggaactcgaccaagttccgtagccaatcaatacg

SEQ ID NO: 62633 - DNA, 40 bp, Mycobacteroides abscessus; identical to SEQ ID NO: 57893
  source 1..40: mol_type = genomic DNA

SEQ ID NO: 62634 - DNA, 50 bp, Mycobacteroides abscessus
  source 1..50: mol_type = genomic DNA
gacgttaatccggtacggaactcgctcaagttccgtagccaatcaatacg

SEQ ID NO: 62635 - DNA, 40 bp, Mycobacteroides abscessus
  source 1..40: mol_type = genomic DNA
gacctgtactctgagttccctcccctcaccctcaaccctg

SEQ ID NO: 62636 - protein, 455 aa, Mycobacteroides abscessus
MASPPRNAALYLRISLDQTGEGLAIDRQREECERIAAQRGWTVVGVYEDRSISATQANKKRPGYEQLVSAYQAGQFDAMVCYDLDRLTRQPRQLEDWIEAAEGRGLALVTANGEADLTTDGGRMFARVKLAVARSEVERKSARQRTAAHQRASLGRPPLGTRLTGYTPKGETIPAEAEVIRRIFKLFQAGETLRSITRMLTEEGVTTRRGNAWNPSTIYGTLTNPRYAGRAVYQGKPTGQLGNWEPLVSPEVFDLIQARLADPRRKTNRVGTDRKHLGSGLYVCAVCEQPTTSWSQGRYRCKDSHVNRAQSQVDSYVLDTIAARLRRGDIATLLAPAKADLAPLLDDIERLTARQATIDADYDAGLIDGTRHAAATATVRAELIAVQQQMAAADKGSALGELLTSPDPAQAFLDAGLMTQRSAIDALAVVRLHRGHRYSRTFDPETVEVDWRRPR

SEQ ID NO: 62637 - DNA, 50 bp, Mycobacteroides abscessus
  source 1..50: mol_type = genomic DNA
gttgttaatccggtgcggaattccaccacattccgcaaccgtgcaacaat

SEQ ID NO: 62638 - DNA, 40 bp, Mycobacteroides abscessus; identical to SEQ ID NO: 57893
  source 1..40: mol_type = genomic DNA

SEQ ID NO: 62639 - DNA, 50 bp, Mycobacteroides abscessus
  source 1..50: mol_type = genomic DNA
gttgttaatccggtgcggaattccctcacattccgcaaccgtgcaacaat

SEQ ID NO: 62640 - DNA, 40 bp, Mycobacteroides abscessus; identical to SEQ ID NO: 62635
  source 1..40: mol_type = genomic DNA

SEQ ID NO: 62641 - protein, 534 aa, Frankia casuarinae
MARATSRRKSANRTPQPAVDPLDTVRVGIYLRRSTDDEHQPYSIEAQEERLRSYIDSQPGWAIALRFSDDASGATTERDDLQRALSAARHGLIDVLLVYRVDRLSRNLRDTVTLLEELDQAGVVFRSATEPFDTATPMGRMLLQMLAMFAQFERDTIIDRVIAGMERKAAKGLWMGGNRPFGYQVDRANWKLLVDEKEAPVVRLIFNLYVKERVGTRAIAKTLNERGHRTTTGGPWSGHQVLRVLDNRIYLGELTFREITVTDTHKPIIEAAQFAEAEKILTIRSDGHTHRAASDSDYYLTGRMRCPQCAKAMLGSNAGGRNRTYRYYTCFTRLRYSRDRCDAPRLDADALDQAVLTALAAFYRDHQQLISDAVHHARQRHHDAHADRTGELATVQADLTQTDQAIDRYLSAFERGTLDEETLATRLATLRTKQKQLRRRQTELTAQIDDEPVMPPRATLSKIAGHIDTIIEVGTDLQRKALVEALIHEVKILGPGRLQPVFKVPRPEPSETAAAALPATTPPKGAVRTMPNMV

SEQ ID NO: 62642 - DNA, 50 bp, Frankia casuarinae
  source 1..50: mol_type = genomic DNA
ggttcgtacaatgccaaacatggtggaccatgtgtaccagcatccgaacc

SEQ ID NO: 62643 - DNA, 40 bp, Frankia casuarinae
  source 1..40: mol_type = genomic DNA
gcatgatcaaaaaactggtggagcgggtgggactcgaacc

SEQ ID NO: 62644 - DNA, 50 bp, Frankia casuarinae
  source 1..50: mol_type = genomic DNA
ggttcgtacaatgccaaacatggtgaaccatgtgtaccagcatccgaacc

SEQ ID NO: 62645 - DNA, 40 bp, Frankia casuarinae
  source 1..40: mol_type = genomic DNA
ccacaatcacacaacttgtgatggggctgggatttgaacc

SEQ ID NO: 62646 - protein, 533 aa, Streptococcus dysgalactiae; identical to SEQ ID NO: 12191

SEQ ID NO: 62647 - DNA, 50 bp, Streptococcus dysgalactiae; identical to SEQ ID NO: 62552
  source 1..50: mol_type = genomic DNA

SEQ ID NO: 62648 - DNA, 40 bp, Streptococcus dysgalactiae
  source 1..40: mol_type = genomic DNA
gttcgaccccggccgccggtatacttgaaaagacaaggtt

SEQ ID NO: 62649 - DNA, 50 bp, Streptococcus dysgalactiae
  source 1..50: mol_type = genomic DNA
agacttaagaatatcggccgccggagtagcttaaagtaaagcaaaagcct

SEQ ID NO: 62650 - DNA, 40 bp, Streptococcus dysgalactiae
  source 1..40: mol_type = genomic DNA
ctccgacctcggcctcctgagtagctgagacgacaagtgt

SEQ ID NO: 62651 - protein, 495 aa, Bacillus altitudinis
MRVSTEEQAIKGSSIDSQIEACVKKAGTTNVLKYADEGFSGELLERPALNRLREDARKGLITELICYDPDRLSRKLMNQLIIDDELRKKGIVLTFVNGDYADSPEGQLFFSMRGAISEFEKAKIKERTSTGRLQKIKKGIIIKDPSLLGYRMNKEKRTLEIIEEEAKVVRMIFDLFTDHSSHFFNRVNGIALHLTKLGIPTKRGAKVWHRQVVRQILMNPSYKGKYEQYKYDTEGSYVSKQAGGPAIMKLRPEEERYVTEIPWVVSDEQWEYAQELLGKSRRKQLQYGTHPYLLSGLVRCGKCGNTMTGKKRKSHGEDFYVYECRKNYAGAKNRGCGKSMSENKLNRIVWDEIYKFITNPEKYRVYKEEEKATHKADELELIQKEIEKAKKGRQRLITLISLSEEDDLDIEEVKTQIVELQKKQNHLMIQQDTIEKEIKEAEGSAAGENALKRALDYLSSVNADNLKLEDKKAIINFIVEEVLIVDSETIHIRTH

SEQ ID NO: 62652 - DNA, 50 bp, Bacillus altitudinis
  source 1..50: mol_type = genomic DNA
caccccccttttgtcattaatatctcattattaatgtcaagaggggggtg

SEQ ID NO: 62653 - DNA, 40 bp, Bacillus altitudinis
  source 1..40: mol_type = genomic DNA
gcgtaaatgcatcaggatttcgttctcgatacaccgcgcc

SEQ ID NO: 62654 - DNA, 50 bp, Bacillus altitudinis
  source 1..50: mol_type = genomic DNA
caccccccttttgtcattaatatccaattattaatgtcaagaggggggtg

SEQ ID NO: 62655 - DNA, 40 bp, Bacillus altitudinis
  source 1..40: mol_type = genomic DNA
gtgtgaatgaatcaggactcagttatccatacagttggca

SEQ ID NO: 62656 - protein, 499 aa, Streptomyces coelicoflavus
MHVVEHRHLTRDQGWGMTKPKRVGIYVRISKDRKGQELGIQRQEKTCRELCERMGWGVLKVYPENDVSASTTSKRRRPQYTEMLRDARDGFIDGIVVYSIDRLTRRISELTNFLEEQKEHAFAFATTEGEDTATANGRMILTIKGAVAQQETERMSERVNNSLLQRREQGKPHAGGMRQFGFKEGTHFQQLDEGEAELIREGYRMLMDRNSKTPGDVARYWGSEGSTTPHGGAWTIQSVKRVYRSERTGGIVTYKGQDIGDSVYGAPLTREQWENVQTLLDGRATPAAQGSGKRKHVYSGFLRCGYCGSAMRVQWATIQGRTFRRTFCHSGQRGRNGHLGCGKVSRKYEWIEERLNEAIEAALLSRIPQREKVQTEDLTGQISVLESRIRALRGRWKEGHMEDEDYFDSLTHLRAELQTLRTREATATIRRSRVETDVLAVWKDDATENLERRRAIVASVIDHVEVFSIGRGRRKPPEITSIKITPLGAEHEASPVSPA

SEQ ID NO: 62657 - DNA, 50 bp, Streptomyces coelicoflavus
  source 1..50: mol_type = genomic DNA
atcaacggtgctacaacctggccggccacgctcgtaaccccactctgtgt

SEQ ID NO: 62658 - DNA, 40 bp, Streptomyces coelicoflavus
  source 1..40: mol_type = genomic DNA
cgggacgagctcctggccggccacgttggtcgccgtccgc

SEQ ID NO: 62659 - DNA, 50 bp, Streptomyces coelicoflavus
  source 1..50: mol_type = genomic DNA
atcaacggtgctacaacctggccgcccacgctcgtaaccccactctgtgt

SEQ ID NO: 62660 - DNA, 40 bp, Streptomyces coelicoflavus
  source 1..40: mol_type = genomic DNA
cggggtgagcaacagggaccccacgttggtgaccctccgc

SEQ ID NO: 62661 - protein, 589 aa, Ruminococcus bromii
MGKKIAAYMRISVDTEKDRDNTSIENQRRIIKAYLKQRFPDAEVDYYVDRDRSGYTFEQRESYMKMRPLLMSGDYDILLIKDLSRFSRRNSKGLVELEDLRDAGVRIISIGDGIDYPTYDDWNNIQVRFLLNEMPVTDASKKVKKVVEMRQNNADWICAVPYGYYMIDSKNMTYEVDEACAEVVRRIFEMYNGGMGYKKIANTLTDEKIPTPRMVEIERKRKMAELNKKKVDIKLKASPVWAIPTVSGILQNDFYIGTLRQRKYTRKRINGPDKRLNAEENIVFENHHTPIVSTREFMKAQQQLKTRTKNNYRGTKKYDNDYSGFLFCGECGSPMFSMSRPDLAPAYTCGTYHKRGLKGCTSHHIRVDVLDTVLKKYVERIMKTSDKMIAELEKNIANEADDLKSNADSVADLQVDLARAKEEYKATQKQKIRDIMKADEEQRDMIEEAYEDMENELISKIEGLEKQTALMVERRNQTIEVNRIAKNAIEIFRDIVNKKKLDKGDLSIIIDKIIIHDGDESKIDIQLKSDIQMLLESGTLTEDELEKAGYRGKVVNFKWDIESSLEATIVQKVRNQRDKAFGVNVLCGG

SEQ ID NO: 62662 - DNA, 50 bp, Ruminococcus bromii
  source 1..50: mol_type = genomic DNA
ggtgtcaacgttttatgtggcggcgacccccatcataaaacgttgacacc

SEQ ID NO: 62663 - DNA, 40 bp, Ruminococcus bromii
  source 1..40: mol_type = genomic DNA
gcttcgtattcgtgagggagatccgctcgaaatttatacc

SEQ ID NO: 62664 - DNA, 50 bp, Ruminococcus bromii
  source 1..50: mol_type = genomic DNA
ggtgtcaacgttttatgtggcggcaacccccatcataaaacgttgacacc

SEQ ID NO: 62665 - DNA, 40 bp, Ruminococcus bromii
  source 1..40: mol_type = genomic DNA
gcttggtgttagttaggaaaataggctcctaattcctacc

SEQ ID NO: 62666 - protein, 488 aa, Streptosporangium roseum
MAPQDAPTYAIVYVRISRDKEGAGLGIDRQREDCEALAERLGFRVIAVYDDNDISAYSGKARPGYRQLLADLEAGRATAVLAWHTDRLHRSPVELEEYITVCEPRGIVTHTVKAGPIDLATPSGRMIARQLGAVARFESEHKSDRARRKRDQMAQAGQWKGGRRPFGYEDNGVTVRPDEAAEVKQASESLLSGMSMHAIVRDWNARGVKTTTGATWSTRSVRNVLTRPRNAGIMEHRGEELGPAEWPAIVDEMTWRSLCALLADPNRRTSPGSERRWLLSGIAECGICEVGGVLTYLRAGTAGKNTGEDRKTAPAYRCRLDDAAKHVVRNAIHLDKYVSAVAVERLSQPGAAAELTIRNDGGAARERAIEREALRIHEQEAGEMFAAREMTRAQLATTNREIAARRAELDLADAAAARVTALAPFASGADASQVWEDLTLDQRRAVISQVMRVVVLPAGKGRPKGWTPEYGKEWGYFDPEAVRIGWKG

SEQ ID NO: 62667 - DNA, 50 bp, Streptosporangium roseum
  source 1..50: mol_type = genomic DNA
gtgagccctagcttgctcttcgccagtgcgaaagtcaacttatggcatac

SEQ ID NO: 62668 - DNA, 40 bp, Streptosporangium roseum
  source 1..40: mol_type = genomic DNA
cagggccacagcgatcgccaggtcgaacacgcttccgcgt

SEQ ID NO: 62669 - DNA, 50 bp, Streptosporangium roseum
  source 1..50: mol_type = genomic DNA
gtgagccctagcttgctcttcgccgttgcgaaagtcaacttatggcatac

SEQ ID NO: 62670 - DNA, 40 bp, Streptosporangium roseum
  source 1..40: mol_type = genomic DNA
cagtgccacaaccagagccgtggcaaaccctcttcctcct

SEQ ID NO: 62671 - protein, 503 aa, Corynebacterium amycolatum; identical to SEQ ID NO: 34681

SEQ ID NO: 62672 - DNA, 50 bp, Corynebacterium amycolatum
  source 1..50: mol_type = genomic DNA
atttatcgacgacactccgtcgaatttcgtttcaatgtaacctgaggcgc

SEQ ID NO: 62673 - DNA, 40 bp, Corynebacterium amycolatum
  source 1..40: mol_type = genomic DNA
cgacggtgacgtggtggagttcaaatttaacgtgtagtgc

SEQ ID NO: 62674 - DNA, 50 bp, Corynebacterium amycolatum
  source 1..50: mol_type = genomic DNA
atttatcgacgacactccgtcgaatgtcgtttcaatgtaacctgaggcgc

SEQ ID NO: 62675 - DNA, 40 bp, Corynebacterium amycolatum
  source 1..40: mol_type = genomic DNA
gtgcggggaactggtggagtgcagagttaacatggggtgc

SEQ ID NO: 62676 - protein, 463 aa, Streptomyces buecherae
MRGCRVAGVARDLNVSATKVPPWKRPELGEWINNRAPEFDQILFWKLDRFVRRISDLHLMIEWCREYDKVLAADKDPIDLDSAYGEMMVTMIAGMARIEAANTGIRLESLWKYARTVDRWVIGKPIYGYTTEEGPDGRRLVAHPFHRRVLRWIYQMLKRGRSMYKITQIVNRAGVPAPNGGKWYAKNLSSILKNPALKGVRVIRPPRAKSKDISRIVYGSDGQPIRLAPPLFTDQEFDEIQDRLQHNVKHGRRSSKKRKLSLFLGVIKCGVCGANMYKHVTAKKRKDGSVRRHARLRCSSYTKEPCGAPTYDPDEMYGALAGTALDQLGGFEVVHRAYARGAENLARATELQASIKHYMDGLAPGGSFAVGGFIQKQAQEALQKLGAELEAIDPESTKDRWIYKSLGLTYSQHWSQLGADQMEKDLLRAGITFVVHQEQCDLLIPDDVKSRLIVKDDYFKKKL

SEQ ID NO: 62677 - DNA, 50 bp, Streptomyces buecherae
  source 1..50: mol_type = genomic DNA
ggcgtatagtccgtgtggttcttgggccataagcacacgcgttgtagccc

SEQ ID NO: 62678 - DNA, 40 bp, Streptomyces buecherae
  source 1..40: mol_type = genomic DNA
gggcgtcatgtggatctcgggccagaactcgctgtacgcg

SEQ ID NO: 62679 - DNA, 50 bp, Streptomyces buecherae
  source 1..50: mol_type = genomic DNA
ggcgtatagtccgtgtggttcttgttccataagcacacgcgttgtagccc

SEQ ID NO: 62680 - DNA, 40 bp, Streptomyces buecherae
  source 1..40: mol_type = genomic DNA
ctgcgtcatgtgattcttgttccagatgttgctgtaatag

SEQ ID NO: 62681 - protein, 607 aa, Paraburkholderia hospita
MKSDPHQKVQASHLKRNAYLYIRQSTLRQVFENTESTKRQYALRQRAVALGWSEDRIIVIDSDLGQSGASSADREGFQRLVAEVGVGHAGIVLGLEVSRLARNSTDWHRLLEICAITDTLILDEDGVYDPAHFNDRLLLGLKGTMSEAELHVLRARLQGGILSKARRGELQMRLPVGFEYNAAGAVVLDPDQQVQHCLRWLFDTFRGTGSAMATARAAHHLELAFPRRCCKGPHKGELLWGSLGHSQVVRILHNPRYAGAFVYGRTHTRKTVDGRTRVIRAPRDQWDTLIPGAHAGYLSWEEYEQNQKRLHESAQAIGADRRRGAPREGPALLQGVVVCGRCGNRMTVRYHSRQGCLCPEYICQREGIEQAGPVCQRIHGAAIDEAIGELLVEALNPLAIEVSLAVQRELQSRIEEADCLRHKQVERAQYEADLAQRRYMRCDPENRLVADSLEADWNHKLRALTEANEEYQRRREQDARILTDEQRAVIVSLASNFPRLWRDPATPDRERKRMIRLLLEDVTLNRDQQVTAQIRFKGGAHRTLSLPLPLKSWQRWVTPATVIEEIDELLNHHTVLQIANILNERGAPSGTGRPFNAKMVARLQRNY

SEQ ID NO: 62682 - DNA, 50 bp, Paraburkholderia hospita
  source 1..50: mol_type = genomic DNA
gaggtgtagtgtgaaacgcaagccttggagtccgcagacaactgcgcccg

SEQ ID NO: 62683 - DNA, 40 bp, Paraburkholderia hospita
  source 1..40: mol_type = genomic DNA
gaacgactcgcacatggcattgtcgaagcagtcgccggcc

SEQ ID NO: 62684 - DNA, 50 bp, Paraburkholderia hospita
  source 1..50: mol_type = genomic DNA
gaggtgtagtgtgaaacgcaagccagggagtccgcagacaactgcgcccg

SEQ ID NO: 62685 - DNA, 40 bp, Paraburkholderia hospita
  source 1..40: mol_type = genomic DNA
gcccggctctcacctgcccaggcccaagcagtcgctgtcc

SEQ ID NO: 62686 - protein, 520 aa, Bariatricus massiliensis
MARKKSKLNDNNLAIAYYRYSSHSQNEASIEQQRELAHEWADAHGLKIVREYEDAAISGTKEDRPGFQLMLSEVAKIRPNTLIAWKTDRLGRDKYVLAMAKKTIRDAGCEIHLLAENIPTDTAEGILIEGLMEALAEYYSRNLSVHIQRGMDFNAEHANFNGHKVFGFKTEKVDKKRKYVIDPDTAPFVQLMFTKYAEGEPMQSICDEFNEAGLRTSRGNPFGVKTMHRMLKNRAYIGEYRHGEFVVPGGMPALVDGETFDRAQKRLAENKRKGSQRARGMDEDGAPRYWLTGKLYCGECGETMQGVSGTSKTGRTYYYYYCSAQRKKLCTKKKVKKDWIEDLVTDVLRHIIDDSENLMSLAVDAAVYYKEHYKETGYLEGLEAKRKEVEKGIANLMKAIEGGALSDTLIERLNQLEAQKASLNDAIQAENVKVSLCEDEHSIKAYFEKFLHADFDNPETRDKILEYFVDKIYLYDEKLVVTSWYSEDKTEITWDMLKGADGDPFVKGEAAEFDCFPLGS

SEQ ID NO: 62687 - DNA, 50 bp, Bariatricus massiliensis; identical to SEQ ID NO: 37162
  source 1..50: mol_type = genomic DNA

SEQ ID NO: 62688 - DNA, 40 bp, Bariatricus massiliensis
  source 1..40: mol_type = genomic DNA
ggttcgactcccctcaggtccactaaaaaagtgccgtgtt

SEQ ID NO: 62689 - DNA, 50 bp, Bariatricus massiliensis; identical to SEQ ID NO: 42984
  source 1..50: mol_type = genomic DNA

SEQ ID NO: 62690 - DNA, 40 bp, Bariatricus massiliensis
  source 1..40: mol_type = genomic DNA
ggtctgactgcctgcagggtcagacaaaaagagccgtatt

SEQ ID NO: 62691 - protein, 564 aa, Fusicatenibacter saccharivorans
MGMRQVQILEATKTTINSVGRRGMGMSIQRIRVAAYCRVSTDGDEQLGSFVSQKSYYEEKIRQNKEWVLAGIFADEAITGTKVDKREGFQEMIRECRNGKIDMILTKSISRFSRNTQDTLKYVRMLRDRNIAVIFEKENINTLDMNGEMLLTILSSLSQGEVESLSENVKMGLRMKMKRGELIGFNGCLGYDYDRETKTITVNEQEAETVRLIYDLYLQGYGTSTIARRLMELGIKNRCGTVEWHTHGVMGIIKNEKYKGDVLLGKTFTVDPISKRRLANMGEEERYYIRDHHEPIVTREIWDKAEEIRLKRVRPRLMETTANRERYTRQFTFSSMLECGYCGHKLSRRTRHQTTTTKKPVWQCMNATKNGISNCPNCKAIDEVIIENAFLDAFRLLADNFDDVLDSVLSTIEDVLKDDTELKRVKQLEKDISSIETKKSRLTDLLIDGKIEQEDYDEKKLSFQRKLHQMTEEKAYLEENIGQQKNISKRMEQLRKTLENEDILDEFDRIVFESIVEKVIVGGYDENGNPSPYKLTFVLKCNQDLKVDDAKADYKANQKGKKVS

SEQ ID NO: 62692 - DNA, 50 bp, Fusicatenibacter saccharivorans
  source 1..50: mol_type = genomic DNA
atgttccccagggactgccgacacatgtggagaccgtctgttgtctacat

SEQ ID NO: 62693 - DNA, 40 bp, Fusicatenibacter saccharivorans
  source 1..40: mol_type = genomic DNA
caattcccgatgacgtgccatgtggagacggttgttcttt

SEQ ID NO: 62694 - DNA, 50 bp, Fusicatenibacter saccharivorans; identical to SEQ ID NO: 62692
  source 1..50: mol_type = genomic DNA

SEQ ID NO: 62695 - DNA, 40 bp, Fusicatenibacter saccharivorans
  source 1..40: mol_type = genomic DNA
catttcccgatgacatgtaatgtggaggatctttttatgt

SEQ ID NO: 62696 - protein, 585 aa, Enterobacter hormaechei; identical to SEQ ID NO: 43631

SEQ ID NO: 62697 - DNA, 50 bp, Enterobacter hormaechei; identical to SEQ ID NO: 43632
  source 1..50: mol_type = genomic DNA

SEQ ID NO: 62698 - DNA, 40 bp, Enterobacter hormaechei
  source 1..40: mol_type = genomic DNA
atcgatcgggtatttcggatttcccgggtggctgataatg

SEQ ID NO: 62699 - DNA, 50 bp, Enterobacter hormaechei
  source 1..50: mol_type = genomic DNA
attggcacctaaaaatatttcggggtgcctaaagtcatttacatgccaat

SEQ ID NO: 62700 - DNA, 40 bp, Enterobacter hormaechei
  source 1..40: mol_type = genomic DNA
atccttcaggtctttctcagtttccgtgaggctcagaatg

SEQ ID NO: 62701 - protein, 530 aa, Sinirhodobacter populi
MNIHSPNVATLRAALYLRVSTARQAEHDISIPDQKRQGEAYCETRGYQLVETFVEPGNSATNDRRPEFQRMIEAATAKPPAFDVVVVHSFSRFFRDEFEMEFYYRKLAKNGVKLVSITQELGDDPIHDMMRRIMSLFDEYQSKENAKHVLRAMNENARQGFWNGARPPIGYRIVAAEQRGAKIKKKLEIDPLHADTVRLIYRLFLEGDGTSGAMGVKAIATYLNERRFFTRDGGRWGLAQIHAILTRTTYIGEHRFNTRSHKDREKKPESEIAIMAVPPLIEREVYDAVQARLKSRNPMVTPARVSSGPTLLTGICFCAKCGGAMTLRTGQGSTGATYRYYTCSTKARQGKTGCKGRTIPMDKLNHLVADHIGDRLLQPKRLETILASVIDRRQERTERRREHLAELQRRITETDQRLGRLFDAIEAGMVDKGDAMAKERMASLKALRDQAAADAERAQLALDSSGNQAVSPDMLKTFARKARERIRLDNGGYRRDHLRALAQRVEVADDEVRIMGSSRNCCERWSPLLA

SEQ ID NO: 62702 - DNA, 50 bp, Sinirhodobacter populi
  source 1..50: mol_type = genomic DNA
ttcatagttctgttctgaaatggtgcgccgcgccgggtgaagatgagaat

SEQ ID NO: 62703 - DNA, 40 bp, Sinirhodobacter populi
  source 1..40: mol_type = genomic DNA
cagatggaaggaaaatggtgcacccggagcgattcgaacg

SEQ ID NO: 62704 - DNA, 50 bp, Sinirhodobacter populi
  source 1..50: mol_type = genomic DNA
ttcatagttctgttctgaaatggtatgccgcgccgggtgaagatgagaat

SEQ ID NO: 62705 - DNA, 40 bp, Sinirhodobacter populi
  source 1..40: mol_type = genomic DNA
cagctgaaaggaagctgatataactggagcaatatgaaca

SEQ ID NO: 62706 - protein, 512 aa, Elizabethkingia meningoseptica
MIADLYIRVSTDDQADKGYSQRDQNERLRKYCEMYNLTIGQVIYEDHSAKNFERPEWKKYLSYLKKRSTKTNIVLFTKWDRFSRNAGDAYQMIGLLTKLGVEPQAIEQPLDLSVPENKMMLAIYLATPEVENDRRALNTYNGMRRAKKEGRLMGRAPYGYINRSREDGRKYIALKEPEASNMKWAFNEISKGIMATNQVREKMNKMGGKKIEKSAFYMALKNPMYCGKVFIDKNKEEDAFCVQGQHEALVSEALFDKVQFILDGKKIERLPKTKFLSDENLPLRGFLVCPDCGGVITGSASRGRSQRYYYYHCKSPCGVRHRADLANDIFLNGLKELEMKEPIKEYVKKIFLENYSSSIVNPLTEKKRIGKEIDKLNNKISIARDKLLSEIIEDDEYIQIKKECKEKIEKLENQLSKDQDRTEIKNINIEKLLEKALEALTNVAFLYSSGDIETKREVIGSIFPEKLEFDGKNYRTARMNAVMHLIFQINNGLEDKKNRRKSELSPFSGFVP

SEQ ID NO: 62707 - DNA, 50 bp, Elizabethkingia meningoseptica
  source 1..50: mol_type = genomic DNA
gttatcacctttttccggctttgtacccaagaccgaagaaatgtcgaacc

SEQ ID NO: 62708 - DNA, 40 bp, Elizabethkingia meningoseptica
  source 1..40: mol_type = genomic DNA
gttatagaggatttatagtacccagtgccggaatcgaacc

SEQ ID NO: 62709 - DNA, 50 bp, Elizabethkingia meningoseptica
  source 1..50: mol_type = genomic DNA
gttatcacctttttccggctttgtcaccaagaccgaagaaatgtcgaacc

SEQ ID NO: 62710 - DNA, 40 bp, Elizabethkingia meningoseptica
  source 1..40: mol_type = genomic DNA
ttgttagaggctttcaagtcacaagagctggatttgaacc

SEQ ID NO: 62711 - protein, 580 aa, Amycolatopsis keratiniphila
MTAEISDPWSKLDEILGLEVAEPVDDGIGALAVYGRCSTEDNQDPETSRGWQIGNARKFVEPLGGRIVAEYFDVGQSRSVPWERRTEASRLLAELKNPRRTWNALVVGEGTRCWFGNQFSLIAPRFAAYGVDLWVPELGGKFDPRNPSHKMLMSVLGGMSESERQHVQARVRAAMDAQVVNEGRHQGGRAPYGYVVVDGGPHPNPRKAAEGFRLRVLAIDEPAAEVVRRIFAEYLDGQGDRAIANGLNRDGIPCPSARRPEQNRHRLADGWQGSTTRSILENPRYTGYAVFGRSARQEMLFDPDDVAAGNVVRFRRAKPDRVVRSRKPAHPEIVSVEDFTQAQLIRRAKAAGGLRTARKAERAGRPVKHVYLFRGLIRCAACERKMEGSPRKYGMYYRCPARTLAPGAPALLTHPPTIYLREEPLRDAVNGWIGGLFDRQNVEQTVRQLVGAQPAVRAEGDGVASKQLEEAEAKLRRFQDAIAAGVDPTALVESINEAQADRAAAQGALAAAGEPAGITDAEVYAMIDSLGDIGAALADSEPGKLARLYRDLRLDLRYDNEKEAVYATTSLRVNNAGVRG

SEQ ID NO: 62712 - DNA, 50 bp, Amycolatopsis keratiniphila
  source 1..50: mol_type = genomic DNA
cgtgtgaataatgcgggtgtccgaggggcgggttgctcactatccacacg

SEQ ID NO: 62713 - DNA, 40 bp, Amycolatopsis keratiniphila
  source 1..40: mol_type = genomic DNA
gggtactgcgcgtgtccgaggggggacttgaacccccacg

SEQ ID NO: 62714 - DNA, 50 bp, Amycolatopsis keratiniphila
  source 1..50: mol_type = genomic DNA
cgtgtgaataatgcgggtgtccgaagggcgggttgctcactatccacacg

SEQ ID NO: 62715 - DNA, 40 bp, Amycolatopsis keratiniphila
  source 1..40: mol_type = genomic DNA
gggccttgcatgagtccggagggggacatgaaggcacacg

SEQ ID NO: 62716 - protein, 539 aa, Neobittarella massiliensis
MRFFIYSRKSVWSARGDSVENQVEMCRRYIAEKFGGGEHQIAVYEDEGFSAKDTDRPQFQFMLRDLYEQRPDYLICYRLDRISRSVSDFSALVEELARQGTALVCMREEFDTAKPMGKAMMYIASVFAQLERETIAERVRDNILLLARSGRWLGGTTPTGYRSVQVRELVLEGRVKTACKLQPVEEELQWVRQLYAVYIQEHSLSAVHRALEMLGARNRRGVPFTRMGVKAMLQNPVYCAADAEAHSYFTARGAAVCFDPQQAPDRGLLVYNKRGAGGRRQEVEQWVVAAGRHPGLICGGQWVRVQKILREEQPATDRPGKQHNDYAMLSGLMFCTRCGQKLLAKKRSGPQREGQYDYICSSKLTAGTRHCDSQNLAGPATDQAVWQHLCGYLCARPEQLQTALGQLRREYIQQLPQSPTQLQREIQRAQTEIQNLVAALSAGNAPAIAGHIARQIEQLDRQVLCWQRQLEGQGQRTETAPVKREAARLLRRRRWLEDLDRRQRRQLVRAVVQRMDWDGEKLYVYYRGETGQENGGGGS

SEQ ID NO: 62717 - DNA, 50 bp, Neobittarella massiliensis
  source 1..50: mol_type = genomic DNA
agttgacctttgtgcggcggcggtttcccgccgacagacaaagggaaact

SEQ ID NO: 62718 - DNA, 40 bp, Neobittarella massiliensis
  source 1..40: mol_type = genomic DNA
tgtcccctgcaacggccgtttcccgacgcttattgcaatt

SEQ ID NO: 62719 - DNA, 50 bp, Neobittarella massiliensis
  source 1..50: mol_type = genomic DNA
agttgacctttgtgcggcggcggttccccgccgacagacaaagggaaact

SEQ ID NO: 62720 - DNA, 40 bp, Neobittarella massiliensis
  source 1..40: mol_type = genomic DNA
tgttccttccaaagggagttcccagcctcttcttccaatt

SEQ ID NO: 62721 - protein, 469 aa, Deinococcus radiopugnans
MQSEKQQISKGRVLSYGRVSTKDQLDGYSLDAQRERLAAYAQFNGWDIPIHFEDPAISGRRETRPAWTALMATLKPGDTVLAKDLSRIARGGIVQTLTIIRDIEARGGRLILIDQSLDTSTPFGRVVLSILATFAEFELEQTRERSLIGRTQAARSGAWPQGSVPYGYRRNEDRQLEPNPDTAEAARTALRALIGRSYELAADHLQETGLPSPTGKPNWSPTRLHAMANQTAYIGEAIYVSDGERIVVPCPPLLSREEWAMIHAGRERTHVGGALPGKYPLTGHLRCEHGAPFTGATGVTWAQRQVAGRFRTYQIAQRGKARYDCTCKARRADDLETQARVLLARVLSDPSDPLALRALSAPPDPLTDVRAQERQEIADALSNLARLRVLGQIEEADYLSLRSELKSRDRALTPAPQPVTPPPAMLELAEDVRASSAQQLAELLDLLEVRFRLSPGQELELLQFRPLGR

SEQ ID NO: 62722 - DNA, 50 bp, Deinococcus radiopugnans
  source 1..50: mol_type = genomic DNA
gcggggagtcttatgctggtgtcattcgacacgagaatatgactcttttt

SEQ ID NO: 62723 - DNA, 40 bp, Deinococcus radiopugnans
  source 1..40: mol_type = genomic DNA
cgagaagataccgtcgtcgttcgagaccagaatgcgtggg

SEQ ID NO: 62724 - DNA, 50 bp, Deinococcus radiopugnans
  source 1..50: mol_type = genomic DNA
gcggggagtcttatgctggtgtcaggcgacacgagaatatgactcttttt

SEQ ID NO: 62725 - DNA, 40 bp, Deinococcus radiopugnans
  source 1..40: mol_type = genomic DNA
ggagcagatagtggggtcagggcagaccagcatgcttggg

SEQ ID NO: 62726 - protein, 524 aa, Pseudomonas carnis
MPKAISYIRFSSEKQAKGSSLERQQTMLAQWLDSNPEYVLSDLRFQDLGVSGFTGAHLENGFGQLLAAVENGSIEPGDVVLIEAIDRVGRLEPMEMLPLLARIVRTGVYIVTLDDGIKYDRESANSNHLFLLVAKVQQAHQYSETLSRRLKASYAARRKNAVEGVVPKRHTPIWLTSEGELIPEIAPLVKQAFEDYASGIGERRIFERIFKGNSNPLLARMAPSTVKRWMNNRTAIGDWDSIPNVYPAVVEHELFYRVQKRMEAKFSPRGTPNKHAYTGLVVCSECGKNFNTKYFKASDQTSMECSSRARRGAMGCSNNRSMPEPVIKLAYLFTFTGHALKALEGQMLTASQKRAMELEGEIGEVNKKITRIVNAITVLEDDSEELTDKLRSLQAERKLLQAEMNGLTHTSISIRDKILSTTEFNKDMMKANALLQSVGYQLVCHPDGRITFEDETGKQTFHYLGWGRSEDVHKVVLSDGKLVKLGITRPENKLVKKTVKATPVDIAAIKGMKLSQIKVRWDKK

SEQ ID NO: 62727 - DNA, 50 bp, Pseudomonas carnis
  source 1..50: mol_type = genomic DNA
cacgtatacattggcgctttcttcgtgcagaatgcggcattgtctatgag

SEQ ID NO: 62728 - DNA, 40 bp, Pseudomonas carnis; identical to SEQ ID NO: 59113
  source 1..40: mol_type = genomic DNA

SEQ ID NO: 62729 - DNA, 50 bp, Pseudomonas carnis
  source 1..50: mol_type = genomic DNA
cacgtatacattggcgctttcttctggcagaatgcggcattgtctatgag

SEQ ID NO: 62730 - DNA, 40 bp, Pseudomonas carnis
  source 1..40: mol_type = genomic DNA
ttggcagtacatcagttggtgtcagagcatgtcttaaaga

SEQ ID NO: 62731 - protein, 536 aa, Streptococcus suis
MQVEGFSLDAQEAKIQQYANAFDIEIVKTYQDAGKSGKTMLGRTEFMNMISDIEAEKDKVDYVLVFKLSRFGRNAADTLKSLAIMESHGVNLICVDDGLDSSKDSGKLVITILSAVAEMERENIISQAMEGRRQKARAGQWNGGFAPVGYSLVNGQLQVNHEEAESVKMIFDLFANSDMGTIAIAKHLANLDIKKPIRHNSTLPYFSSSGITRILDNPVYNGKIAFGRRESTRDKISGETKVTQSENYILTDGIHEAIIDDETWKKVRKKREANAHKYKRENPNKGDSIYILSGLIKCPLCNAGLYGNKSIKRNKNKKDEYYKNYYYYACKHRKHVDGHKCTFNKQLKTGNLDHEVLSIISKLVSRPGFAKKLQEKINIQVDTSRIDSEIEQYKSLFRQLNATKMNLIQQIDTLNFEVPHFQQKSIDLDMRLNTIYDKIADVETLIETSESKREVILKDKMTADNIYKILVNFASLMDVMEDIDKKRLCQMLIEKIEIYDEKNEAGRWVKAIHFKLPIIEEDLEISLDNSTPVEAV

SEQ ID NO: 62732 - DNA, 50 bp, Streptococcus suis; identical to SEQ ID NO: 42092
  source 1..50: mol_type = genomic DNA

SEQ ID NO: 62733 - DNA, 40 bp, Streptococcus suis
  source 1..40: mol_type = genomic DNA
tccccatacagcacggaccgaggcggttgttaaactaagc

SEQ ID NO: 62734 - DNA, 50 bp, Streptococcus suis
  source 1..50: mol_type = genomic DNA
agtttggacaatagtacaccggtttgggcggttgtgaaattgtccaaacg

SEQ ID NO: 62735 - DNA, 40 bp, Streptococcus suis
  source 1..40: mol_type = genomic DNA
tcagaatacagtgtggacctgggggtttgtaaatttaagc

SEQ ID NO: 62736 - protein, 538 aa, Streptococcus suis; identical to SEQ ID NO: 47476

SEQ ID NO: 62737 - DNA, 50 bp, Streptococcus suis; identical to SEQ ID NO: 42097
  source 1..50: mol_type = genomic DNA

SEQ ID NO: 62738 - DNA, 40 bp, Streptococcus suis; identical to SEQ ID NO: 62733
  source 1..40: mol_type = genomic DNA

SEQ ID NO: 62739 - DNA, 50 bp, Streptococcus suis
  source 1..50: mol_type = genomic DNA
agtttggacaatagtacaccggtttgggcggttgttaaattgtccaaacg

SEQ ID NO: 62740 - DNA, 40 bp, Streptococcus suis; identical to SEQ ID NO: 62735
  source 1..40: mol_type = genomic DNA

SEQ ID NO: 62741 - protein, 536 aa, Streptococcus suis; identical to SEQ ID NO: 47486

SEQ ID NO: 62742 - DNA, 50 bp, Streptococcus suis; identical to SEQ ID NO: 42092
  source 1..50: mol_type = genomic DNA

SEQ ID NO: 62743 - DNA, 40 bp, Streptococcus suis; identical to SEQ ID NO: 62733
  source 1..40: mol_type = genomic DNA

SEQ ID NO: 62744 - DNA, 50 bp, Streptococcus suis; identical to SEQ ID NO: 62734
  source 1..50: mol_type = genomic DNA

SEQ ID NO: 62745 - DNA, 40 bp, Streptococcus suis; identical to SEQ ID NO: 62735
  source 1..40: mol_type = genomic DNA

SEQ ID NO: 62746 - protein, 536 aa, Streptococcus suis
MQVEGFSLDAQEAKIQQYANAFDIEIVKTYQDAGKSGKTMLGRTEFMNMISDIEAEKDKVDYVLVFKLSRFGRNAADTLKSLAIMESHGVNLICVDDGLDSSKDSGKLVITILSAVAEMERENIISQAMEGRRQKARAGQWNGGFAPVGYSLVNGQLQVNHEEAESVKMIFDLFANSDMGTIAIAKHLANLDIKKPIRHNSTLPYFSSSGIARILDNPVYNGKIAFGRRESTRDKISGETKVTQSENYILTDGIHEAIIDDETWKKVRKKREANAHKYKRENPNKGDSIYILSGLIKCPLCHAGLYGNKSIKRNKNKKDEYYKNYYYYACKHRKHVDGHKCTFNKQLKTGNLDHEVLSIISKLVSRPDFARKLQEKINIQVDTSRIDSEIEQYKSLFRQLSATKMNLIQQIDSLNFEDPHFQQKSIDLDMRLNTIYDKLADVERLIETSESKREVILKDKMTADNIYKILVNFASFMDVMEDIDKKRLCQMLIEKVEIYDDKNKAGRWVKAIHFKLPIIEEDLEISLDNSTPVEAV

SEQ ID NO: 62747 - DNA, 50 bp, Streptococcus suis; identical to SEQ ID NO: 42092
  source 1..50: mol_type = genomic DNA

SEQ ID NO: 62748 - DNA, 40 bp, Streptococcus suis; identical to SEQ ID NO: 62733
  source 1..40: mol_type = genomic DNA

SEQ ID NO: 62749 - DNA, 50 bp, Streptococcus suis; identical to SEQ ID NO: 62734
  source 1..50: mol_type = genomic DNA

SEQ ID NO: 62750 - DNA, 40 bp, Streptococcus suis; identical to SEQ ID NO: 62735
  source 1..40: mol_type = genomic DNA

SEQ ID NO: 62751 - protein, 577 aa, Burkholderia sp JP2-270
MSNSESARPMAYSYIRFSTAQQALGDSLRRQVESTEQYCEEHGLTLARASAYRDLGVSAFRKKNIEAGKLAEFIRAVKSGKVSPGSYLIVEQFDRLSRAEVNVALRLFLDLVDAGIVVVTLADKKVWNKDSVADVGDLITAIIYMSRANDESERKSDRLSAVWEQKKKRAADGTATRIVTSEAPRWLRAKADKTGFDVVPELAHSVRRVFEMRIDGAGVVAICRRANQERWPLPGKMPVKKLGESDEDFGERRQTSGQWHQSLVARILKNRAVLGEYQPRRIDTEHQGARVPVGEPIRGYYPSIVDEATFGRAQATALRRGVRPGRRDPHARNWLYGLVKCGACGNSLVRKNKTSAKQPGYSRYYCVARVRGATKCPSVSSAQLEALVNYVAASGIPLNWAADTSLDALKAQADILELEIASSKASIDGIADLAGSTASESAKKSLLARLDREGAALDAKEAQLAHVRAELSDQVFLGGEDAAHERLQRISREIDAIASGQMGLDGALRLREELARIFQKIVVHQAEQFIEFFIKGRDKPAWLPFDFLSLEAPIEPTAEQLEAAERDIDALRRAMED

SEQ ID NO: 62752 - DNA, 50 bp, Burkholderia sp JP2-270
  source 1..50: mol_type = genomic DNA
tggtgcaattaacaccccacaatcgacatcgtagagatataattgcacca

SEQ ID NO: 62753 - DNA, 40 bp, Burkholderia sp JP2-270; identical to SEQ ID NO: 58468
  source 1..40: mol_type = genomic DNA

SEQ ID NO: 62754 - DNA, 50 bp, Burkholderia sp JP2-270; identical to SEQ ID NO: 62752
  source 1..50: mol_type = genomic DNA

SEQ ID NO: 62755 - DNA, 40 bp, Burkholderia sp JP2-270
  source 1..40: mol_type = genomic DNA
actgggcaggccgaggcaggagaaccacgggagcccgggg

SEQ ID NO: 62756 - protein, 579 aa, Burkholderia multivorans
MSTETAKPLAYSYIRFSTAQQSLGDSLRRQVELTEKYCEEHGLTLARASAYRDLGVSAFRSKNIEAGKLAEFIAAVKAGRVEPGSFLIIEQFDRLSRAEVNVALRLFLDLVDAGIVVVTLADKKVWDKDSVTDVGDLITAIIYMSRANDESARKSDRLSAVWAQKKKRAADGTASRIVTSEAPRWLRANDDKTGFDIVPELAESVRRVFEMRINGAGIVAICRRANQESWPVPGKPPVRKAGESDEDFAERRLASGQWHQSLVSRILRNRAVLGEYQPRRIDAENNGNRIPVGEPISGYYPAVIGEETFLRAHATSLRRGIRPGRRDARARNWLYGLVKCGECGNSLVRKNKTSIKQPGYSRYYCVARVRGLTKCPSVSSEQLEGCVNYIAASWLPTNWNADASLDSLKVRADSLEVQIASSKQAIDGLADLAGSVTAESARRTLIERLNKEGELLGAREAELARVRTELADRSYVNGAVDAREALQRMAREIDEIAAGRSGPDEALRLREELARILQKIVVHEAAGYVEFWIKGREEPAWLPLDFHSLELPVEPSEAQLEAAWRDLDALRGAMNSQGR

SEQ ID NO: 62757 - DNA, 50 bp, Burkholderia multivorans
  source 1..50: mol_type = genomic DNA
tagggcaattaattacccacgattgagctagtcgggatataattgcacca

SEQ ID NO: 62758 - DNA, 40 bp, Burkholderia multivorans; identical to SEQ ID NO: 58468
  source 1..40: mol_type = genomic DNA

SEQ ID NO: 62759 - DNA, 50 bp, Burkholderia multivorans; identical to SEQ ID NO: 62757
  source 1..50: mol_type = genomic DNA

SEQ ID NO: 62760 - DNA, 40 bp, Burkholderia multivorans; identical to SEQ ID NO: 62755
  source 1..40: mol_type = genomic DNA

SEQ ID NO: 62761 - protein, 588 aa, Burkholderia multivorans
MHRVNYCARNVNTETAKPLAYSYIRFSTAQQALGDSLRRQVELTEKYCEEHGLTLARASAYRDLGVSAFRSKNIEAGKLAEFIAAVRAGRVAPGSFLIIEQFDRLSRAEVNVALRLFLDLVDAGIVVVTLADKKVWDKESVTDVGDLITAIIYMSRANDESARKSDRLSAVWAQKKKRAADGTASRIVTSEVPRWLRANDDKTGFVIVPELAESVRRVFEMRINGAGVVAICRRANQERWPVPGKPPVRKAGEADEDFSKRKLASGQWHQSLVSRILRNRAVLGEYQPRRIDAENSRNRIPVGEPIRGYYPAVIDEATFLRAHATSLRRGTRPGRRDAQARNWLYGLVKCGECGNSLVRKNKTSAKQPGYSRYYCVARVRGLTKCGSVNSELLEASVKYIAASWLPNNWNSDASLDSLKARADSLEVQIASSRRAIDGLADLAASVTAESARRTLIERLNEEGELLGTREAELARVRTELADKSYATGAMTAHEGLERMAHEIDEIAAGRGGTDASLRLREEIARILQKVVVYEADGYVEFWVKGREKPVWIPFDFFSQKPPTAPSEAQLEEAWRDMDALQTARDSHD

SEQ ID NO: 62762 - DNA, 50 bp, Burkholderia multivorans
  source 1..50: mol_type = genomic DNA
ctgcgcaattaaatacccacgattgagaatgaaggaatataattgcaccg

SEQ ID NO: 62763 - DNA, 40 bp, Burkholderia multivorans; identical to SEQ ID NO: 58468
  source 1..40: mol_type = genomic DNA

SEQ ID NO: 62764 - DNA, 50 bp, Burkholderia multivorans; identical to SEQ ID NO: 62762
  source 1..50: mol_type = genomic DNA

SEQ ID NO: 62765 - DNA, 40 bp, Burkholderia multivorans; identical to SEQ ID NO: 62755
  source 1..40: mol_type = genomic DNA

SEQ ID NO: 62766 - protein, 568 aa, Bacillus subtilis
MTDIKDVFKHHKSRVDKIDTIEEKTKKDSYGVLIRVSDVKQVTKDSIPMQRERAYKFIKERDGILYKEYIEEAVSASKNSIKQRPVLQELLKDIEDGKINKVIAYKRDRLSRIQKDWLTILDTIFKNNCDIEFTSAEEQPISSNPMVRGIMEPVLGFLANMESNNTSMRVKETRASIAAKGRWTGGTLPYGYDLNKNKEIVVIKEVIPSLIEIEDLYLNGIGVGSITRYMNGHEVKHLGKRKKGADIKRVVYKGRKTYWTESAVEGVLFNPFYAGIIEYSKEGNKHLQYDQDKFVREKGFHEAIRTLDKQEKIYEMKSKKSISAPRKFSTTFLLTGLVYCSECGSPIQSRTVLKKERNNEKYCYYVCASKQNKDKTSRNEMCPSKNFKQNILEDFVVSKLLEMFDGFNKDNLKEEILKGIDQGKSTIETDIVSAQAELKELQSELVSIMNLMKRVSPESPLYEEIITDYEKSYTETLLKKKEIEEKLESLQQSIKENNDKEIEQNIVLDALKNFSIVFKEASQVQRKTLLDSIIKRIDISQDGKLNILCNFELPKDGESYVHSINRRP

SEQ ID NO: 62767 - DNA, 50 bp, Bacillus subtilis; identical to SEQ ID NO: 60732
  source 1..50: mol_type = genomic DNA

SEQ ID NO: 62768 - DNA, 40 bp, Bacillus subtilis
  source 1..40: mol_type = genomic DNA
gggtcaggagccgaccggcgacccgtttaattccatgatt

SEQ ID NO: 62769 - DNA, 50 bp, Bacillus subtilis
  source 1..50: mol_type = genomic DNA
gttatgttcattccattaaccggcctcccgctaagggtgtagaacataac

SEQ ID NO: 62770 - DNA, 40 bp, Bacillus subtilis
  source 1..40: mol_type = genomic DNA
ggctcaggagccggactgcctgcattcaaattccatgtct

SEQ ID NO: 62771 - protein, 568 aa, Bacillus amyloliquefaciens
MTDIKDVFKHHKSRVDKIDTIEEKTKKDTYGVLIRVSDVKQVTKDSIPMQRERAYKFIKERDGILYKEYIEEAVSASKNSIKQRPVLQELLKDIEDGKINKVIAYKRDRLSRIQKDWLTILDTIFKNNCDIEFTSAEEQPISSNPMVRGIMEPVLGFLANMESNNTSMRVKETRASIAAKGRWTGGTLPYGYDLNKNKEIVVIKEVIPSLIEIEDLYLNGIGVGSITRYMNGHEVKHLGKRKKGADIKRIVYKGRKTYWTESAVEGVLFNPFYAGIIEYSKEGNKHLQYDQDKFVREKGFHEAIRTLDKQEKIYEMKSKKSISAPRKFSTTFLLTGLVYCSECGSPIQSRTVLKKERNNEKYCYYVCASKQNKDKTSRNEICPSKNFKQNILEDFVVSKLLEMFDGFNKDNLKEEILKGIDQGKSTIETDIVSAQAELKELQSELVSIMNLMKRVSPESPLYEEIITDYEKSYTETLLKKKEIEEKLESLQQSIKENNDKEIEQNIVLDALKNFSIVFKEASQVQRKTLLDSIIKRIDISQDGKLNILCNFEIPKDEKSYVHSINRRP

SEQ ID NO: 62772 - DNA, 50 bp, Bacillus amyloliquefaciens; identical to SEQ ID NO: 60732
  source 1..50: mol_type = genomic DNA

SEQ ID NO: 62773 - DNA, 40 bp, Bacillus amyloliquefaciens; identical to SEQ ID NO: 62768
  source 1..40: mol_type = genomic DNA

SEQ ID NO: 62774 - DNA, 50 bp, Bacillus amyloliquefaciens; identical to SEQ ID NO: 62769
  source 1..50: mol_type = genomic DNA

SEQ ID NO: 62775 - DNA, 40 bp, Bacillus amyloliquefaciens; identical to SEQ ID NO: 62770
  source 1..40: mol_type = genomic DNA

SEQ ID NO: 62776 - protein, 465 aa, Mycobacterium avium
MTTAAIYTRISNDPTGQRAGVDRQREDCRALAAGLGWEVIEPDPPFEDNDVSAFTGAERKGFERLLTAVKHGQVDAIICWHPDRLYRRVADLQRLVEITDRGVEIRTVNGGDLDLSNATGKMLARIVGSVSEMESEHKAERQRRANIQRAEQGTWWSSQRCFGYTQTGKIQKREANLIRRAAADVLDGKSLRAIAREWNAKGIASTRGATWNTSRLKRLLCNPRYAGRRTYRGTETGPGTWTPILDPDTHAGVVAILRDTSRGGAVSYERKYIGSYRYVCGVCGAKLHRTVSTHADGRTFSRYACTAAAHLSRSQPELDAYVESEVLKHLRDEKRLHKTLAPKTTQINVEELRTRRTALAAKKDGLATLFTDGVLDGPAVRRESGKLTTRIADIDAALAEAARRSPVANAVADGPEMVEKYWAAQSPDMKGKIIDELCTVVVNPAPRGRYFKPECIDIRPIIAST

SEQ ID NO: 62777 - DNA, 50 bp, Mycobacterium avium
  source 1..50: mol_type = genomic DNA
tgatgcattttcttgaccaccatgatggtggtcgtcgaatttgtccgctg

SEQ ID NO: 62778 - DNA, 40 bp, Mycobacterium avium
  source 1..40: mol_type = genomic DNA
caacggcctgccggcatccatcgtggtgacgaccacgctg

SEQ ID NO: 62779 - DNA, 50 bp, Mycobacterium avium
  source 1..50: mol_type = genomic DNA
tgatgcattttcttgaccaccatgtcggtggtcgtcgaatttgtccgctg

SEQ ID NO: 62780 - DNA, 40 bp, Mycobacterium avium
  source 1..40: mol_type = genomic DNA
caccggcctgcctgcctcctccggcctggccagcatggtg

SEQ ID NO: 62781 - protein, 525 aa, Faecalibacterium prausnitzii
MYLEISNPMDYHVALYIRLSKEDENEGPSQSVQNQESLLREFVQQHRLSVFDTYVDDGWSGTSFDRPSFQRMIGDIETKKVNMVITKDLSRLGRDYIMTGHYMERYFPEHRVRYISLLDGIDTGVDSTANDITPFRAIMNDMYAKDISKKIKSVKRDKQRKGQFIGGKPMYGYKMHPTEKNKIVIDEEVAPVVRRIFALALSGMSCRKIATTLNEEGIPTPATYCGWKVGNPGPYTGLWSSERISEMLKNETYIGNMVQGRMVKISYKSKKCLRQSPENWVVVEGTHEPIIDPETFQKVQMLVNSRKHTRSRTYDFLLKGLIFCHECGYPMAVLNRKNAAGEDRLFFVCRTYQRFTKAGVCTCHSIKEETVNEAVLAKVREVCQTYLNPDRLSPIAQEVVENASKESSCEAEMQALQSKITALTTNLDQMYMDRLNGLLSEEDFQRIYQKVKLDRTVLEDRLKSLQEQAKQPVNTEEKAKALVKQFLDSVLTSRELLVSLIERVELTEEKEVIIKFRFHELEAIS

SEQ ID NO: 62782 - DNA, 50 bp, Faecalibacterium prausnitzii
  source 1..50: mol_type = genomic DNA
gggcatcgtttacaataggcgtgtcgctacgtatagcgacgccgctaatg

SEQ ID NO: 62783 - DNA, 40 bp, Faecalibacterium prausnitzii
  source 1..40: mol_type = genomic DNA
gctgttgggcatcagtcggagctatgtatcccgcctggaa

SEQ ID NO: 62784 - DNA, 50 bp, Faecalibacterium prausnitzii
  source 1..50: mol_type = genomic DNA
gggcatcgtttacaataggcgtgttactacgtatagcgacgccgctaatg

SEQ ID NO: 62785 - DNA, 40 bp, Faecalibacterium prausnitzii
  source 1..40: mol_type = genomic DNA
gctgtgggacatcagcaggtactgtttcctctgcttggaa

SEQ ID NO: 62786 - protein, 487 aa, Mycobacteroides abscessus; identical to SEQ ID NO: 54561

SEQ ID NO: 62787 - DNA, 50 bp, Mycobacteroides abscessus
  source 1..50: mol_type = genomic DNA
gtcggtagtaaaactagacagtcgaatagcccacaagctatatttacaac

SEQ ID NO: 62788 - DNA, 40 bp, Mycobacteroides abscessus
  source 1..40: mol_type = genomic DNA
gatggcatgtccacggtcgaatacgccatcgggactatcg

SEQ ID NO: 62789 - DNA, 50 bp, Mycobacteroides abscessus
  source 1..50: mol_type = genomic DNA
gtcggtagtaaaactagacagtcggttagcccacaagctatatttacaac

SEQ ID NO: 62790 - DNA, 40 bp, Mycobacteroides abscessus
  source 1..40: mol_type = genomic DNA
gaagggatgtctcccggctgtcaggccatcgggactttca
